United States Patent Application Publication US 2011/0183924 A1 - sequence listing, part 6

SEQ ID NO: 13359 - DNA, 6763 bp, Homo sapiens
cgcagcggccggagagggatggggggcgcccacccagtctgagcctcgccgcgggcgccttcggctcacgcagcgcttcccgcgggccgccagtgcgcaccctcggccacatcagcctccgcctggcgggtgcacccgggccggcgaggaaggggcaaccgtccgggtgggtggggcgggctgggtacctgaggtcaccagctcggctgtagaggcaggggcggcggaggcggaactgcggagttgctgggtccaccgacccttaccctcagcgagagaagtaaccaatgtgaaagatgttgcagaagtgttccagaagtggctgaagatagaaggaaaaaagtgccactgcctatcagaaaaaacaaaacaaaacatgggaaatacaaccaccaaattccgtaaagcactcatcaatggtgatgaaaacctggcctgccaaatatatgaaaacaatcctcagctaaaagaatctcttgatccaaatacatcttatggggagccctaccagcacaatactccattacattatgctgctagacatggaatgaataaaatattagggacttttcttggtagagatggaaatccaaataaacggaatgtgcacaatgaaacatctatgcatttgttgtgtatgggacctcaaattatgatatctgaaggagcccttcatcctcgcttggcacgccccacagaagatgatttcagaagagcagattgtctgcagatgatcttaaaatggaaaggagcaaaacttgaccagggtgaatatgagagagcagctattgatgctgttgataacaaaaaaaacacacccttgcactatgctgctgcctcagggatgaaagcctgtgtagagcttttagtaaaacatggaggagacttgtttgctgagaatgaaaataaagatactccttgtgattgtgctgaaaagcaacaccacaaagatttggccctcaatctggaatctcaaatggtattctcacgggatcccgaggctgaagaaatagaagctgaatatgctgcattagacaaacgagagccatatgaaggattaaggcctcaggatcttcgtagactaaaagatatgcttattgtggaaactgcagacatgcttcaggctcctctctttactgctgaagctttacttcgagctcatgactgggacagggagaaattacttgaagcttggatgtccaacccggagaactgctgccaacgatcaggtgttcaaatgccaactccaccaccaagtgggtataatgcctgggacacgctcccatctccaagaactccaaggactacacgctcttctgtcacctccccagatgaaatcagcttatctcctggggatttagacaccagtttgtgtgacatttgtatgtgcagtatctctgtatttgaagaccctgtggatatgccctgtggacatgacttttgtagaggatgttgggagtcgtttttgaatctgaaaattcaagaaggtgaagctcacaacattttttgccctgcatatgattgcttccaacttgtacctgtggatatcatagaaagtgtagtttcaaaggagatggacaaacgatacctacagtttgatattaaggcctttgttgaaaataatcctgccattaaatggtgtcctactccaggctgtgacagagcagtaagactaacgaaacaagggtcaaatacatctggatctgatacactcagcttcccattgctgagagctcctgctgttgattgtggaaaaggacacctcttctgctgggagtgccttggtgaagcacatgagccttgtgactgccaaacatggaagaattggctgcaaaaaataaccgaaatgaaaccagaagaacttgtgggagttagtgaagcctacgaggatgccgccaattgtctctggttattaactaactccaagccttgtgccaactgtaagtctccaatacagaagaatgaaggctgcaatcacatgcagtgtgctaagtgcaagtatgacttttgctggatttgccttgaagagtggaaaaaacatagttcgtccactggaggttattacagatgtactcgctatgaagtcattcaacacgtggaggagcaatccaaggaaatgactgtggaggctgagaaaaaacacaaacgatttcaggaacttgacagatttatgcactattatacaagatttaaaaaccatgagcatagttatcagctagaacaacgccttcttaaaacagccaaagaaaagatggagcaattgagcagagctctcaaagaaactgaaggaggctgtccagataccactttcattgaagatgcagttcatgtgctcttaaaaactcggcgcattctcaagtgttcttatccatatggatttttcttggaacctaaaagcacaaagaaagaaatttttgaactaatgcaaacagacctagaaatggtcactgaagaccttgcccagaaagtcaataggccttaccttcgcacaccccgccacaagatcatcaaagcagcatgccttgtacagcagaagaggcaagaattcctggcatctgtggctcggggagtagctcctgcagactcaccagaagctccaaggcgcagctttgctggtggaacatgggattgggaatatttaggatttgcatcaccagaggaatatgctgaatttcagtatcggaggaggcacagacaacgtcgtcgaggagatgttcacagtctactcagtaatcctccagaccctgatgagccaagtgaaagcactttagatattccagaaggcggcagcagcagccgcaggcctggcacatccgtggtaagttctgcatctatgagtgtgctgcacagctcttccctgcgtgactacacccctgccagtcgctctgaaaaccaggactctcttcaggctctgagttccttggatgaagacgatcccaatatacttcttgcaatacagttatcactgcaagagtctgggctggccctcgatgaagaaactagagacttcctcagtaatgaagcatccttaggtgcgataggcacttctttaccttccaggctggactctgtccccagaaatacagatagccctcgggctgcattgagcagctctgagcttttggaacttggtgacagcctcatgagactaggagcagagaatgacccattttcaactgacaccctgagctcacaccctctcagtgaggcaagaagtgatttctgtccctcatctagtgatcctgactcagctggccaggaccccaacatcaatgacaatcttctcggcaacatcatggcttggtttcatgacatgaaccctcagagtattgccctgattcctccagcaactacagaaatcagtgcagattcccagctcccctgtatcaaagatgggtcagaaggtgtgaaggatgtggaactggtgctgccagaagattcaatgtttgaagatgccagtgtcagtgaaggtagaggaacccagatagaagaaaatcctttggaagaaaatattctggcgggggaagcagcatctcaagctggtgacagtggtaacgaggcagccaacagaggagatggttcagatgtttcaagtcaaacacctcaaacctcaagtgactggcttgaacaagtacatttagtgtgaactgcacacatctgggctctaaatgaattacaggtacagatggtatgctaggtggagtatgcttgatagagactttgattcacttaattccaactcagtgataaaccactgacattagggttgaatacagagaagttcccttgaatggtagcttcattttttattttaaccttacagggaatttcctttgtacttaattgaatagcttttcccctttttgctgacaaaaagaagagcaagagaaagagaaacaaaaatgaaataaataagttgtattccacactctaagaaaatgcagtcctctatttagcctaggcttgacaatacttaaattgaacatttaaactaaaggcttactccctaatctttgggtggctttcctttaaaaaaaaaaaaaaagttttcttcattctagaaatttattttggataaatccgataacatatatgtcctcaatctctttgtgctcttccataacttacttcctttttgtctgagcaatgtgaattgaagtctctttagtaccacatctaccatagtgtaattagttttaattttcacatgaatcaaaggtttcctttcatgtctatttacagtccaattgtgccaaactcttacttgtgtgctgactaacaaggcatttaggtgtgcagcatcctagagtgctccagggcagtgtcagcgttctcgggagtaaaaggtgccacttggtagcaatgatattccagaattaaatgggtttttgttgccatggagactgcatttatataaatgtagcctgtagcttaagttaactaaacctaatgctgctgttaaaaacagtttattttaatattaaaatacagttgattagcaacagcggtgctgtattttaagagacactttattggaagtgcaatcatagttatttgttttcacaattttacagtgcattctaattactgatgggtgcaattacttttaatcgtgttttataaaatagaaaaaaagtggagttttcatgagttatagtaaatcccacgattattaagaaattcaataaaacatcctgcgcaacatgttaccgtgcctttgcctaacctaaatggatagttgccagttaaataagtgagtaattcaaatttcaatgtctcttctgaagtaactatgctatgaattgcaaagacctccataaaaccacccatggccttgcttttacactaactataacaactaaatgttcaatcagtttgtttgcctaactagcaaatgctgacatgtgtttgttctactgcgcaatactcatttgctgtgtgattactgtttagtgttgaaaaaaatcaacttcctagttatcagtgtcttactgtgaagaaaatactggtcttagttgtaattaggatacaatggtacagtgtgtaattaaaactagagtaaactgttggaatggctgttttacttaaatattatcaaaactagcataacataagcaaaatagataagtacaacactccatttagtgttttgccagattgttaccagaagtctacagataccaaactttcagttctgagtttgtacaggcaagtcctgggctgggtaaaaagttatattaatattgttatccacaagagatgtgattatgggttttgattactttttttttttccaaaccctgcttttgaaatatccttgtacttaaaattcatattgctaagacactgtattagaatatttaatattccccagatcctcttaggataaactgtgggaatcctcctatgccatggatatcaaaggtccacattagtttttatttctccagtgatcagaaacattgatatcaatccctattaaattagtggggggaatattaactttatctacagtgtattactgtatattaaactgaaatagtccattaaaggatttttttataaatttattttggattaaaaatatcaacaccaataagtttttagaccaagttgtaatttttccaatatagagtctttgcatcacactgaggcatcttgcacagctgcagttaaggtgagaaagaatgctctgtgtgaagacagtgtacacaatgggttccggtttccttgcaccttgtgcagtatcctttatttctgtgctgttctctcctgagcatgaaaaatgatcattatccaatttgtatttccttggtacatattttaaaaacaacacagtcattgactttacaattcagtaatgaagtttggcaaagcctattttgtaaacaagttaattttataatgtaaaaaaaaaaagttaatctaaccttgacttgttatttgcactttcatagtctatacttgatacattcccactttatatacagtaggattctacaaacgtgtagatgtttggccaaatgaatgctgttaataatatgtaaaattctttgattaaacatttattacttaactacttccattttgtctcattacattgtagactttgttttaaccaagtcagaaagctgattttcttcaaattaaatccctccaatgtgatgggatcaatttggttcttacatgtaattgattagtgcctaatatttttacactagccacttactgagcattttatatcccagttataaatatgaaaacactgcatgacaatgtgttaaaacattatgacatcagtgctcattttattgacatcactgtagctttcaggagaaaaatgttattttttcttgaactctaatagaaatacatagaaaaataactttaagatatgttttgtgaaattgcttaggaaagaaaaaaattttatgccatgtgaataaaaatgcctgcttctctttcactttattattgtgtcccttatgagttaccaaaataacccatgacatttgaccatgccccagctggtgcttcatggggtctgctggtgataatcatttaaagtggcgtcatcttatttatgcctttcattatgtggatctgaagcttaactaccaatgttcataggctgaattattccttaattgttgttcattacagccactgatctcattttttatctcctttgagtcctcaaatatttatcatttacgtgttatgaattaaaatctggaatttattaaagtttgatcataattta

SEQ ID NO: 13360 - DNA, 5441 bp, Homo sapiens
tcatattcactctggtcaagttttgctcctttccattttaagatcatctgcagacaatctgctctaatgaaacatctatgcatttgttgtgtatgggacctcaaattatgatatctgaaggagcccttcatcctcgcttggcacgccccacagaagatgatttcagaagagcagattgtctgcagatgatcttaaaatggaaaggagcaaaacttgaccagggtgaatatgagagagcagctattgatgctgttgataacaaaaaaaacacacccttgcactatgctgctgcctcagggatgaaagcctgtgtagagcttttagtaaaacatggaggagacttgtttgctgagaatgaaaataaagatactccttgtgattgtgctgaaaagcaacaccacaaagatttggccctcaatctggaatctcaaatggtattctcacgggatcccgaggctgaagaaatagaagctgaatatgctgcattagacaaacgagagccatatgaaggattaaggcctcaggatcttcgtagactaaaagatatgcttattgtggaaactgcagacatgcttcaggctcctctctttactgctgaagctttacttcgagctcatgactgggacagggagaaattacttgaagcttggatgtccaacccggagaactgctgccaacgatcaggtgttcaaatgccaactccaccaccaagtgggtataatgcctgggacacgctcccatctccaagaactccaaggactacacgctcttctgtcacctccccagatgaaatcagcttatctcctggggatttagacaccagtttgtgtgacatttgtatgtgcagtatctctgtatttgaagaccctgtggatatgccctgtggacatgacttttgtagaggatgttgggagtcgtttttgaatctgaaaattcaagaaggtgaagctcacaacattttttgccctgcatatgattgcttccaacttgtacctgtggatatcatagaaagtgtagtttcaaaggagatggacaaacgatacctacagtttgatattaaggcctttgttgaaaataatcctgccattaaatggtgtcctactccaggctgtgacagagcagtaagactaacgaaacaagggtcaaatacatctggatctgatacactcagcttcccattgctgagagctcctgctgttgattgtggaaaaggacacctcttctgctgggagtgccttggtgaagcacatgagccttgtgactgccaaacatggaagaattggctgcaaaaaataaccgaaatgaaaccagaagaacttgtgggagttagtgaagcctacgaggatgccgccaattgtctctggttattaactaactccaagccttgtgccaactgtaagtctccaatacagaagaatgaaggctgcaatcacatgcagtgtgctaagtgcaagtatgacttttgctggatttgccttgaagagtggaaaaaacatagttcgtccactggaggttattacagatgtactcgctatgaagtcattcaacacgtggaggagcaatccaaggaaatgactgtggaggctgagaaaaaacacaaacgatttcaggaacttgacagatttatgcactattatacaagatttaaaaaccatgagcatagttatcagctagaacaacgccttcttaaaacagccaaagaaaagatggagcaattgagcagagctctcaaagaaactgaaggaggctgtccagataccactttcattgaagatgcagttcatgtgctcttaaaaactcggcgcattctcaagtgttcttatccatatggatttttcttggaacctaaaagcacaaagaaagaaatttttgaactaatgcaaacagacctagaaatggtcactgaagaccttgcccagaaagtcaataggccttaccttcgcacaccccgccacaagatcatcaaagcagcatgccttgtacagcagaagaggcaagaattcctggcatctgtggctcggggagtagctcctgcagactcaccagaagctccaaggcgcagctttgctggtggaacatgggattgggaatatttaggatttgcatcaccagaggaatatgctgaatttcagtatcggaggaggcacagacaacgtcgtcgaggagatgttcacagtctactcagtaatcctccagaccctgatgagccaagtgaaagcactttagatattccagaaggcggcagcagcagccgcaggcctggcacatccgtggctctgagttccttggatgaagacgatcccaatatacttcttgcaatacagttatcactgcaagagtctgggctggccctcgatgaagaaactagagacttcctcagtaatgaagcatccttaggtgcgataggcacttctttaccttccaggctggactctgtccccagaaatacagatagccctcgggctgcattgagcagctctgagcttttggaacttggtgacagcctcatgagactaggagcagagaatgacccattttcaactgacaccctgagctcacaccctctcagtgaggcaagaagtgatttctgtccctcatctagtgatcctgactcagctggccaggaccccaacatcaatgacaatcttctcggcaacatcatggcttggtttcatgacatgaaccctcagagtattgccctgattcctccagcaactacagaaatcagtgcagattcccagctcccctgtatcaaagatgggtcagaaggtgtgaaggatgtggaactggtgctgccagaagattcaatgtttgaagatgccagtgtcagtgaaggtagaggaacccagatagaagaaaatcctttggaagaaaatattctggcgggggaagcagcatctcaagctggtgacagtggtaacgaggcagccaacagaggagatggttcagatgtttcaagtcaaacacctcaaacctcaagtgactggcttgaacaagtacatttagtgtgaactgcacacatctgggctctaaatgaattacaggtacagatggtatgctaggtggagtatgcttgatagagactttgattcacttaattccaactcagtgataaaccactgacattagggttgaatacagagaagttcccttgaatggtagcttcattttttattttaaccttacagggaatttcctttgtacttaattgaatagcttttcccctttttgctgacaaaaagaagagcaagagaaagagaaacaaaaatgaaataaataagttgtattccacactctaagaaaatgcagtcctctatttagcctaggcttgacaatacttaaattgaacatttaaactaaaggcttactccctaatctttgggtggctttcctttaaaaaaaaaaaaaaagttttcttcattctagaaatttattttggataaatccgataacatatatgtcctcaatctctttgtgctcttccataacttacttcctttttgtctgagcaatgtgaattgaagtctctttagtaccacatctaccatagtgtaattagttttaattttcacatgaatcaaaggtttcctttcatgtctatttacagtccaattgtgccaaactcttacttgtgtgctgactaacaaggcatttaggtgtgcagcatcctagagtgctccagggcagtgtcagcgttctcgggagtaaaaggtgccacttggtagcaatgatattccagaattaaatgggtttttgttgccatggagactgcatttatataaatgtagcctgtagcttaagttaactaaacctaatgctgctgttaaaaacagtttattttaatattaaaatacagttgattagcaacagcggtgctgtattttaagagacactttattggaagtgcaatcatagttatttgttttcacaattttacagtgcattctaattactgatgggtgcaattacttttaatcgtgttttataaaatagaaaaaaagtggagttttcatgagttatagtaaatcccacgattattaagaaattcaataaaacatcctgcgcaacatgttaccgtgcctttgcctaacctaaatggatagttgccagttaaataagtgagtaattcaaatttcaatgtctcttctgaagtaactatgctatgaattgcaaagacctccataaaaccacccatggccttgcttttacactaactataacaactaaatgttcaatcagtttgtttgcctaactagcaaatgctgacatgtgtttgttctactgcgcaatactcatttgctgtgtgattactgtttagtgttgaaaaaaatcaacttcctagttatcagtgtcttactgtgaagaaaatactggtcttagttgtaattaggatacaatggtacagtgtgtaattaaaactagagtaaactgttggaatggctgttttacttaaatattatcaaaactagcataacataagcaaaatagataagtacaacactccatttagtgttttgccagattgttaccagaagtctacagataccaaactttcagttctgagtttgtacaggcaagtcctgggctgggtaaaaagttatattaatattgttatccacaagagatgtgattatgggttttgattactttttttttttccaaaccctgcttttgaaatatccttgtacttaaaattcatattgctaagacactgtattagaatatttaatattccccagatcctcttaggataaactgtgggaatcctcctatgccatggatatcaaaggtccacattagtttttatttctccagtgatcagaaacattgatatcaatccctattaaattagtggggggaatattaactttatctacagtgtattactgtatattaaactgaaatagtccattaaaggatttttttataaatttattttggattaaaaatatcaacaccaataagtttttagaccaagttgtaatttttccaatatagagtctttgcatcacactgaggcatcttgcacagctgcagttaaggtgagaaagaatgctctgtgtgaagacagtgtacacaatgggttccggtttccttgcaccttgtgcagtatcctttatttctgtgctgttctctcctgagcatgaaaaatgatcattatccaatttgtatttccttggtacatattttaaaaacaacacagtcattgactttacaattcagtaatgaagtttggcaaagcctattttgtaaacaagttaattttataatgtaaaaaaaaaaagttaatctaaccttgacttgttatttgcactttcatagtctatacttgatacattcccactttatatacagtaggattctacaaacgtgtagatgtttggccaaatgaatgctgttaataatatgtaaaattctttgattaaacatttattacttaa

SEQ ID NO: 13361 - DNA, 4880 bp, Homo sapiens
cgcagcggccggagagggatggggggcgcccacccagtctgagcctcgccgcgggcgccttcggctcacgcagcgcttcccgcgggccgccagtgcgcaccctcggccacatcagcctccgcctggcgggtgcacccgggccggcgaggaaggggcaaccgtccgggtgggtggggcgggctgggtacctgaggtcaccagctcggctgtagaggcaggggcggcggaggcggaactgcggagttgctgggtccaccgacccttaccctcagcgagagaagtaaccaatgtgaaagatgttgcagaagtgttccagaagtggctgaagatagaaggaaaaaagtgccactgcctatcagaaaaaacaaaacaaaacatgggaaatacaaccaccaaattccgtaaagcactcatcaatggtgatgaaaacctggcctgccaaatatatgaaaacaatcctcagctaaaagaatctcttgatccaaatacatcttatggggagccctaccagcacaatactccattacattatgctgctagacatggaatgaataaaatattagggacttttcttggtagagatggaaatccaaataaacggaatgtgcacaatgaaacatctatgcatttgttgtgtatgggacctcaaattatgatatctgaaggagcccttcatcctcgcttggcacgccccacagaagatgatttcagaagagcagattgtctgcagatgatcttaaaatggaaaggagcaaaacttgaccagggtgaatatgagagagcagctattgatgctgttgataacaaaaaaaacacacccttgcactatgctgctgcctcagggatgaaagcctgtgtagagcttttagtaaaacatggaggagacttgtttgctgagaatgaaaataaagatactccttgtgattgtgctgaaaagcaacaccacaaagatttggccctcaatctggaatctcaaatggtattctcacgggatcccgaggctgaagaaatagaagctgaatatgctgcattagacaaacgagagccatatgaaggattaaggcctcaggatcttcgtagactaaaagatatgcttattgtggaaactgcagacatgcttcaggctcctctctttactgctgaagctttacttcgagctcatgactgggacagggagaaattacttgaagcttggatgtccaacccggagaactgctgccaacgatcaggtgttcaaatgccaactccaccaccaagtgggtataatgcctgggacacgctcccatctccaagaactccaaggactacacgctcttctgtcacctccccagatgaaatcagcttatctcctggggatttagacaccagtttgtgtgacatttgtatgtgcagtatctctgtatttgaagaccctgtggatatgccctgtggacatgacttttgtagaggatgttgggagtcgtttttgaatctgaaaattcaagaaggtgaagctcacaacattttttgccctgcatatgattgcttccaacttgtacctgtggatatcatagaaagtgtagtttcaaaggagatggacaaacgatacctacagtttgatattaaggcctttgttgaaaataatcctgccattaaatggtgtcctactccaggctgtgacagagcagtaagactaacgaaacaagggtcaaatacatctggatctgatacactcagcttcccattgctgagagctcctgctgttgattgtggaaaaggacacctcttctgctgggagtgccttggtgaagcacatgagccttgtgactgccaaacatggaagaattggctgcaaaaaataaccgaaatgaaaccagaagaacttgtgggagttagtgaagcctacgaggatgccgccaattgtctctggttattaactaactccaagccttgtgccaactgtaagtctccaatacagaagaatgaaggctgcaatcacatgcagtgtgctaagtgcaagtatgacttttgctggatttgccttgaagagtggaaaaaacatagttcgtccactggaggttattacagatgtactcgctatgaagtcattcaacacgtggaggagcaatccaaggaaatgactgtggaggctgagaaaaaacacaaacgatttcaggaacttgacagatttatgcactattatacaagatttaaaaaccatgagcatagttatcagctagaacaacgccttcttaaaacagccaaagaaaagatggagcaattgagcagagctctcaaagaaactgaaggaggctgtccagataccactttcattgaagatgcagttcatgtgctcttaaaaactcggcgcattctcaagtgttcttatccatatggatttttcttggaacctaaaagcacaaagaaagaaatttttgaactaatgcaaacagacctagaaatggtcactgaagaccttgcccagaaagtcaataggccttaccttcgcacaccccgccacaagatcatcaaagcagcatgccttgtacagcagaagaggcaagaattcctggcatctgtggctcggggagtagctcctgcagactcaccagaagctccaaggcgcagctttgctggtggaacatgggattgggaatatttaggatttgcatcaccagaggaatatgctgaatttcagtatcggaggaggcacagacaacgtcgtcgaggagatgttcacagtctactcagtaatcctccagaccctgatgagccaagtgaaagcactttagatattccagaaggcggcagcagcagccgcaggcctggcacatccgtggtaagttctgcatctatgagtgtgctgcacagctcttccctgcgtgactacacccctgccagtcgctctgaaaaccaggactctcttcaggctctgagttccttggatgaagacgatcccaatatacttcttgcaatacagttatcactgcaagagtctgggctggccctcgatgaagaaactagagacttcctcagtaatgaagcatccttaggtgcgataggcacttctttaccttccaggctggactctgtccccagaaatacagatagccctcgggctgcattgagcagctctgagcttttggaacttggtgacagcctcatgagactaggagcagagaatgacccattttcaactgacaccctgagctcacaccctctcagtgaggcaagaagtgatttctgtccctcatctagtgatcctgactcagctggccaggaccccaacatcaatgacaatcttctcggcaacatcatggcttggtttcatgacatgaaccctcagagtattgccctgattcctccagcaactacagaaatcagtgcagattcccagctcccctgtatcaaagatgggtcagaaggtgtgaaggatgtggaactggtgctgccagaagattcaatgtttgaagatgccagtgtcagtgaaggtagaggaacccagatagaagaaaatcctttggaagaaaatattctggcgggggaagcagcatctcaagctggtgacagtggtaacgaggcagccaacagaggagatggttcagatgtttcaagtcaaacacctcaaacctcaagtgactggcttgaacaagtacatttagtgtgaactgcacacatctgggctctaaatgaattacaggtacagatggtatgctaggtggagtatgcttgatagagactttgattcacttaattccaactcagtgataaaccactgacattagggttgaatacagagaagttcccttgaatggtagcttcattttttattttaaccttacagggaatttcctttgtacttaattgaatagcttttcccctttttgctgacaaaaagaagagcaagagaaagagaaacaaaaatgaaataaataagttgtattccacactctaagaaaatgcagtcctctatttagcctaggcttgacaatacttaaattgaacatttaaactaaaggcttactccctaatctttgggtggctttcctttaaaaaaaaaaaaaaagttttcttcattctagaaatttattttggataaatccgataacatatatgtcctcaatctctttgtgctcttccataacttacttcctttttgtctgagcaatgtgaattgaagtctctttagtaccacatctaccatagtgtaattagttttaattttcacatgaatcaaaggtttcctttcatgtctatttacagtccaattgtgccaaactcttacttgtgtgctgactaacaaggcatttaggtgtgcagcatcctagagtgctccagggcagtgtcagcgttctcgggagtaaaaggtgccacttggtagcaatgatattccagaattaaatgggtttttgttgccatggagactgcatttatataaatgtagcctgtagcttaagttaactaaacctaatgctgctgttaaaaacagtttattttaatattaaaatacagttgattagcaacagcggtgctgtattttaagagacactttattggaagtgcaatcatagttatttgttttcacaattttacagtgcattctaattactgatgggtgcaattacttttaatcgtgttttataaaatagaaaaaaagtggagttttcatgagttatagtaaatcccacgattattaagaaattcaataaaacatcctgcgcaacatgttaccgtgcctttgcctaacctaaatggatagttgccagttaaataagtgagtaattcaaatttcaatgtctcttctgaagtaactatgctatgaattgcaaagacctccatagaaatggccatgatctagcagacatgctctctaaactgagtaactttggtaccgaccggtg

SEQ ID NO: 13362 - DNA, 5477 bp, Homo sapiens
tcatattcactctggtcaagttttgctcctttccattttaagatcatctgcagacaatctgctctaatgaaacatctatgcatttgttgtgtatgggacctcaaattatgatatctgaaggagcccttcatcctcgcttggcacgccccacagaagatgatttcagaagagcagattgtctgcagatgatcttaaaatggaaaggagcaaaacttgaccagggtgaatatgagagagcagctattgatgctgttgataacaaaaaaaacacacccttgcactatgctgctgcctcagggatgaaagcctgtgtagagcttttagtaaaacatggaggagacttgtttgctgagaatgaaaataaagatactccttgtgattgtgctgaaaagcaacaccacaaagatttggccctcaatctggaatctcaaatggtattctcacgggatcccgaggctgaagaaatagaagctgaatatgctgcattagacaaacgagagccatatgaaggattaaggcctcaggatcttcgtagactaaaagatatgcttattgtggaaactgcagacatgcttcaggctcctctctttactgctgaagctttacttcgagctcatgactgggacagggagaaattacttgaagcttggatgtccaacccggagaactgctgccaacgatcaggtgttcaaatgccaactccaccaccaagtgggtataatgcctgggacacgctcccatctccaagaactccaaggactacacgctcttctgtcacctccccagatgaaatcagcttatctcctggggatttagacaccagtttgtgtgacatttgtatgtgcagtatctctgtatttgaagaccctgtggatatgccctgtggacatgacttttgtagaggatgttgggagtcgtttttgaatctgaaaattcaagaaggtgaagctcacaacattttttgccctgcatatgattgcttccaacttgtacctgtggatatcatagaaagtgtagtttcaaaggagatggacaaacgatacctacagtttgatattaaggcctttgttgaaaataatcctgccattaaatggtgtcctactccaggctgtgacagagcagtaagactaacgaaacaagggtcaaatacatctggatctgatacactcagcttcccattgctgagagctcctgctgttgattgtggaaaaggacacctcttctgctgggagtgccttggtgaagcacatgagccttgtgactgccaaacatggaagaattggctgcaaaaaataaccgaaatgaaaccagaagaacttgtgggagttagtgaagcctacgaggatgccgccaattgtctctggttattaactaactccaagccttgtgccaactgtaagtctccaatacagaagaatgaaggctgcaatcacatgcagtgtgctaagtgcaagtatgacttttgctggatttgccttgaagagtggaatcaacacgtggaggagcaatccaaggaaatgactgtggaggctgagaaaaaacacaaacgatttcaggaacttgacagatttatgcactattatacaagatttaaaaaccatgagcatagttatcagctagaacaacgccttcttaaaacagccaaagaaaagatggagcaattgagcagagctctcaaagaaactgaaggaggctgtccagataccactttcattgaagatgcagttcatgtgctcttaaaaactcggcgcattctcaagtgttcttatccatatggatttttcttggaacctaaaagcacaaagaaagaaatttttgaactaatgcaaacagacctagaaatggtcactgaagaccttgcccagaaagtcaataggccttaccttcgcacaccccgccacaagatcatcaaagcagcatgccttgtacagcagaagaggcaagaattcctggcatctgtggctcggggagtagctcctgcagactcaccagaagctccaaggcgcagctttgctggtggaacatgggattgggaatatttaggatttgcatcaccagaggaatatgctgaatttcagtatcggaggaggcacagacaacgtcgtcgaggagatgttcacagtctactcagtaatcctccagaccctgatgagccaagtgaaagcactttagatattccagaaggcggcagcagcagccgcaggcctggcacatccgtggtaagttctgcatctatgagtgtgctgcacagctcttccctgcgtgactacacccctgccagtcgctctgaaaaccaggactctcttcaggctctgagttccttggatgaagacgatcccaatatacttcttgcaatacagttatcactgcaagagtctgggctggccctcgatgaagaaactagagacttcctcagtaatgaagcatccttaggtgcgataggcacttctttaccttccaggctggactctgtccccagaaatacagatagccctcgggctgcattgagcagctctgagcttttggaacttggtgacagcctcatgagactaggagcagagaatgacccattttcaactgacaccctgagctcacaccctctcagtgaggcaagaagtgatttctgtccctcatctagtgatcctgactcagctggccaggaccccaacatcaatgacaatcttctcggcaacatcatggcttggtttcatgacatgaaccctcagagtattgccctgattcctccagcaactacagaaatcagtgcagattcccagctcccctgtatcaaagatgggtcagaaggtgtgaaggatgtggaactggtgctgccagaagattcaatgtttgaagatgccagtgtcagtgaaggtagaggaacccagatagaagaaaatcctttggaagaaaatattctggcgggggaagcagcatctcaagctggtgacagtggtaacgaggcagccaacagaggagatggttcagatgtttcaagtcaaacacctcaaacctcaagtgactggcttgaacaagtacatttagtgtgaactgcacacatctgggctctaaatgaattacaggtacagatggtatgctaggtggagtatgcttgatagagactttgattcacttaattccaactcagtgataaaccactgacattagggttgaatacagagaagttcccttgaatggtagcttcattttttattttaaccttacagggaatttcctttgtacttaattgaatagcttttcccctttttgctgacaaaaagaagagcaagagaaagagaaacaaaaatgaaataaataagttgtattccacactctaagaaaatgcagtcctctatttagcctaggcttgacaatacttaaattgaacatttaaactaaaggcttactccctaatctttgggtggctttcctttaaaaaaaaaaaaaaagttttcttcattctagaaatttattttggataaatccgataacatatatgtcctcaatctctttgtgctcttccataacttacttcctttttgtctgagcaatgtgaattgaagtctctttagtaccacatctaccatagtgtaattagttttaattttcacatgaatcaaaggtttcctttcatgtctatttacagtccaattgtgccaaactcttacttgtgtgctgactaacaaggcatttaggtgtgcagcatcctagagtgctccagggcagtgtcagcgttctcgggagtaaaaggtgccacttggtagcaatgatattccagaattaaatgggtttttgttgccatggagactgcatttatataaatgtagcctgtagcttaagttaactaaacctaatgctgctgttaaaaacagtttattttaatattaaaatacagttgattagcaacagcggtgctgtattttaagagacactttattggaagtgcaatcatagttatttgttttcacaattttacagtgcattctaattactgatgggtgcaattacttttaatcgtgttttataaaatagaaaaaaagtggagttttcatgagttatagtaaatcccacgattattaagaaattcaataaaacatcctgcgcaacatgttaccgtgcctttgcctaacctaaatggatagttgccagttaaataagtgagtaattcaaatttcaatgtctcttctgaagtaactatgctatgaattgcaaagacctccataaaaccacccatggccttgcttttacactaactataacaactaaatgttcaatcagtttgtttgcctaactagcaaatgctgacatgtgtttgttctactgcgcaatactcatttgctgtgtgattactgtttagtgttgaaaaaaatcaacttcctagttatcagtgtcttactgtgaagaaaatactggtcttagttgtaattaggatacaatggtacagtgtgtaattaaaactagagtaaactgttggaatggctgttttacttaaatattatcaaaactagcataacataagcaaaatagataagtacaacactccatttagtgttttgccagattgttaccagaagtctacagataccaaactttcagttctgagtttgtacaggcaagtcctgggctgggtaaaaagttatattaatattgttatccacaagagatgtgattatgggttttgattactttttttttttccaaaccctgcttttgaaatatccttgtacttaaaattcatattgctaagacactgtattagaatatttaatattccccagatcctcttaggataaactgtgggaatcctcctatgccatggatatcaaaggtccacattagtttttatttctccagtgatcagaaacattgatatcaatccctattaaattagtggggggaatattaactttatctacagtgtattactgtatattaaactgaaatagtccattaaaggatttttttataaatttattttggattaaaaatatcaacaccaataagtttttagaccaagttgtaatttttccaatatagagtctttgcatcacactgaggcatcttgcacagctgcagttaaggtgagaaagaatgctctgtgtgaagacagtgtacacaatgggttccggtttccttgcaccttgtgcagtatcctttatttctgtgctgttctctcctgagcatgaaaaatgatcattatccaatttgtatttccttggtacatattttaaaaacaacacagtcattgactttacaattcagtaatgaagtttggcaaagcctattttgtaaacaagttaattttataatgtaaaaaaaaaaagttaatctaaccttgacttgttatttgcactttcatagtctatacttgatacattcccactttatatacagtaggattctacaaacgtgtagatgtttggccaaatgaatgctgttaataatatgtaaaattctttgattaaacatttattacttaa

SEQ ID NO: 13363 - DNA, 5199 bp, Homo sapiens
tcatattcactctggtcaagttttgctcctttccattttaagatcatctgcagacaatctgctctaatgaaacatctatgcatttgttgtgtatgggacctcaaattatgatatctgaaggagcccttcatcctcgcttggcacgccccacagaagatgatttcagaagagcagattgtctgcagatgatcttaaaatggaaaggagcaaaacttgaccagggtgaatatgagagagcagctattgatgctgttgataacaaaaaaaacacacccttgcactatgctgctgcctcagggatgaaagcctgtgtagagcttttagtaaaacatggaggagacttgtttgctgagaatgaaaataaagatactccttgtgattgtgctgaaaagcaacaccacaaagatttggccctcaatctggaatctcaaatggtattctcacgggatcccgaggctgaagaaatagaagctgaatatgctgcattagacaaacgagagccatatgaaggattaaggcctcaggatcttcgtagactaaaagatatgcttattgtggaaactgcagacatgcttcaggctcctctctttactgctgaagctttacttcgagctcatgactgggacagggagaaattacttgaagcttggatgtccaacccggagaactgctgccaacgatcaggtgttcaaatgccaactccaccaccaagtgggtataatgcctgggacacgctcccatctccaagaactccaaggactacacgctcttctgtcacctccccagatgaaatcagcttatctcctggggatttagacaccagtttgtgtgacatttgtatgtgcagtatctctgtatttgaagaccctgtggatatgccctgtggacatgacttttgtagaggatgttgggagtcgtttttgaatctgaaaattcaagaaggtgaagctcacaacattttttgccctgcatatgattgcttccaacttgtacctgtggatatcatagaaagtgtagtttcaaaggagatggacaaacgatacctacagtttgatattaaggcctttgttgaaaataatcctgccattaaatggtgtcctactccaggctgtgacagagcagtaagactaacgaaacaagggtcaaatacatctggatctgatacactcagcttcccattgctgagagctcctgctgttgattgtggaaaaggacacctcttctgctgggagtgccttggtgaagcacatgagccttgtgactgccaaacatggaagaattggctgcaaaaaataaccgaaatgaaaccagaagaacttgtgggagttagtgaagcctacgaggatgccgccaattgtctctggttattaactaactccaagccttgtgccaactgtaagtctccaatacagaagaatgaaggctgcaatcacatgcagtgtgctaagtgcaagtatgacttttgctggatttgccttgaagagtggaaaaaacatagttcgtccactggaggttattacagatgtactcgctatgaagtcattcaacacgtggaggagcaatccaaggaaatgactgtggaggctgagaaaaaacacaaacgatttcaggaacttgacagatttatgcactattatacaagatttaaaaaccatgagcatagttatcagctagaacaacgccttcttaaaacagccaaagaaaagatggagcaattgagcagagctctcaaagaaactgaaggaggctgtccagataccactttcattgaagatgcagttcatgtgctcttaaaaactcggcgcattctcaagtgttcttatccatatggatttttcttggaacctaaaagcacaaagaaagaaatttttgaactaatgcaaacagacctagaaatggtcactgaagaccttgcccagaaagtcaataggccttaccttcgcacaccccgccacaagatcatcaaagcagcatgccttgtacagcagaagaggcaagaattcctggcatctgtggctcggggagtagctcctgcagactcaccagaagctccaaggcgcagctttgctggtggaacatgggattgggaatatttaggatttgcatcaccagaggaatatgctgaatttcagtatcggaggaggcacagacaacgtcgtcgaggagatgttcacagtctactcagtaatcctccagaccctgatgagccaagtgaaagcactttagatattccagaaggcggcagcagcagccgcaggcctggcacatccgtggtaagttctgcatctatgagtgtgctgcacagctcttccctgcgtgactacacccctgccagtcgctctgaaaaccaggactctcttcaggctctgagttccttggatgaagacgatccccaatgacaatcttctcggcaacatcatggcttggtttcatgacatgaaccctcagagtattgccctgattcctccagcaactacagaaatcagtgcagattcccagctcccctgtatcaaagatgggtcagaaggtgtgaaggatgtggaactggtgctgccagaagattcaatgtttgaagatgccagtgtcagtgaaggtagaggaacccagatagaagaaaatcctttggaagaaaatattctggcgggggaagcagcatctcaagctggtgacagtggtaacgaggcagccaacagaggagatggttcagatgtttcaagtcaaacacctcaaacctcaagtgactggcttgaacaagtacatttagtgtgaactgcacacatctgggctctaaatgaattacaggtacagatggtatgctaggtggagtatgcttgatagagactttgattcacttaattccaactcagtgataaaccactgacattagggttgaatacagagaagttcccttgaatggtagcttcattttttattttaaccttacagggaatttcctttgtacttaattgaatagcttttcccctttttgctgacaaaaagaagagcaagagaaagagaaacaaaaatgaaataaataagttgtattccacactctaagaaaatgcagtcctctatttagcctaggcttgacaatacttaaattgaacatttaaactaaaggcttactccctaatctttgggtggctttcctttaaaaaaaaaaaaaaagttttcttcattctagaaatttattttggataaatccgataacatatatgtcctcaatctctttgtgctcttccataacttacttcctttttgtctgagcaatgtgaattgaagtctctttagtaccacatctaccatagtgtaattagttttaattttcacatgaatcaaaggtttcctttcatgtctatttacagtccaattgtgccaaactcttacttgtgtgctgactaacaaggcatttaggtgtgcagcatcctagagtgctccagggcagtgtcagcgttctcgggagtaaaaggtgccacttggtagcaatgatattccagaattaaatgggtttttgttgccatggagactgcatttatataaatgtagcctgtagcttaagttaactaaacctaatgctgctgttaaaaacagtttattttaatattaaaatacagttgattagcaacagcggtgctgtattttaagagacactttattggaagtgcaatcatagttatttgttttcacaattttacagtgcattctaattactgatgggtgcaattacttttaatcgtgttttataaaatagaaaaaaagtggagttttcatgagttatagtaaatcccacgattattaagaaattcaataaaacatcctgcgcaacatgttaccgtgcctttgcctaacctaaatggatagttgccagttaaataagtgagtaattcaaatttcaatgtctcttctgaagtaactatgctatgaattgcaaagacctccataaaaccacccatggccttgcttttacactaactataacaactaaatgttcaatcagtttgtttgcctaactagcaaatgctgacatgtgtttgttctactgcgcaatactcatttgctgtgtgattactgtttagtgttgaaaaaaatcaacttcctagttatcagtgtcttactgtgaagaaaatactggtcttagttgtaattaggatacaatggtacagtgtgtaattaaaactagagtaaactgttggaatggctgttttacttaaatattatcaaaactagcataacataagcaaaatagataagtacaacactccatttagtgttttgccagattgttaccagaagtctacagataccaaactttcagttctgagtttgtacaggcaagtcctgggctgggtaaaaagttatattaatattgttatccacaagagatgtgattatgggttttgattactttttttttttccaaaccctgcttttgaaatatccttgtacttaaaattcatattgctaagacactgtattagaatatttaatattccccagatcctcttaggataaactgtgggaatcctcctatgccatggatatcaaaggtccacattagtttttatttctccagtgatcagaaacattgatatcaatccctattaaattagtggggggaatattaactttatctacagtgtattactgtatattaaactgaaatagtccattaaaggatttttttataaatttattttggattaaaaatatcaacaccaataagtttttagaccaagttgtaatttttccaatatagagtctttgcatcacactgaggcatcttgcacagctgcagttaaggtgagaaagaatgctctgtgtgaagacagtgtacacaatgggttccggtttccttgcaccttgtgcagtatcctttatttctgtgctgttctctcctgagcatgaaaaatgatcattatccaatttgtatttccttggtacatattttaaaaacaacacagtcattgactttacaattcagtaatgaagtttggcaaagcctattttgtaaacaagttaattttataatgtaaaaaaaaaaagttaatctaaccttgacttgttatttgcactttcatagtctatacttgatacattcccactttatatacagtaggattctacaaacgtgtagatgtttggccaaatgaatgctgttaataatatgtaaaattctttgattaaacatttattacttaa

SEQ ID NO: 13364 - DNA, 1625 bp, Homo sapiens
cgcagcggccggagagggatggggggcgcccacccagtctgagcctcgccgcgggcgccttcggctcacgcagcgcttcccgcgggccgccagtgcgcaccctcggccacatcagcctccgcctggcgggtgcacccgggccggcgaggaaggggcaaccgtccgggtgggtggggcgggctgggtacctgaggtcaccagctcggctgtagaggcaggggcggcggaggcggaactgcggagttgctgggtccaccgacccttaccctcagcgagagaagtaaccaatgtgaaagatgttgcagaagtgttccagaagtggctgaagatagaaggaaaaaagtgccactgcctatcagaaaaaacaaaacaaaacatgggaaatacaaccaccaaattccgtaaagcactcatcaatggtgatgaaaacctggcctgccaaatatatgaaaacaatcctcagctaaaagaatctcttgatccaaatacatcttatggggagccctaccagcacaatactccattacattatgctgctagacatggaatgaataaaatattagggacttttcttggtagagatggaaatccaaataaacggaatgtgcacaatgaaacatctatgcatttgttgtgtatgggacctcaaattatgatatctgaaggagcccttcatcctcgcttggcacgccccacagaagatgatttcagaagagcagattgtctgcagatgatcttaaaatggaaaggagcaaaacttgaccagggtgaatatgagagagcagctattgatgctgttgataacaaaaaaaacacacccttgcactatgctgctgcctcagggatgaaagcctgtgtagagcttttagtaaaacatggaggagacttgtttgctgagaatgaaaataaagatactccttgtgattgtgctgaaaagcaacaccacaaagatttggccctcaatctggaatctcaaatggtattctcacgggatcccgaggctgaagaaatagaagctgaatatgctgcattagacaaacgagagtactgactgctttgaaggttattgctggtttgtttagtctgaaaatggaagcagtttatctttgcaacaggaaagagaaagccatatgaaggattaaggcctcaggatcttcgtagactaaaagatatgcttattgtggaaactgcagacatgcttcaggctcctctctttactgctgaagctttacttcgagctcatgactgggacagggagaaattacttgaagcttggatgtccaacccggagaactgctgccaacgatcaggtgttcaaatgccaactccaccaccaagtgggtataatgcctgggacacgctcccatctccaagaactccaaggactacacgctcttctgtcacctccccagatgaaatcagcttatctcctggggatttagacaccagtttgtgtgacatttgtatgtgcagtatctctgtatttgaagaccctgtggatatgccctgtggacatgacttttgtagaggatgttgggagtcgtgagtatatgagcaccttagcatctcttactgcatgatagcactctgatttgttaataaaattgtttgctttcagtatttaa

SEQ ID NO: 13365 - DNA, 833 bp, Homo sapiens
taatgcccatttaactttattttttttcttttcaaagccatatgaaggattaaggcctcaggatcttcgtagactaaaagatatgcttattgtggaaactgcagacatgcttcaggctcctctctttactgctgaagctttacttcgagctcatggtaatgaaagaaatgtcttatgcttctaagaacatgagtaacttttgaaacttctgagtttttaaaagggctatttttgtatttgaatacagaacaaaatggtttgttaaaaaagcctaagttgtgttttgtgcagttgttacttctatactcagttcctcataacatcttgtattttgaagtataaattggcatatatctaagaggagacactggaaaattctttttagaaattgagctactaaagcaaattatagaatgtctaattttagaaatatgtctaatttgagtgagattgagcattgaaatccatagtcctagccctggttttgacattaatttttgctgaagtcattcaagtataaaattatggtagttcaattaaatacctaagaattgtgctattagtattgtcagttgtatttattttatatggtagctatttctccccatgaagtgcacaaagtgaagttaaagggtcaccttggaaatatattgtcccttttaagggtggttttcttgtttctttgttttgttttgttttttagacataactaactttatataagaaaattttcctaagtgctcagtttaagttccctataatccttatgacaggcattctgggagctctcacatgctggattggatcttctcattgcccacatgatatatgac

SEQ ID NO: 13366 - DNA, 5531 bp, Homo sapiens
tcatattcactctggtcaagttttgctcctttccattttaagatcatctgcagacaatctgctctaatgaaacatctatgcatttgttgtgtatgggacctcaaattatgatatctgaaggagcccttcatcctcgcttggcacgccccacagaagatgatttcagaagagcagattgtctgcagatgatcttaaaatggaaaggagcaaaacttgaccagggtgaatatgagagagcagctattgatgctgttgataacaaaaaaaacacacccttgcactatgctgctgcctcagggatgaaagcctgtgtagagcttttagtaaaacatggaggagacttgtttgctgagaatgaaaataaagatactccttgtgattgtgctgaaaagcaacaccacaaagatttggccctcaatctggaatctcaaatggtattctcacgggatcccgaggctgaagaaatagaagctgaatatgctgcattagacaaacgagagccatatgaaggattaaggcctcaggatcttcgtagactaaaagatatgcttattgtggaaactgcagacatgcttcaggctcctctctttactgctgaagctttacttcgagctcatgactgggacagggagaaattacttgaagcttggatgtccaacccggagaactgctgccaacgatcaggtgttcaaatgccaactccaccaccaagtgggtataatgcctgggacacgctcccatctccaagaactccaaggactacacgctcttctgtcacctccccagatgaaatcagcttatctcctggggatttagacaccagtttgtgtgacatttgtatgtgcagtatctctgtatttgaagaccctgtggatatgccctgtggacatgacttttgtagaggatgttgggagtcgtttttgaatctgaaaattcaagaaggtgaagctcacaacattttttgccctgcatatgattgcttccaacttgtacctgtggatatcatagaaagtgtagtttcaaaggagatggacaaacgatacctacagtttgatattaaggcctttgttgaaaataatcctgccattaaatggtgtcctactccaggctgtgacagagcagtaagactaacgaaacaagggtcaaatacatctggatctgatacactcagcttcccattgctgagagctcctgctgttgattgtggaaaaggacacctcttctgctgggagtgccttggtgaagcacatgagccttgtgactgccaaacatggaagaattggctgcaaaaaataaccgaaatgaaaccagaagaacttgtgggagttagtgaagcctacgaggatgccgccaattgtctctggttattaactaactccaagccttgtgccaactgtaagtctccaatacagaagaatgaaggctgcaatcacatgcagtgtgctaagtgcaagtatgacttttgctggatttgccttgaagagtggaaaaaacatagttcgtccactggaggttattacagatgtactcgctatgaagtcattcaacacgtggaggagcaatccaaggaaatgactgtggaggctgagaaaaaacacaaacgatttcaggaacttgacagatttatgcactattatacaagatttaaaaaccatgagcatagttatcagctagaacaacgccttcttaaaacagccaaagaaaagatggagcaattgagcagagctctcaaagaaactgaaggaggctgtccagataccactttcattgaagatgcagttcatgtgctcttaaaaactcggcgcattctcaagtgttcttatccatatggatttttcttggaacctaaaagcacaaagaaagaaatttttgaactaatgcaaacagacctagaaatggtcactgaagaccttgcccagaaagtcaataggccttaccttcgcacaccccgccacaagatcatcaaagcagcatgccttgtacagcagaagaggcaagaattcctggcatctgtggctcggggagtagctcctgcagactcaccagaagctccaaggcgcagctttgctggtggaacatgggattgggaatatttaggatttgcatcaccagaggaatatgctgaatttcagtatcggaggaggcacagacaacgtcgtcgaggagatgttcacagtctactcagtaatcctccagaccctgatgagccaagtgaaagcactttagatattccagaaggcggcagcagcagccgcaggcctggcacatccgtggtaagttctgcatctatgagtgtgctgcacagctcttccctgcgtgactacacccctgccagtcgctctgaaaaccaggactctcttcaggctctgagttccttggatgaagacgatcccaatatacttcttgcaatacagttatcactgcaagagtctgggctggccctcgatgaagaaactagagacttcctcagtaatgaagcatccttaggtgcgataggcacttctttaccttccaggctggactctgtccccagaaatacagatagccctcgggctgcattgagcagctctgagcttttggaacttggtgacagcctcatgagactaggagcagagaatgacccattttcaactgacaccctgagctcacaccctctcagtgaggcaagaagtgatttctgtccctcatctagtgatcctgactcagctggccaggaccccaacatcaatgacaatcttctcggcaacatcatggcttggtttcatgacatgaaccctcagagtattgccctgattcctccagcaactacagaaatcagtgcagattcccagctcccctgtatcaaagatgggtcagaaggtgtgaaggatgtggaactggtgctgccagaagattcaatgtttgaagatgccagtgtcagtgaaggtagaggaacccagatagaagaaaatcctttggaagaaaatattctggcgggggaagcagcatctcaagctggtgacagtggtaacgaggcagccaacagaggagatggttcagatgtttcaagtcaaacacctcaaacctcaagtgactggcttgaacaagtacatttagtgtgaactgcacacatctgggctctaaatgaattacaggtacagatggtatgctaggtggagtatgcttgatagagactttgattcacttaattccaactcagtgataaaccactgacattagggttgaatacagagaagttcccttgaatggtagcttcattttttattttaaccttacagggaatttcctttgtacttaattgaatagcttttcccctttttgctgacaaaaagaagagcaagagaaagagaaacaaaaatgaaataaataagttgtattccacactctaagaaaatgcagtcctctatttagcctaggcttgacaatacttaaattgaacatttaaactaaaggcttactccctaatctttgggtggctttcctttaaaaaaaaaaaaaaagttttcttcattctagaaatttattttggataaatccgataacatatatgtcctcaatctctttgtgctcttccataacttacttcctttttgtctgagcaatgtgaattgaagtctctttagtaccacatctaccatagtgtaattagttttaattttcacatgaatcaaaggtttcctttcatgtctatttacagtccaattgtgccaaactcttacttgtgtgctgactaacaaggcatttaggtgtgcagcatcctagagtgctccagggcagtgtcagcgttctcgggagtaaaaggtgccacttggtagcaatgatattccagaattaaatgggtttttgttgccatggagactgcatttatataaatgtagcctgtagcttaagttaactaaacctaatgctgctgttaaaaacagtttattttaatattaaaatacagttgattagcaacagcggtgctgtattttaagagacactttattggaagtgcaatcatagttatttgttttcacaattttacagtgcattctaattactgatgggtgcaattacttttaatcgtgttttataaaatagaaaaaaagtggagttttcatgagttatagtaaatcccacgattattaagaaattcaataaaacatcctgcgcaacatgttaccgtgcctttgcctaacctaaatggatagttgccagttaaataagtgagtaattcaaatttcaatgtctcttctgaagtaactatgctatgaattgcaaagacctccataaaaccacccatggccttgcttttacactaactataacaactaaatgttcaatcagtttgtttgcctaactagcaaatgctgacatgtgtttgttctactgcgcaatactcatttgctgtgtgattactgtttagtgttgaaaaaaatcaacttcctagttatcagtgtcttactgtgaagaaaatactggtcttagttgtaattaggatacaatggtacagtgtgtaattaaaactagagtaaactgttggaatggctgttttacttaaatattatcaaaactagcataacataagcaaaatagataagtacaacactccatttagtgttttgccagattgttaccagaagtctacagataccaaactttcagttctgagtttgtacaggcaagtcctgggctgggtaaaaagttatattaatattgttatccacaagagatgtgattatgggttttgattactttttttttttccaaaccctgcttttgaaatatccttgtacttaaaattcatattgctaagacactgtattagaatatttaatattccccagatcctcttaggataaactgtgggaatcctcctatgccatggatatcaaaggtccacattagtttttatttctccagtgatcagaaacattgatatcaatccctattaaattagtggggggaatattaactttatctacagtgtattactgtatattaaactgaaatagtccattaaaggatttttttataaatttattttggattaaaaatatcaacaccaataagtttttagaccaagttgtaatttttccaatatagagtctttgcatcacactgaggcatcttgcacagctgcagttaaggtgagaaagaatgctctgtgtgaagacagtgtacacaatgggttccggtttccttgcaccttgtgcagtatcctttatttctgtgctgttctctcctgagcatgaaaaatgatcattatccaatttgtatttccttggtacatattttaaaaacaacacagtcattgactttacaattcagtaatgaagtttggcaaagcctattttgtaaacaagttaattttataatgtaaaaaaaaaaagttaatctaaccttgacttgttatttgcactttcatagtctatacttgatacattcccactttatatacagtaggattctacaaacgtgtagatgtttggccaaatgaatgctgttaataatatgtaaaattctttgattaaacatttattacttaa

SEQ ID NO: 13367 - DNA, 5068 bp, Homo sapiens
cgcagcggccggagagggatggggggcgcccacccagtctgagcctcgccgcgggcgccttcggctcacgcagcgcttcccgcgggccgccagtgcgcaccctcggccacatcagcctccgcctggcgggtgcacccgggccggcgaggaaggggcaaccgtccgggtgggtggggcgggctgggtacctgaggtcaccagctcggctgtagaggcaggggcggcggaggcggaactgcggagttgctgggtccaccgacccttaccctcagcgagagaagtaaccaatgtgaaagatgttgcagaagtgttccagaagtggctgaagatagaaggaaaaaagtgccactgcctatcagaaaaaacaaaacaaaacatgggaaatacaaccaccaaattccgtaaagcactcatcaatggtgatgaaaacctggcctgccaaatatatgaaaacaatcctcagctaaaagaatctcttgatccaaatacatcttatggggagccctaccagcacaatactccattacattatgctgctagacatggaatgaataaaatattagggacttttcttggtagagatggaaatccaaataaacggaatgtgcacaatgaaacatctatgcatttgttgtgtatgggacctcaaattatgatatctgaaggagcccttcatcctcgcttggcacgccccacagaagatgatttcagaagagcagattgtctgcagatgatcttaaaatggaaaggagcaaaacttgaccagggtgaatatgagagagcagctattgatgctgttgataacaaaaaaaacacacccttgcactatgctgctgcctcagggatgaaagcctgtgtagagcttttagtaaaacatggaggagacttgtttgctgagaatgaaaataaagatactccttgtgattgtgctgaaaagcaacaccacaaagatttggccctcaatctggaatctcaaatggtattctcacgggatcccgaggctgaagaaatagaagctgaatatgctgcattagacaaacgagagccatatgaaggattaaggcctcaggatcttcgtagactaaaagatatgcttattgtggaaactgcagacatgcttcaggctcctctctttactgctgaagctttacttcgagctcatgactgggacagggagaaattacttgaagcttggatgtccaacccggagaactgctgccaacgatcaggtgttcaaatgccaactccaccaccaagtgggtataatgcctgggacacgctcccatctccaagaactccaaggactacacgctcttctgtcacctccccagatgaaatcagcttatctcctggggatttagacaccagtttgtgtgacatttgtatgtgcagtatctctgtatttgaagaccctgtggatatgccctgtggacatgacttttgtagaggatgttgggagtcgtttttgaatctgaaaattcaagaaggtgaagctcacaacattttttgccctgcatatgattgcttccaacttgtacctgtggatatcatagaaagtgtagtttcaaaggagatggacaaacgatacctacagtttgatattaaggcctttgttgaaaataatcctgccattaaatggtgtcctactccaggctgtgacagagcagtaagactaacgaaacaagggtcaaatacatctggatctgatacactcagcttcccattgctgagagctcctgctgttgattgtggaaaaggacacctcttctgctgggagtgccttggtgaagcacatgagccttgtgactgccaaacatggaagaattggctgcaaaaaataaccgaaatgaaaccagaagaacttgtgggagttagtgaagcctacgaggatgccgccaattgtctctggttattaactaactccaagccttgtgccaactgtaagtctccaatacagaagaatgaaggctgcaatcacatgcagtgtgctaagtgcaagtatgacttttgctggatttgccttgaagagtggaaaaaacatagttcgtccactggaggttattacagatgtactcgctatgaagtcattcaacacgtggaggagcaatccaaggaaatgactgtggaggctgagaaaaaacacaaacgatttcaggaacttgacagatttatgcactattatacaagatttaaaaaccatgagcatagttatcagctagaacaacgccttcttaaaacagccaaagaaaagatggagcaattgagcagagctctcaaagaaactgaaggaggctgtccagataccactttcattgaagatgcagttcatgtgctcttaaaaactcggcgcattctcaagtgttcttatccatatggatttttcttggaacctaaaagcacaaagaaagaaatttttgaactaatgcaaacagacctagaaatggtcactgaagaccttgcccagaaagtcaataggccttaccttcgcacaccccgccacaagatcatcaaagcagcatgccttgtacagcagaagaggcaagaattcctggcatctgtggctcggggagtagctcctgcagactcaccagaagctccaaggcgcagctttgctggtggaacatgggattgggaatatttaggatttgcatcaccagaggaatatgctgaatttcagtatcggaggaggcacagacaacgtcgtcgaggagatgttcacagtctactcagtaatcctccagaccctgatgagccaagtgaaagcactttagatattccagaaggcggcagcagcagccgcaggcctggcacatccgtggtaagttctgcatctatgagtgtgctgcacagctcttccctgcgtgactacacccctgccagtcgctctgaaaaccaggactctcttcaggctctgagttccttggatgaagacgatcccaatatacttcttgcaatacagttatcactgcaagagtctgggctggccctcgatgaagaaactagagacttcctcagtaatgaagcatccttaggtgcgataggcacttctttaccttccaggctggactctgtccccagaaatacagatagccctcgggctgcattgagcagctctgagcttttggaacttggtgacagcctcatgagactaggagcagagaatgacccattttcaactgacaccctgagctcacaccctctcagtgaggcaagaagtgatttctgtccctcatctagtgatcctgactcagctggccaggaccccaacatcaatgacaatcttctcggcaacatcatggcttggtttcatgacatgaaccctcagagtattgccctgattcctccagcaactacagaaatcagtgcagattcccagctcccctgtatcaaagatgggtcagaaggtgtgaaggatgtggaactggtgctgccagaagattcaatgtttgaagatgccagtgtcagtgaaggtagaggaacccagatagaagaaaatcctttggaagaaaatattctggcgggggaagcagcatctcaagctggtgacagtggtaacgaggcagccaacagaggagatggttcagatgtttcaagtcaaacacctcaaacctcaagtgactggcttgaacaagtacatttagtgtgaactgcacacatctgggctctaaatgaattacaggtacagatggtatgctaggtggagtatgcttgatagagactttgattcacttaattccaactcagtgataaaccactgacattagggttgaatacagagaagttcccttgaatggtagcttcattttttattttaaccttacagggaatttcctttgtacttaattgaatagcttttcccctttttgctgacaaaaagaagagcaagagaaagagaaacaaaaatgaaataaataagttgtattccacactctaagaaaatgcagtcctctatttagcctaggcttgacaatacttaaattgaacatttaaactaaaggcttactccctaatctttgggtggctttcctttaaaaaaaaaaaaaaagttttcttcattctagaaatttattttggataaatccgataacatatatgtcctcaatctctttgtgctcttccataacttacttcctttttgtctgagcaatgtgaattgaagtctctttagtaccacatctaccatagtgtaattagttttaattttcacatgaatcaaaggtttcctttcatgtctatttacagtccaattgtgccaaactcttacttgtgtgctgactaacaaggcatttaggtgtgcagcatcctagagtgctccagggcagtgtcagcgttctcgggagtaaaaggtgccacttggtagcaatgatattccagaattaaatgggtttttgttgccatggagactgcatttatataaatgtagcctgtagcttaagttaactaaacctaatgctgctgttaaaaacagtttattttaatattaaaatacagttgattagcaacagcggtgctgtattttaagagacactttattggaagtgcaatcatagttatttgttttcacaattttacagtgcattctaattactgatgggtgcaattacttttaatcgtgttttataaaatagaaaaaaagtggagttttcatgagttatagtaaatcccacgattattaagaaattcaataaaacatcctgcgcaacatgttaccgtgcctttgcctaacctaaatggatagttgccagttaaataagtgagtaattcaaatttcaatgtctcttctgaagtaactatgctatgaattgcaaagacctccataaaaccacccatggccttgcttttacactaactataacaactaaatgttcaatcagtttgtttgcctaactagcaaatgctgacatgtgtttgttctactgcgcaatactcatttgctgtgtgattactgtttagtgttgaaaaaaatcaacttcctagttatcagtgtcttactgtgaagaaaatactggtcttagttgtaattaggatacaatggtacagtgtgtaattaaaactagagtaaactgtt

SEQ ID NO: 13368 - DNA, 5479 bp, Homo sapiens
tcatattcactctggtcaagttttgctcctttccattttaagatcatctgcagacaatctgctctaatgaaacatctatgcatttgttgtgtatgggacctcaaattatgatatctgaaggagcccttcatcctcgcttggcacgccccacagaagatgatttcagaagagcagattgtctgcagatgatcttaaaatggaaaggagcaaaacttgaccagggtgaatatgagagagcagctattgatgctgttgataacaaaaaaaacacacccttgcactatgctgctgcctcagggatgaaagcctgtgtagagcttttagtaaaacatggaggagacttgtttgctgagaatgaaaataaagatactccttgtgattgtgctgaaaagcaacaccacaaagatttggccctcaatctggaatctcaaatggtattctcacgggatcccgaggctgaagaaatagaagctgaatatgctgcattagacaaacgagagccatatgaaggattaaggcctcaggatcttcgtagactaaaagatatgcttattgtggaaactgcagacatgcttcaggctcctctctttactgctgaagctttacttcgagctcatgactgggacagggagaaattacttgaagcttggatgtccaacccggagaactgctgccaacgatcaggtgttcaaatgccaactccaccaccaagtgggtataatgcctgggacacgctcccatctccaagaactccaaggactacacgctcttctgtcacctccccagatgaaatcagcttatctcctggggatttagacaccagtttgtgtgacatttgtatgtgcagtatctctgtatttgaagaccctgtggatatgccctgtggacatgacttttgtagaggatgttgggagtcgtttttgaatctgaaaattcaagaaggtgaagctcacaacattttttgccctgcatatgattgcttccaacttgtacctgtggatatcatagaaagtgtagtttcaaaggagatggacaaacgatacctacagtttgatattaaggcctttgttgaaaataatcctgccattaaatggtgtcctactccaggctgtgacagagcagtaagactaacgaaacaagggtcaaatacatctggatctgatacactcagcttcccattgctgagagctcctgctgttgattgtggaaaaggacacctcttctgctgggagtgccttggtgaagcacatgagccttgtgactgccaaacatggaagaattggctgcaaaaaataaccgaaatgaaaccagaagaacttgtgggagttagtgaagcctacgaggatgccgccaattgtctctggttattaactaactccaagccttgtgccaactgtaagtctccaatacagaagaatgaaggctgcaatcacatgcagtgtgctaagtgcaagtatgacttttgctggatttgccttgaagagtggaaaaaacatagttcgtccactggaggttattacagatgtactcgctatgaagtcattcaacacgtggaggagcaatccaaggaaatgactgtggaggctgagaaaaaacacaaacgatttcaggaacttgacagatttatgcactattatacaagatttaaaaaccatgagcatagttatcagctagaacaacgccttcttaaaacagccaaagaaaagatggagcaattgagcagagctctcaaagaaactgaaggaggctgtccagataccactttcattgaagatgcagttcatgtgctcttaaaaactcggcgcattctcaagtgttcttatccatatggatttttcttggaacctaaaagcacaaagaaagaaatttttgaactaatgcaaacagacctagaaatggtcactgaagaccttgcccagaaagtcaataggccttaccttcgcacaccccgccacaagatcatcaaagcagcatgccttgtacagcagaagaggcaagaattcctggcatctgtggctcggggagtagctcctgcagactcaccagaagctccaaggcgcaggaatatgctgaatttcagtatcggaggaggcacagacaacgtcgtcgaggagatgttcacagtctactcagtaatcctccagaccctgatgagccaagtgaaagcactttagatattccagaaggcggcagcagcagccgcaggcctggcacatccgtggtaagttctgcatctatgagtgtgctgcacagctcttccctgcgtgactacacccctgccagtcgctctgaaaaccaggactctcttcaggctctgagttccttggatgaagacgatcccaatatacttcttgcaatacagttatcactgcaagagtctgggctggccctcgatgaagaaactagagacttcctcagtaatgaagcatccttaggtgcgataggcacttctttaccttccaggctggactctgtccccagaaatacagatagccctcgggctgcattgagcagctctgagcttttggaacttggtgacagcctcatgagactaggagcagagaatgacccattttcaactgacaccctgagctcacaccctctcagtgaggcaagaagtgatttctgtccctcatctagtgatcctgactcagctggccaggaccccaacatcaatgacaatcttctcggcaacatcatggcttggtttcatgacatgaaccctcagagtattgccctgattcctccagcaactacagaaatcagtgcagattcccagctcccctgtatcaaagatgggtcagaaggtgtgaaggatgtggaactggtgctgccagaagattcaatgtttgaagatgccagtgtcagtgaaggtagaggaacccagatagaagaaaatcctttggaagaaaatattctggcgggggaagcagcatctcaagctggtgacagtggtaacgaggcagccaacagaggagatggttcagatgtttcaagtcaaacacctcaaacctcaagtgactggcttgaacaagtacatttagtgtgaactgcacacatctgggctctaaatgaattacaggtacagatggtatgctaggtggagtatgcttgatagagactttgattcacttaattccaactcagtgataaaccactgacattagggttgaatacagagaagttcccttgaatggtagcttcattttttattttaaccttacagggaatttcctttgtacttaattgaatagcttttcccctttttgctgacaaaaagaagagcaagagaaagagaaacaaaaatgaaataaataagttgtattccacactctaagaaaatgcagtcctctatttagcctaggcttgacaatacttaaattgaacatttaaactaaaggcttactccctaatctttgggtggctttcctttaaaaaaaaaaaaaaagttttcttcattctagaaatttattttggataaatccgataacatatatgtcctcaatctctttgtgctcttccataacttacttcctttttgtctgagcaatgtgaattgaagtctctttagtaccacatctaccatagtgtaattagttttaattttcacatgaatcaaaggtttcctttcatgtctatttacagtccaattgtgccaaactcttacttgtgtgctgactaacaaggcatttaggtgtgcagcatcctagagtgctccagggcagtgtcagcgttctcgggagtaaaaggtgccacttggtagcaatgatattccagaattaaatgggtttttgttgccatggagactgcatttatataaatgtagcctgtagcttaagttaactaaacctaatgctgctgttaaaaacagtttattttaatattaaaatacagttgattagcaacagcggtgctgtattttaagagacactttattggaagtgcaatcatagttatttgttttcacaattttacagtgcattctaattactgatgggtgcaattacttttaatcgtgttttataaaatagaaaaaaagtggagttttcatgagttatagtaaatcccacgattattaagaaattcaataaaacatcctgcgcaacatgttaccgtgcctttgcctaacctaaatggatagttgccagttaaataagtgagtaattcaaatttcaatgtctcttctgaagtaactatgctatgaattgcaaagacctccataaaaccacccatggccttgcttttacactaactataacaactaaatgttcaatcagtttgtttgcctaactagcaaatgctgacatgtgtttgttctactgcgcaatactcatttgctgtgtgattactgtttagtgttgaaaaaaatcaacttcctagttatcagtgtcttactgtgaagaaaatactggtcttagttgtaattaggatacaatggtacagtgtgtaattaaaactagagtaaactgttggaatggctgttttacttaaatattatcaaaactagcataacataagcaaaatagataagtacaacactccatttagtgttttgccagattgttaccagaagtctacagataccaaactttcagttctgagtttgtacaggcaagtcctgggctgggtaaaaagttatattaatattgttatccacaagagatgtgattatgggttttgattactttttttttttccaaaccctgcttttgaaatatccttgtacttaaaattcatattgctaagacactgtattagaatatttaatattccccagatcctcttaggataaactgtgggaatcctcctatgccatggatatcaaaggtccacattagtttttatttctccagtgatcagaaacattgatatcaatccctattaaattagtggggggaatattaactttatctacagtgtattactgtatattaaactgaaatagtccattaaaggatttttttataaatttattttggattaaaaatatcaacaccaataagtttttagaccaagttgtaatttttccaatatagagtctttgcatcacactgaggcatcttgcacagctgcagttaaggtgagaaagaatgctctgtgtgaagacagtgtacacaatgggttccggtttccttgcaccttgtgcagtatcctttatttctgtgctgttctctcctgagcatgaaaaatgatcattatccaatttgtatttccttggtacatattttaaaaacaacacagtcattgactttacaattcagtaatgaagtttggcaaagcctattttgtaaacaagttaattttataatgtaaaaaaaaaaagttaatctaaccttgacttgttatttgcactttcatagtctatacttgatacattcccactttatatacagtaggattctacaaacgtgtagatgtttggccaaatgaatgctgttaataatatgtaaaattctttgattaaacatttattacttaa

SEQ ID NO: 13369 - DNA, 5513 bp, Homo sapiens
tcatattcactctggtcaagttttgctcctttccattttaagatcatctgcagacaatctgctctaatgaaacatctatgcatttgttgtgtatgggacctcaaattatgatatctgaaggagcccttcatcctcgcttggcacgccccacagaagatgatttcagaagagcagattgtctgcagatgatcttaaaatggaaaggagcaaaacttgaccagggtgaatatgagagagcagctattgatgctgttgataacaaaaaaaacacacccttgcactatgctgctgcctcagggatgaaagcctgtgtagagcttttagtaaaacatggaggagacttgtttgctgagaatgaaaataaagatactccttgtgattgtgctgaaaagcaacaccacaaagatttggccctcaatctggaatctcaaatggtattctcacgggatcccgaggctgaagaaatagaagctgaatatgctgcattagacaaacgagagccatatgaaggattaaggcctcaggatcttcgtagactaaaagatatgcttattgtggaaactgcagacatgcttcaggctcctctctttactgctgaagctttacttcgagctcatgactgggacagggagaaattacttgaagcttggatgtccaacccggagaactgctgccaacgatcaggtgttcaaatgccaactccaccaccaagtgggtataatgcctgggacacgctcccatctccaagaactccaaggactacacgctcttctgtcacctccccagatgaaatcagcttatctcctggggatttagacaccagtttgtgtgacatttgtatgtgcagtatctctgtatttgaagaccctgtggatatgccctgtggacatgacttttgtagaggatgttgggagtcgtttttgaatctgaaaattcaagaaggtgaagctcacaacattttttgccctgcatatgattgcttccaacttgtacctgtggatatcatagaaagtgtagtttcaaaggagatggacaaacgatacctacagtttgatattaaggcctttgttgaaaataatcctgccattaaatggtgtcctactccaggctgtgacagagcagtaagactaacgaaacaagggtcaaatacatctggatctgatacactcagcttcccattgctgagagctcctgctgttgattgtggaaaaggacacctcttctgctgggagtgccttggtgaagcacatgagccttgtgactgccaaacatggaagaattggctgcaaaaaataaccgaaatgaaaccagaagaacttgtgggagttagtgaagcctacgaggatgccgccaattgtctctggttattaactaactccaagccttgtgccaactgtaagtctccaatacagaagaatgaaggctgcaatcacatgcagtgtgctaagtgcaagtatgacttttgctggatttgccttgaagagtggaaaaaacatagttcgtccactggaggttattacagatgtactcgctatgaagtcattcaacacgtggaggagcaatccaaggaaatgactgtggaggctgagaaaaaacacaaacgatttcaggaacttgacagatttatgcactattatacaagatttaaaaaccatgagcatagttatcagctagaacaacgccttcttaaaacagccaaagaaaagatggagcaattgagcagagctctcaaagaaactgaaggaggctgtccagataccactttcattgaagatgcagttcatgtgctcttaaaaactcggcgcattctcaagtgttcttatccatatggatttttcttggaacctaaaagcacaaagaaagaaatttttgaactaatgcaaacagacctagaaatggtcactgaagaccttgcccagaaagtcaataggccttaccttcgcacaccccgccacaagatcatcaaagcagcatgccttgtacagcagaagaggcaagaattcctggcatctgtggctcggggagtagctcctgcagactcaccagaagctccaaggcgcagctttgctggtggaacatgggattgggaatatttaggatttgcatcaccagagtatcggaggaggcacagacaacgtcgtcgaggagatgttcacagtctactcagtaatcctccagaccctgatgagccaagtgaaagcactttagatattccagaaggcggcagcagcagccgcaggcctggcacatccgtggtaagttctgcatctatgagtgtgctgcacagctcttccctgcgtgactacacccctgccagtcgctctgaaaaccaggactctcttcaggctctgagttccttggatgaagacgatcccaatatacttcttgcaatacagttatcactgcaagagtctgggctggccctcgatgaagaaactagagacttcctcagtaatgaagcatccttaggtgcgataggcacttctttaccttccaggctggactctgtccccagaaatacagatagccctcgggctgcattgagcagctctgagcttttggaacttggtgacagcctcatgagactaggagcagagaatgacccattttcaactgacaccctgagctcacaccctctcagtgaggcaagaagtgatttctgtccctcatctagtgatcctgactcagctggccaggaccccaacatcaatgacaatcttctcggcaacatcatggcttggtttcatgacatgaaccctcagagtattgccctgattcctccagcaactacagaaatcagtgcagattcccagctcccctgtatcaaagatgggtcagaaggtgtgaaggatgtggaactggtgctgccagaagattcaatgtttgaagatgccagtgtcagtgaaggtagaggaacccagatagaagaaaatcctttggaagaaaatattctggcgggggaagcagcatctcaagctggtgacagtggtaacgaggcagccaacagaggagatggttcagatgtttcaagtcaaacacctcaaacctcaagtgactggcttgaacaagtacatttagtgtgaactgcacacatctgggctctaaatgaattacaggtacagatggtatgctaggtggagtatgcttgatagagactttgattcacttaattccaactcagtgataaaccactgacattagggttgaatacagagaagttcccttgaatggtagcttcattttttattttaaccttacagggaatttcctttgtacttaattgaatagcttttcccctttttgctgacaaaaagaagagcaagagaaagagaaacaaaaatgaaataaataagttgtattccacactctaagaaaatgcagtcctctatttagcctaggcttgacaatacttaaattgaacatttaaactaaaggcttactccctaatctttgggtggctttcctttaaaaaaaaaaaaaaagttttcttcattctagaaatttattttggataaatccgataacatatatgtcctcaatctctttgtgctcttccataacttacttcctttttgtctgagcaatgtgaattgaagtctctttagtaccacatctaccatagtgtaattagttttaattttcacatgaatcaaaggtttcctttcatgtctatttacagtccaattgtgccaaactcttacttgtgtgctgactaacaaggcatttaggtgtgcagcatcctagagtgctccagggcagtgtcagcgttctcgggagtaaaaggtgccacttggtagcaatgatattccagaattaaatgggtttttgttgccatggagactgcatttatataaatgtagcctgtagcttaagttaactaaacctaatgctgctgttaaaaacagtttattttaatattaaaatacagttgattagcaacagcggtgctgtattttaagagacactttattggaagtgcaatcatagttatttgttttcacaattttacagtgcattctaattactgatgggtgcaattacttttaatcgtgttttataaaatagaaaaaaagtggagttttcatgagttatagtaaatcccacgattattaagaaattcaataaaacatcctgcgcaacatgttaccgtgcctttgcctaacctaaatggatagttgccagttaaataagtgagtaattcaaatttcaatgtctcttctgaagtaactatgctatgaattgcaaagacctccataaaaccacccatggccttgcttttacactaactataacaactaaatgttcaatcagtttgtttgcctaactagcaaatgctgacatgtgtttgttctactgcgcaatactcatttgctgtgtgattactgtttagtgttgaaaaaaatcaacttcctagttatcagtgtcttactgtgaagaaaatactggtcttagttgtaattaggatacaatggtacagtgtgtaattaaaactagagtaaactgttggaatggctgttttacttaaatattatcaaaactagcataacataagcaaaatagataagtacaacactccatttagtgttttgccagattgttaccagaagtctacagataccaaactttcagttctgagtttgtacaggcaagtcctgggctgggtaaaaagttatattaatattgttatccacaagagatgtgattatgggttttgattactttttttttttccaaaccctgcttttgaaatatccttgtacttaaaattcatattgctaagacactgtattagaatatttaatattccccagatcctcttaggataaactgtgggaatcctcctatgccatggatatcaaaggtccacattagtttttatttctccagtgatcagaaacattgatatcaatccctattaaattagtggggggaatattaactttatctacagtgtattactgtatattaaactgaaatagtccattaaaggatttttttataaatttattttggattaaaaatatcaacaccaataagtttttagaccaagttgtaatttttccaatatagagtctttgcatcacactgaggcatcttgcacagctgcagttaaggtgagaaagaatgctctgtgtgaagacagtgtacacaatgggttccggtttccttgcaccttgtgcagtatcctttatttctgtgctgttctctcctgagcatgaaaaatgatcattatccaatttgtatttccttggtacatattttaaaaacaacacagtcattgactttacaattcagtaatgaagtttggcaaagcctattttgtaaacaagttaattttataatgtaaaaaaaaaaagttaatctaaccttgacttgttatttgcactttcatagtctatacttgatacattcccactttatatacagtaggattctacaaacgtgtagatgtttggccaaatgaatgctgttaataatatgtaaaattctttgattaaacatttattacttaa

SEQ ID NO: 13370 - DNA, 3343 bp, Homo sapiens
tcatattcactctggtcaagttttgctcctttccattttaagatcatctgcagacaatctgctctaatgaaacatctatgcatttgttgtgtatgggacctcaaattatgatatctgaaggagcccttcatcctcgcttggcacgccccacagaagatgatttcagaagagcagattgtctgcagatgatcttaaaatggaaaggagcaaaacttgaccagggtgaatatgagagagcagctattgatgctgttgataacaaaaaaaacacacccttgcactatgctgctgcctcagggatgaaagcctgtgtagagcttttagtaaaacatggaggagacttgtttgctgagaatgaaaataaagatactccttgtgattgtgctgaaaagcaacaccacaaagatttggccctcaatctggaatctcaaatggtattctcacgggatcccgaggctgaagaaatagaagctgaatatgctgcattagacaaacgagagccatatgaaggattaaggcctcaggatcttcgtagactaaaagatatgcttattgtggaaactgcagacatgcttcaggctcctctctttactgctgaagctttacttcgagctcatgactgggacagggagaaattacttgaagcttggatgtccaacccggagaactgctgccaacgatcaggtgttcaaatgccaactccaccaccaagtgggtataatgcctgggacacgctcccatctccaagaactccaaggactacacgctcttctgtcacctccccagatgaaatcagcttatctcctggggatttagacaccagtttgtgtgacatttgtatgtgcagtatctctgtatttgaagaccctgtggatatgccctgtggacatgacttttgtagaggatgttgggagtcgtttttgaatctgaaaattcaagaaggtgaagctcacaacattttttgccctgcatatgattgcttccaacttgtacctgtggatatcatagaaagtgtagtttcaaaggagatggacaaacgatacctacagtttgatattaaggcctttgttgaaaataatcctgccattaaatggtgtcctactccaggctgtgacagagcagtaagactaacgaaacaagggtcaaatacatctggatctgatacactcagcttcccattgctgagagctcctgctgttgattgtggaaaaggacacctcttctgctgggagtgccttggtgaagcacatgagccttgtgactgccaaacatggaagaattggctgcaaaaaataaccgaaatgaaaccagaagaacttgtgggagttagtgaagcctacgaggatgccgccaattgtctctggttattaactaactccaagccttgtgccaactgtaagtctccaatacagaagaatgaaggctgcaatcacatgcagtgtgctaagtgcaagtatgacttttgctggatttgccttgaagagtggaaaaaacatagttcgtccactggaggttattacagatgtactcgctatgaagtcattcaacacgtggaggagcaatccaaggaaatgactgtggaggctgagaaaaaacacaaacgatttcaggaacttgacagatttatgcactattatacaagatttaaaaaccatgagcatagttatcagctagaacaacgccttcttaaaacagccaaagaaaagatggagcaattgagcagagctctcaaagaaactgaaggaggctgtccagataccactttcattgaagatgcagttcatgtgctcttaaaaactcggcgcattctcaagtgttcttatccatatggatttttcttggaacctaaaagcacaaagaaagaaatttttgaactaatgcaaacagacctagaaatggtcactgaagaccttgcccagaaagtcaataggccttaccttcgcacaccccgccacaagatcatcaaagcagcatgccttgtacagcagaagaggcaagaattcctggcatctgtggctcggggagtagctcctgcagactcaccagaagctccaaggcgcagctttgctggtggaacatgggattgggaatatttaggatttgcatcaccagaggaatatgctgaatttcagtatcggaggaggcacagacaacgtcgtcgaggagatgttcacagtctactcagtaatcctccagaccctgatgagccaagtgaaagcactttagatattccagaaggcggcagcagcagccgcaggcctggcacatccgtggtaagttctgcatctatgagtgtgctgcacagctcttccctgcgtgactacacccctgccagtcgctctgaaaaccaggactctcttcaggctctgagttccttggatgaagacgatcccaatatacttcttgcaatacagttatcactgcaagagtctgggctggccctcgatgaagaaactagagacttcctcagtaatgaagcatccttaggtgcgataggcacttctttaccttccaggctggactctgtccccagaaatacagatagccctcgggctgcattgagcagctctgagcttttggaacttggtgacagcctcatgagactaggagcagagaatgacccattttcaactgacaccctgagctcacaccctctcagtgaggcaagaagtgatttctgtccctcatctagtgatcctgactcagctggccaggaccccaacatcaatgacaatcttctcggcaacatcatggcttggtttcatgacatgaaccctcagagtattgccctgattcctccagcaactacagaaatcagtgcagattcccagctcccctgtatcaaagatgggtcagaaggtgtgaaggatgtggaactggtgctgccagaagattcaatgtttgaagatgccagtgtcagtgaaggtagaggaacccagatagaagaaaatcctttggaagaaaatattctggcgggggaagcagcatctcaagctggtgacagtggtaacgaggcagccaacagaggagatggttcagatgtttcaagtcaaacacctcaaacctcaagtgactggcttgaacaagtacatttagtgtgaactgcacacatctgggctctaaatgaattacaggtacagatggtatgctaggtggagtatgcttgatagagactttgattcacttaattccaactcagtgataaaccactgacattagggttgaatacagagaagttcccttgaatggtagcttcattttttattttaacctacggatttcttctactggtgatagctttgtccccctttaacgcctgcgggaacgacggcttaggaaacgg

SEQ ID NO: 13371 - DNA, 764 bp, Homo sapiens
tttaatagttcttaaagtatctatttattgaaaggagagatgtccatgatgttaagtagaaaacgaaagctgactacgttagggcatagatatgttcatatgctggaccatgttcacatgtgtatcaaaacatcacattgtacatctgaaatatatgcaattttaaaagctgaaaaagagtatatattgtgatttctattttttatattaaaagcgtacaagttgtttgtatagagaaaacattctgatggacatatatccagcatggtaacagtggctatcactgggtgtgttttggaggcgatcctttttttcttttgtattattcactagcattttatttctattttgcaatgagcatgtattttataaacagtagaaataaaactattttttaaaagatgccaatgtgagagggtcaggtagatattattggcctcaataggtagactttggagcctgacagatcaacagtgacatgcagcaaagcacataacacagggtggttcctgattgcagggcagagggcgctactttctgcctgacttttatctctcaccagacgtttgtggtcatgtctcctcctgcattatatggaagttaaaggaatgtcagaacctggtctgctaaatggaggattgctatgggctgaattgtatcctgccctttcaaattcatatggtgaagtcctaacctacagtacttcagaatgtggccctatttggagataggggctttatagaggtgcttaagttaagatgagt

SEQ ID NO: 13372 - DNA, 119 bp, Homo sapiens
tttttatttttattttttggttcccctctcagccttatcccattttcgaagtctcataatctggacatcatagaaaaaggatgactttaaaagacagattcataattgcaaaacaatag

SEQ ID NO: 13373 - DNA, 441 bp, Homo sapiens
gagtgaaatctcctgaattttaatgagtttgtttgcatacatgaattcgaacaatacattaaatcttaaaacatggtagctgattttaatggagtaaattacccaacttgaaagttagtgaataggtttttctttccctaataatcaagatgctgcttccatctcaaaaaagtcattaatcatacttttacagtatcaatacatgctgttagtttctttttcatctttaaactgtctcaagagatttaggaaaagaaatgtgcataagtgagcataaagtgtgatttcctccatttaacactttttcttatacaaggatgagggctgggtgcagtggcacatgcctataatccaagcactttgggaggccgaggcaggaggcttgcttgagctcaggagttagagaccagcctaggcagcatagggagacctcatctctac

SEQ ID NO: 13374 - DNA, 683 bp, Homo sapiens
ttgatccagtgcttcttagtgtgtgtgtgtgcacacgtggcatctattccagtgcttcttactgtgtgtgtgtgtgcacacgtggcatttaatccagtgtttcttagtgtgtgtgtgtgtgtgtgtgtgcacaagtggcatttaatccagtgcctcctagtgtgtgtgtgtgtgtgtgcgcacaagtggcatttaatccagtgcttcctagtgtgtgtgtgtgtgtgtgagttaatttagtatttatagttgaaccgggcctgggctgtattgctgcttaagttagattcaagacctcacaaatatcaaattaattgaaggtaggattataaccttcccacttgtagtggcttaggatatgaatgcctggaaggtgtgtctattttcctgccctgccattggacttcagcaggctctgtgtgtgtgctgagccttgtgggcgagagcctttcagttccctcatccctttccaaccaagatggacctcttcttggtcctgggtgaggcctagagtgccagtgggaatcataatatttgcctcatgtgattataattcactggtcaattagacaacatataaaaacacctcaaccatctcagtcacgtattaagtgatagctgttattacatctgtggtgattttttaaaactttttgttttgaaataatttcagacatacagaa

SEQ ID NO: 13375 - DNA, 419 bp, Homo sapiens
gacttctgcagagactgaatcatctttatgtcctctatggtagttggcacttagtagatattaaataaaaaacaggctgggcaagatggctcatgcctgtaatcccagtaatttgggaggctgaagcaggtggatcacttgagctcaggagttcaagaccagcctgggcaacatggtaaaatcctatctctacaaaaactataaaaagtagcgggatgtggtggcatgtgcccatagacccagctacttggaaggctgaagtgggaggattgcttgagcccggggggtggaagttggactgagccaaggtccagctccagcctgggccacagagggagaccctgtctcaaaacaaacaaacaaacaaatctctttaactcccaaaatggaaagttctccaagatatatgttaagtgatt

SEQ ID NO: 13376 - DNA, 392 bp, Homo sapiens
tcctactcactagtttatttatgcatgccttaatatagccagcatttagtgagtggctaatttgccaaccaaagatgactaagacatagttgttctcaagtagttcacacattgatgaaggggcaaactggcctgaaacaagaagcaataatatttatagagtaaacatagttgtatgcataagttttagagaagcacaatggaaagacagcctaatgcttggttctggactacagagcggtgattctagttaggcaatctgagatcttgaagacatttgttgaagaagatgtgaaacaagttttttttattgttgttaatttttggtgttcctatgcccaaagcttttgagacagtgaaattgattattttggtggttccagaaggcaccc

SEQ ID NO: 13377 - DNA, 710 bp, Homo sapiens
tgagttctaaccatttttttgtgtgtgtataatgccattctcttcctctgtgaagtgcctgttcggggtgttgctacgtttttgttttgttgtgttttctgttgtagtgtttacatttttcttgtcgattcctaagaggactttagggtactgagtcacccatggtcatgtgttgcagagaagtgtcacagagtgaaaactgtcttttccttgatactacctttagattcatatttgggaagaccttcgctaatcatgactacataagtattcacttttactttcttaagacctttttgttttcatttctttttatagtaatgtctaagccatctggaatttatgtttgttgattatgcaagaaagggatcgaagtgctttttctgagtcattatccacatgccgaaacatttattgaatagccctttccttattgatctgaaaacaccttcttataaaaccttgcattggtttttggacttgctgtgctttcaggagtcagaagaacattcttttgattattgtagctttacattaataatacattttggccgggtgcggtggctcacgtatgtaatcctagcattttgggagactgaggcaggcggaacacctgaggtcaggggttcaagaccagactggccaacatggcaaaaccccgtctctacaaaaaaaaaaaaaaaaaaaaattagctgggcatggtggtgcc

SEQ ID NO: 13378 - DNA, 408 bp, Homo sapiens
tcttaccggaggcaaattctgtgtggttgccggctttcatagcagcttcagaggcaggcccatgagagacgagcgaattttcagggtattgagtgccttgctacattcacactgtatgtgccgttcaagattactattgaagggaaaatcacaaggtattggtttttaaggagggtattcgtatttaaggctatttgctgtaggaattaccttctacagagtttgaactctgttctgaaaagtctgagagaaatagaaacagttcataggaaattttgaagtttggctagcctgtaaaccacaggcttaacagtgctctaaagtcagttctgagactttgtaactcttgatacataattatgaatgcatttttgctttgttgattgttccaataaacagaatcagtgg

SEQ ID NO: 13379 - DNA, 504 bp, Homo sapiens
aagtttttccccagagttgtccatactgttttacattcctaccagcaatgtccgaataatctggtttcttcatacccttgctagccattggatgttgtcatttttttattttagccatttttatatgtgtgtagtaatacctcattgtggttttaatttgtatttatctaatggctgttgatggtgaacatttttttcatgtgcttatttgtaggagaggctttttaaaaattataaatttcaagcctttttttctgattatgaaaaaatactgtatatatcataaaaatgtacgcaaggaaaaaataaagattgctatgattctgttaccttcaggtaatcactgttaaatttggtgcattttatcctaacctgtaaagttatgttatttttaaaaacaaaattgagattataatgtttatattacttgtaaattttttccatcttaatatgttagccttttcagtgccattaaatttggccatatgtaactgaagcttaaga

SEQ ID NO: 13380 - DNA, 460 bp, Homo sapiens
aataactgaaagagtgtatttggattgcttgtaacacaaaggataaatatttgagggtatagataccccattcttcatgatgtgattattacacaccacatacctgtatcagaacatctcatgtacccgtaaatatatacatttattatatacccacaaaaagtaaaaaaaaaattttaagagctgctctcttaacaaatttcaagtaagcaatatggtattgttaaccatagttaccgtgccaaatatgagatgcccagaacttattcatcttatcaccgaaagtctgtaccctttgagcaacatttcctcctagcccctggcaaccattctaattcgactctcttttcctctgagttcaacattttcagattccacagataagtgagatcacacagcatttgtctttctctgtctgaattagttcacttagctaattctactctttttgtatgagttc

SEQ ID NO: 13381 - DNA, 432 bp, Homo sapiens
ccactgcactccagcctgggtgacggagtgaaactcttgtctcaaaaaaaaaaaaaagtttctggttagatttttcctctaggcgcaatctgaggagaaaggaggaaagcttggagaggaacacagctatgaaatgcatccatctgcccctccttcgtcatcaggcaatggcacaatctgagccaggaatgaccctctgtcttccaaggcctgaggtgcagagaagagcaaccaagcccacataatcttccagggttccaaccccagtcctgggtataagaagcaagctgttgccttatatgtgttaaaaagaagagaggggctgggtgcagtggcttacgcctgtaatcccaacactttgggaggctgaggcaggaggatcacttgaggccaggagttcaagactagactacaaagtgagaccctgtctct

SEQ ID NO: 13382 - DNA, 2126 bp, Homo sapiens
cactggggatttaaagagctgccacttccttaggcctccagagggcactgggaagtcacagctgctgagggaccactctgctcccccgcctaagccatgcacctctgtgggggcaatgggctgctgacccagacagaccccaaggagcaacaaaggcagctgaagaagcagaagaaccgggcagccgcccagcgaagccggcagaagcacacagacaaggcagacgccctgcaccagcagcacgagtctctggaaaaagacaacctcgccctgcggaaggagatccagtccctgcaggccgagctggcgtggtggagccggaccctgcacgtgcatgagcgcctgtgccccatggattgtgcctcctgctcagctccagggctcctgggctgctgggaccaggctgaggggctcctgggccctggcccacagggacaacatggctgccgggagcagctggagctgttccagaccccgggttcctgttacccagctcagccgctctctccaggtccacagcctcatgattctcccagcctcctccagtgccccctgccctcactgtcccttggccccgctgtggttgctgaacctcctgtccagctgtcccccagccctctcctgtttgcctcgcacactggttccagcctgcaggggtcttcctctaagctcagtgccctccagcccagcctcacggcccaaactgcccctccacagcccctcgagctggagcatcccaccagagggaagctggggtcctctcccgacaacccttcctctgccctggggcttgcacgtctgcagagcagggagcacaaacctgctctctcagcagccacttggcaagggctggttgtggatcccagccctcaccctctcctggcctttcctctgctctcctctgctcaagtccacttctaacctggtcttcggagctgggttggccccttctttgggctcaggaagcagccttagcacacgggcctctcctccctcactactgggtgctgccctgcgtggctgaccagctggcccaggatttcacagtcgaaaaggaagccaccactgatgcctcccactgtgacaggccctgtcaccaccaatatcttatttcaacctcacagttgacctgagaaatcgagattatcactccactttttcagacaaggaaactgaggctcagggaagccaagtgacaagtccaaggtcacgaagactttcttggagcccgaaacaccaccctctgctcctccttctcctgtcctggcccaggcatcctaggggctgaaatcctggaaaccgtgggctggtgtgagaaggtttgcatgctcagagcagagaagggctctccccactgcttcgtgattccagggccagagccatgcagtcccagaaaccccaacctagctggggcaggtccagagtccaagccctggtgggtagaggccaagcagaagccctgaagtggactcttgcttcccctagtagtgttttcagtgccaagaagctgaaactgtgagctggagttggggagaggtctggaagaggaccatctgggatttctacagcctgggtacccatagccacaccaaggcttctgggagattctgcagggtcagctttccaggctgttcccaaatagctccctgcctccccactgcccctaaagccacagcagaagagccattcatctcataaacaaaaaggaagaggaaagaatgaggaaggaccctgtgcaaggttatttgcaggcagggatgggcttgtacctgacagcacccacccctgtgtggcccccaggccctcatcaccctcagacccctcctaagcagttccctcattgctctttggactaggctgacagcaggaagagcagggcccatgaccgggtggaagttcagttttggtgtctgcttcaagagggggttttacactctgattccaggacaagcactctgaggcgggtgggggagagaaaccctggctcttcacccaggtttcacacacatgtaaatgaaacactatgttagtatctaacacactcctggatacagaacacaagtcttggcacatatgtgatggaaataaagtgttttgcaatcttttctgctttgcctagttactta

SEQ ID NO: 13383 - DNA, 897 bp, Homo sapiens
cactggggatttaaagagctgccacttccttaggcctccagagggcactgggaagtcacagctgctgagggaccactctgctcccccgcctaagccatgcacctctgtgggggcaatgggctgctgacccagacagaccccaaggagcaacaaaggcagctgaagaagcagaagaaccgggcagccgcccagcgaagccggcagaagcacacagacaaggcagacgccctgcaccagcagcacgagtctctggaaaaagacaacctcgccctgcggaaggagatccagtccctgcaggccgagctggcgtggtggagccggaccctgcacgtgcatgagcgcctgtgccccatggattgtgcctcctgctcagctccagggctcctgggctgctgggaccaggctgaggggctcctgggccctggcccacagggacaacatggctgccgggagcagctggagctgttccagaccccgggttcctgttacccagctcagccgctctctccaggtccacagcctcatgattctcccttgtacctgacagcacccacccctgtgtggcccccaggccctcatcaccctcagacccctcctaagcagttccctcattgctctttggactaggctgacagcaggaagagcagggcccatgaccgggtggaagttcagttttggtgtctgcttcaagagggggttttacactctgattccaggacaagcactctgaggcgggtgggggagagaaaccctggctcttcacccaggtttcacacacatgtaaatgaaacactatgttagtatctaacacactcctggatacagaacacaagtcttggcacatatgtgatggaaataaagtgttttgcaatcttttctgctttgcctagttactta

SEQ ID NO: 13384 - DNA, 1953 bp, Homo sapiens
gaggagaccggaggtctgagctgcagccactacacaggcctggaattctaccacagggaatttgcagcacgagtctctggaaaaagacaacctcgccctgcggaaggagatccagtccctgcaggccgagctggcgtggtggagccggaccctgcacgtgcatgagcgcctgtgccccatggattgtgcctcctgctcagctccagggctcctgggctgctgggaccaggctgaggggctcctgggccctggcccacagggacaacatggctgccgggagcagctggagctgttccagaccccgggttcctgttacccagctcagccgctctctccaggtccacagcctcatgattctcccagcctcctccagtgccccctgccctcactgtcccttggccccgctgtggttgctgaacctcctgtccagctgtcccccagccctctcctgtttgcctcgcacactggttccagcctgcaggggtcttcctctaagctcagtgccctccagcccagcctcacggcccaaactgcccctccacagcccctcgagctggagcatcccaccagagggaagctggggtcctctcccgacaacccttcctctgccctggggcttgcacgtctgcagagcagggagcacaaacctgctctctcagcagccacttggcaagggctggttgtggatcccagccctcaccctctcctggcctttcctctgctctcctctgctcaagtccacttctaacctggtcttcggagctgggttggccccttctttgggctcaggaagcagccttagcacacgggcctctcctccctcactactgggtgctgccctgcgtggctgaccagctggcccaggatttcacagtcgaaaaggaagccaccactgatgcctcccactgtgacaggccctgtcaccaccaatatcttatttcaacctcacagttgacctgagaaatcgagattatcactccactttttcagacaaggaaactgaggctcagggaagccaagtgacaagtccaaggtcacgaagactttcttggagcccgaaacaccaccctctgctcctccttctcctgtcctggcccaggcatcctaggggctgaaatcctggaaaccgtgggctggtgtgagaaggtttgcatgctcagagcagagaagggctctccccactgcttcgtgattccagggccagagccatgcagtcccagaaaccccaacctagctggggcaggtccagagtccaagccctggtgggtagaggccaagcagaagccctgaagtggactcttgcttcccctagtagtgttttcagtgccaagaagctgaaactgtgagctggagttggggagaggtctggaagaggaccatctgggatttctacagcctgggtacccatagccacaccaaggcttctgggagattctgcagggtcagctttccaggctgttcccaaatagctccctgcctccccactgcccctaaagccacagcagaagagccattcatctcataaacaaaaaggaagaggaaagaatgaggaaggaccctgtgcaaggttatttgcaggcagggatgggcttgtacctgacagcacccacccctgtgtggcccccaggccctcatcaccctcagacccctcctaagcagttccctcattgctctttggactaggctgacagcaggaagagcagggcccatgaccgggtggaagttcagttttggtgtctgcttcaagagggggttttacactctgattccaggacaagcactctgaggcgggtgggggagagaaaccctggctcttcacccaggtttcacacacatgtaaatgaaacactatgttagtatctaacacactcctggatacagaacacaagtcttggcacatatgtgatggaaataaagtgttttgcaatcttttctgctttgcctagttactta

SEQ ID NO: 13385 - DNA, 2171 bp, Homo sapiens
cactggggatttaaagagctgccacttccttaggcctccagagggcactgggaagtcacagctgctgagggaccactctgctcccccgcctaagccatgcacctctgtgggggcaatgggctgctgacccagacagaccccaaggagcaacaaaggcagctgaagaagcagaagaaccgggcagccgcccagcgaagccggcagaagcacacagacaaggcagacgccctgcaccagcagcacgagtctctggaaaaagacaacctcgccctgcggaaggagatccagtccctgcaggccgagctggcgtggtggagccggaccctgcacgtgcatgagcgcctgtgccccatggattgtgcctcctgctcagctccagggctcctgggctgctgggaccaggctgaggggctcctgggccctggcccacagggacaacatggctgccgggagcagctggagctgttccagaccccgggttcctgttacccagctcagccgctctctccaggtccacagcctcatgattctcccagcctcctccagtgccccctgccctcactgtcccttggccccgctgtggttgctgaacctcctgtccagctgtcccccagccctctcctgtttgcctcgcacactggttccagcctgcaggggtcttcctctaagctcagtgccctccagcccagcctcacggcccaaactgcccctccacagcccctcgagctggagcatcccaccagagggaagctggggtcctctcccgacaacccttcctctgccctggggcttgcacgtctgcagagcagggagcacaaacctgctctctcagcagccacttggcaagggctggttgtggatcccagccctcaccctctcctggcctttcctctgctctcctctgctcaagtccacttctaacctggtcttcggagctgggttggccccttctttgggctcaggaagcagccttagcacacgggcctctcctccctcactactgggtgctgccctgcgtggctgaccagctggcccaggatttcacagtcgaaaaggaagccaccactgatgcctcccactgtgacaggccctgtcaccaccaatatcttatttcaacctcacagttgacctgagaaatcgagattatcactccactttttcagacaaggaaactgaggctcagggaagccaagtgacaagtccaaggtcacgaagactttcttggagcccgaaacaccaccctctgctcctccttctcctgtcctggcccaggcatcctaggggctgaaatcctggaaaccgtgggctggtgtgagaaggtttgcatgctcagagcagagaagggctctccccactgcttcgtgattccagggccagagccatgcagtcccagaaaccccaacctagctggggcaggtccagagtccaagccctggtgggtagaggccaagcagaagccctgaagtggactcttgcttcccctagtagtgttttcagtgccaagaagctgaaactgtgagctggagttggggagaggtctggaagaggaccatctgggatttctacagcctgggtacccatagccacaccaaggcttctgggagattctgcagggtcagctttccaggctgttcccaaatagctccctgcctccccactgcccctaaagccacagcagaagagccattcatctcataaacaaaaaggaagaggaaagaatgaggaaggaccctgtgcaaggttatttgcaggcagggatgggcttgtacctgacagcacccacccctgtgtggcccccaggccctcatcaccctcagacccctcctaagcagttccctcattgctctttggactaggctgacagcaggaagagcagggcccatgaccgggtggaagttcagttttggtgtctgcttcaagagggggttttacactctgattccaggacaagcactctgaggcgggtgggggagagaaaccctggctcttcacccaggtttcacacacatgtaaatgaaacactatgttagtatctaacacactcctggatacagaacacaagtcttggcacatatgtgatggaaataaagtgttttgcaatcttttctgctttgcctagttacttactgattgccaggacgagcacacaggtgtaatcggggcgagctcga

SEQ ID NO: 13386 - DNA, 426 bp, Homo sapiens
cacaaagacacacccgcggggatgaggaggttgtcagtgattgaagggacacactactacttgattttatggaagtgggcgaaaacaatcaaagggaagtacattccctgccctggagtagtgaagtgtaggctgggagctcttcgccgccaaccctggctttgcctcaggcaccgaactttccaataccaagatattaacagatggtggtgagcacatggagggctgctacttacataatctagccactccgcccggctgcccagagcccggcgaggaaccggccaggccgcgcgcgccttccgaggtgtgcttcctgacataacttgcctttctccaaccccacccatcgttttgagggttagcatttggagaggccgtgatttaaaaaaaccaaacaaaaacaaaaacacccaaaacattgat

SEQ ID NO: 13387 - DNA, 709 bp, Homo sapiens
aagtagacagtttctaacagaaccatttacagtgcaacataaaatacatttacgagcagcctccccacagtcctgagggaaagtaccccagaccctagaattctttatcattcacagtgtcatcaagagggaagactctgtcacagcttcccaccctgagggccttgcgtgagccacaggtgctgagagatttttcctctaggcccccggctggccgtgtgggggccaggatggccaggagttctgccccatcacttctgtgtgcagttctgttccatcacttctgtgtacagaaagccattcctgtctaccccagagtcccattcacatatgttcactgcttgtcatgatacggagataggtgcactgaagtgaatacaaatattttcagacatctataagaacagaaaccttgcgaccctctgagtaattaaaggatgtatcccaatacgaaggcagatgaacccagggatccagggtgaaagcaacgtctgccagcaacatgacatgttttgctgaagttaaggtgtcactttttaaaaaaattaaaaatctaaaatttcagatgtgtgtgaaggagaacagagagaaggggagatagactttaactttagtctttgtaataaaaccttaagttacgtactgagaattaaaatgcaaccaacggtagaatagagatagatgataagactttcaaaccagcagagag

SEQ ID NO: 13388 - DNA, 286 bp, Homo sapiens
cccctaagaagaaaaagtcaaacaaaccttttatggtttcagttcacagacattactgccaaccttgttttaatcaactggttgctcttgcttactggacatctatggtatttcttcaatgcaaaacaacgagcaagctcatctgccaagaactccccccaggaggccagtggaaaagaagccatacttgtaagaattctaaaggaaacaagaactttgtaagggtaaacggagttacttccgaatttccctaagggaatccttattgtgaccgcttcagctgcct

SEQ ID NO: 13389 - DNA, 368 bp, Homo sapiens
ctactactactaaattcgcggccgcgtcgatccacagtcagggcacggcgcccctcaagaactccagagtcacctgtctcatcggctcccagcaagtgcctctttgtctatgatgtcccccttctctgaggcctggacccacccatctttgtccctggggcctgctcccagccactgaggcccgctctggccaggggagaaggagctgccgtgcgtcttccctgtgccccgtctccctgcttggttctcccctcccttccctggccggctgccatggccaggagctaagtgcctttttgtgtgcaaccacttaccctttctctgaaaaacctgttctcaggaaggatctgataaactcatttactctc

SEQ ID NO: 13390 - DNA, 1121 bp, Homo sapiens
cacacgccaacacaagaagaagagcgacggggagacaaaccatggcatgatgagccggggttaatggacgaggcagggagaaggagctgccgtgcgtcttccctgtgccccgtctccctgcttggttctcccctcccttccctggccggctgccatggccaggagctaagtgcctttttgtgtgcaaccacttaccctttctctgaaaaacctgttctcaggaaggatctgataaactcatttactctcaggtgtaagagactgatgagaccttagaagcgaattcctctctggaggccttgctttctagcagaggtcacctgaagtgtgtgaggaggatcatcattttcctcatcccccctcttctcacattaaggtggtggcttgccactcagcagtcctagcttggtgactgggaactgccacatacagggccaggcctaccctccttccccacaagccccctccaacccccacccccatgctctggacctcatggctcctatgagcttggagcatggtgaaccatcagagaatctagaaccaaccaagctaggaacatcagcctggtgccctgttaaccccttaaagctgtggtttacaacttttcaaaaatttaaatcattagaactctccatcttgattgactgccctagttttacccagaatcagctggggatgtggccaggtgcagagccccctgcccattccccctttgcatgcctggggaagctccaggtctttttggaacacgacccttaacacggctcctaagggggtatcaccagtccagttccccaagtgtgtgggggatgagccctagccctactctgtgactctgggtgagggctcctcagatctgtgccccaggggacaggccctcaaagtgccatccgtgctcaggtcccagtgccccaggctgacccacctctggtcagtgagtctcctgtgcctgagtgagggatatcgggacctgggggccctgccgagcacctcccacccactgctagtgctggggctttgtgagtgttccaacttcatagccgagagttggaggacaaggctggggcagggcgaggaacggattgagtcctgcctaagcctcgggacatctaaacagc

SEQ ID NO: 13391 - DNA, 471 bp, Homo sapiens
gagcgtggaagaagcagaggtgcccaagccactgcccccagcctccaaagatgaggacgaggacatccagagcatcctcagaacacggcaggagcggaggcagaggcggcaggtggtggaggctgcacaggcccccatccaggagaggctggaggcagaggaggggaggaacagcttgagccctgtgcaggccacacagaaacccctagtctccaagaaggaactggaaatcccacctcgccggagactgagtcgggaacagcggggcccctgggccctggaggaggagagcttggtgggcagggagccagaagagaggaagaaaggggttccagaaaagtccccagtcttggagaagtcctccatgccaaagaagatggccaggagctaagtgcctttttgtgtgcaaccacttaccctttctctgaaaaacctgttctcaggaaggatctgataaactcatttactctc

SEQ ID NO: 13392 - DNA, 2034 bp, Homo sapiens
gagcgtggaagaagcagaggtgcccaagccactgcccccagcctccaaagatgaggacgaggacatccagagcatcctcagaacacggcaggagcggaggcagaggcggcaggtggtggaggctgcacaggcccccatccaggagaggctggaggcagaggaggggaggaacagcttgagccctgtgcaggccacacagaaacccctagtctccaagaaggaactggaaatcccacctcgccggagactgagtcgggaacagcggggcccctgggccctggaggaggagagcttggtgggcagggagccagaagagaggaagaaaggggttccagaaaagtccccagtcttggagaagtcctccatgccaaagaagacggcacctgaaaagagcctggtctccgataaaacctccatctctgagaaggtgctggcctcagagaagacatctctatcagagaagatagcagtgtcagagaaaagaaacagctcagagaagaagtctgttctagaaaaaaccagtgtctctgagaagtcgctggccccagggatggcactgggctcaggaaggaggctggtgtctgagaaagcttccatctttgagaaggcactggcctcagagaagagcccaactgcagatgctaagccggccccaaagagggccacagcctcagagcagcccctggcgcaggagccgccagcctctgggggaagcccagccaccaccaaggagcagagaggaagggccctccctgggaagaacctgccctctttggcaaagcagggggcttcagaccctccgactgtggcctcccgcctcccacccgtcacactccaggtgaaaatccccagcaaggaggaagaggcagatatgtcctcacccacacagcgaacctacagcagctccctcaaacgctccagccccaggaccatctcctttcggatgaaacccaagaaagaaaactcggaaacaaccctaactcgcagtgccagcatgaagctcccagacaacacagtgaagttgggagagaagctggagagataccacacggccatacggagatcagaatctgtcaagtctcggggtctgccttgcactgagttattcgtggctcctgtgggtgtagccagcaagcgccacctctttgagaaggaactggcgggccagagccgagcagaaccagcctccagccggaaggagaacttgaggctctcaggggttgtgacatcaaggctcaacctgtggatcagcaggacccaggaatctggagatcaggacccccaggaggcacagaaagcatcatctgcaaccgagaggactcagtggggacagaaatctgactcctcgctggacgctgaggtgtgacaagccccgccaagacagacctgcaagtcttcgtctcaagggacctccctcatgccaggcccctgcctctcacagcagcaccctttcctctcattgtccctgttccctttttgcctgtggatctgtttggccaggtccctggggtcaggaatatttgcaagactcagccagctccttcccagcccagcctcttggggctgggactttctcaccctgcggcaggcacaacagatgctgggacccagtctctgcccaggtcacagcacaagtgcacatcagcactatggggcctatgtcctgcccagagacctctgctccttcctgctcacatccacagtcagggcacggcgcccctcaagaactccagagtcacctgtctcatcggctcccagcaagtgcctctttgtctatgatgtcccccttctctgaggcctggacccacccatctttgtccctggggcctgctcccagccactgaggcccgctctggccaggggagaaggagctgccgtgcgtcttccctgtgccccgtctccctgcttggttctcccctcccttccctggccggctgccatggccaggagctaagtgcctttttgtgtgcaaccacttaccctttctctgaaaaacctgttctcaggaaggatctgataaactcatttactctc

SEQ ID NO: 13393 - DNA, 2064 bp, Homo sapiens
gagcgtggaagaagcagaggtgcccaagccactgcccccagcctccaaagatgaggacgaggacatccagagcatcctcagaacacggcaggagcggaggcagaggcggcaggtggtggaggctgcacaggcccccatccaggagaggctggaggcagaggaggggaggaacagcttgagccctgtgcaggccacacagaaacccctagtctccaagaaggaactggaaatcccacctcgccggagactgagtcgggaacagcggggcccctgggccctggaggaggagagcttggtgggcagggagccagaagagaggaagaaaggggttccagaaaagtccccagtcttggagaagtcctccatgccaaagaagacggcacctgaaaagagcctggtctccgataaaacctccatctctgagaaggtgctggcctcagagaagacatctctatcagagaagatagcagtgtcagagaaaagaaacagctcagagaagaagtctgttctagaaaaaaccagtgtctctgagaagtcgctggccccagggatggcactgggctcaggaaggaggctggtgtctgagaaagcttccatctttgagaaggcactggcctcagagaagagcccaactgcagatgctaagccggccccaaagagggccacagcctcagagcagcccctggcgcaggagccgccagcctctgggggaagcccagccaccaccaaggagcagagaggaagggccctccctgggaagaacctgccctctttggcaaagcagggggcttcagaccctccgactgtggcctcccgcctcccacccgtcacactccaggtgaaaatccccagcaaggaggaagaggcagatatgtcctcacccacacagcgaacctacagcagctccctcaaacgctccagccccaggaccatctcctttcggatgaaacccaagaaagaaaactcggaaacaaccctaactcgcagtgccagcatgaagctcccagacaacacagtgaagttgggagagaagctggagagataccacacggccatacggagatcagaatctgtcaagtctcggggtctgccttgcactgagttattcgtggctcctgtgggtgtagccagcaagcgccacctctttgagaaggaactggcgggccagagccgagcagaaccagcctccagccggaaggagaacttgaggctctcaggggttgtgacatcaaggctcaacctgtggatcagcaggacccaggaatctggagatcaggacccccaggaggcacagaaagcatcatctgcaaccgagaggactcagtggggacagaaatctgactcctcgctggacgctgaggtgtgacaagccccgccaagacagacctgcaagtcttcgtctcaagggacctccctcatgccaggcccctgcctctcacagcagcaccctttcctctcattgtccctgttccctttttgcctgtggatctgtttggccaggtccctggggtcaggaatatttgcaagactcagccagctccttcccagcccagcctcttggggctgggactttctcaccctgcggcaggcacaacagatgctgggacccagtctctgcccaggtcacagcacaagtgcacatcagcactatggggcctatgtcctgcccagagacctctgctccttcctgctcacatccacagtcagggcacggcgcccctcaagaactccagagtcacctgtctcatcggctcccagcaagtgcctctttgtctatgatgtcccccttctctgaggcctggacccacccatctttgtccctggggcctgctcccagccactgaggcccgctctggccaggggagaaggagctgccgtgcgtcttccctgtgccccgtctccctgcttggttctcccctcccttccctggccggctgccatggccaggagctaagtgcctttttgtgtgcaaccacttaccctttctctgaaaaacctgttctcaggaaggatctgataaactcatttactctccaaaaaaaaaaacgggggtttttcgggggg

SEQ ID NO: 13394 - DNA, 2906 bp, Homo sapiens
gagcgtggaagaagcagaggtgcccaagccactgcccccagcctccaaagatgaggacgaggacatccagagcatcctcagaacacggcaggagcggaggcagaggcggcaggtggtggaggctgcacaggcccccatccaggagaggctggaggcagaggaggggaggaacagcttgagccctgtgcaggccacacagaaacccctagtctccaagaaggaactggaaatcccacctcgccggagactgagtcgggaacagcggggcccctgggccctggaggaggagagcttggtgggcagggagccagaagagaggaagaaaggggttccagaaaagtccccagtcttggagaagtcctccatgccaaagaagacggcacctgaaaagagcctggtctccgataaaacctccatctctgagaaggtgctggcctcagagaagacatctctatcagagaagatagcagtgtcagagaaaagaaacagctcagagaagaagtctgttctagaaaaaaccagtgtctctgagaagtcgctggccccagggatggcactgggctcaggaaggaggctggtgtctgagaaagcttccatctttgagaaggcactggcctcagagaagagcccaactgcagatgctaagccggccccaaagagggccacagcctcagagcagcccctggcgcaggagccgccagcctctgggggaagcccagccaccaccaaggagcagagaggaagggccctccctgggaagaacctgccctctttggcaaagcagggggcttcagaccctccgactgtggcctcccgcctcccacccgtcacactccaggtgaaaatccccagcaaggaggaagaggcagatatgtcctcacccacacagcgaacctacagcagctccctcaaacgctccagccccaggaccatctcctttcggatgaaacccaagaaagaaaactcggaaacaaccctaactcgcagtgccagcatgaagctcccagacaacacagtgaagttgggagagaagctggagagataccacacggccatacggagatcagaatctgtcaagtctcggggtctgccttgcactgagttattcgtggctcctgtgggtgtagccagcaagcgccacctctttgagaaggaactggcgggccagagccgagcagaaccagcctccagccggaaggagaacttgaggctctcaggggttgtgacatcaaggctcaacctgtggatcagcaggacccaggaatctggagatcaggacccccaggaggcacagaaagcatcatctgcaaccgagaggactcagtggggacagaaatctgactcctcgctggacgctgaggtgtgacaagccccgccaagacagacctgcaagtcttcgtctcaagggacctccctcatgccaggcccctgcctctcacagcagcaccctttcctctcattgtccctgttccctttttgcctgtggatctgtttggccaggtccctggggtcaggaatatttgcaagactcagccagctccttcccagcccagcctcttggggctgggactttctcaccctgcggcaggcacaacagatgctgggacccagtctctgcccaggtcacagcacaagtgcacatcagcactatggggcctatgtcctgcccagagacctctgctccttcctgctcacatccacagtcagggcacggcgcccctcaagaactccagagtcacctgtctcatcggctcccagcaagtgcctctttgtctatgatgtcccccttctctgaggcctggacccacccatctttgtccctggggcctgctcccagccactgaggcccgctctggccaggggagaaggagctgccgtgcgtcttccctgtgccccgtctccctgcttggttctcccctcccttccctggccggctgccatggccaggagctaagtgcctttttgtgtgcaaccacttaccctttctctgaaaaacctgttctcaggaaggatctgataaactcatttactctcaggtgtaagagactgatgagaccttagaagcgaattcctctctggaggccttgctttctagcagaggtcacctgaagtgtgtgaggaggatcatcattttcctcatcccccctcttctcacattaaggtggtggcttgccactcagcagtcctagcttggtgactgggaactgccacatacagggccaggcctaccctccttccccacaagccccctccaacccccacccccatgctctggacctcatggctcctatgagcttggagcatggtgaaccatcagagaatctagaaccaaccaagctaggaacatcagcctggtgccctgttaaccccttaaagctgtggtttacaacttttcaaaaatttaaatcattagaactctccatcttgattgactgccctagttttacccagaatcagctggggatgtggccaggtgcagagccccctgcccattccccctttgcatgcctggggaagctccaggtctttttggaacacgacccttaacacggctcctaagggggtatcaccagtccagttccccaagtgtgtgggggatgagccctagccctactctgtgactctgggtgagggctcctcagatctgtgccccaggggacaggccctcaaagtgccatccgtgctcaggtcccagtgccccaggctgacccacctctggtcagtgagtctcctgtgcctgagtgagggatatcgggacctgggggccctgccgagcacctcccacccactgctagtgctggggctttgtgagtgttccaacttcatagccgagagttggaggacaaggctggggcagggcgaggaacggattgagtcctgcctaagcctcgggacatctaaacagc

SEQ ID NO: 13395 - DNA, 2100 bp, Homo sapiens
gagcgtggaagaagcagaggtgcccaagccactgcccccagcctccaaagatgaggacgaggacatccagagcatcctcagaacacggcaggagcggaggcagaggcggcaggtggtggaggctgcacaggcccccatccaggagaggctggaggcagaggaggggaggaacagcttgagccctgtgcaggccacacagaaacccctagtctccaagaaggaactggaaatcccacctcgccggagactgagtcgggaacagcggggcccctgggccctggaggaggagagcttggtgggcagggagccagaagagaggaagaaaggggttccagaaaagtccccagtcttggagaagtcctccatgccaaagaagacggcacctgaaaagagcctggtctccgataaaacctccatctctgagaaggtgctggcctcagagaagacatctctatcagagaagatagcagtgtcagagaaaagaaacagctcagagaagaagtctgttctagaaaaaaccagtgtctctgagaagtcgctggccccagggatggcactgggctcaggaaggaggctggtgtctgagaaagcttccatctttgagaaggcactggcctcagagaagagcccaactgcagatgctaagccggccccaaagagggccacagcctcagagcagcccctggcgcaggagccgccagcctctgggggaagcccagccaccaccaaggagcagagaggaagggccctccctgggaagaacctgccctctttggcaaagcagggggcttcagaccctccgactgtggcctcccgcctcccacccgtcacactccaggtgaaaatccccagcaaggaggaagaggcagatatgtcctcacccacacagcgaacctacagcagctccctcaaacgctccagccccaggaccatctcctttcggatgaaacccaagaaagaaaactcggaaacaaccctaactcgcagtgccagcatgaagctcccagacaacacagtgaagttgggagagaagctggagagataccacacggccatacggagatcagaatctgtcaagtctcggggtctgccttgcactgagttattcgtggctcctgtgggtgtagccagcaagcgccacctctttgagaaggaactggcgggccagagccgagcagaaccagcctccagccggaagggcctctgaacatgcctcgctgctgccaagggccctaaaccctgagatggaaagttctctttttaggagaacttgaggctctcaggggttgtgacatcaaggctcaacctgtggatcagcaggacccaggaatctggagatcaggacccccaggaggcacagaaagcatcatctgcaaccgagaggactcagtggggacagaaatctgactcctcgctggacgctgaggtgtgacaagccccgccaagacagacctgcaagtcttcgtctcaagggacctccctcatgccaggcccctgcctctcacagcagcaccctttcctctcattgtccctgttccctttttgcctgtggatctgtttggccaggtccctggggtcaggaatatttgcaagactcagccagctccttcccagcccagcctcttggggctgggactttctcaccctgcggcaggcacaacagatgctgggacccagtctctgcccaggtcacagcacaagtgcacatcagcactatggggcctatgtcctgcccagagacctctgctccttcctgctcacatccacagtcagggcacggcgcccctcaagaactccagagtcacctgtctcatcggctcccagcaagtgcctctttgtctatgatgtcccccttctctgaggcctggacccacccatctttgtccctggggcctgctcccagccactgaggcccgctctggccaggggagaaggagctgccgtgcgtcttccctgtgccccgtctccctgcttggttctcccctcccttccctggccggctgccatggccaggagctaagtgcctttttgtgtgcaaccacttaccctttctctgaaaaacctgttctcaggaaggatctgataaactcatttactctc

SEQ ID NO: 13396 - DNA, 1062 bp, Homo sapiens
ggggcctggcatgagggaggtcccttgagacgaagacttgcaggtctgtcttggcggggcttgtcacacctcagcgtccagcgaggagtcagatttctgtccccactgagtcctctcggttgcagatgagttattcgtggctcctgtgggtgtagccagcaagcgccacctctttgagaaggaactggcgggccagagccgagcagaaccagcctccagccggaaggagaacttgaggctctcaggggttgtgacatcaaggctcaacctgtggatcagcaggacccaggaatctggagatcaggacccccaggaggcacagaaagcatcatctgcaaccgagaggactcagtggggacagaaatctgactcctcgctggacgctgaggtgtgacaagccccgccaagacagacctgcaagtcttcgtctcaagggacctccctcatgccaggcccctgcctctcacagcagcaccctttcctctcattgtccctgttccctttttgcctgtggatctgtttggccaggtccctggggtcaggaatatttgcaagactcagccagctccttcccagcccagcctcttggggctgggactttctcaccctgcggcaggcacaacagatgctgggacccagtctctgcccaggtcacagcacaagtgcacatcagcactatggggcctatgtcctgcccagagacctctgctccttcctgctcacatccacagtcagggcacggcgcccctcaagaactccagagtcacctgtctcatcggctcccagcaagtgcctctttgtctatgatgtcccccttctctgaggcctggacccacccatctttgtccctggggcctgctcccagccactgaggcccgctctggccaggggagaaggagctgccgtgcgtcttccctgtgccccgtctccctgcttggttctcccctcccttccctggccggctgccatggccaggagctaagtgcctttttgtgtgcaaccacttaccctttctctgaaaaacctgttctcaggaaggatctgataaactcatttactctc

SEQ ID NO: 13397 - DNA, 817 bp, Homo sapiens
tacctctcgggtcctgtactctcgggcctgtactctcgggccaggacattggagattaggacccccaggaggcacagaaagcatcatctgcaaccgagaggactcagtggggacagaaatctgactcctcgctggacgctgaggtgtgacaagccccgccaagacagacctgcaagtcttcgtctcaagggacctccctcatgccaggcccctgcctctcacagcagcaccctttcctctcattgtccctgttccctttttgcctgtggatctgtttggccaggtccctggggtcaggaatatttgcaagactcagccagctccttcccagcccagcctcttggggctgggactttctcaccctgcggcaggcacaacagatgctgggacccagtctctgcccaggtcacagcacaagtgcacatcagcactatggggcctatgtcctgcccagagacctctgctccttcctgctcacatccacagtcagggcacggcgcccctcaagaactccagagtcacctgtctcatcggctcccagcaagtgcctctttgtctatgatgtcccccttctctgaggcctggacccacccatctttgtccctggggcctgctcccagccactgaggcccgctctggccaggggagaaggagctgccgtgcgtcttccctgtgccccgtctccctgcttggttctcccctcccttccctggccggctgccatggccaggagctaagtgcctttttgtgtgcaaccacttaccctttctctgaaaaacctgttctcaggaaggatctgataaactcatttactctc

SEQ ID NO: 13398 - DNA, 1730 bp, Homo sapiens
gagcgtggaagaagcagaggtgcccaagccactgcccccagcctccaaagatgaggacgaggacatccagagcatcctcagaacacggcaggagcggaggcagaggcggcaggtggtggaggctgcacaggcccccatccaggagaggctggaggcagaggaggggaggaacagcttgagccctgtgcaggccacacagaaacccctagtctccaagaaggaactggaaatcccacctcgccggagactgagtcgggaacagcggggcccctgggccctggaggaggagagcttggtgggcagggagccagaagagaggaagaaaggggttccagaaaagtccccagtcttggagaagtcctccatgccaaagaagacggcacctgaaaagagcctggtctccgataaaacctccatctctgagaaggtgctggcctcagagaagacatctctatcagagaagatagcagtgtcagagaaaagaaacagctcagagaagaagtctgttctagaaaaaaccagtgtctctgagaagtcgctggccccagggatggcactgggctcaggaaggaggctggtgtctgagaaagcttccatctttgagaaggcactggcctcagagaagagcccaactgcagatgctaagccggccccaaagagggccacagcctcagagcagcccctggcgcaggagccgccagcctctgggggaagcccagccaccaccaaggagcagagaggaagggccctccctgggaagaacctgccctctttggcaaagcagggggcttcagaccctccgactgtggcctcccgcctcccacccgtcacactccaggtgaaaatccccagcaaggaggaagaggcagatatgtcctcacccacacagcgaacctacagcagctccctcaaacgctccagccccaggaccatctcctttcggatgaaacccaagaaagaaaactcggaaacaaccctaactcgcagtgccagcatgaagctcccagacaacacagtgaagttgggagagaagctggagagataccacacggccatacggagatcagaatctgtcaagtctcggggtctgccttgcactgagttattcgtggctcctgtgggtgtagccagcaagcgccacctctttgagaaggaactggcgggccagagccgagcagaaccagcctccagccggaaggagaacttgaggctctcaggggttgtgacatcaaggctcaacctgtggatcagcaggacccaggaatctggagatcaggacccccaggaggcacagaaagcatcatctgcaaccgagaggactcagtggggacagaaatctgactcctcgctggacgctgaggtgtgacaagccccgccaagacagacctgcaagtcttcgtctcaagggacctccctcatgccaggcccctgcctctcacagcagcaccctttcctctcattgtccctgttccctttttgcctgtggatctgtttggccaggtccctggggtcaggaatatttgcaagactcagccagtgaggcccgctctggccaggggagaaggagctgccgtgcgtcttccctgtgccccgtctccctgcttggttctcccctcccttccctggccggctgccatggccaggagctaagtgcctttttgtgtgcaaccacttaccctttctctgaaaaacctgttctcaggaaggatctgataaactcatttactctc

SEQ ID NO: 13399 - DNA, 732 bp, Homo sapiens
cttccccttccatccctgacaccccattgacttgtgctaacagctctttgccccacaggtgtgacaagccccgccaagacagacctgcaagtcttcgtctcaagggacctccctcatgccaggcccctgcctctcacagcagcaccctttcctctcattgtccctgttccctttttgcctgtggatctgtttggccaggtccctggggtcaggaatatttgcaagactcagccagctccttcccagcccagcctcttggggctgggactttctcaccctgcggcaggcacaacagatgctgggacccagtctctgcccaggtcacagcacaagtgcacatcagcactatggggcctatgtcctgcccagagacctctgctccttcctgctcacatccacagtcagggcacggcgcccctcaagaactccagagtcacctgtctcatcggctcccagcaagtgcctctttgtctatgatgtcccccttctctgaggcctggacccacccatctttgtccctggggcctgctcccagccactgaggcccgctctggccaggggagaaggagctgccgtgcgtcttccctgtgccccgtctccctgcttggttctcccctcccttccctggccggctgccatggccaggagctaagtgcctttttgtgtgcaaccacttaccctttctctgaaaaacctgttctcaggaaggatctgataaactcatttactctc

SEQ ID NO: 13400 - DNA, 1566 bp, Homo sapiens
gagcgtggaagaagcagaggtgcccaagccactgcccccagcctccaaagatgaggacgaggacatccagagcatcctcagaacacggcaggagcggaggcagaggcggcaggtggtggaggctgcacaggcccccatccaggagaggctggaggcagaggaggggaggaacagcttgagccctgtgcaggccacacagaaacccctagtctccaagaaggaactggaaatcccacctcgccggagactgagtcgggaacagcggggcccctgggccctggaggaggagagcttggtgggcagggagccagaagagaggaagaaaggggttccagaaaagtccccagtcttggagaagtcctccatgccaaagaagacggcacctgaaaagagcctggtctccgataaaacctccatctctgagaaggtgctggcctcagagaagacatctctatcagagaagatagcagtgtcagagaaaagaaacagctcagagaagaagtctgttctagaaaaaaccagtgtctctgagaagtcgctggccccagggatggcactgggctcaggaaggaggctggtgtctgagaaagcttccatctttgagaaggcactggcctcagagaagagcccaactgcagatgctaagccggccccaaagagggccacagcctcagagcagcccctggcgcaggagccgccagcctctgggggaagcccagccaccaccaaggagcagagaggaagggccctccctgggaagaacctgccctctttggcaaagcagggggcttcagaccctccgactgtggcctcccgcctcccacccgtcacactccaggtgaaaatccccagcaaggaggaagaggcagatatgtcctcacccacacagcgaacctacagcagctccctcaaacgctccagccccaggaccatctcctttcggatgaaacccaagaaagaaaactcggaaacaaccctaactcgcagtgccagcatgaagctcccagacaacacagtgaagttgggagagaagctggagagataccacacggccatacggagatcagaatctgtcaagtctcggggtctgccttgcactgagttattcgtggctcctgtgggtgtagccagcaagcgccacctctttgagaaggaactggcgggccagagccgagcagaaccagcctccagccggaaggagaacttgaggctctcaggggttgtgacatcaaggctcaacctgtggatcagcaggacccaggaatctggagatcaggacccccaggaggcacagaaagcatcatctgcaaccgagaggactcagtggggacagaaatctgactcctcgctggacgctgaggtgtgacaagccccgccaagacagacctgcaagtcttcgtctcaagggacctccctcatgccaggatagaggctgcagtgagctatgacttgggccactgtactgcagcctgggtgacaagactaccccgtggtctttaaaggaaatatatataaagtcatatcctttgtacattgctcgaaccacgtagtatctctcacatcgtt

SEQ ID NO: 13401 - DNA, 1522 bp, Homo sapiens
gagcgtggaagaagcagaggtgcccaagccactgcccccagcctccaaagatgaggacgaggacatccagagcatcctcagaacacggcaggagcggaggcagaggcggcaggtggtggaggctgcacaggcccccatccaggagaggctggaggcagaggaggggaggaacagcttgagccctgtgcaggccacacagaaacccctagtctccaagaaggaactggaaatcccacctcgccggagactgagtcgggaacagcggggcccctgggccctggaggaggagagcttggtgggcagggagccagaagagaggaagaaaggggttccagaaaagtccccagtcttggagaagtcctccatgccaaagaagacggcacctgaaaagagcctggtctccgataaaacctccatctctgagaaggtgctggcctcagagaagacatctctatcagagaagatagcagtgtcagagaaaagaaacagctcagagaagaagtctgttctagaaaaaaccagtgtctctgagaagtcgctggccccagggatggcactgggctcaggaaggaggctggtgtctgagaaagcttccatctttgagaaggcactggcctcagagaagagcccaactgcagatgctaagccggccccaaagagggccacagcctcagagcagcccctggcgcaggagccgccagcctctgggggaagcccagccaccaccaaggagcagagaggaagggccctccctgggaagaacctgccctctttggcaaagcagggggcttcagaccctccgactgtggcctcccgcctcccacccgtcacactccaggtgaaaatccccagcaaggaggaagaggcagatatgtcctcacccacacagcgaacctacagcagctccctcaaacgctccagccccaggaccatctcctttcggatgaaacccaagaaagaaaactcggaaacaaccctaactcgcagtgccagcatgaagctcccagacaacacagtgaagttgggagagaagctggagagataccacacggccatacggagatcagaatctgtcaagtctcggggtctgccttgcactgagttattcgtggctcctgtgggtgtagccagcaagcgccacctctttgagaaggaactggcgggccagagccgagcagaaccagcctccagccggaaggagaacttgaggctctcaggggttgtgacatcaaggctcaacctgtggatcagcaggacccaggaatctggagatcaggacccccaggaggcacagaaagcatcatctgcaaccgagaggactcagtggggacagaaatctgactcctcgctggacgctgaggtgaatggtggggaggagcctggccctacggcggagggccacggtgtactgtgggagaccccatcgtccccgtgtgcacacactaattggcctgcaatcgcgcagtccacccagaacgcccccatccctgctcatgcagattggtctgagccaaccgtgaga

SEQ ID NO: 13402 - DNA, 1217 bp, Homo sapiens
ggacccaatgattggtatgaggtggagggaaggttaatggttgatattgctagggtggcgcttccaattaggcgcatgagtaggcggcctgcagtaatgttagcggttaggcgtacggccagggctattggttgaatgagtaggctgatggtttcgataacaactagtatggggagaaggagctgccgtgcgtcttccctgtgccccgtctccctgcttggttctcccctcccttccctggccggctgccatggccaggagctaagtgcctttttgtgtgcaaccacttaccctttctctgaaaaacctgttctcaggaaggatctgataaactcatttactctcaggtgtaagagactgatgagaccttagaagcgaattcctctctggaggccttgctttctagcagaggtcacctgaagtgtgtgaggaggatcatcattttcctcatcccccctcttctcacattaaggtggtggcttgccactcagcagtcctagcttggtgactgggaactgccacatacagggccaggcctaccctccttccccacaagccccctccaacccccacccccatgctctggacctcatggctcctatgagcttggagcatggtgaaccatcagagaatctagaaccaaccaagctaggaacatcagcctggtgccctgttaaccccttaaagctgtggtttacaacttttcaaaaatttaaatcattagaactctccatcttgattgactgccctagttttacccagaatcagctggggatgtggccaggtgcagagccccctgcccattccccctttgcatgcctggggaagctccaggtctttttggaacacgacccttaacacggctcctaagggggtatcaccagtccagttccccaagtgtgtgggggatgagccctagccctactctgtgactctgggtgagggctcctcagatctgtgccccaggggacaggccctcaaagtgccatccgtgctcaggtcccagtgccccaggctgacccacctctggtcagtgagtctcctgtgcctgagtgagggatatcgggacctgggggccctgccgagcacctcccacccactgctagtgctggggctttgtgagtgttccaacttcatagccgagagttggaggacaaggctggggcagggcgaggaacggattgagtcctgcctaagcctcgggacatctaaacagc

SEQ ID NO: 13403 - DNA, 146 bp, Homo sapiens
tggggtatcccgagccctttggagcctggtcttagtctctggtctccaccctgataccctcaatcaggaggcacagaaagcatcatctgcaaccgagaggactcagtggggacagaaatctgactcctcgctggacgctgaggtga

SEQ ID NO: 13404 - DNA, 787 bp, Homo sapiens
ctctcttctgaggcctctctccttggcctgctgatggtcaccttcttgcagtgccctcatgtgatttttcctctggctctgtctgtgtcccagcctcctcctctcataaggacaccattcaaactgaattagggtccactgacatgacctcattttaccttaattaccactctaaagtcttttcttcagatgcagtcatgttctgaagtactgagggttagggcttcaacttacgaatttggtgagttcacagttcagcctgtaacacatttcttcaggatttccagagcgtgcacagttttgagcagaaaaacgcactgctggaggaaaaggagagaactggaaaattccagcaagctgtcatagacttgatctgggggaggtggggccccactgagaaagatgacaaggtgaacaaagatcagcaagtgattcggtgcacccagcaaacttagaatagatttacttcaagaaattcataaatgaaaaaaaaacaaaaaaacaaaaaaaaaacttgggtttcaaaaaatttctattaacttgctttataaaaagatttcataacagggttcctttaaatacccagccgcaccagtatacttaacaagtgatttgatttaataccatgtgattaaagtactacgtttgcagagcctagccattaaaagcaggacagacaacctgtaattaaaattttgctgaaccctcctcctccaaagaccagttcagttcgcagaggttgatggtgaaagcagccgaggcacttcaactttgctccccagtgtct

SEQ ID NO: 13405 - DNA, 486 bp, Homo sapiens
ctctcttctgaggcctctctccttggcctgctgatggtcaccttcttgcagtgccctcatgtgatttttcctctggctctgtctgtgtcccagcctcctcctctcataaggacaccattcaaactgaattagggtccactgacatgacctcattttaccttaattaccactctaaagtcttttcttcagatgcagtcatgttctgaagtactgagggttagggcttcaacttacgaatttggtgagttcacagttcagcctgtaacacatttcttcaggatttccagagcgtgcacagttttgagcagaaaaacgcactgctggaggaaaaggagagaactggaaaattccagcaagctgtcatagacttgatctgggggaggtggggccccactgagaaagatgacaaggtgaacaaagatcagcaagtgattcggtgcacccagcaaacttagaatagatttacttcaagaaattcataaatga

SEQ ID NO: 13406 - DNA, 412 bp, Homo sapiens
tatctaatagatgtctcaaacctttaatgcgcctaagcctgaactcctgatcttctgaccataagcttgcttctccttagttttcccctactggttggtggcatctctgcccttgtgattgcttgcaccagaaatcttagaatcatttgggactcgcctgtcttacctttcatatctaatttgttagcaaatcctttcaaatttgatcttcaaactatattcagaatccactcatttttcatcagctctgttgcttcctctgttctgagccaacatcttgcctaagtttttgcaataaattccttacaggtccccttgtttctgccctttacagtctacagtgtattttcaacacagtagctagagaggttcttttaaaatatgtcatcccatgggaggctttttattaaga

SEQ ID NO: 13407 - DNA, 780 bp, Homo sapiens
ggattctttgtgccttctctgggtcttaattctcatctgtagaatggagatgatacctactcaaaggttgtattttaaaaattaaatgagatagtgttttaagacacttatcctagcttccaacacctcgtgggggccgcagtaataggtggtggcattgtcatgttcttttccacgctccgaagtctgttcacccttagaattgccctttgtatgccacaatgctagttacgttagtacaccctccaaatggcataatgagtgcttgtcagatgcttcacagattgtcaaatatgtgcccactgtctatgtctgcttggaggaaggagagtcagtgaccaaggagaacatacggaggtgacggcgattttggccgtgagagccaagtgtgattttggtgttgctgcaactcctttgcttagtgcagcagatgtgttcttgatcaaaaagttggactcaaatgcactgtaaattactttgtgtcttggaacgctgtaggggagcttattggttagaaaaatcctgcagtaaatctttctgtagtgtaaatataattcatttgtttttataaatccagaatgttttacattcttaaattctggcacatgtactcatgaaaatgacattgttaaatattatggttgtgaaaaacataaataagagatttactccccagcatagccaggttacagtgagaagaaatttatacactgtggactgagtactgttaccttaagaacctcaatactaccttaattgggcatgcccgtaatttcttat

SEQ ID NO: 13408 - DNA, 2275 bp, Homo sapiens
ggggtgggggtggatggatagatggatggatggatggacggatggggtgggggaaggaaggaaaggagggagaaaggagggaatactggctccatctttgagagctctggtgggcagggcagaaacaggccacagtgctcaacccggacaccctcacgaagggtcgcaagtcactcttgtggctcagattgctcttaggacctggagggacagaccagaatcagggtcccctcctttacccctgagttccttactgttcccccaagcctgggagcagtctatcccccaaccctgccatctcccttactcatccctcttccacagcttcccctttctagccccctctgccctacctgtctttcctgagtgtttgaggggagagagagacccacatctccccaaagagatgagcttttggggcacaacatcccaccgcagtccccctcacccgacaacacctcctacctggccccttgccaaatcccaagcagaattagcaacaggaaaagcagagccccaggagagacactctactatatatactcttctatatattctgtttctattgtatattcactctgtacatgtgggtgtaaatgctgttaaatgacaaaccaatattatactgtggctggtggactattttcatcctcagtgctgtacagatctattttcattgtatatttgatatatttttaattttgtagcgtgtggctgggccaggccccagcgggaggggctgagctggggctgtgtgcttgctaggtgtgggcgcgctagtgctcgttgtagccttttgctgtgtcttcgctgtgtgttagacgtagggcctagagctcggggtgtgtgtgtgcgtgctgtgtgtatggtgtgcacatacgtgagtgtgggtgtgtgtagcgtgctgatctgtgactcccagtgttcaccaccttcctgaagaccacgctccctccccctgcctcctcctcctcctcttggctctattgggagcctcagggccggcagggtgcttcgggagccccctgctacggggaaaggcatgtgtttcttgctggtgactcattgccttcacaccactgggtttgccagaaacagggaaggagggcgttaagggaaaaaaaaaatcctcaaatttatttaccagtcagcttcttgctgttcccagtagaatcgctagctcttctccagaggaaaagtactaggattcttaagatggcgagaccccaagagggatctcatagcactgctgcatttgccgttgacgcagtcctgacagtgtttgaaaagggccgcctgccccctccccactgtgcttttgatgcctttggagtcaaaggcaggtggggtcacctgatgagctaagatccagccccagaatcctggaggagcaggaggtagcaggagaggaccaggtccccaagtcccttcacagggtccccacccccactggctttggtgctgtccacacagtgcccaccagaaggcagagggaactccagggcagggatgtgcctgaaagagtcaacagtcccctgatcccctacctctgcctgccctccagccccatcaccagcttcttgctcagggagacttccgccctcctcactgaggcaacatgaagcccgaggcccagatgggggctgaacaggtagggcacatcagttaatgccagtgaggtcagcttctgccctccagcaatacatgtgcaggggttgctgctttcccagtgccaggagaacccccgctccgagtcagcctgtgtgggtcatgaggctggggcccaggagacacggtcccaggcactgcacaggcctgcagtattaccaggcggaggggctgcttttctgcccttcctcacccccacgccccaccccactcccccagagtactccccactgtgaaaagagctggaaactaaactggttagaatgaacctggctccctgagcatccctggatccttcaaataggccctgagatgtgaggtctgctgcttcactggggcccgatgactttggctgggggagggggcctagggcctcttctcattgaaagctctgctttatacagacccaagcatacacaccaggccgtcactttgggttctggcataagttcagaacaattcaagtccatgtgtcccatggctggtcagagccctgggtcaaaaccactcagcccaggggaggggatgaggcattgtcaccctagacccctcttcctctctcccccaccatagtgtgcaataaagtgtctgttcttaccaaaaaaat

SEQ ID NO: 13409 - DNA, 2082 bp, Homo sapiens
ggggtgggggtggatggatagatggatggatggatggacggatggggtgggggaaggaaggaaaggagggagaaaggagggaatactggctccatctttgagagctctggtgggcagggcagaaacaggccacagtgctcaacccggacaccctcacgaagggtcgcaagtcactcttgtggctcagattgctcttaggacctggagggacagaccagaatcagggtcccctcctttacccctgagttccttactgttcccccaagcctgggagcagtctatcccccaaccctgccatctcccttactcatccctcttccacagcttcccctttctagccccctctgccctacctgtctttcctgagtgtttgaggggagagagagacccacatctccccaaagagatgagcttttggggcacaacatcccaccgcagtccccctcacccgacaacacctcctacctggccccttgccaaatcccaagcagaattagcaacaggaaaagcagagccccaggagagacactctactatatatactcttctatatattctgtttctattgtatattcactctgtacatgtgggtgtaaatgctgttaaatgacaaaccaatattatactgtggctggtggactattttcatcctcagtgctgtacagatctattttcattgtatatttgatatatttttaattttgtagcgtgtggctgggccaggccccagcgggaggggctgagctggggctgtgtgcttgctaggtgtgggcgcgctagtgctcgttgtagccttttgctgtgtcttcgctgtgtgttagacgtagggcctagagctcggggtgtgtgtgtgcgtgctgtgtgtatggtgtgcacatacgtgagtgtgggtgtgtgtagcgtgctgatctgtgactcccagtgttcaccaccttcctgaagaccacgctccctccccctgcctcctcctcctcctcttggctctattgggagcctcagggccggcagggtgcttcgggagccccctgctacggggaaaggcatgtgtttcttgctggtgactcattgccttcacaccactgggtttgccagaaacagggaaggagggcgttaagggaaaaaaaaaatcctcaaatttatttaccagtcagcttcttgctgttcccagtagaatcgctagctcttctccagaggaaaagtactaggattcttaagatggcgagaccccaagagggatctcatagcactgctgcatttgccgttgacgcagtcctgacagtgtttgaaaagggccgcctgccccctccccactgtgcttttgatgcctttggagtcaaaggcaggtggggtcacctgatgagctaagatccaccccatcaccagcttcttgctcagggagacttccgccctcctcactgaggcaacatgaagcccgaggcccagatgggggctgaacaggtagggcacatcagttaatgccagtgaggtcagcttctgccctccagcaatacatgtgcaggggttgctgctttcccagtgccaggagaacccccgctccgagtcagcctgtgtgggtcatgaggctggggcccaggagacacggtcccaggcactgcacaggcctgcagtattaccaggcggaggggctgcttttctgcccttcctcacccccacgccccaccccactcccccagagtactccccactgtgaaaagagctggaaactaaactggttagaatgaacctggctccctgagcatccctggatccttcaaataggccctgagatgtgaggtctgctgcttcactggggcccgatgactttggctgggggagggggcctagggcctcttctcattgaaagctctgctttatacagacccaagcatacacaccaggccgtcactttgggttctggcataagttcagaacaattcaagtccatgtgtcccatggctggtcagagccctgggtcaaaaccactcagcccaggggaggggatgaggcattgtcaccctagacccctcttcctctctcccccaccatagtgtgcaataaagtgtctgttcttaccaaaaaaat

SEQ ID NO: 13410 - DNA, 548 bp, Homo sapiens
taactacaaatacaagatgattttctggactactattcacccagttgctatctcatttagattcctgtatctaatccagtagcaaattctgtaggttctgctttcaatatatgtactaaatcagacactttcccccctgtctttcaaacctctgttcacttccatcatttactgcctggcctcctgtattagcctactttggagcagcagctagtgttatcttcttaaaatatagaccatgttactcccctgctaaaaactgtagaggttctccatcacacttacattagaatcttgccttcccccccaccccttagctataaggccctgcattcatttgggatgcctacttctgagcgcatctgcacttctctctctgggtcactccactgtagccacactgttgctttgctgtaccctgaacaataagtggttgagcttattccagtcacaggactttcctccagtttgttgcattgcttgctttgtccagttgttccgttcttagctcatatgtcataccctctacctaacctgtcccgtataaa

SEQ ID NO: 13411 - DNA, 511 bp, Homo sapiens
cctacctcactggtttggtaagagaattacaggatgattcatgtgaagcactttgcccagtgagctattactgaaaaccccataatcactctaccttctctgtaactggtttgtgatatatgctttcaagcctttctctgtgcatttatatacatagataggtatatatagaaatacgtcttttttaaaaaacaaattgtatcatatatattattctatgatatgtttttggttttttatttgtctgtcttagaactttctaatgccttctattagggtcatcttcattctgaggcatagtattccagatgtgggtgtatcacagtttagcttccctctactcatgtctatttaggtgatttctcattattttatgaccataaatagcattatagggaacatccatgcatatgtctgttggggcacctatgtgagtgtttctccaggttcaatacgtaaaagtagaactgctgagtccaaaccacacctttttaaaacctcatccttaggg

SEQ ID NO: 13412 - DNA, 419 bp, Homo sapiens
  misc_feature (349)..(349): n is a, c, g, or t
  misc_feature (353)..(353): n is a, c, g, or t
  misc_feature (355)..(355): n is a, c, g, or t
acccacacaccacactttgcacaagtctcaccttctaagatcttccttctctccctgccccagcccagccagccccaaactctcatcctcaggactacccatggcagtgactcgctgtcttggacttgtatcttagaagaagtctccaggacaatccactttgtaaatgtggatttttcagaaaagtaaatggtactttttctggccaggcacggtggctcatgcctgtaatcccaacactttgggaacccaagggaggcggatcacctgaagtcaggagtttgagaccagcctggccaacatggtgaaacctcatctctactaaaagtacaaaaaaaaaatggcaagngcgncnggtggctcacacctgtaatcccagcactttgggaagccaaggttggcggatcatgagatgagga

SEQ ID NO: 13413 - DNA, 434 bp, Homo sapiens
gagatggaaagcccagaaccagtccctttaatgcacttatttgcaaaacaagatgtcactatgcagcagagtgacagtcctttcccctggaactgtcccagagttctccaagctgaagccagggctacattcaccatctcagactcctgctgagctaagtaaccaccctctcctaccttctcttcaggagccctggcacccttgctctggggagagtttgaagagcaacctgaaagttcccacagtttttcctcaaatctgggtttccatgagcatgggccaccagtcgggagagccacatgcctgcccttgcctggctcaagactgtcactctgtcagatttcatattcgctcttctggacccttaggccttccagtctgggatctttggaccttgaactggactctgtaggaagttcttaacattaaaggaa

SEQ ID NO: 13414 - DNA, 360 bp, Homo sapiens
gattaacaagagaaaaccattaaaaaattatttaacaaagttttccatgacaagggagccctcagaaatgaggaccaaagacccaatgaaaagtatgtatttttaggcttggattctatggacaagtcatgtagaagtatgattggacaataagtatattatctagtgctaataaatgggcactggggagcccagaaatggctgtctgttcagattcttttggcctctgggtaaagaagtactcctctggaataagggctttatgccctactttcaggggaggtaggtcagagcattcctttatggccagctgccacacagaaaggcatagtgattgtggtaatactgaccttcttgctt

SEQ ID NO: 13415 - DNA, 751 bp, Homo sapiens
attcggcacagcggtataaaatatatagcatgaaacatgcctttagtctgaatgtattgttgatgttcagggtgattagggtaaaaaggagaaagctgaagagatatcctgataatataatccttcctgcagcaagcctgctttaggagtacatcaaggaatttctaaagaaaacaacacgagcctctcattccttgaatgtttgttgcttttctcttcatttttgtttttgtttttgagacagagtctcactctgtctcccagggctggagtgcagtggcatgacctcagctcactgccacctctgcctcccgggtttaagtgactctcgtgcctcagcctcccgagttgctggggattacagttgtgtggcaaccacacccaggctaatttttgtatttttcgtagagatggggtttcaccatgttggccaggctagtctcgaactcctgacctcaagtgatccgagtgctgggtataggtgtgagccactgcacccagccttctcttcatttttgaatgtgtttttattttcatgctcacttactcaactctctctaaacatgcagatatttaagtgtgctttgacagctgggtgtggtggctcactcctttcatcccagcactttgggaggcctatgtgggaggatcccttgagcccaggagtttgagactgttgtgagctgtggttgtgctgctgcactccagcctgggcatcagagatcctgtctctaaacacaaaaagaaataa

SEQ ID NO: 13416 - DNA, 387 bp, Homo sapiens
actgcttgaacccgggaggcagaggttgcagtgagccgagatcacaccactgtactccagcctggagaacagagtgagactctgtctcaacaacaaaataaaaaaggtcatacttcctcaataaatgttgaccattattagtcgtaaatgaattttagtttagttccatgatttgtggtcaaggatactgtaagcaaaataactcctcatataggaaaaaaaatcttaactcagtatattcagagaatcaaagttgaaaatgctatatatgaatctgttctaaccacttctagaaattggagctctaaaccatgtaaatttcctaaaacaagtacatttcctgatgtgtgtataaattttcccccatgtaactaatattggtatcct

SEQ ID NO: 13417 - DNA, 156 bp, Homo sapiens
gacacagtgagactccatctcaaaaaaaaaaagaaaaagataaaccaggcacagtggttcaagagttcaaggatctcttaagccaaggagttcaaggtttcagtcagttatgtttgcaccactgcatgccagcctaagtgacagagcgagagcttg

SEQ ID NO: 13418 - DNA, 862 bp, Homo sapiens
gattactggattttgtccagtgtgaaatgtcttcattgtcctctgtatatcctcagtttcctttgacttaatgtaaacaaagactagatgctgtcatgctatgagtcctagctggatttgcagtatgtcttcatctaaagtttccagttgatatcatcgctagcctcacaagataagcctatagttggttacattttacttcctaaagggaattttaattccttgtcccttaaggatctcaacaatattaggcctgtattacctggaaaaagtaattttctgttgtttccccaaaactctgacttaaactccgtttggttcacactcctaatgtcttctcttcatgatactattgtccctacagctttacatttcattagggtgtgctttccttccccacataacacattctttaagtctgacctcaaatcttcaacccctccctgacttttgtcatgacttctgtatctcccttccctcgacttcagtttcacctaggggtgataggataaagaagtgactctgattaagtaatctgttattcgatagtgtctatattttgcttgagctgttttgctcttggatcatagtcctgtaaggaaaggggcatgttatcccttgatgtagtgtgtaacagagagagatatttctttctttctttgattatctgagaagctaggcaggtgaaagaactttcttgtccatccattcagaaataatttacaggcagttacttctaaatatgcatgcctgggccaaatgtggtggctcacacctgtaatcccaaccctgggaagctgaggcaggaggattgcttgcaaccagcctgggtaacatagtgaaaccctgtctctacaaaaaa

SEQ ID NO: 13419 - DNA, 509 bp, Homo sapiens
tctggccttttaataggaagtaattttggtctagaaatgcactggagcctgtgccctggtagctggaaaggtgctctagagagtggtgaaatgtagcctgccaccaggctctgcctggagtgtggattctggacatccttcccagttggggaaatgggccctggaactattctttgatgtagtatgtgtgtttactcctacatgccccagtccttgaagggtagcttaagaaacccagccagtgaggccaaagtgcttgttctaccaacagagtagtaggtgggggaaaaccccaaagattgctatccacactcctcttctttggtgcctggaaaaacagtactctttctagcaattaacatttgaaacagatatactggcctgtcagataaatcagtggcttagcattgttttgtggtacaaattctggaaagagttgtttattaggaaaaccttcttaaaaaattgtgagatgaccatagttctccctctctaaatgccagattaaa

SEQ ID NO: 13420 - DNA, 2818 bp, Homo sapiens
  misc_feature (29)..(29): n is a, c, g, or t
  misc_feature (608)..(608): n is a, c, g, or t
  misc_feature (1460)..(1460): n is a, c, g, or t
  misc_feature (2135)..(2135): n is a, c, g, or t
catacatctttaggaaagggaggcaggtngaccctaagccatgcagccttgtgcagtgcttggtgttagatggtgcgtgtggcccctgtggatggagatctacctctggtatgtaggcaccaactctggatccgtgcaggatggttatcccagaatccagagcaagggagcagcctgcgtggaatattatgtgagggcagtgccgggtgcggaggacacgttgcagctcccgagccaatagatgccaggttgtgccaggagctcacacacagcaggctccaggggcggtgctgggtcatctccaccaccaaaaggacaaaatgaaaagtctgaatggaggttaacaggctcgattaatattgaactgactttcccgccacacctggatcattctgtgggtctgcagcaatatatttatcacacttcacagatgagctggcaggggtcaatctgccaatgacactggcagttaccaaaacgtgggcagaatgtttgcgtgcttcatgccctgctggagaggagcctccaagaactgactagctgtcccttttgctttgtttttctctaaaaattggtctcactgttttttgtgctcatgttgatatttntagaccttacaaggaataaatatctttgactatatgtacatttcccccttgttttcatgttcaaaaggatcacttcagaatgcaaagtaactgacattttcagaaaatgttattcgtgtttttacctataactcactagcttttttctattaaagtctttatatacatttttattattatgttttctcatgtaaagcataagaaaaatgcttgctagtttgatagtagtctgttatccattaaatcttactgaattttggaagtgcgtggctttatatagaagccttagaagttgctcagactgtatttaagatgacatattatctggtttctgcttgacttttttttttcgggggggcggtggggagaaatagagcatttttcttccataatggtacttctaagacatatctaagcacaaagtgaaaaagaattcaattcttaaactggttctttttttagcgatttaggagaactcagaataagctggggcaagggaaggggactgtcttagtccactggggctgctgtaacaaaataccttagactgggtactttataaacaacaggaatgtattgttcacagttccggaggctgggaagtccaagatcaaggtgccagcagatttggagtctggggagggccattcctcatagatggcgccttccacctgttctcatggggtggaaagggcaggcagctctctggggcctcttttctgaggcactgatgactttcctaagggtggagcctttccagaggccccaccttctaatactatcaccttggtgattaggtttcaacatctgaattttggggactacaaacgttctgaccacagcagggatcanttgattcagtgtcatagaatctctcttaatccttttgaaaatcctttagttagacaaattttaatttgacttcaatcttagtctttagggggtaagtgtaaaaatatgcagcaaaatgctgtcctctctgtctgtctctgtctctgttcgtctccctctctggcacctgtccaggaatgactgcagatggggcagggctgcagctgacttgggagcagccaacctggaggttcttcccccgtgtcccctgatcaaagaacagaagcacctcagcaaccacgccccgtcctggaaagtgttacccccccaaccccagacttctgtttcttgtacccctgtggcttctgctcgctgtcttctccttgtggcagttttcatttcggttgagacagccccagatgggacaggatgggtggggggaggcagaaggcttccaaaaccagcagcagcattacactaggtactcattggcccctttctgtgaccgagttcacactcagaacacacgtgttgaaatcgggaaaaaaacggagacctgttgtatcttgcaaggaaaacgttccttacaggtatatttacagaggactgtgtcacactcaggcagaaatgacctcaacaagacagcctcgtggaaggaagaacacttacctacttaactcccctccccgccccggnctgcctagtctagcctagccgtctataacaaccccagtggactgacattccatcttggaatttatggaggtgacaaaagtgtcatttgagatggaccaaacccagcccttccaagaagagctctgtatgttttatcttgacatgtgttgatgaataatgacctgcacacacattctgaatgcaggaagggaagtcctgctctccgtccatcgccagtcactcactcgggggaggccaggaacttagtagctctcggctctggtctgcatcccttcccctcgggttctgctcgcctcggctgtgtctcacaggagtcagcgcccggcggccgtgtgcaggtgctggggccccaccttagctcaagctctcttaaattccttatggcagaatgaaaacaacttcattagggcctacctgagaagaaaacaaaaacaagaaaaagtgtggacatcattatccacttgtcctggctgccttgcccccttctaaccatttcatgcccattctagtgtgggcttctgagtgctcatttggtttttcatatagtttttaaatcagttgttactgtcaagatgaaaacatatcacagatgttagtagcgcagtgctgagtgcttcttaaacagtattaacttacatgcttgatgaccatgtgttcttgattaacaaagccaacgcaagtac

SEQ ID NO: 13421 - DNA, 544 bp, Homo sapiens
tcgccctctgtgctctctgcagccgccactgggattaaggggaccaggtgtgtctgtggcacctgtgccctcctaggcatctcgccagccaccagctgaacaggtttggtgctcctgggtatctgggaggggctggggacgttcctgcctcctggtgtggcttagactgaaagtcctgcacgtccgaactcagggatactcgaggcttcctggacatagactcacgggcccagagtctggccgggctctgagggacgctgcccggccaggtgccccggcaccctccttccgcattccccaccccccacccctccccctgcatcctccccaaccgaccccagacagagctgggagggcctgagggacactgcccaggccggcaccccgctgcccctccccaccttggtcagcgctgagctgggctgcccagaaatctatgagcctgttaaataatccagattattgttcttaatctcaaaacaatgagtggaaggtgccattatttctctttgcaataaaaataaaagttgaaatacgcagttta

SEQ ID NO: 13422 - DNA, 328 bp, Homo sapiens
taacaaagcatttttcaatctggcagtgcaaacattttagatgatattaaaaattctcttcttcctttataaacacagaaccaaatacaataaggaatgaacttcaagatgtttttaagtatgatataagtaagaggacaaagttgctacaacaataaagacaaactatacaaaatttttattatcatttcttttgttctcctaaagttttacccacacctacaaaaaaagtggtctgcatagtcaaaaaggtaatcacaaagtttccaggctaggttattttattaaaagggatttatctcaccttgggaaataaatcaaaactaat

SEQ ID NO: 13423 - DNA, 487 bp, Homo sapiens
ttagggtctttacagttatgataaagacaaggcgaggccacactggattagagcaggccctaatccactgactggtgtccttctaagaagagggaaatttggacacgcagtcacacaaggagaatgctgtgtgatgaagaaggcagagagtggagtgacacatctttaagacaaagactgccaaagattgtggacaatactggtatcagaaacttctgccaacttcttctgaaacgtctgcctacaaacttgttttctactaaaatcgtccattctatgagaaaacacagaatatgatgaaccattcagccaggaaactgctgctaattcctcagggctgtttacctatgatggcctatatcagaagctaggagtgaggcatagaataatattcctcagagcctccagtaggaaccaaccctagtgacaccttgctctcagacttctagcctccagcactgtgtaagaataaatttatgttgtttta

SEQ ID NO: 13424 - DNA, 447 bp, Homo sapiens
aggatcacttgaggccaggggctcaagaccagcttgagcaacataacgagtttatgtttcatttaacttttatgcaacttcttaaagtttgttaacttactttcttaagaaggaatgttttatggttaacttcatttttgtagtcagtgcatatacactactttagatatataagattagctatcctaggctgggcatggtggcttacacctgtaatcccagcactttaggaggctgaggcaggtggatcacataaggtcaggagtggccaacatggtgaaaccccctctctactaaaaatacaaaaaattgccgggagtggtggcgcacatctgtgataccagctactgaggcaggagaattgcttgatcacgggaggcggaggttgcagtgagctgagattgcgccactatacttcagcctgggcgacagtgagactcagtctca

SEQ ID NO: 13425 - DNA, 748 bp, Homo sapiens
gagggaggcatggaaagacttaaagataagtggagacgactcattgatcaccacaagggagagaattggtcaccttggatctctgggaagggaatatatgggatacttttaggaggggagctagaaaaaaaatgattgagcaaagaagacaaccacggcagaaaggaaccaaagtgattactaaactaagttatttgaggacagtgatcgtatttattttattaatatattcttagcacctagcattgcaaataaccttgcaaatgtttactgaataaatgaatgaatattgattaggatcttatcagattcttggtcttgataagtaatctatagatgtgtgttattttaaataatgtaaatataaatttaatagaaatgtgtattaaaatatatttgcaaaaaagaaatataagctttttcaaatgtggaaaatttagctgaacatggtggtacatgcctgtagtcctagctgccttgggaggctgaggcaggaagattgcttgagccccaggaattcaagactgcagtgagctatgatgacactactgcactcccagcttgggcaacagagaccctgactggtaaaaaaacaaatgtgtatgtatcttttttccgtatttttctgaattcttttcctcctttcaggaaatatattttgtgaattcactttatgatatcagacaaccatataatcaacaaataaaattttcaatgtttgtaagacccttttatttaagaggaccat

SEQ ID NO: 13426 - DNA, 497 bp, Homo sapiens
gagggaggcatggaaagacttaaagataagtggagacgactcattgatcaccacaagggagagaattggtcaccttggatctctgggaagggaatatatgggatacttttaggaggggagctagaaaaaaaatgattgagcaaagaagacaaccacggcagaaaggaaccaaagtgattactaaactaagttatttgaggacagtgatcgtatttattttattaatatattcttagcacctagcattgcaaataaccttgcaaatgtttactgaataaatgaatgaatattgattaggatcttatcagattcttggtcttgataagtaatctatagatgtgtgttgtccagttgtatcaggaagggagtacagtgtaatggttaagtgacctccagaaacaggtagcttggatttgaatctcagttaaaccacttagtagctgtgtgaccttggacaagttatctaacttctttgtgtctcatctgtaaaagaaaaa

SEQ ID NO: 13427 - DNA, 502 bp, Homo sapiens
ccattcccaacctgcccactacacacggtcatagaaaagcctctcatgacctggccccattacctgggcaaactcatcacctctcactctgttcttcagcagttctgaacttgtgcttctcaagaactagtagatcccagaacacaccttacttttttacatttgcatgccctcacccacttctcaagactggtagcccatattgtgcctttgtggaaattaggaaaaggtgccacatccccctcgtgaggctagattccagaccccactcatcccttgactggcaccatactgccctgaccaacctgcatactatttcaacatagcctggagcaaacacgctggtccacccagcaaacccctcctcatccatcaagccacagctcagctgctaccgcctccgtgaagtcatcttcagataccctcacaggtttcgctggtttctctgctaagcttccactgctttttaaacagcctccattaaaacaattatctttttcga

SEQ ID NO: 13428 - DNA, 542 bp, Homo sapiens
tacacaaatgccactgtgttgcaactgcttacagtattcagcacagtaccatgctgcacagatttatagcctaggaacaatagtctataccatataacctagatgtgtagttggctatgctatctaggtttgtctaagtatactctgatgttcatacaacaaaatagcctaacaatgaatttctcagaacacagcactgttcacagttgcaaagatatggaatcaacctaagtatccatcaacaaatgattggataaagaaaatgtggctaggtgtggtgctcacatctgtaatcccagcactttgggaggccaaggcgagaatccaggagtttgagatcagcctgggcaacatagtgagaccctatctctacaaaaaaaaggtttttttaattagccggtgtgtgatgacacatacctgtagtctcagctacttagggggacaggtgggaggattgcttgagcctgggaggttgaggctgcagtgagccatgattgcaccactggcactccaggctaggcaacacagcaagacccgtctca

SEQ ID NO: 13429 - DNA, 452 bp, Homo sapiens
tggcacctagaaagctctttgtaaatttcccatcactgtcatcacccatccctcatccatggcattaccatgaatgccctgattccgaggagggattggtttcccatgagacatccccatcctatttgaagatgatggtaatatagctattttttccccagttcttgagtttaaaaaaaaaagatggtcaaaagctgagagttgatccttggctaagagtggacctcccttggcagagatgagaacaggagcaaaacagaaggggtcaaatgtgaaacaagactcttaggtttcagtgctgttgagatgagatgccaggagcagaagatccagtgggcattgttgggcagcagtggaggaaggaaggaaggagaggagaggaaaaggaagaaattaataacgccttcttcctagctcctcccaccctgtggttctcaaaacagatcttccca

SEQ ID NO: 13430 - DNA, 456 bp, Homo sapiens
ccccagacacctccttctcatcacctccttaacatacaggaatctgtgtttttaaggatgctgaacccgtgcatcccgtatctctgtctggaattgcacttcaggttccaatccttgctgcagtgaacctggtgagttaattttcttctcatcagtttcagtgactacctccacaaaacacagagaaaatatttacctgtctcatatgttaatatgaggatgaaaagccgtttttccatgtcaagttctttcatggaacaagtgctcaatacatgggagctattatcacgattatcatattcttttcaaaagaaagagctctctcagggtttccatttaaatatttgattctagaccaggagttggctaactacagtctgtgggccaagaccggcctgccacctgtttttgtacagctcgtgagctaagaatcctttccacattaaaagttaaaat

SEQ ID NO: 13431 - DNA, 230 bp, Homo sapiens
tatatatatttttcagcattgcattctttatcctctccttctacagctctaatgtcatgaatgttagaccttttggcattgcctcacaggtccctcggttcatttttttaaaaaaatatgttttctttgttgttcattggatactttcaattgatctgtcttcaagttcattgacttccctttgttatctctattctgctattatcaaacctatcaatgagttaaaaaat

SEQ ID NO: 13432 - DNA, 418 bp, Homo sapiens
attgcatagaaagtcacctttacttcagtttggattaaggtttatagtcttagaatcttgagaataagtgacttgcaagcatgtctaacttttattcatatctgacaaaatattaatggctatctcagggccgaacatcttggtaacatctttgctaagatcgtctatcatttattatggagaatttcagatttatgtaaaagcagacagaagaacatcatgaggtactctttatctgtttcctgcccctagctaccgtcaccacatgactaaactcccatttggttcttggctttaattttcgttttgaagcaaattcaaaactctgcatcatttcatttgtaaatatcacaagatgtgttgaaaaaataggataattcttttccctctacaacataatgacaatatcattatcaca

SEQ ID NO: 13433 - DNA, 151 bp, Homo sapiens
tttatgacagtattttgaattctctttcagataattaatatatctccatttcattagtattggtttccagagttttatcttgttccttttttggattatgtttctctgttttttcattttccttgactctttgtgttggtatctgtgcatt

SEQ ID NO: 13434 - DNA, 365 bp, Homo sapiens
tccacacccacatacaccacaaacacacatacacacccacacaacacactctcacacacacacacactctcatacacacacacatctgcatcttaatgtacaggcagtgctaaaatagacatcttaatatttgttccatgaatatttaccttgtagatatacagagtttccttaaaacagcaaaactgttcctgcttctgattcaccctgctgacaatgtgcatggttaagtgtaacagcgtttatagtgagggtgattaatggtagtcacagtgtaacagagcacagacagccaggttccagggttgggagggcaaggaagtcaacacagttttatatcatcctcctggctgggaaaaaaaaaa

SEQ ID NO: 13435 - DNA, 336 bp, Homo sapiens
gtttttttagtattccattttttattttattagtatttgattactaggctttcccctatgtcatgtgatgtgagtagccccggaaagagagtacccaatctttgcctagataacttcacaattatccattcttttattcaaaattcttctccagattgattattctggtaaaaatgtaaacactccatagggggttaatacatattatgtaattaatatcctagtataaacttctatcattgtttaatcaccttctcaccctgtataaatgccaaagcacagaataagaacgggatatacctctctacaggatccccattacagatgttttgtgcg

SEQ ID NO: 13436 - DNA, 492 bp, Homo sapiens
cagccacctccgaggatgagacttactggaagggcacatgagggaatgttctggggaatgagaatgtcctggaaataccctctatcttgattctgtggttacacaggtgtctacatttgtcaaaactcctcagccctcacttgtgcatttcactgtaatggaaattacaccttattaagaaaaaaaaatggaaaactgaaagataggtctggaggggctcatgtttcaaggaaaacagaaactgattcctttgtagtgctgaacatactgacgactgggaaagaagacacaactgaagatgcctctgcaaaatcagcccggtcccatccttggtccctgcttacgtttgagtttgagacccacaggttaaggccttgaacgacatcttcaaagatctatgcagaactacgacatccaacatagaagcgccatgagccacatgtggctatttcaatcaaattaattaaaaataaagtgaaaaattcaaccctc

SEQ ID NO: 13437 - DNA, 448 bp, Homo sapiens
taagctcccaagtgattctatgtgcagtggggttgcaaaactgcaggttgaatcttagcttctccaggaagccacctctgattagctgatgctaatctatgagcccagtggaactgtcaccttttctaatcagccagccctgatgtatccatacaattggagggggatggggtgaaataacccccattagtgtgaattggttgaagaggacacagaaggatgtaggatgtaccttctcatttctctgagcttaacttccaaatgaacaagcatttgcagctgctggacagccacaaaatcaattcactcagtcatttaaccaacattcattgagcacctattatggataaagagcaatgagagattcacagcatatttgatatagtctctgtaaaccaaaaataaaattctaagtcccctaaatgacggaatggagcccccctcttca

SEQ ID NO: 13438 - DNA, 395 bp, Homo sapiens
gtcagattaacatgttttgggtttttaaaaatgtatatgtctccacacatagagctatatggagaaaaggctgagaggaattagtccaaaattttaacaagattttgaggctggctgggtgcagcggctcacgcctgtaatccaaacactttgggaggctgaggcgggtggatcacctgacgtcaggagttcgagagcagcctggccaatatggtgaaaccctatctctactaaaaatacaaaatttatctggacgtggtggcacatgcctgtagtctcagctactctggaggctgaggcaggagaatcacttgaacctgggagacggaggttgcagtgaaccgagattgtgccactgcactccagcctgggcaacagaacgagactctgtctca

SEQ ID NO: 13439 - DNA, 447 bp, Homo sapiens
gtaaagatcacaaaacacttaatgagcggtgttgccagtttgaatatctcaattcttagttatctaagttccctggtaggcttctttaattatctgggtctcttctagacatctggaacaaatagttgattgacataatacagactagccacatattttataagagttacttttgactcatttagatttttaaaatatacagtgtctgtattcttctctattcattttgttaatttttttttacctaataatgattaagcaccaattatgtgacagcactatgctaagcactttgcatgcattcatctcatttaaatctcaactctgtgaaagtttttattctagttactgtattaagtctcaattctgtcaatatccatgaagcacagaaggcagctgttatttaccttaattttacagatgtgaaaactaaaggcatttaaagag

SEQ ID NO: 13440 - DNA, 472 bp, Homo sapiens
ggcctcccaaagtgctgggattacaggtgtgaaccactgtgccttgccgaatatgggtagttttagacatgctcatggcagaatgatcaacaggcggaagaagtgggaggtccagccgatgtggatccctgagagcccatgtccacaaacaggggaagaatagtggctaaaataggtcttgtagggaattttaaagacaagtgaattgtctgttgaggcagccaaaaaggggctggcttctgccaggtggcagccaggcaatgtccaggagaggagattgccaaggaaaggaggctacaaatgccccctccttgtgatgtcaggacctcccttagcgagcgatctggccaagacacagggaaaagacacaggatccagacccggggctctgctccttggacggctcagtgcagagagtcagctggctgcctggaaggagagagtgggcaagggtgtgagggaatctttgggg

SEQ ID NO: 13441 - DNA, 937 bp, Homo sapiens
gaacttccatagtgttttctacattagcggtaccattttacattctcaccaacaatgcacaaggatttcagtttctccacatcctcaccaacatttgctcttttcttgtttttatttttaataggagctctcctaatgggtgtgaggtgatatctcattatggttttggctcacatttctctagcgatgttgggcatcttttcatgtactcactggtcaaatgtttatcttgtttggagaattgtctattcaagtcctttgtgatcatggttttctttttgatgcttgctataattttggtctctttagttggactccggtgctattttcctcagtatatttgatggtctaccacaggggtccccaacccctgagccacagaccagtgtgagtccgtggcctgttaggaactggcctgcacagcaggtggagcagcagttgagtgagcgaaactccatctatgtttacagctgctccccgttgctcacattaccacctgagctctgcctcctgtcggattagccagccttgttagattcctcatatgggagcatgaaccccaattgtgaattgccgcgtgtgtgggatcctaggttgcacaccccttgtaagaatcctaatgcctgatgatctgaggtggaacagtttcatcctgaaaccatacccccatcccaatctgcggaaaaattgtcttccatgaaaccaaccggtccctggtgccaaaaaggttggggaccactggcttacaagatactctattcccatctttagttctcttgccccaaacatagaattaactactctactagctgtgtttgttcttttggtgtaaaaaaatgatttgaattcaaaacatggggttctgtcaaaatagcacagtgaatttgtgaattgatcatgtctctgctccaaataaagaaacaaactacaagaagag

SEQ ID NO: 13442 - DNA, 506 bp, Homo sapiens
ctgctctcctggcatgggtgtgagtcagcacacactgaggtgagagaagaagctgttatattcaggccagatttttttttgcaaaaatctttctttacacgcagcaagaactgggaaggagcccactggagctgagccagcaaaacccaaatggaatccacgttgttggcctcttaatttgtttgaatcattgcagattcccagaactttgatacagaaaagtgctcagggtcgggcgcggtggctcacgcctatagtcccaggactttgggaggctgaggccagaggaccgcttgaggccaggagtttgaggccagcctggccaacatggtgagacccatctccgcaataataaaaataatcagccaggagaggtgttgcacacctatggttttagctactcggagggtgaggcagaaggattgctggaacccaggtgtttgaggctgcgtgagctgcgatcgcaccactgcactccagcctgggtgacagtgagaccctatctc

SEQ ID NO: 13443 - DNA, 770 bp, Homo sapiens
ggaggaagggtacaggaaataccaatagcttacttttttgagtgcttattatgtgctgaatactggtttaagggcttgtacagcaaatccaatgaaatccttacaaattccctatgaggtcggtactattactagcccctttttatggacagaggaatctgaggtataaagagatcttgtaacatcctcagtccttcaagaactacacactccttttaccctcttctctgaaaggagaccctgctctcttcattccccctcttctagcctgtattgctcacttcacacttctaccctcaggcacagagtcttccctcaggcccaggccacagccttctccattcctgccacggcgccctcctcttctcccaggtctgctggcagcctaggtgacttccacactgatgtccatgacccagacagctaccttcacagcttcttgatttcctggtctaaaaaactgctttccagcttatatccaaggctcataattacaaagagctattttcaccactgaaattttaaatattaatattctttttttttttggagaggagtttcattctgtggcccaggttggagtggagtgagcaagatcccacattgattcagcgtggagaaagagcaatttcagtctaaaaacaaaaaaggaaaaggaacaattggtttagtgatagatgattcagaatttgcgggtgagaagcagggggggtgttcattatggttggtaggaacgcagaaggggtgcaggggtattgacctgaagggtt

SEQ ID NO: 13444 - DNA, 465 bp, Homo sapiens
ggaggaagggtacaggaaataccaatagcttacttttttgagtgcttattatgtgctgaatactggtttaagggcttgtacagcaaatccaatgaaatccttacaaattccctatgaggtcggtactattactagcccctttttatggacagaggaatctgaggtataaagagatttaagggccaaggtcacatagatggcaagtacagggccagaactcacaccagtttctgtgtgtatgtaaaatgactgtgggaggcataaactcaccttttaaaaggtgagtcacggaaggaaaaagaggagagtccctttgtttttctgtattatgtacttttgaatcatttttagtttttttctatcaagagcctttccccatctcaaaacattataatggaagtacaagctcaatccaaaaagacaaaaactaaaaatgattcacaagtacataatacgggtaccgag

SEQ ID NO: 13445 - DNA, 1693 bp, Homo sapiens
ggaggaagggtacaggaaataccaatagcttacttttttgagtgcttattatgtgctgaatactggtttaagggcttgtacagcaaatccaatgaaatccttacaaattccctatgaggtcggtactattactagcccctttttatggacagaggaatctgaggtataaagagatttaagggccaaggtcacatagatggcaagtacagggccagaactcacaccagtttctgtgtgtatgtaaaatgactgtgggaggcataaactcaccttttaaaaggtgagtcacggaaggaaaaagaggagagtccctttgtttttctgtattatgtacttttgaatcatttttagtttttttctttttggattgagcttgtacttccattataatgttttgagatggggaaaggctcttgatagaaaatttaaaatttactaaggaacagaaagctctaaaacaaatcactagcctgggcaacacagtgagacccatctttaccaaaaaaacaaacaaaaaactggcccgctgtgctggcacgtgcctgtggtcccagctactcgggaggctgaggcaggaggagctcaagttgggagctgcaggaagctatgatggtgccactgcattccagcctgggtggcagagtgagactctctcaaacaacaacaaagaaagcattaaaacaaaacaaaaacccacctcattcagggcaataattactattttgatttttcagctcacagacctacattctgcagtcttgtgtatttgagcttacaatggtacccattaaatttggctaaaacacttgggttgctgttttccctaaagaaacactattaagtcacatccccaaaacttacttagtggtcatgacgcatattagtcagtgtactgaaaattaagtattctggcccattaaaatatataaaaaattttaaaggttgtttctgtgcctgtggcatcttttattatctaattaactaaggatcttttaaaaaatctctgaattattttttgaactatcattgccatacaggtttgttttcttcaaccctatcggccctcctgagtctttctgtgctccggatagctcttttcttgtaacatcctcagtccttcaagaactacacactccttttaccctcttctctgaaaggagaccctgctctcttcattccccctcttctagcctgtattgctcacttcacacttctaccctcaggcacagagtcttccctcaggcccaggccacagccttctccattcctgccacggcgccctcctcttctcccaggtctgctggcagcctaggtgacttccacactgatgtccatgacccagacagctaccttcacagcttcttgatttcctggtctaaaaaactgctttccagcttatatccaaggctcataattacaaagagctattttcaccactgaaattttaaatattaatattctttttttttttggagaggagtttcattctgtggcccaggttggagtggagtgagcaagatcccacattgattcagcgtggagaaagagcaatttcagtctaaaaacaaaaaaggaaaaggaacaattggtttagtgatagatgattcagaatttgcgggtgagaagcagggggggtgttcattatggttggtaggaacgcagaaggggtgcaggggtattgacctgaagggtt

SEQ ID NO: 13446 - DNA, 1360 bp, Homo sapiens
ctgacactacaggcatgggacaaaggcaactaagttgcatctatagaattgagaaaaataatatgctttgaggctgggtacccagcactttgcaaggccaaggcaggaggatcgcttgaaccaggagttcaagaccagcctgggcaacataatgagactctgtctctacaaaaaataaacaaaagctagccgagtgtcatggtgcatgcctgtagacccagctattggggaggctgaggcaggaggagctcaagttgggagctgcaggaagctatgatggtgccactgcattccagcctgggtggcagagtgagactctctcaaacaacaacaaagaaagcattaaaacaaaacaaaaacccacctcattcagggcaataattactattttgatttttcagctcacagacctacattctgcagtcttgtgtatttgagcttacaatggtacccattaaatttggctaaaacacttgggttgctgttttccctaaagaaacactattaagtcacatccccaaaacttacttagtggtcatgacgcatattagtcagtgtactgaaaattaagtattctggcccattaaaatatataaaaaattttaaaggttgtttctgtgcctgtggcatcttttattatctaattaactaaggatcttttaaaaaatctctgaattattttttgaactatcattgccatacaggtttgttttcttcaaccctatcggccctcctgagtctttctgtgctccggatagctcttttcttgtaacatcctcagtccttcaagaactacacactccttttaccctcttctctgaaaggagaccctgctctcttcattccccctcttctagcctgtattgctcacttcacacttctaccctcaggcacagagtcttccctcaggcccaggccacagccttctccattcctgccacggcgccctcctcttctcccaggtctgctggcagcctaggtgacttccacactgatgtccatgacccagacagctaccttcacagcttcttgatttcctggtctaaaaaactgctttccagcttatatccaaggctcataattacaaagagctattttcaccactgaaattttaaatattaatattctttttttttttggagaggagtttcattctgtggcccaggttggagtggagtgagcaagatcccacattgattcagcgtggagaaagagcaatttcagtctaaaaacaaaaaaggaaaaggaacaattggtttagtgatagatgattcagaatttgcgggtgagaagcagggggggtgttcattatggttggtaggaacgcagaaggggtgcaggggtattgacctgaagggtt

SEQ ID NO: 13447 - DNA, 445 bp, Homo sapiens
ctctatttatggactctattctgttcctctggtccgtttgtctccttgtgtcagtacttctctgctttatttactgtggcctaataagtcttgatatccattagtgtgaatattccaactgggcgacagggagagaacctgtctcaaaaaaaaaaaaattggccgggcacggtggctcatgcctgtaatcccagcactttgggaggctgaggcgggcagatcgcgagatcaggagttcgagaccagcgtggccaacatggtgaaaccccgtctctactagaaatacaaaaattacctgggcacggagaaggggtgcctgtaatcccaactactcgggaggctgaggcaggagaattgcctgaacctgggaggcagaggttgcagtgagccgagattgcactccagcctgggtgacagagcaagactccattgcaggaaaaaaaaa

SEQ ID NO: 13448 - DNA, 437 bp, Homo sapiens
gcttataatccaatttcatgacaatcgttggacatgtaattcctttttaaaagtttctcttgtttcttaatgaattacagtttgaaggctcaatttaaagtgtttatcacaaaactgaatttttaaacagcactctccagcatttatgtatttcactttaaaagttaaattatttcggctgggcgcggtggctcacacctgtaatctcagcactttgggaggccgaggtgggcggatcacaaggtcaggagatcgagaccatcctggctaacacggtgaaaccccatctctactataaataccaaaattagccgggcgtggtggcgggcgcctgtagtcccagctactcgggaggctgaggcaggggaatggcgtgaacccgggaggcggagctttcagtgagtggagatcgcgccactgcactacagcctgggcaa

SEQ ID NO: 13449 - DNA, 86 bp, Homo sapiens
cagcttaggcctcagtaagaacagctggagaatgtcaggacaaataacaaactgaacttagatttggaaaacaaaatggaggcttg

SEQ ID NO: 13450 - DNA, 504 bp, Homo sapiens
actgtgagaaagggaccagagaatatctttttctctggcaagattccatctgtggattattttattagacatgccttctgaaagattaggggtggaggatcaaaagaaatattctttatctgaaggctctttgatcttcagggttgatagaatctgttaaagtgttagataatacagtacctaatgatttctttttaggcttaaatagcctcactgaatgagattatttacttaactgtgattgccctttctgtttcggaattgaccttgctaatttttgaatcaggagcactgaaacagatctctaaattttgaaggtctggctctaggaagcacaagtgtggaagattttaggtcttaggttttaatgttcagagcgtttcttccaattcaaaacgtaatcactggaaaataaacttctaaatgaaaatgtgctttggtcagctgcctctgaattatcattgtgcaacattacttaaataaatttgtgtttgaaagaccttg

SEQ ID NO: 13451 - DNA, 771 bp, Homo sapiens
tgtagtaagggttttgagagagcgttccggacttaatctcttcagcagcctcttgcataaatcacattgatactccttttcctgcctccagttgttttcacgtctgtatttttctcctgttatatttacatgttcagtttttatttaacctttgaggaatggaaatgaaggttgtgtctataagtcgaggttccagatataaaattctgtcttcctttttgatcattaacttgtttgtttcagaatatttggtgaatgcaactgtgatgatactagtgtgaataacaacggaagacactcacttggctttggctaggtgtagtgttgactacagaggtgtttaaaaagtggcctgagggccggcctgttagagctcttttggctgtggaagctaatttgtgctgaatgtggtgcctacagaaaaacccttcagaggtcatacagtgtgtactctttctgccggtcagttgaggctccttacctagcttagcaagaggtttctgccctggtcctcaacataaccagagaaagtaaatgggaaactttatctggaaaattattcaaaagcaggaaataaatcaccttggttagcattttaataatttatccatgagactatttacaagttactactttgtcaattcaacaaatatttattgtctatactcttctaggcagtggggtgaacaacacaggccaagttcctgttttcatggaacttatgttctgatgttgggaggcaaataacaaacaacaaacatgtaaaaaaaa

SEQ ID NO: 13452 - DNA, 327 bp, Homo sapiens
ttacgcgtactataacttagtgtagtttagtatttaatgttaattttagtaaaatttgcatctcaaagtatcatttttatattatgggacgttttcagattggctaatatttgcattgtaaattttgtatgcagtttatctaaaattcaaaaatactgtcagtacaccagcgtttaacatctatattccaatttgtatacagtttaaaattgtactgcaaaactattgtgtgctcttacacagtatgcatcatattgttgtctgtgaaattaaaggacatttgatagtctactgaatgtaaaatataatgcttggtatatgaatgat

SEQ ID NO: 13453 - DNA, 1834 bp, Homo sapiens
cgcccccgcccccaggcttgtgtagatcatgccgccagtagcggccctgactgccgaggaaacggtagcttaggacagttggctgttaagtgacactgattctccccgccccgcctgacccccgagaaggaggcttgtcccccgctgcgtgagggggtggggaagtgggtagtgaattcggatctacctgggaggggggagtggaagttcccgccccggagagcggcgaggcggcagccacagttgattatggaagattcccacaagagtaccacgtcagagacagcacctcaacctggttcagcagttcagggagctcacatttctcatattgctcaacaggtatcatctttatcagaaagtgaggagtcccaggactcatccgacagcataggctcctcacagaaagcccacgggatcctagcacggcgcccatcttacagaaaaattttgaaagacttatcttctgaagatacacggggcagaaaaggagacggagaaaattctggagtttctgctgctgtcacttctatgtctgttccaactcccatctatcagactagcagcggacagtatattgccattgccccaaatggagccttacagttggcaagtccaggcacagatggagtacagggacttcagacattaaccatgacaaattcaggcagtactcagcaaggtacaactattcttcagtatgcacagacctctgatggacagcagatacttgtgcccagcaatcaggtggtcgtacaaactgcatcaggagatatgcaaacatatcagatccgaactacaccttcagctacttctctgccacaaactgtggtgatgacatctcctgtgactctcacctctcagacaactaagacagatgacccccaattgaaaagagaaataaggttaatgaaaaacagagaagctgctcgagaatgtcgcagaaagaagaaagaatatgtgaaatgcctggaaaaccgagttgcagtcctggaaaatcaaaataaaactctaatagaagagttaaaaactttgaaggatctttattccaataaaagtgtttgattcctaagaaagaaaatatttttgtggacatgcataaaaattaaatggatttcctagtggagttttataaattaaaaggtcaaaactgaagctttttatttaggcttttccaaatcaaggataaatatcttacgcacgatatctagtgacagaggagaaagtggaaaatgacctcaaggaagctacgggcacaactggaagctttgtagaaattaaacatattcaaggagcaagaaatgaactttcagcagtctaaattttctaaataaccaatagttgccaatctaaaatggcagagaagatgaaatttgataaactgaattttttttaaaaatccatttaccctacaggtttgcatttgtttgctgaaatttacctttttttagttatatatatgtgtgtgtgtgtgtgtaatttctgccaataaattctaaattacaaaggtaagagaaaacctagtacattactaaatatataaagtatatgttctgattatgtatacttgttctagtgtcaagtctttttaagtgggtttttaaaagtttgttattggacttgaatggatttttgagactaggttaattatttttgaggtcttatcctaaaaggcatctaaggtacatgaatggagtatggtgattttataacattttttatcagaatggaaaaagaactgtttaaaagtttgatacttttaaatagttggtttttttgcttactctggtaatgattttctacaaatacataataaattgtttttttgattcta

SEQ ID NO: 13454 - DNA, 1913 bp, Homo sapiens
cgcccccgcccccaggcttgtgtagatcatgccgccagtagcggccctgactgccgaggaaacggtagcttaggacagttggctgttaagtgacactgattctccccgccccgcctgacccccgagaaggaggcttgtcccccgctgcgtgagggggtggggaagtgggtagtgaattcggatctacctgggaggggggagtggaagttcccgccccggagagcggcgaggcggcagccacagttgattatggaagattcccacaagagtaccacgtcagagacagcacctcaacctggttcagcagttcagggagctcacatttctcatattgctcaacaggtatcatctttatcagaaagtgaggagtcccaggactcatccgacagcataggctcctcacagaaagcccacgggatcctagcacggcgcccatcttacagaaaaattttgaaagacttatcttctgaagatacacggggcagaaaaggagacggagaaaattctggagtttctgctgctgtcacttctatgtctgttccaactcccatctatcagactagcagcggacagtatattgccattgccccaaatggagccttacagttggcaagtccaggcacagatggagtacagggacttcagacattaaccatgacaaattcaggcagtactcagcaaggtacaactattcttcagtatgcacagacctctgatggacagcagatacttgtgcccagcaatcaggtggtcgtacaaactgcatcaggagatatgcaaacatatcagatccgaactacaccttcagctacttctctgccacaaactgtggtgatgacatctcctgtgactctcacctctcagacaactaagacagatgacccccaattgaaaagagaaataaggttaatgaaaaacagagaagctgctcgagaatgtcgcagaaagaagaaagaatatgtgaaatgcctggaaaaccgagttgcagtcctggaaaatcaaaataaaactctaatagaagagttaaaaactttgaaggatctttattccaataaaagtgtttgattcctaagaaagaaaatatttttgtggacatgcataaaaattaaatggatttcctagtggagttttataaattaaaaggtcaaaactgaagctttttatttaggcttttccaaatcaaggataaatatcttacgcacgatatctagtgacagaggagaaagtggaaaatgacctcaaggaagctacgggcacaactggaagctttgtagaaattaaacatattcaaggagcaagaaatgaactttcagcagtctaaattttctaaataaccaatagttgccaatctaaaatggcagagaagatgaaatttgataaactgaattttttttaaaaatccatttaccctacaggtttgcatttgtttgctgaaatttacctttttttagttatatatatgtgtgtgtgtgtgtgtaatttctgccaataaattctaaattacaaaggtaagagaaaacctagtacattactaaatatataaagtatatgttctgattatgtatacttgttctagtgtcaagtctttttaagtgggtttttaaaagtttgttattggacttgaatggatttttgagactaggttaattatttttgaggtcttatcctaaaaggcatctaaggtacatgaatggagtatggtgattttataacattttttatcagaatggaaaaagaactgttttttacaatccctattagattgcttctcagttccaacattctgatcccgctgaacatccccacttaattaggctgcggttcactagcatgcgccgccccactccctctttctctatccccaccccccttcttgcatcccaacccacgcttcccaccacgctgcttcccca

SEQ ID NO: 13455 - DNA, 1129 bp, Homo sapiens
cgcccccgcccccaggcttgtgtagatcatgccgccagtagcggccctgactgccgaggaaacggtagcttaggacagttggctgttaagtgacactgattctccccgccccgcctgacccccgagaaggaggcttgtcccccgctgcgtgagggggtggggaagtgggtagtgaattcggatctacctgggaggggggagtggaagttcccgccccggagagcggcgaggcggcagccacagttgattatggaagattcccacaagagtaccacgtcagagacagcacctcaacctggttcagcagttcagggagctcacatttctcatattgctcaacaggtatcatctttatcagaaagtgaggagtcccaggactcatccgacagcataggctcctcacagaaagcccacgggatcctagcacggcgcccatcttacagaaaaattttgaaagacttatcttctgaagatacacggggcagaaaaggagacggagaaaattctggagtttctgctgctgtcacttctatgtctgttccaactcccatctatcagactagcagcggacagtatattgccattgccccaaatggagccttacagttggcaagtccaggcacagatggagtacagggacttcagacattaaccatgacaaattcaggcagtactcagcaaggtacaactattcttcagtatgcacagacctctgatggacagcagatacttgtgcccagcaatcaggtggtcgtacaaactgcatcaggagatatgcaaacatatcagatccgaactacaccttcagctacttctctgccacaaactgtggtgatgacatctcctgtgactctcacctctcagacaactaagacagatgacccccaattgaaaagagaaataaggttaatgaaaaacagagaagctgctcgagaatgtcgcagaaagaagaaagaatatgtgaaatgcctggaaaaccgagttgcagtcctggaaaatcaaaataaaactctaatagaagagttaaaaactttgaaggatctttattccaataaaagtgtttgattcctaactgagataatgtattacaattctatcacaagaaacagcattatgacctatgttttcg

SEQ ID NO: 13456 - DNA, 487 bp, Homo sapiens
atacctgttttagtaaatagtgtttgtgggctttttgccactcctttgaattagtgtattatataaccttacaatagctattttctctttttgattaaagttgccattgccccaaatggagccttacagttggcaagtccaggcacagatggagtacagggacttcagacattaaccatgacaaattcaggcagtactcagcaaggtacaactattcttcagtatgcacagacctctgatggacagcagatacttgtgcccagcaatcaggtggtcgtacaaagtaagtatgctttctgtctacagaaagtctcctaacactgtcagagacacttactaactaactcattcactcttgtttaccatctagctgcatcaggagatatgcaaacatatcagatccgaactacaccttcagctacttctctgccacaaactgtggtgatgacatctcctgtgactctcacctctcagacaactaagacag

SEQ ID NO: 13457 - DNA, 2446 bp, Homo sapiens
cgcccccgcccccaggcttgtgtagatcatgccgccagtagcggccctgactgccgaggaaacggtagcttaggacagttggctgttaagtgacactgattctccccgccccgcctgacccccgagaaggaggcttgtcccccgctgcgtgagggggtggggaagtgggtagtgaattcggatctacctgggaggggggagtggaagttcccgccccggagagcggcgaggcggcagccacagttgattatggaagattcccacaagagtaccacgtcagagacagcacctcaacctggttcagcagttcagggagctcacatttctcatattgctcaacaggtatcatctttatcagaaagtgaggagtcccaggactcatccgacagcataggctcctcacagaaagcccacgggatcctagcacggcgcccatcttacagaaaaattttgaaagacttatcttctgaagatacacggggcagaaaaggagacggagaaaattctggagtttctgctgctgtcacttctatgtctgttccaactcccatctatcagactagcagcggacagtatattgccattgccccaaatggagccttacagttggcaagtccaggcacagatggagtacagggacttcagacattaaccatgacaaattcaggcagtactcagcaaggtacaactattcttcagtatgcacagacctctgatggacagcagatacttgtgcccagcaatcaggtggtcgtacaaactgcatcaggagatatgcaaacatatcagatccgaactacaccttcagctacttctctgccacaaactgtggtgatgacatctcctgtgactctcacctctcagacaactaagacagatgacccccaattgaaaagagaaataaggttaatgaaaaacagagaagctgctcgagaatgtcgcagaaagaagaaagaatatgtgaaatgcctggaaaaccgagttgcagtcctggaaaatcaaaataaaactctaatagaagagttaaaaactttgaaggatctttattccaataaaagtgtttgattcctaagaaagaaaatatttttgtggacatgcataaaaattaaatggatttcctagtggagttttataaattaaaaggtcaaaactgaagctttttatttaggcttttccaaatcaaggataaatatcttacgcacgatatctagtgacagaggagaaagtggaaaatgacctcaaggaagctacgggcacaactggaagctttgtagaaattaaacatattcaaggagcaagaaatgaactttcagcagtctaaattttctaaataaccaatagttgccaatctaaaatggcagagaagatgaaatttgataaactgaattttttttaaaaatccatttaccctacaggtttgcatttgtttgctgaaatttacctttttttagttatatatatgtgtgtgtgtgtgtgtaatttctgccaataaattctaaattacaaaggtaagagaaaacctagtacattactaaatatataaagtatatgttctgattatgtatacttgttctagtgtcaagtctttttaagtgggtttttaaaagtttgttattggacttgaatggatttttgagactaggttaattatttttgaggtcttatcctaaaaggcatctaaggtacatgaatggagtatggtgattttataacattttttatcagaatggaaaaagaactgtttaaaagtttgatacttttaaatagttggtttttttgcttactctggtaatgattttctacaaatacataataaattgtttttttgattctatattctgtatgcagttgaatatccattacttattctgctgtgctttaatagaatggaatgtttacaggcccttaaaatattatttttaaaaaaccttctgaagatacataccaaagtttttccaagaagattttataatcaatttaataatgtaaggtttatcagattctataatagtatagttattaaggcaattttatgttagagactattttgtaatgtagtgagtggtacctttataagaaaagtgactgccaatatatttttatagctgatctttataaattctaatgttgagtttttaatgattattttaaatgtttatatagtttagtaaaatttgcatctcaaagtatcatttttatattatgggacgttttcagattggctaatatttgcattgtaaattttgtatgcagtttatctaaaattcaaaaatactgtcagtacaccagcgtttaacatctatattccaatttgtatacagtttaaaattgtactgcaaaactattgtgtgctcttacacagtatgcatcatattgttgtctgtgaaattaaaggacatttgatagtctactgaatgtaaaatataatgcttggtatatgaatgat

SEQ ID NO: 13458 - DNA, 2342 bp, Homo sapiens
cccttccagtcgtgcgtctcctcctttccctcgcccccaaataaaagtaaagcccgaaaccgcccgccgcggggtggctttcgcctcagaagccgccctttgcagtcgcaggcgctagctctccgtgggaggtctcgagttgattatggaagattcccacaagagtaccacgtcagagacagcacctcaacctggttcagcagttcagggagctcacatttctcatattgctcaacaggtatcatctttatcagaaagtgaggagtcccaggactcatccgacagcataggctcctcacagaaagcccacgggatcctagcacggcgcccatcttacagaaaaattttgaaagacttatcttctgaagatacacggggcagaaaaggagacggagaaaattctggagtttctgctgctgtcacttctatgtctgttccaactcccatctatcagactagcagcggacagtatattgccattgccccaaatggagccttacagttggcaagtccaggcacagatggagtacagggacttcagacattaaccatgacaaattcaggcagtactcagcaaggtacaactattcttcagtatgcacagacctctgatggacagcagatacttgtgcccagcaatcaggtggtcgtacaaactgcatcaggagatatgcaaacatatcagatccgaactacaccttcagctacttctctgccacaaactgtggtgatgacatctcctgtgactctcacctctcagacaactaagacagatgacccccaattgaaaagagaaataaggttaatgaaaaacagagaagctgctcgagaatgtcgcagaaagaagaaagaatatgtgaaatgcctggaaaaccgagttgcagtcctggaaaatcaaaataaaactctaatagaagagttaaaaactttgaaggatctttattccaataaaagtgtttgattcctaagaaagaaaatatttttgtggacatgcataaaaattaaatggatttcctagtggagttttataaattaaaaggtcaaaactgaagctttttatttaggcttttccaaatcaaggataaatatcttacgcacgatatctagtgacagaggagaaagtggaaaatgacctcaaggaagctacgggcacaactggaagctttgtagaaattaaacatattcaaggagcaagaaatgaactttcagcagtctaaattttctaaataaccaatagttgccaatctaaaatggcagagaagatgaaatttgataaactgaattttttttaaaaatccatttaccctacaggtttgcatttgtttgctgaaatttacctttttttagttatatatatgtgtgtgtgtgtgtgtaatttctgccaataaattctaaattacaaaggtaagagaaaacctagtacattactaaatatataaagtatatgttctgattatgtatacttgttctagtgtcaagtctttttaagtgggtttttaaaagtttgttattggacttgaatggatttttgagactaggttaattatttttgaggtcttatcctaaaaggcatctaaggtacatgaatggagtatggtgattttataacattttttatcagaatggaaaaagaactgtttaaaagtttgatacttttaaatagttggtttttttgcttactctggtaatgattttctacaaatacataataaattgtttttttgattctatattctgtatgcagttgaatatccattacttattctgctgtgctttaatagaatggaatgtttacaggcccttaaaatattatttttaaaaaaccttctgaagatacataccaaagtttttccaagaagattttataatcaatttaataatgtaaggtttatcagattctataatagtatagttattaaggcaattttatgttagagactattttgtaatgtagtgagtggtacctttataagaaaagtgactgccaatatatttttatagctgatctttataaattctaatgttgagtttttaatgattattttaaatgtttatatagtttagtaaaatttgcatctcaaagtatcatttttatattatgggacgttttcagattggctaatatttgcattgtaaattttgtatgcagtttatctaaaattcaaaaatactgtcagtacaccagcgtttaacatctatattccaatttgtatacagtttaaaattgtactgcaaaactattgtgtgctcttacacagtatgcatcatattgttgtctgtgaaattaaaggacatttgatagtctactgaatgtaaaatataatgcttggtatatgaatgat

SEQ ID NO: 13459 - DNA, 441 bp, Homo sapiens
ttgtagaaacaggggtcttgtcatgttgcccaggctggtcttgaactcctgggctcaagtgatcctctcaccttagcatccccaaatgttgggattacagatgtgagccactgtgctcggtaccttctttcagttgtgccatatcttgactttgggccaacacccccacacagcctggaaacatttatgatttggtgcttggagatcagagatgtcactaggagcagagcctgcctcagtctagctctggccttggtcctggggaagctgtatcctccaaccttactttgtcttccttccctgatctgatcccactgaccagcaccttatcgacgaggttgcttaaagtaaatcaccatcccgttgagagaggaagtgaatcaaagttagagggaattaacaaatttagtaaacggggaagcatcccaaatccaccaacca

SEQ ID NO: 13460 - DNA, 445 bp, Homo sapiens
cattagaattctattagaaatcaaaacaagatcttcaaatatctggaggaaaaatttcccaaatagtaaaaaaaaaaataaaaataaacttaacccattgatcaaagaagttgtcacaagggatattcgaagctactttgaacagaaataaaatgaaaccgtaacttaatgaaatttgtggggttccactagagttgttcttagaaggaaatatgtagttttaaatgtttatattagaaaagaaaaaatgtctaaagtgaatcatctaggcttccagttataactagaataaaaagaacatgttaaaccctacaagtagatagaaaagaggaaatattaaagatgaaagcaaaagtcagtgacagaaaaaactagagaaaaattaatgaaaccagtagttgtttatgtggtaaataaaattagtaataatacctctaagtagact

SEQ ID NO: 13461 - DNA, 344 bp, Homo sapiens
tgtcctcagaattagtccaggggtatttatccacaatccccattccctcaacttgagtgttgaccctgcggatgttaaatgcacttcctccaggctttcctgagaaatcacttatggtgccagagctgtcatgtagacaagtagagagacaaagaaagttgagctagaaactgtcagattctatagtgagtttccatgatggctgcagggtaattcagagggtgatctagagcatatggggcaaggcatgaaaagcacctctgaaaaatcctgtctccaaatatgtgtaaaaataagttagcacaatatggatgtgaactttcttagtactgttcatggataca

SEQ ID NO: 13462 - DNA, 2047 bp, Homo sapiens
ctgcttcggcctcccagcgtgctgggattataggcgtgagccaccacgcccggcctgtttcctttggtttaaagtggattcgaatcagtgttaaatcagaaaatcagggttttctaggaaattgggaattagttgccagaaaggaaactgaactatgcagaagcaaataagagctgggatgaggctggatggggtgactgacagtccagatcattgaaacagattgggtcgtcggaaactggtccagatgaggctggatggggtgactgacagtctggatcattgaaactgattaggtcgtcagaaacgggtccagacgaggatgaggctgaggctggatggggtgactgacagtctggatcattgaaactgattgggtggttggtcagaaacgggtccagatgaggatgaggctgaggctggatggggtgactgacagtctggatcattgaaactgattgggtggttggtcagaaacgggtccagatgaggatgaggctggatggggtgactgacagtctggatcattgaaactgattgggtcgtcagaaactggtccagatgaggctgggtggggtgactgacagtttggatcattgaaactgattgggtggtcagaaactggtccagatgaggatgtggctggatggggtgactgacagtctggatcattgaaactgattgggtggtcagaaactggtccagatgaggatgtggctggatggggtgactgacagtctggatcattgaaactgattgggtggtgagaaatgggtccagatgaggatgaggctggatggggtgactgacagtctggatcattgaaactgattgggtggtgagaaatgggtccagatgaggatgaggctggatggggtgactgacagtctggatcattgaaactggtccactatgacgcagcaggggcagtttggcagagcatcctcttcccttgtccttgtgaaagaacacaggaaacatttgggttttacagcttttcacaccctactatcaggcatcagaatcaaaattagttactaaattgggtgaattttggaaacctgcatttctatgcatctgctattccagaaaaaaatgggaatgtattacaggagagttacctcacagtgtcttatgttgtggaacctgaaacataaccacgtgttttcttatatgatcatttgtgttgatactgcttttatttgagtttatgaacagaaatagaaagtatggtgcttgggttttgccctttcttactcctgaaagttaaatcagaagacactgatttcattttgtgaaatttagctcagagactattgatcttttgtttcattaatatgaacaactattagtaaaaaatagctttaacagcatttctgctgatatctagtaatctattcttttaatgtgaaaataagataaaatgtcctggagctaattctagcttaaatttgccagtatttctgtatgtcattaagtttttttcctctaaggttggtaatagaattttgttaatctttgcatacctgatggcatctatgtcaatgctgattgggtaattataaattctgtgctaatttaaaacttaatttgcctcttaaggtgattgtcctctgagtaatgattgtagttaaatgaagtatagcttgcaactatactatcacatgggtcgttaagtaaaaataaataaaccaaatttgtctgagacaggctaagatcaatcttctcatcaaaccaatttttctctaagagcaatttcactttcagttttagggtggacattcttgaatgcctcaaattaaacgttatctatttaatcttcctggaatagtctgtgaccaaaaaggagggtgtgatatatttaggtgtaaatatatcacatatatggtgtgatatatttgggatttatatattcagctcattctctgtgaagaagtcttcctgactaaaattggtttcaagataaactaatttctgttagtatttctactctgcctaccatgtatgcctttttgttagaaactaataaatgtatcagtcactagca

SEQ ID NO: 13463 - DNA, 1736 bp, Homo sapiens
ctgcttcggcctcccagcgtgctgggattataggcgtgagccaccacgcccggcctgtttcctttggtttaaagtggattcgaatcagtgttaaatcagaaaatcagggttttctaggaaattgggaattagttgccagaaaggaaactgaactatgcagaagcaaagggtccagatgaggatgaggctggatggggtgactgacagtctggatcattgaaactgattgggtcgtcagaaactggtccagatgaggctgggtggggtgactgacagtttggatcattgaaactgattgggtggtcagaaactggtccagatgaggatgtggctggatggggtgactgacagtctggatcattgaaactgattgggtggtcagaaactggtccagatgaggatgtggctggatggggtgactgacagtctggatcattgaaactgattgggtggtgagaaatgggtccagatgaggatgaggctggatggggtgactgacagtctggatcattgaaactgattgggtggtgagaaatgggtccagatgaggatgaggctggatggggtgactgacagtctggatcattgaaactggtccactatgacgcagcaggggcagtttggcagagcatcctcttcccttgtccttgtgaaagaacacaggaaacatttgggttttacagcttttcacaccctactatcaggcatcagaatcaaaattagttactaaattgggtgaattttggaaacctgcatttctatgcatctgctattccagaaaaaaatgggaatgtattacaggagagttacctcacagtgtcttatgttgtggaacctgaaacataaccacgtgttttcttatatgatcatttgtgttgatactgcttttatttgagtttatgaacagaaatagaaagtatggtgcttgggttttgccctttcttactcctgaaagttaaatcagaagacactgatttcattttgtgaaatttagctcagagactattgatcttttgtttcattaatatgaacaactattagtaaaaaatagctttaacagcatttctgctgatatctagtaatctattcttttaatgtgaaaataagataaaatgtcctggagctaattctagcttaaatttgccagtatttctgtatgtcattaagtttttttcctctaaggttggtaatagaattttgttaatctttgcatacctgatggcatctatgtcaatgctgattgggtaattataaattctgtgctaatttaaaacttaatttgcctcttaaggtgattgtcctctgagtaatgattgtagttaaatgaagtatagcttgcaactatactatcacatgggtcgttaagtaaaaataaataaaccaaatttgtctgagacaggctaagatcaatcttctcatcaaaccaatttttctctaagagcaatttcactttcagttttagggtggacattcttgaatgcctcaaattaaacgttatctatttaatcttcctggaatagtctgtgaccaaaaaggagggtgtgatatatttaggtgtaaatatatcacatatatggtgtgatatatttgggatttatatattcagctcattctctgtgaagaagtcttcctgactaaaattggtttcaagataaactaatttctgttagtatttctactctgcctaccatgtatgcctttttgttagaaactaataaatgtatcagtcactagca

SEQ ID NO: 13464 - DNA, 2164 bp, Homo sapiens
ctgcttcggcctcccagcgtgctgggattataggcgtgagccaccacgcccggcctgtttcctttggtttaaagtggattcgaatcagtgttaaatcagaaaatcagggttttctaggaaattgggaattagttgccagaaaggaaactgaactatgcagaagcaaataagagctgggatgaggctggatggggtgactgacagtccagatcattgaaacagattgggtcgtcggaaactggtccagatgaggctggatggggtgactgacagtctggatcattgaaactgattaggtcgtcagaaacgggtccagacgaggatgaggctgaggctggatggggtgactgacagtctggatcattgaaactgattgggtggttggtcagaaacgggtccagatgaggatgaggctgaggctggatggggtgactgacagtctggatcattgaaactgattgggtggttggtcagaaacgggtccagatgaggatgaggctggatggggtgactgacagtctggatcattgaaactgattgggtcgtcagaaactggtccagatgaggctgggtggggtgactgacagtttggatcattgaaactgattgggtggtcagaaactggtccagatgaggatgtggctggatggggtgactgacagtctggatcattgaaactgattgggtggtcagaaactggtccagatgaggatgtggctggatggggtgactgacagtctggatcattgaaactgattgggtggtgagaaatgggtccagatgaggatgaggctggatggggtgactgacagtctggatcattgaaactgattgggtggtgagaaatgggtccagatgaggatgaggctggatggggtgactgacagtctggatcattgaaactggtccactatgacgcagcaggggcagtttggcagagcatcctcttcccttgtccttgtgaaagaacacaggaaacatttgggttttacagcttttcacaccctactatcaggcatcagaatcaaaattagttactaaattgggtgaattttggaaacctgcatttctatgcatctgctattccagaaaaaaatgggaatgtattacaggagagttacctcacagtgtcttatgttgtggaacctgaaacataaccacgtgttttcttatatgatcatttgtgttgatactgcttttatttgagtttatgaacagaaatagaaagtatggtgcttgggttttgccctttcttactcctgaaagttaaatcagaagacactgatttcattttgtgaaatttagctcagagactattgatcttttgtttcattaatatgaacaactattagtaaaaaatagctttaacagcatttctgctgatatctagtaatctattcttttaatgtgaaaataagataaaatgtcctggagctaattctagcttaaatttgccagtatttctgtatgtcattaagtttttttcctctaaggttggtaatagaattttgttaatctttgcatacctgatggcatctatgtcaatgctgattgggtaattataaattctgtgctaatttaaaacttaatttgcctcttaaggtgattgtcctctgagtaatgattgtagttaaatgaagtatagcttgcaactatactatcacatgggtcgttaagtaaaaataaataaaccaaatttgtctgagacaggctaagatcaatcttctcatcaaaccaatttttctctaagagcaatttcactttcagttttagggtggacattcttgaatgcctcaaattaaacgttatctatttaatcttcctggaatagtctgtgaccaaaaaggagggtgtgatatatttaggtgtaaatatatcacatatatggtgtgatatatttgggatttatatattcagctcattctctgtgaagaagtcttcctgactaaaattggtttcaagataaactaatttctgttagtatttctactctgcctaccatgtatgcctttttgttagaaactaataaatgtatcagtcactagcaggtactggtcctttttcctctcatttttgtggaaaggatatgcaaacactgaatttctcagggagtactaaggctgtgcagaggctgagaatctgaaaaataaaatactaaaaataa

SEQ ID NO: 13465 - DNA, 541 bp, Homo sapiens
  misc_feature (415)..(415): n is a, c, g, or t
atttctaagtagttgagttgttgtgatgagggtacgactgctaatggtcggcaggttttgttttcattggtgaatctggtgtcatcatattccggtcatatgttgaaatattctttgtttaggtctggaagtagaggatctcactctgcacgtccacattgtgttgtttttaaaatgatgtctctgggagtatggatttctagaatttcaaatctgagtgaaggtccgggcatgtgtgggcctcatcacctgggccttgacagtgaactttgtgggctgtgtttcagatttcaaagatttgccccatagctggggaaggagttgtgcatttttgctaatagtcggtgtcagggaatgtaggatgctcgagctggggaaagttagagagggaaggaacatttatatataaataatnggatagttgaatattaggatcagattaatttgggctgatgaaagttttttttttttaaagcagttgtgcactctgggaaggaagtcttttcacaggttcacttgatagggattctttaaggcgagg

SEQ ID NO: 13466 - DNA, 759 bp, Homo sapiens
tgagatggagtctcactctgtctcccaggctggagtgcagtggtgtgatcttggctcactgcaacctctgcctcctgggttcaagcgattctcctgcctacaggaggattataggtgtccaccaccatacctggctaatttttgtatttttagtagagacagggtttcgccatgttggccaggctggtcttgaactcctgacctcaggtgatccaccctccttggcctctcagagtgctgggattacaggcgtgagccactgcgccccagccccttctattgatttttataactccatcctcttgattttcccctcttattttccattggtttgtctttgttcagttgttcaattattccttaaatgttgatgtttcttggccttcttacatcagggctgacaaataggttatacttacacttctgtattactggcagttccctgaaaggactggatttgaaaggattttgagtggtgtcctacccagtgggtaggaatactgggatctgcataggtaggaaggaagggataacagaacatgtgtcacatctttgccatccctgctgtcttcttcttgggtactttaactgagattcatggcttctactatcacttacatgccgaaacatttaaatctctttatttagccaagatcttgccacttggcagttctttatatccatcttccttttacatagctccgcttggcatcccaccagcacctcagactcatgatgaggattgagcttatcactttg

SEQ ID NO: 13467 - DNA, 612 bp, Homo sapiens
  misc_feature (301)..(301): n is a, c, g, or t
gcattttacttccctttaatcaaaaaataaataagtacactccacagggactttttttttttaatgaggaaaaaaggtgaaagaacaaaataaaacaaacaaaaccaaaacctacagggactcttcatttctggcctgcaaggaatcaccagccaggctgagggacacggacagccagcccagctgggccatgccaggtgactcacaaggctgaaaagggagccgctccgctctgggtggttcagtcccagccaggggttgggatgtcctgcctgcggaggggccacagccacatggggcncactcagcagcaggggcacaccgatccctattctgcaaggtgtatcccacaaggcccttcctcttggtggcacctgtgacctctgcagaatttcattttctggtcatcctttcctctcgtggaccccacagcactgcctcaagctcacctggcttttcctgactcactggctcttcctcttctctcctttcatgagtcccttcagattctcttttgttatctacctttgttgaaaggcaacctcagcaactcccatggtcacaacagtcagaacaaacgggtttctatctttagtcctaattctgccttaa

SEQ ID NO: 13468 - DNA, 402 bp, Homo sapiens
cacaccgacgggaaagctggttcctttgccatatcagggcaccactgggtgcagcgtttggcagacctgggtttgaatcctggcttctctgagccttcgtttccgcatctgtgtctgtcattaaaacacttaagaattacctccaaggttttccgcttcaatgtgtcctcagtggagaaaaatagaaccaacctattccgagcagaattccgggtcttgcgggtgcccaaccccagctctaagcggaatgagcagaggatcgagctcttccaggtaactcctctctcagagcagaaaccacaccgacgggaaagctggttcctttgccatatcagggcaccactgggtgcagcgtttggcagacctgggtttgaatcctggcttctctgagccttcgtttcc

SEQ ID NO: 13469 - DNA, 623 bp, Homo sapiens
gtgcatgtgtgtgtgtgtgagagagagagggagaggagcgagagggagagggagagggagagagagaaagggagggaagcagagagtcaagtccaagggaatgagcgagagaggcagagacaggggaagaggcgtgcgagagaaggaataacagctttccggagcaggcgtgccgtgaactggcttctattttattttatttttttctcctttttattttttaaagagaagcaggggacagaagcaatggccgaggcagaagacaagccgaggtgctggtgaccctgggcgtctgagtggatgattggggctgctgcgctcagaggcctgcctccctgccttccaatgcatataaccccacaccccagccaatgaagacgagaggcagcgtgaacaaagtcatttagaaagcccccgaggaagtgtaaacaaaagagaaagcatgaatggagtgcctgagagacaagtgtgtcctgtactgcccccacctttagctgggccagcaactgcccggccctgcttctcatttataaaaaataaaaaggagagaaaaaataaaataaaatagaagccagttcacagcacgcctgctccggaaagctgttattccattctctctcact

SEQ ID NO: 13470 - DNA, 3425 bp, Homo sapiens
gtgcatgtgtgtgtgtgtgagagagagagggagaggagcgagagggagagggagagggagagagagaaagggagggaagcagagagtcaagtccaagggaatgagcgagagaggcagagacaggggaagaggcgtgcgagagaaggaataacagctttccggagcaggcgtgccgtgaactggcttctattttattttatttttttctcctttttattttttaaagagaagcaggggacagaagcaatggccgaggcagaagacaagccgaggtgctggtgaccctgggcgtctgagtggatgattggggctgctgcgctcagaggcctgcctccctgccttccaatgcatataaccccacaccccagccaatgaagacgagaggcagcgtgaacaaagtcatttagaaagcccccgaggaagtgtaaacaaaagagaaagcatgaatggagtgcctgagagacaagtgtgtcctgtactgcccccacctttagctgggccagcaactgcccggccctgcttctccccacctactcactggtgatctttttttttttacttttttttcccttttcttttccattctcttttcttattttctttcaaggcaaggcaaggattttgattttgggacccagccatggtccttctgcttcttctttaaaatacccactttctccccatcgccaagcggcgtttggcaatatcagatatccactctatttatttttacctaaggaaaaactccagctcccttcccactcccagctgccttgccacccctcccagccctctgcttgccctccacctggcctgctgggagtcagagcccagcaaaacctgtttagacacatggacaagaatcccagcgctacaaggcacacagtccgcttcttcgtcctcagggttgccagcgcttcctggaagtcctgaagctctcgcagtgcagtgagttcatgcaccttcttgccaagcctcagtctttgggatctggggaggccgcctggttttcctccctccttctgcacgtctgctggggtctcttcctctccaggccttgccgtccccctggcctctcttcccagctcacacatgaagatgcacttgcaaagggctctggtggtcctggccctgctgaactttgccacggtcagcctctctctgtccacttgcaccaccttggacttcggccacatcaagaagaagagggtggaagccattaggggacagatcttgagcaagctcaggctcaccagcccccctgagccaacggtgatgacccacgtcccctatcaggtcctggccctttacaacagcacccgggagctgctggaggagatgcatggggagagggaggaaggctgcacccaggaaaacaccgagtcggaatactatgccaaagaaatccataaattcgacatgatccaggggctggcggagcacaacgaactggctgtctgccctaaaggaattacctccaaggttttccgcttcaatgtgtcctcagtggagaaaaatagaaccaacctattccgagcagaattccgggtcttgcgggtgcccaaccccagctctaagcggaatgagcagaggatcgagctcttccagatccttcggccagatgagcacattgccaaacagcgctatatcggtggcaagaatctgcccacacggggcactgccgagtggctgtcctttgatgtcactgacactgtgcgtgagtggctgttgagaagagagtccaacttaggtctagaaatcagcattcactgtccatgtcacacctttcagcccaatggagatatcctggaaaacattcacgaggtgatggaaatcaaattcaaaggcgtggacaatgaggatgaccatggccgtggagatctggggcgcctcaagaagcagaaggatcaccacaaccctcatctaatcctcatgatgattcccccacaccggctcgacaacccgggccaggggggtcagaggaagaagcgggctttggacaccaattactgcttccgcaacttggaggagaactgctgtgtgcgccccctctacattgacttccgacaggatctgggctggaagtgggtccatgaacctaagggctactatgccaacttctgctcaggcccttgcccatacctccgcagtgcagacacaacccacagcacggtgctgggactgtacaacactctgaaccctgaagcatctgcctcgccttgctgcgtgccccaggacctggagcccctgaccatcctgtactatgttgggaggacccccaaagtggagcagctctccaacatggtggtgaagtcttgtaaatgtagctgagaccccacgtgcgacagagagaggggagagagaaccaccactgcctgactgcccgctcctcgggaaacacacaagcaacaaacctcactgagaggcctggagcccacaaccttcggctccgggcaaatggctgagatggaggtttccttttggaacatttctttcttgctggctctgagaatcacggtggtaaagaaagtgtgggtttggttagaggaaggctgaactcttcagaacacacagactttctgtgacgcagacagaggggatggggatagaggaaagggatggtaagttgagatgttgtgtggcaatgggatttgggctaccctaaagggagaaggaagggcagagaatggctgggtcagggccagactggaagacacttcagatctgaggttggatttgctcattgctgtaccacatctgctctagggaatctggattatgttatacaaggcaagcattttttttttttttaaagacaggttacgaagacaaagtcccagaattgtatctcatactgtctgggattaagggcaaatctattacttttgcaaactgtcctctacatcaattaacatcgtgggtcactacagggagaaaatccaggtcatgcagttcctggcccatcaactgtattgggccttttggatatgctgaacgcagaagaaagggtggaaatcaaccctctcctgtctgccctctgggtccctcctctcacctctccctcgatcatatttccccttggacacttggttagacgccttccaggtcaggatgcacatttctggattgtggttccatgcagccttggggcattatgggttcttcccccacttcccctccaagaccctgtgttcatttggtgttcctggaagcaggtgctacaacatgtgaggcattcggggaagctgcacatgtgccacacagtgacttggccccagacgcatagactgaggtataaagacaagtatgaatattactctcaaaatctttgtataaataaatatttttggggcatcctggatgatttcatcttctggaatattgtttctagaacagtaaaagccttattctaaggtgaaaaaaaa

SEQ ID NO: 13471 - DNA, 1620 bp, Homo sapiens
tgcaacctctgcttcctggattcaggtgatcctcccacctcagcctcccaagtagctgggattacaggcgcctgccaccacagccagctaatttttttgtatttttagtagagatggggtttcaccatgctggccaggctggtctcaaactcctgacctgaagtgatctgcctgcctctgcctcccaagtcctgggactacagctgtgagccactgcacccggcccccaacagttcctcttaaagagcacccgtggccattctagcacttgctcagcttctgggactgcccctggaactgggcgacttcctgggttccaggcctgagacttggccttccaacctctcactgacatgtcccttcccaggtgctgggactgtacaacactctgaaccctgaagcatctgcctcgccttgctgcgtgccccaggacctggagcccctgaccatcctgtactatgttgggaggacccccaaagtggagcagctctccaacatggtggtgaagtcttgtaaatgtagctgagaccccacgtgcgacagagagaggggagagagaaccaccactgcctgactgcccgctcctcgggaaacacacaagcaacaaacctcactgagaggcctggagcccacaaccttcggctccgggcaaatggctgagatggaggtttccttttggaacatttctttcttgctggctctgagaatcacggtggtaaagaaagtgtgggtttggttagaggaaggctgaactcttcagaacacacagactttctgtgacgcagacagaggggatggggatagaggaaagggatggtaagttgagatgttgtgtggcaatgggatttgggctaccctaaagggagaaggaagggcagagaatggctgggtcagggccagactggaagacacttcagatctgaggttggatttgctcattgctgtaccacatctgctctagggaatctggattatgttatacaaggcaagcattttttttttttttaaagacaggttacgaagacaaagtcccagaattgtatctcatactgtctgggattaagggcaaatctattacttttgcaaactgtcctctacatcaattaacatcgtgggtcactacagggagaaaatccaggtcatgcagttcctggcccatcaactgtattgggccttttggatatgctgaacgcagaagaaagggtggaaatcaaccctctcctgtctgccctctgggtccctcctctcacctctccctcgatcatatttccccttggacacttggttagacgccttccaggtcaggatgcacatttctggattgtggttccatgcagccttggggcattatgggttcttcccccacttcccctccaagaccctgtgttcatttggtgttcctggaagcaggtgctacaacatgtgaggcattcggggaagctgcacatgtgccacacagtgacttggccccagacgcatagactgaggtataaagacaagtatgaatattactctcaaaatctttgtataaataaatatttttggggcatcctggatgatttcatcttctggaatattgtttctagaacagtaaaagccttattctaaggtgaaaaaaaa

SEQ ID NO: 13472 - DNA, 2415 bp, Homo sapiens
gtgcatgtgtgtgtgtgtgagagagagagggagaggagcgagagggagagggagagggagagagagaaagggagggaagcagagagtcaagtccaagggaatgagcgagagaggcagagacaggggaagaggcgtgcgagagaaggaataacagctttccggagcaggcgtgccgtgaactggcttctattttattttatttttttctcctttttattttttaaagagaagcaggggacagaagcaatggccgaggcagaagacaagccgaggtgctggtgaccctgggcgtctgagtggatgattggggctgctgcgctcagaggcctgcctccctgccttccaatgcatataaccccacaccccagccaatgaagacgagaggcagcgtgaacaaagtcatttagaaagcccccgaggaagtgtaaacaaaagagaaagcatgaatggagtgcctgagagacaagtgtgtcctgtactgcccccacctttagctgggccagcaactgcccggccctgcttctccccacctactcactggtgatctttttttttttacttttttttcccttttcttttccattctcttttcttattttctttcaaggcaaggcaaggattttgattttgggacccagccatggtccttctgcttcttctttaaaatacccactttctccccatcgccaagcggcgtttggcaatatcagatatccactctatttatttttacctaaggaaaaactccagctcccttcccactcccagctgccttgccacccctcccagccctctgcttgccctccacctggcctgctgggagtcagagcccagcaaaacctgtttagacacatggacaagaatcccagcgctacaaggcacacagtccgcttcttcgtcctcagggttgccagcgcttcctggaagtcctgaagctctcgcagtgcagtgagttcatgcaccttcttgccaagcctcagtctttgggatctggggaggccgcctggttttcctccctccttctgcacgtctgctggggtctcttcctctccaggccttgccgtccccctggcctctcttcccagctcacacatgaagatgcacttgcaaagggctctggtggtcctggccctgctgaactttgccacggtcagcctctctctgtccacttgcaccaccttggacttcggccacatcaagaagaagagggtggaagccattaggggacagatcttgagcaagctcaggctcaccagcccccctgagccaacggtgatgacccacgtcccctatcaggtcctggccctttacaacagcacccgggagctgctggaggagatgcatggggagagggaggaaggctgcacccaggaaaacaccgagtcggaatactatgccaaagaaatccataaattcgacatgatccaggggctggcggagcacaacgaactggctgtctgccctaaaggaattacctccaaggttttccgcttcaatgtgtcctcagtggagaaaaatagaaccaacctattccgagcagaattccgggtcttgcgggtgcccaaccccagctctaagcggaatgagcagaggatcgagctcttccagatccttcggccagatgagcacattgccaaacagcgctatatcggtggcaagaatctgcccacacggggcactgccgagtggctgtcctttgatgtcactgacactgtgcgtgagtggctgttgagaagagagtccaacttaggtctagaaatcagcattcactgtccatgtcacacctttcagcccaatggagatatcctggaaaacattcacgaggtgatggaaatcaaattcaaaggcgtggacaatgaggatgaccatggccgtggagatctggggcgcctcaagaagcagaaggatcaccacaaccctcatctaatcctcatgatgattcccccacaccggctcgacaacccgggccaggggggtcagaggaagaagcgggctttggacaccaattactgcttccgcaacttggaggagaactgctgtgtgcgccccctctacattgacttccgacaggatctgggctggaagtgggtccatgaacctaagggctactatgccaacttctgctcaggcccttgcccatacctccgcagtgcagacacaacccacagcacggtatggagcaggctcatgccatctgaggcactggggctgaccgaccagaccacttgttaaaaagaatgagtgaaggattgaatgttgagtgagcaaatgatggtctggggtgagtaaaattcctctggtgaaggttctgatcttggcaccctgactcagttctactcagtcacattctgcccttttaaattcctaccatagtttcaaccagctttttaatttgctttgtccaaagctctctgt

SEQ ID NO: 13473 - DNA, 1871 bp, Homo sapiens
gtgcatgtgtgtgtgtgtgagagagagagggagaggagcgagagggagagggagagggagagagagaaagggagggaagcagagagtcaagtccaagggaatgagcgagagaggcagagacaggggaagaggcgtgcgagagaaggaataacagctttccggagcaggcgtgccgtgaactggcttctattttattttatttttttctcctttttattttttaaagagaagcaggggacagaagcaatggccgaggcagaagacaagccgaggtgctggtgaccctgggcgtctgagtggatgattggggctgctgcgctcagaggcctgcctccctgccttccaatgcatataaccccacaccccagccaatgaagacgagaggcagcgtgaacaaagtcatttagaaagcccccgaggaagtgtaaacaaaagagaaagcatgaatggagtgcctgagagacaagtgtgtcctgtactgcccccacctttagctgggccagcaactgcccggccctgcttctccccacctactcactggtgatctttttttttttacttttttttcccttttcttttccattctcttttcttattttctttcaaggcaaggcaaggattttgattttgggacccagccatggtccttctgcttcttctttaaaatacccactttctccccatcgccaagcggcgtttggcaatatcagatatccactctatttatttttacctaaggaaaaactccagctcccttcccactcccagctgccttgccacccctcccagccctctgcttgccctccacctggcctgctgggagtcagagcccagcaaaacctgtttagacacatggacaagaatcccagcgctacaaggcacacagtccgcttcttcgtcctcagggttgccagcgcttcctggaagtcctgaagctctcgcagtgcagtgagttcatgcaccttcttgccaagcctcagtctttgggatctggggaggccgcctggttttcctccctccttctgcacgtctgctggggtctcttcctctccaggccttgccgtccccctggcctctcttcccagctcacacatgaagatgcacttgcaaagggctctggtggtcctggccctgctgaactttgccacggtcagcctctctctgtccacttgcaccaccttggacttcggccacatcaagaagaagagggtggaagccattaggggacagatcttgagcaagctcaggctcaccagcccccctgagccaacggtgatgacccacgtcccctatcaggtcctggccctttacaacagcacccgggagctgctggaggagatgcatggggagagggaggaaggctgcacccaggaaaacaccgagtcggaatactatgccaaagaaatccataaattcgacatgatccaggggctggcggagcacaacgaactggctgtctgccctaaaggaattacctccaaggttttccgcttcaatgtgtcctcagtggagaaaaatagaaccaacctattccgagcagaattccgggtcttgcgggtgcccaaccccagctctaagcggaatgagcagaggatcgagctcttccagatccttcggccagatgagcacattgccaaacagcgctatatcggtggcaagaatctgcccacacggggcactgccgagtggctgtcctttgatgtcactgacactgtgcgtgagtggctgttgagaagagagtccaacttaggtctagaaatcagcattcactgtccatgtcacacctttcagcccaatggagatatcctggaaatatgatcgagggagaggtgagaggagggacccagagggcagacaggagatggttgatg

SEQ ID NO: 13474 - DNA, 415 bp, Homo sapiens
acggtagatctcattaattattttatccatctgattggtgaagaatgtgtctgagcacctctgtatgtttaagggccatgcataattccattttcctgtgtgcacatccccatggattgtggttccatgcagccttggggcattatgggttcttcccccacttcccctccaagaccctgtgttcatttggtgttcctggaagcaggtgctacaacatgtgaggcattcggggaagctgcacatgtgccacacagtgacttggccccagacgcatagactgaggtataaagacaagtatgaatattactctcaaaatctttgtataaataaatatttttggggcatcctggatgatttcatcttctggaatattgtttctagaacagtaaaagccttattctaaggtgaaaaaaaa

SEQ ID NO: 13475 - DNA, 453 bp, Homo sapiens
agtttcttttattggtggttttaagttgattttctataaatgttttttgttgtagcaacttggaggagaactgctgtgtgcgccccctctacattgacttccgacaggatctgggctggaagtgggtccatgaacctaagggctactatgccaacttctgctcaggcccttgcccatacctccgcagtgcagacacaacccacagcacggtatggagcaggctcatgccatctgaggcactggggctgaccgaccagaccacttgttaaaaagaatgagtgaaggattgaatgttgagtgagcaaatgatggtctggggtgagtaaaattcctctggtgaaggttctgatcttggcaccctgactcagttctactcagtcacattctgcccttttaaattcctaccatagtttcaaccagctttttaatttgctttgtccaaagctctctgta

SEQ ID NO: 13476 - DNA, 316 bp, Homo sapiens
caaacctcaattttatatttctttatatcttgtttctctcctttattcaatcaacaagcagtttttgaagtgttgtcctgtatcaaggggtcacagatttgctggctatggtctgacaatctaatggagagagagaagtattgtcaaataaagacagtaaaatgtgatttcgcagtctataaatatatacaaataatatttcattcatgagtattcttttaatgtccttcttaaaataacttaatttggggatttgtctttaaaactctcgcaaaaatttgaagccaaattaagttactcatgagataactagttt

SEQ ID NO: 13477 - DNA, 549 bp, Homo sapiens
tcagttaaatgttgggaaaaatgagctcaactcttctttccagcagaaagtagatagtaaggccactttacttattaactgaactcaattaaaaatcatgtcttttttttttaagtaccacagtacagaaagctacgtgtatattacggtactaaaaataaaaattttaaatttagagaaattatttgtttaatgctttttaagttaagcttttaaaagtttcataacaaaaggtgagtaagttcaaggtgggacataagagtacatagaaattaatgactaaaatcaacaaaataatccttgctactaagacaaagttaaaactgagcctgtttgaagtaaaactggtaactcttgagtcacgttaatacactttataaagcaagaatttatttaaaattaaaagtttcaaagaagccaggtgtggtggtgcacacttgtagtcccggcaacttgggaggctaaggtgggagggccatctgagaccaggtgttcaaggccagcctaggaaacggcaagaccctgtctctaaaacaattagtttattaa

SEQ ID NO: 13478 - DNA, 225 bp, Homo sapiens
tccatgggttctgcacctgtgggttcaaccaaccactgactgaaaatatctggaaaaaaattgtctataccaaacatgtacagatacattttcttgtctttatttcctaaacaatacagtataacaactatttacatagtgtttacattgtattagatattataagtaatccagagctgctttaaagtataccagaggatgtgctaggttatatttaaatactat

SEQ ID NO: 13479 - DNA, 345 bp, Homo sapiens
ctcctttggtgctcttcctttctttacatagattttactttctaacctgttatttttttcttctctctagagaacttcttttaacatttcttgcaaagcagatctactggcaacaaaatatctcaatttttgtttgtctgagaaagtctttatttctccttgacttttgaagaataagttcacagggtacagaattctaggttggtaggctttttctctcaaaactttaaaatatttcactccacacttgtttgtatggtttttgagaagtgggaagtaattactatatttgtttctctatagataaggtgtttatttcctctggcttctttctagatatgccga

SEQ ID NO: 13480 - DNA, 299 bp, Homo sapiens
attttgacaagcttttccaagaatagtaaaaatattttacgtataatcttgagaacttaatagctatcttaatcataatcagttcacttcagcaaactgactaacaaaatgtcttacatgttttgcatttgggatacatttgatctaaagactgaaagcatactaattattttgaggagtttctgtaattttgttggctggaaaatgttggcaaactgatcacactgaaagaaagaaccggctgggcgcagtggctcacgcctgtaatcccagcactttgggaggccaaggggggcaga

SEQ ID NO: 13481 - DNA, 488 bp, Homo sapiens
aatctcttttgacagtttaattggcagggcctccagccactgaacctaggagggtacaggaaagaagtttttcctcccctacaattgctgagcttcttgcttaatttagaggctttccatcccaattttattctaacatgagggcgtgagataaatattataaaaatataaaccaaattcatgaaaagctgagagttccaggggtgacagcaatcagtcattctcatttaacaaataccagttgagtgcttacgacttgccaggcactatatcaggcactggggtgcaaagatgaataagcgggaaatgctttctagagacaggaacagagaggagcatgaacagcaataactaactgcctggagaagtccaaaaaagcaaagcttgtcataacaggcataaaaggaaaaggagcaatttcaatcttcctaacctcaagatttccccattaaggcagacaggacctagcaaatgtagtttggggatgg

SEQ ID NO: 13482 - DNA, 874 bp, Homo sapiens
agatcacgttatctgcaaacaagggtactttgacttcctcctttccaacttggatgccctttatttgtttctcttgtctgactgctctatttttgtactcattattagtgccatgttgaataacagtggtgaaaagtaggcatccttgtcatgttccagatcttggaggaaaggctttcagtttttcctagagacaccaaggaatgcagcaagagcaaactttcatctctgtgatcccttgccaagtaattagaaaaatcagtattctaacttttttttttttaaagagataatttagggccgggtgtggtggctcatgcctgtagtcccggcacttttgggaggccgaggcgggcggatcacaaggtcgggagattgagaccatcctggctaacacggtgaggccctgtctctactaaaaatacaaaaaaaagaaaattagccgggcacggtggcgggcacctgtagtcccagctactcaggaggctgaggtgggagaatggcgtgaacccaggaggcggagcttgcagtgagccgagatcgtgccattgcactccagtctgggcaacagagcaagactccgtctcaaaaaaaaaaaaaaaaaaaaagagtaatttagtaatttagtatggtcaaagaaaagaaaggaaatgtgtattacttagactaaatggagagagaaaaagtaagctttcatttttctttcaggtgcagaagggtgtatagaaatgattgaaatgtctgtgtttcaagggctttgagggtgtgcttgtgaatgtcaagttatttgaagacattactgtggcttcgaatcatcatttctttttgataacgaaatgggagggttgtctttggaaattccatttaatattaa

SEQ ID NO: 13483 - DNA, 492 bp, Homo sapiens
cagtgagctatgatcatgccactgcactccagcctgggcgacagagcaagaccttgtgtccaacaacagcaacaacaaatttgaatgaatcaccaccctttgaacaccagaatctgcacggccatcctctttgggaaaccctagggtttccgagccacactgggtccatagtcccatcaagtccactaactggagtgaacactgcaggtgtgcgccttctctgaattaacttaggctggcatcagaataactgcaggagggagaacggccatcttccccatttcacagacagaaaacaaggccagagagatcaagtaacctgccccaagttccttaggaaagtgggaagtgggattcaaacccacgtttaccctggttgcaaccatacccttgggttgtgttgggcagccgctgtgtcctaatgatctggggcccagcctcttcctcatggcgtcacccgcctggccccgggttccctgaaacgcttgaggg

SEQ ID NO: 13484 - DNA, 845 bp, Homo sapiens
tcctctgcactccctagcagcaaaaagcaccatcatctgcccagttgtccagccagatctattactgacacctgcctacctctctttctcccctcttctgtcctttttttccaccttcccagtcagtcagtcattcatatctgtgttctttcttccccctccaaatctacccctgcctgaccacctttgccttcattcaggccctcacctgatcttgcctggagggttctgatgctttctccctggaaggccttgcttaggctggaagatctgatttcaggggggtaggggggtggcccccaatcggcctcccagacttaactctatccctctttgcactccgatccctaggctgacccattcccctttactttttcacggtgccccacttccctgcctttgcatatcctgctttctctgcctacagtgtagaggtcattttcttctgggattctttagagctctgcagggctgacatttacaggggcctgtgctgcttgcgtgtgtgttcagcatttggtgtgcatgacttcttatcacactcagcccctgtgatcctcatttgattggtcacagtaacttcataagctgggcggtattgttattcccagtctacagatgaaaactgaagcagcttagagttgcagcaacttctctgtggtacagctactgagggtagaggtaggcctcgaccccgggcagtctggctccaggctctgtactcttaaccacactggattgcctggctttagtcctcacccctcatcgcccctcctggactgagccccttgaaggcaagagtgttttgagaaacagtgatttgttcgttagtttttatatacaga

SEQ ID NO: 13485 - DNA, 510 bp, Homo sapiens
attcaaaagtatttgtttgcaactcccttatgcaatacgagggtctagctaccaatcaaatatgtgggaaattttttgaacatttcagggaaatgattcctattgtaggctttaacgagctcagaggatgatttttttaaaaaccagtgataaatctttcttgtcttaaggagttctgtttgtaattgaaggaaattgatttaggaaggatgaattgtgcattttagaacaaaaataaggcatgtaagtaaggtgtttatcagtatgaattcctctgagtgctggtaaatgctcttcataacaagttctccagctaaaggctcccattagcagctgttcggtcattaattgtctttcttcaacaagtagtcacaggaaaggtttcatagtgccagagttctttctgtgtgtctcctccatcccaaattcaaagggcatcattaggaacatctgggaggacagtatgacagatagcagaatccttctggtacttgcacttccctgtgtctc

SEQ ID NO: 13486 - DNA, 561 bp, Homo sapiens
tttctctcgtttccttggggcatgacgttagtttaggagcatgagggaggtggggagaaacaccacccttctccccgcccttccttagaattttttaaaaaactttactctgtggagaatcagttccctaggagcctggggcatagtcacactttcattctcatctttgctgctttaccggcttaggtggctgatagttttcctgaattgtttttcaatactcagagctcttgtctttcggaagatggaagaggagcatgcacgatcatagctgctggtgtgtcttccctgtcagcttaaaacgcagatttggccgggtgtggtggctcacgcctgttatcccagcagtttgggaggccgaggtgggtggatcacctgaggtcagaagttcgagaccagcctgacaaacatggtgaaaccctgtctctactaaaaataacaaaaattagctgggcgtggtggcatgtgcctgtaatcccaatgacttgggaggctgaggcaggagaatcgcttgaacccaggaggtagagattgcagtgagccgagatcatgccattacac

SEQ ID NO: 13487 - DNA, 106 bp, Homo sapiens
gaaatcagatgtttggctgaggacatttctatgcaatgtattgaaagtgtggcttggctcctcctgactgcttataataaaatgtgagagagaaatgacttaaata

SEQ ID NO: 13488 - DNA, 999 bp, Homo sapiens
gaaagctctaaggaagcatccatttcctgcctctccagctggaggtagcttctggcattccttggcttgtggttgcatgatgccagtctctgcctctgtggtcacattgcttcctcctcttttgtctgaaaacaccctctgattgcatttagggccaaacttctcaaggcccttaatttaatcactttttctttttggcagtgggagggagcatataaagtaataatcacaggttctggagattaggacatatacgtaattgttttgggggccaccattcagcctactacaaatactttattcttttttattgctccatagatttagaatgttcactctacctatcctacctgtattaagaatatatcatcataatctttctaaaatcccatgtagatctagatagagcagaaaatacaaacttttccctttcccagtaatcaacctacatttaattattcatgctatgatggactgcataaattaaagaaaaaatagaaaatctgaaagggaagataatgatctcattgttatttgtagttgaccatggtcaactataaaagtataaaaatactaaaattattaaatgtcatatttatgatcatttgttcacctgaagagtattgaataataaggggtacatttgggttatactgaatgagtgttgaaaatgattgaaaatcattgaaaataatttatttggggttgaaattttatcaaataaataatctataaggtgtatacattatgagcaagttagcaagagtgtcttgatacaaagtattggtaaaagaaaagatagttcacactgagtttgttttcaatttaattcatttttgcagatgtcaacaaaatctttcacctttttatagtatttaggaagaagagagcatgtaaggtcaaactttaattaacttttctttgcctatactggactttccctacacaagtaggtacttatattctgatcacaagtccccacacgtcggttgtagatag

SEQ ID NO: 13489 - DNA, 380 bp, Homo sapiens
aatcatggaaacttctccactattcctgatacacgttcaatcaactaatacaaagcaaagctcagtgatgcagtagagagagaccaggcctccagagtgatgcagaattatgcagaagaagaatattccttctgcggtcatgactattccaatttactatgaatgtccccatctggagaacaaaacaaacctgattcaaccagaatggataagcagagttagctttcatggtcctataatattaggtgacacagctttggtctttaaaatttgcacaggtgacaaaataaaataaactcaacaatataaccagatggctcattcagttgctggagaatagttttaaatgcatgtaaaatttattaaagtaaaatttctct

SEQ ID NO: 13490 - DNA, 531 bp, Homo sapiens
catagcagattgattttccaaagatggcagcagcaatatctctcatcacgcatatccttataacatgaatttgacctttcttccatgtagagatgggatctatttcccctcttgaatctgggcaggttgtaactgtggcagatgtgattctatatgacttctaaagctttgtcatacaaatgacaaatcatcaccttgccggctagattgctcacggtggatccccgaaccaccatataaacagtgccctgaggttaccatcttgtgaaggagcccaagtgagccaacatgtagagaccacgtggagatgctctgaggccacacgaagagaaagagagacgctcaacaagcccccagctggctagccccccgctctcccagctctggctgttgtctgactctaaccacatgagggacccagagccagattcacttaggtgagtccatcccaatttcccaacccacaggaaaccatggaagataataaaataagtgttgtgtcaaactcccaggcttttgaatggttacaca

SEQ ID NO: 13491 - DNA, 487 bp, Homo sapiens
tcatcaaagagcataaaaaaagactctcaaaataagtttgagtcagcttattacacagaattagggaaaccgccaggtggccaagctaaaaatgcaacagtagaggccatactaacagaatttagatataagttgttgcacactataaaggaaatgaagattacatttgagtccaaggaagtataatttcaactattgatagaattaaaatttaaaacatcctcagatgaatatatcagagtcactacattttattatataaactacccagttttcaaccgaaaattattggacattcaaagaaagaaaaagtcagaaacctgtgacctacactacaaaaaacaattaggtaaacaatagaaactatctatctttagagtttctgggttttggatttaactgaccaaaactttaacgaagttattaaatgcatgttcaaaaactaagaaaaaaacatgctgttttttaaataaacacaaaataccta

SEQ ID NO: 13492 - DNA, 453 bp, Homo sapiens
cttaaatctacctccttccaagattctctactttttcacccacgaacactgactgtagtgtgaaatcacagcccaaatatgttaattcattaaattaggcattcattcccagagtgcaaattcctcaggtcagaatttaggccctccaaggccgggggtggtggctcatgcctgtaatcccagcactttgggaggctgaggggggcagactggttgagcccagaagttcatgaccagcctgagcaacatggcaaaaccctgtctttacaaaaaattaaaaaattagccaggtgtggtggcacgcatctgtaatcccagctactcaggaggctgaagtaagagagtcacttgagcccaggagaatagcttgaaccttggtggggcagaggttgtagtaagccaagatcgtgtcattgtacttcagcccgggcaacaagagtaagactctgtctc

SEQ ID NO: 13493 - DNA, 1771 bp, Homo sapiens
atttagttatagttttaaaaaagaaattcaagcccattaaaatatgtctggtcaatgaaatgcttccttttattgtgttgtgctattgtactttgtttttcaaaacattgtaaaaatagtatctttggtttagtattttggattatatattataatctgaggagtgttttgcttatgtagaatccagatatatttctgttacctaggagatgttacttacatatgtaatactgtatcctgcacgtggaaatattcagaattgtagatagcataactctccctgctcctattcttttgagcctaggtataattttttttttttttttagaaaaagacatatttagctttaatttctatttatgctaaacatatttataagtagtctgtcaatataataccaactatttttatttttacataattcaattatttcatttgacatgtctggcagactcaagacattaagtaaaaaattggaactatgatttttctttgtcattttttaaaaaagaattattttattaacctgctggcatataatctggagttcttttcacaaccttactttttctgatttgctttattgaatgattgaatactcatttctttctaaaaatatgttgtaaattctcccttggcaagatttctccctatgagggtagttattatttgagtctgccaagtggttaccatggggcaaggtgccatgatgtattcttgggtgcattggttttttgcgcattgtaaatttaagacacttatagtaagtggactcattcatagatgagtttcagaaccttttacgttctcggtagaggcttctgtcggacaggcagaagagtgtattcctcacttttttttttgtcttcaaattccagtaaggcatagcacttttaagaaattagaatttttctatcatctatgcaaatgatatttatgttaatattaaatatcttatgttacactgggagtaatttgaggtgcaattatttttattactactttgaatagaggaccattatccttctttcttcagaaaactaagaagtaagtgtaacttttaaagtaagtatatatcagtgagagtaggcttgttttacaactatttctagccagtgagttgtgttttcatgtctcatcaaaagacaataccacattgcatcattttacaaaatatgttgtcattttcatttcagttgtaacataggaaaatagatatttcctagatgatttctgagtttcttactgcaaagaacagttataaattggtatacatgtgtctctgtaatagggataatattgatatatctgttgctacatatttaagaatcattctatcttatgttgtcttgaggccaagatttaccacgtttgcccagtgtattgaattggtggtagaaggtagttccatgttccatttgtagatctttaagattttatctttgataactttaatagaatgtggctcagttctggtccttcaagcctgtatggtttggattttcagtaggggacagttgatgtggagtcaatctctttggtacacaggaagctttataaaatttcattcacgaatctcttattttgggaagctgttttgcatatgagaagaacactgttgaaataaggaactaaagctttatatattgatcaaggtgattctgaaagttttaatttttaatgttgtaatgttatgttattgttaattgtactttattatgtattcaatagaaaatcatgatttattaataaaagcttaaattctcatcta

SEQ ID NO: 13494 - DNA, 1935 bp, Homo sapiens
atttagttatagttttaaaaaagaaattcaagcccattaaaatatgtctggtcaatgaaatgcttccttttattgtgttgtgctattgtactttgtttttcaaaacattgtaaaaatagtatctttggtttagtattttggattatatattataatctgaggagtgttttgcttatgtagaatccagatatatttctgttacctaggagatgttacttacatatgtaatactgtatcctgcacgtggaaatattcagaattgtagatagcataactctccctgctcctattcttttgagcctaggtataattttttttttttttttagaaaaagacatatttagctttaatttctatttatgctaaacatatttataagtagtctgtcaatataataccaactatttttatttttacataattcaattatttcatttgacatgtctggcagactcaagacattaagtaaaaaattggaactatgatttttctttgtcattttttaaaaaagaattattttattaacctgctggcatataatctggagttcttttcacaaccttactttttctgatttgctttattgaatgattgaatactcatttctttctaaaaatatgttgtaaattctcccttggcaagatttctccctatgagggtagttattatttgagtctgccaagtggttaccatggggcaaggtgccatgatgtattcttgggtgcattggttttttgcgcattgtaaatttaagacacttatagtaagtggactcattcatagatgagtttcagaaccttttacgttctcggtagaggcttctgtcggacaggcagaagagtgtattcctcacttttttttttgtcttcaaattccagtaaggcatagcacttttaagaaattagaatttttctatcatctatgcaaatgatatttatgttaatattaaatatcttatgttacactgggagtaatttgaggtgcaattatttttattactactttgaatagaggaccattatccttctttcttcagaaaactaagaagtaagtgtaacttttaaagtaagtatatatcagtgagagtaggcttgttttacaactatttctagccagtgagttgtgttttcatgtctcatcaaaagacaataccacattgcatcattttacaaaatatgttgtcattttcatttcagttgtaacataggaaaatagatatttcctagatgatttctgagtttcttactgcaaagaacagttataaattggtatacatgtgtctctgtaatagggataatattgatatatctgttgctacatatttaagaatcattctatcttatgttgtcttgaggccaagatttaccacgtttgcccagtgtattgaattggtggtagaaggtagttccatgttccatttgtagatctttaagattttatctttgataactttaatagaatgtggctcagttctggtccttcaagcctgtatggtttggattttcagtaggggacagttgatgtggagtcaatctctttggtacacaggaagctttataaaatttcattcacgaatctcttattttgggaagctgttttgcatatgagaagaacactgttgaaataaggaactaaagctttatatattgatcaaggtgattctgaaagttttaatttttaatgttgtaatgttatgttattgttaattgtactttattatgtattcaatagaaaatcatgatttattaataaaagcttaaattctcatctaaaaaaaaaaaaaaaaaaaaaaattttgggggcccggcccggaaagttttacaccatcttgggggcggcccgatagaaatgtccacgttcccagaaccggccaaagtgtgcgtcccccaaaaccgggggcggcttaaaccagggtgggctgtcaagcaacacccg

SEQ ID NO: 13495 - DNA, 3401 bp, Homo sapiens
  misc_feature (1642)..(1642): n is a, c, g, or t
  misc_feature (1649)..(1649): n is a, c, g, or t
  misc_feature (1842)..(1842): n is a, c, g, or t
  misc_feature (2189)..(2189): n is a, c, g, or t
  misc_feature (2249)..(2249): n is a, c, g, or t
  misc_feature (2290)..(2290): n is a, c, g, or t
  misc_feature (2332)..(2332): n is a, c, g, or t
  misc_feature (2343)..(2345): n is a, c, g, or t
  misc_feature (2352)..(2352): n is a, c, g, or t
  misc_feature (2385)..(2385): n is a, c, g, or t
  misc_feature (3394)..(3398): n is a, c, g, or t
  misc_feature (3401)..(3401): n is a, c, g, or t
atagcctttagcctcatggggttgttgagcagttgaaataatagctagtgtgaggaactgaacataaaattttagttttaggatgggtgtggtggctcacgcctataatctcagcactttgggaggccaatgaaggcggatcacttgagcccaggagttcaagaccagcttgaccaagatggcaaaaccctgtctctattaaaaatacaaaaaaattagctgggcatggtggcacacacctgtaatcccagctactagggaggctgaggcaggagaatcgtacttcccctttatactcttctgtatatttgattttttttttttttaagacagagtcctggctctgtcgcccaggctggagtgcagcgacatagtctcagctcactgcagcatccgtggaggctgaaacaggagaatcgcatgaattttttaaaaaatctaaacatgtaattttaaaacgggcttaagaagaatgataacagttttggtcttcttttttatcaaccatgcttttattttacttgaatctcgtgccaattgctttgtaatattaaagtaggatttacacaagtggaatttagaaaagatgataatctatcaaatctgtcaataccaattagaatgtaataaagaaattaggatagtggaggtttgagcaagtaaaggctcacccaaattcaaagccaatacttgatgctgagaggggatattttctggaaggtaatttttaaaaattaaagtcacaattataaattgtatatttcctaataaaagaaatctcaactcatgggacaatttgaatttaaaacactattgttcctcattcagtgatgaacaagtcaaaacgtttcagaaaagaaagcctttaaagaagaatcctggcacagaaaaggtccatttagacattgccttcttcccccatctctaatgcctcttttcaaatctctgacttgcacatgaagtaacagtgaggtgtcctgtgcagcagtcgcaattttttgacttgtcaaattgaagaaattcaattatgtagccagagcttagatcactgacatgtatactggcataagcttttttttgtttgtttttaattttattagaagtgggatctcattttgttgcccatgctggtctcaaacacctgtcttcaagtgatcctcctgcctcagcagcatcagtttaatatctagataaaatctgatgtatgtaattttacttttaagggtttttttccaaacagacgtcctgacaatgttgtttcctattccttgaacattcacctgacgcttatatactgtcattacttttatctgtcaactgatgtcagctactcaatttacacattacttttgtgcatttcatcctgtttctcagtttgacattgtcattcaaattcagagtttgacactgaaaccctgggcatggtggctcacacctgtaatcccagcacttcgggagactgcggtaagcagatcatttgaacccaggagtttgagactagccttggcaacatggtgaaaccccatctctaccaaaaaaaaaaaaaaaaaaaagcaaaaacaaaaattaactgggcatagttgcacacacctgtagtcccagctactcaggaggctgaagtgggacgatcgcttgagcccanaaggcanaggttacggtgagtagagattgtgccactgcactccagcctggacgacagggcaagacgctgtctcaaaaataaaatattagtaaagaagagtacaatcagaatatgaaaatgtgtaaatgtgcatattctctttttttctaatttggtagcattaaaaatacttaagcatcaaagtttggctttatgaaganggagtctgagacacctcaggtttcagcccttactaatagcgtggctcaaagagcgttaacttgcctgtgcttctgtttccttatctgtaaaatggggatgatgctgtaacatcaaagagcttataatactttccagagctggcagtactaaataagaccattcctctaaagtgccagcattttgaaaagcatcaacccatcaaccttgtgctttaaatctggcattcttaaagctatacctgtaggcagtatagagtgtttttttttatttgtttttttgttgttgtcttttgagtctcactctgtctcccaggctgtagtgcagtggcacgtcttggttcgccgcnacctccgcctcccaggttcaagcgattctcgtgcctcagccccccgcatagctggcattncaggcacacaccaccacgcccagctaatttttgtagttttngtagtatctactaaaataaacagggtttcaccatgttggccnggctggtctcnnnctcctgncctcaagtgatctgcctgcctcggcctcccaangtgctgggattgcaggcgtgagtcaccatgcccggccggcagtgtatatcttctaaagttgcaatttttgttcactccagaatcacttttcaaaaagcatgcagatttaatgccaccagtttgtgttatgtatctatcccgcaaaacagctctaaaggtgatttactaaaagattaacagcatttatctctggtgggataatttttctttgcttgtttacctgtgtcttgcagattttacacagtgaacaatgactgtataattttaaaatacagatatgcacaattgtgtaatgtaaatatgctcagcttcaatacatttaagaacacatttttaacttttcgtaaggagtcttcagtttaaaagtacagtgtcattacagagtgcttattctgttacaaaattagtaaagctgattctgcctctaaatctgaagtaattcccactttttttcatgcttgagtttagttgataaatagcattttagatactaaaaatgattggatgagtatttctacattaataagttgctaattaggcaccagggtagcagatagaatgcctttctgtgtgctaggtttaaacattttacacacagtcttatttaaaacagccttgcagtttatagatgaactgattgttaggctaaccagaggtgttactataccctccaggataacccagctagtaagggcagagccaggatgattcagacccagaccagagccgggtgttttgtccacagtactgctgctgcttataccgtaacgggaaaagtacacaacagtgtcttaatatttcattcttccatgaaaaacacttttaaaatattgaaacattataggagcagaagtacatctctaaatatacttttaggtcacattgaaaacatttccaaaggatttgacctgaagttaatgttgctacattatgctcaatacagcaggctgttctgctagggaaattgttaatattttaaaaatattttcctaagctttagctttaccannnnnaan

SEQ ID NO: 13496 - DNA, 1851 bp, Homo sapiens
agtgacccagacaaagagaggaaagccccggagaatcatgctgacaccatcgggagcggcagagccatccccattaaacagggcatgctcttaaagcgaagtggaaaatggctgaagacatggaaaaagaaatacgtcaccctgtgttccaatggcgtgctcacctattattcaagcttaggtgattatatgaagaatattcataaaaaagagattgaccttcggacatctaccatcaaagtcccaggaaagtggccatccctagccacatcagcctgtgcacccatctccagctctaaaagcaatggcctatccaaggacatggacaccgggctgggtgactccatatgcttcagccccggtatctccagcaccaccagccccaagctcaacccgcccccctctcctcatgccaataaaaagaaacacctaaagaagaaaagcaccaacaactttatgattgtgtctgccactggccaaacgtggcactttgaagccacgacgtatgaggagcgggatgcctgggtccaagccatccagagccagatcctggccagcctgcagtcatgcaagagcagtaaaagcaagtcccagctgaccagccagagtgaggccatggccctgcagtcgatccaaaacatgcgtgggaacgcccactgtgtggactgtgagacccagaatcctaagtgggccagtttgaacttgggagtcctcatgtgtattgaatgctcaggtatccaccgcagttttggcacccgcctttcccgtgtgcgatctctggagctggatgactggccagttgagctcaggaaggttatgtcatctattggcaatgagctagccaacagcatctgggaagggagcagccaggggcagacaaaaccctcaataaagtccacgagggaagagaaggaatggtggatccgttccaaatatgaggagaagctctttctggccccactaccctgcactgagctgtccctgggccagcagctgctgcgggccaccactgatgaggacctgcagacagccatcctgctgctggcacatggctcccgtgaggaggtgaacgagacctgtggggagggagacggctgcacggcactccatctggcctgccgcaaggggaatgtggtcctggagcagctcctgacggggtggacgtcatggcccgagatgcccacgggaacacagcgctgacctacgcccggcaggcctccagccaggagtgcatcaacgtgcttctgcagtacggctgccccgacgagtgcgtgtagtatctgttttatttgactgcagtctccttggtgcaaaaacaaaatgggaaaaataaggataactcagaatttcaaaaggaaatcacaaattcagctagtaatagcattttcagtacttttcgtaaactaagtaaatacacaaaatgttgatttttctgaccataagacatattttatgtccttttgccaaggtggatgtgttagtctcaggccctcctggccacattgcccaagtcacacaggcttctgtattatgtatttagataaaatgtgtgaaaatatatttgaaaaaaatttcataaatgtgcattgatttttgtacacatggcacctctttttcatttttatttttatttttatttttttggacgatgttttgctctgttgccgccactgcactctggcctgggcaacagagcaagactcggtctcaaaaaaaagaaaaagagggttacagatcattgcacatggaaaatattcccagcagtaaccacttccattaatgtgatctacagcttttaaaaaggagcatctcagaataagatggtggtacaatttgcttattgagaaagga

SEQ ID NO: 13497 - DNA, 2038 bp, Homo sapiens
agtgacccagacaaagagaggaaagccccggagaatcatgctgacaccatcgggagcggcagagccatccccattaaacagggcatgctcttaaagcgaagtggaaaatggctgaagacatggaaaaagaaatacgtcaccctgtgttccaatggcgtgctcacctattattcaagcttaggtgattatatgaagaatattcataaaaaagagattgaccttcggacatctaccatcaaagtcccaggaaagtggccatccctagccacatcagcctgtgcacccatctccagctctaaaagcaatggcctatccaaggacatggacaccgggctgggtgactccatatgcttcagccccggtatctccagcaccaccagccccaagctcaacccgcccccctctcctcatgccaataaaaagaaacacctaaagaagaaaagcaccaacaactttatgattgtgtctgccactggccaaacgtggcactttgaagccacgacgtatgaggagcgggatgcctgggtccaagccatccagagccagatcctggccagcctgcagtcatgcaagagcagtaaaagcaagtcccagctgaccagccagagtgaggccatggccctgcagtcgatccaaaacatgcgtgggaacgcccactgtgtggactgtgagacccagaatcctaagtgggccagtttgaacttgggagtcctcatgtgtattgaatgctcaggtatccaccgcagttttggcacccgcctttcccgtgtgcgatctctggagctggatgactggccagttgagctcaggaaggttatgtcatctattggcaatgagctagccaacagcatctgggaagggagcagccaggggcagacaaaaccctcaataaagtccacgagggaagagaaggaatggtggatccgttccaaatatgaggagaagctctttctggccccactaccctgcactgagctgtccctgggccagcagctgctgcgggccaccactgatgaggacctgcagacagccatcctgctgctggcacatggctcccgtgaggaggtgaacgagacctgtggggagggagacggctgcacggcactccatctggcctgccgcaaggggaatgtggtcctggagcagctcctgacggggtggacgtcatggcccgagatgcccacgggaacacagcgctgacctacgcccggcaggcctccagccaggagtgcatcaacgtgcttctgcagtacggctgccccgacgagtgcgtgtagtatctgttttatttgactgcagtctccttggtgcaaaaacaaaatgggaaaaataaggataactcagaatttcaaaaggaaatcacaaattcagctagtaatagcattttcagtacttttcgtaaactaagtaaatacacaaaatgttgatttttctgaccataagacatattttatgtccttttgccaaggtggatgtgttagtctcaggccctcctggccacattgcccaagtcacacaggcttctgtattatgtatttagataaaatgtgtgaaaatatatttgaaaaaaatttcataaatgtgcattgatttttgtacacatggcacctctttttcatttttatttttatttttatttttttggacgatgttttgctctgttgccgcggagcttgcaatgagctgagattgcaccactgcactccagcctgggcgaccaagcgagactccatctcaaaaaaaaaaattagctgggcgtggtggcgggcacctgtagtcccagctacttgggaggctgaggcaggataatggcatgaactcaggaggcaaagcttgcagtgagcagagattgtgccactgcactctggcctgggcaacagagcaagactcggtctcaaaaaaaagaaaaagagggttacagatcattgcacatggaaaatattcccagcagtaaccacttccattaatgtgatctacagcttttaaaaaggagcatctcagaataagatggtggtacaatttgcttattgagaaagga

SEQ ID NO: 13498 - DNA, 491 bp, Homo sapiens
ctgaaagtgttattttgagtgcttttagtatgtaatataaactgtataatttttaaaaagactttatataaagccctgtgttgctctcaatctgttttcctgccactgacaaccttcataaacttgtccacagaggatgccatagccccagggggcaggtggagaaatcatggtcaaattaaaaacaacgttcccattgcgtaataatgcagggtcctaaaacaagtaacggcgtccttattagaaaatctgtatttttttcatcatggattagttttaatcttttacaaatattgcacttaaacactgtttatcttgattactgccatttttgctgcccacttaaattttgtccctgaaagaatgcctcatccacctcactctaacccaggccctgttacacacccttctgaggatggttttatttattttatgatgtgaatctaagactattcgttttatttttctgtactgcatttttattttgtaaa

SEQ ID NO: 13499 - DNA, 691 bp, Homo sapiens
cgtgcccagcctatcatgactcaactgggatctggcacactgcactgggtgttttgttctctgatgtgcacattgatgaatgcatattggtacaagggaaatgaatctgttttcagccatttaaaaaattgtgttgtaaagcaaacaaaaatagcttgaacatttaaaaattactgtttaatattgtttgactgattttctaagaattatgtgaacaatgatgagtccagggcagcagccatcacaaatatgacagtccagcaaggcccatggaggtccctttggaagggacttgcacagctgattttctttttccagtgttgtttttacgggtgaaacgtggcttttgaaatactttagttgtttggcttagagctcccactttccccctaacatagtgcctgtctgttttttaaaacattttacccttcggcactattttctgctattcccattaatattatgtaacataaaccacttgctactgatttgggcatattacagactacaattactagttgctttgaatgcattggcactcttaattattgcaaaggagaattgaaaagtagtcttgtggtcctagttaatttagctttgggcaaactaagtggcttttcttctgtcctcttctcaaaaggccttttaagcagcagagactgggctaaatactggaactgaattccacttt

SEQ ID NO: 13500 - DNA, 500 bp, Homo sapiens
caccaggatatctgaaaatccctaagctagttgcagcttccacttagcttttaaaatcactcactgttaagtaaatgaaaaactatactggggtctaaacagtaccatgtaacctaaataatgtgttttaaaatgggatctggttgtaggcatgtttgacttcacactgtaaagtaagtgcaggcaagggtatgcaattatctttacagtaagtcgtcagcaattgttattaactaatgatcaaatatttacttttgtctggcttagatttcaatcacagtaattagaagaaaagaacatccactacttactgtggtatattgttttaataagagaccgcaagtggagggcctcataccaacaggaatttaaatcacatctttatgatggaagttaatctctctaatatgctttttcaaggttttgtgattttagcaatggatttccctcagcagctaccaagcagtattttaagagatgcttaaagcaaaacacatgca

SEQ ID NO: 13501 - DNA, 303 bp, Homo sapiens
atggttctccttgctttaagccttgataggagacggggaggccaacccttctctgcagaccgtgatcctcactagacagaggagctccaaacctgcccatctcatcccatgcaccgacggtgcctggcctggctccaaactcccgaaaggaactattttacaggtgccaaaaaggggacagtgttgataataataataaaatgaaacaatctgattggggcattgctggatcagaaaatgtgtgacctttttaaagttaaattgttaaaaaattttaactattaaacattttaaatattaaac

SEQ ID NO: 13502 - DNA, 1890 bp, Homo sapiens
cttgacagtgacgggaggcaagggtgagagagaacactgggctgctagggacaggcagagaagatcaataaccttgcaccaattgggatccaaatggctgagtagacagagaagggagaaagacttgaagaatatgaaaagtatctggcctagtcttacccctgcatccctggggaaggatgtgggccacagaggtatctccatgtttctgttatgaaaggagcccacaactccagatggctagaaactagcccaagtcatatgtgcatccaaacttctgtgtcttggggcctgctggagactttttgacctactaccacgacgactaacaacactgctagcaaattccccggatggtcactgtcaattcctgctgctgccctttatttcctccgcttaaggcactgaggaacagaaattgaagatgcatcccatacaggttaattttctgtttttttttttgttgttgttgttgttttgttttgttttgtttttctcttgagacggaatctcgctgtcactggggatggagtgcagtggtgtgatcgctgctcactgcaacgtctgcctctcaagttcaatgattcttctgcctcagcctctacttggggggcagaggtgggaggattgcctgagcccaggaagtcaaggctgcagtgacctgaagtcacgccgccacgctccagcacaggcaagagtgagcccgtctccaaaaaaaaaagggggaaaggttgtaggtgaataagacattacctacacagggcaagaaacagggtgaagccagcaaaactactgtgaatgcatttgtgtagtttttgctcttggactggtgtttattttacagaactacaaaacaaaagcaaaaagcaagtccctaaacactaagaaaaaatgaatccaactgtgtatcaagttgacagcataatcagagaaaaaattattttaattttaaaactattttcattgcgggtctctagtgggatatattctaagaataaaaataattgcaggccaggcgcggtggctcacacctgtaatcccagcactttgggaggccaaggtgggcagatcacgaggtcaggagttcaagaccagcctggccaacatggtgaaacccccatctctactaaaaatacaaaaattagccgagtgtggtggcgggcacctgtggtcccagctactcaggaggctgaggcaagagactcgcttgaatcccggaggcagaggctgcagtgagccaagattgcaccattgcactccagcctgggtgagacagagccagactgtgtctcaaaaataaaataaacataaagggatgattcatgtcccacccaggacagagcagaacagtgagagattttatcatgttactcagaatggggtacaatttaaaaacttcaaagggtttatttctgttattttcatttaatgtttccaaaccacagttgatcaagagtaactgaaacaaggaaagcaaaaccacaggtaggggggtttctgtactgttccattttgcctaagtcttgaaatccccacaagaaaagttttttttgtaaagtagttgaaagaaagaattgttgactaaaatgatattaaatcccctcaaatgaactgaaggcctacacatgaaaaatgttataaaacttaaatcagtggagacgcaatcatcccatgctggaagaaatgtcaaaataccaatgggtaattatctttttcctgatttttaaaaatatacataatttttaacccagaaattgtaatgctaagagtttcttagaataaaccaaacattgtgcaagatgttatattcagtaatactggattaaataaatgttatagccatatagtggaatactgtgccattaaaatgatatatttattgatgtgaaa

SEQ ID NO: 13503 - DNA, 1338 bp, Homo sapiens
cttgacagtgacgggaggcaagggtgagagagaacactgggctgctagggacaggcagagaagatcaataaccttgcaccaattgggatccaaatggctgagtagacagagaagggagaaagacttgaagaatatgaaaagtatctggcctagtcttacccctgcatccctggggaaggatgtgggccacagaggtatctccatgtttctgttatgaaaggagcccacaactccagatggctagaaactagcccaagtcatatgtgcatccaaacttctgtgtcttggggcctgctggagactttttgacctactaccacgacgactaacaacactgctagcaaattccccggatggtcactgtcaattcctgctgctgccctttatttcctccgcttaaggcactgaggaacagaaattgaagatgcatcccatacaggttaattttctgtttttttttttgttgttgttgttgttttgttttgttttgtttttctcttgagacggaatctcgctgtcactggggatggagtgcagtggtgtgatcgctgctcactgcaacgtctgcctctcaagttcaatgattcttctgcctcagcctcgtggcgggcacctgtggtcccagctactcaggaggctgaggcaagagactcgcttgaatcccggaggcagaggctgcagtgagccaagattgcaccattgcactccagcctgggtgagacagagccagactgtgtctcaaaaataaaataaacataaagggatgattcatgtcccacccaggacagagcagaacagtgagagattttatcatgttactcagaatggggtacaatttaaaaacttcaaagggtttatttctgttattttcatttaatgtttccaaaccacagttgatcaagagtaactgaaacaaggaaagcaaaaccacaggtaggggggtttctgtactgttccattttgcctaagtcttgaaatccccacaagaaaagttttttttgtaaagtagttgaaagaaagaattgttgactaaaatgatattaaatcccctcaaatgaactgaaggcctacacatgaaaaatgttataaaacttaaatcagtggagacgcaatcatcccatgctggaagaaatgtcaaaataccaatgggtaattatctttttcctgatttttaaaaatatacataatttttaacccagaaattgtaatgctaagagtttcttagaataaaccaaacattgtgcaagatgttatattcagtaatactggattaaataaatgttatagccatatagtggaatactgtgccattaaaatgatatatttattgatgtgaaa

SEQ ID NO: 13504 - DNA, 866 bp, Homo sapiens
cttgacagtgacgggaggcaagggtgagagagaacactgggctgctagggacaggcagagaagatcaataaccttgcaccaattgggatccaaatggctgagtagacagagaagggagaaagacttgaagaatatgaaaagtatctggcctagtcttacccctgcatccctggggaaggatgtgggccacagaggtatctccatgtttctgttatgaaaggagcccacaactccagatggctagaaactagcccaagtcatatgtgcatccaaacttctgtgtcttggggcctgctggagactttttgacctactaccacgacgactaacaacactgctagcaaattccccggatggtcactgtcaattcctgctgctgccctttatttcctccgcttaaggcactgaggaacagaaattgaagatgcatcccatacaggttaattttctgtttttttttttgttgttgttgttgttttgttttgttttgtttttctcttgagacggaatctcgctgtcactggggatggagtgcagtggtgtgatcgctgctcactgcaacgtctgcctctcaagttcaatgattcttctgcctcagcctcccgagtagctgggattacaggtgcccgccaccacacccgggtaatttttgtattattagtagagacggagtttcaccatgttggccaggctggtctcgaattcctgacctcaagtgatctgcctgccttgacctcccaaagtgctgggattacaggcgtgagccaccgtgcccggcccattcttctaatctaactcatatcagccacataaagtcattgtctctagaaaccctaattgagtgttcttaacagctcttgctctct

SEQ ID NO: 13505 - DNA, 434 bp, Homo sapiens
tacatatttttaggatacattatttactcttttataagcaggctaagtgctgtaaaggatagatatttctttacctttccttgtgacaatgttgaagctttaacctgtttacagcataaagactctgttaagtacaatcttaatctttattttttagtattctcaaatctactacatatgaatctaatttttgcagtgaaataaactttctctcttcgttatttagctgtttcaaaatccctaacttttgtcttcctgtctactccttcctttctccttcacatttccaagcagtatttggaaacatgacaatatatttttcaagtatgtttatgttcttttatcaatgaaaagcttccctaagatagcaatgtccctaatagggtaaaatacagttagctgtatttttttaacctcctcatagcaataggatg

SEQ ID NO: 13506 - DNA, 229 bp, Homo sapiens
ggtggagaagatactgcaggtaataagacagatgagatccctaattctacggtgcagatgttttagaggaggtgacagacaggaagccattatcctaatagagtcggtaatttcaaaaagtgttgtcttcagaaggaaaaaatttaaaaggcagtatgatagaagtgactgtgatacaaaggtggacttttttaggttagatggtcatggtgtgtgtgtgtgtgtgtgt

SEQ ID NO: 13507 - DNA, 214 bp, Homo sapiens
atgaaaagtgctacttcagtgaatacacgaatgataagagagtgaaacagccttattgctgatatggagaaagttttagtggtctaagatcaaaccagccataacattttcttagtccaaaatataatcaagagcaaaggcataggtctcttcaagttaatgagggctaagagagatgaggaatctcagaaggcaagttagatgctagcaaggg

SEQ ID NO: 13508 - DNA, 478 bp, Homo sapiens
tttgctctaaaaaattatgacagtgttttagtaggtaaatttcctaatgtgtatacaattgagttagacaatttttatttgcatacatttttcttaattgcatctttgttttaaaaaaaaaacaaggaacgtatgtgcaaagaaatgctttaagcagccacttaggctgactgtcagtttccctttgcagattaccttgatgtgtgaggaagctgatttggtattggaaagtattgtggagctaggaggaatcaaactgctctattttcttcattttcaaactcaccttgggcaggcacgtaaacaccattgtccaggctttcattccagagggagatgtctactttgctgtttttctttgtgtgaagacaatgacagtggttgaaattacaggatagaatatgagaatgctaagtaatactgtgaaatcccagaatctactttattcaggaagatgaataaacagagatgtaaaacc

SEQ ID NO: 13509 - DNA, 365 bp, Homo sapiens
ctcctgtcaaagtccctgccccgctggatcggacacaggcttaaattaccgcatcgtttgcacccctctgttctaggattaccttgatgtgtgaggaagctgatttggtattggaaagtattgtggagctaggaggaatcaaactgctctattttcttcattttcaaactcaccttgggcaggcacgtaaacaccattgtccaggctttcattccagagggagatgtctactttgctgtttttctttgtgtgaagacaatgacagtggttgaaattacaggatagaatatgagaatgctaagtaatactgtgaaatcccagaatctactttattcaggaagatgaataaacagagatgtaaaacc

SEQ ID NO: 13510 - DNA, 381 bp, Homo sapiens
gccaaattacagccaaaaggttgtttttgaaacttgaatctagagcaagaggaattaattagtggattctaaatttcaaataatttgatagcttcagagcatcaaggtgtacacataggttcttttttcctggacagtaagtgtccactgatgattgtcctcccttcttaggtacatctctttttctatctctgatatgctaatattttcagtcagattataatctggtttggggatccttgtgactgtttcaagtgtctacatttattctctaaatcagtttatcttaattgtaaagtttaaattctaagtggcaagcttattttctttaagaaaaaataatgatggggtagggaggtggggctggggtaccatattaca

SEQ ID NO: 13511 - DNA, 2779 bp, Homo sapiens
tcagggatctgacctggcagctattcctccttctctgaagagttcccatcagtagtcattacaactacctctcgcctcaaggctccatttttagctgctgctctgatttcagggcagccagtactctggccccttcagtcggggagtggaaggagatgtggggtgggggtgagaaaatgcttctgcctgttgttcttgaaggatagactatgggtgggcagagagaactgggggcagaaatggaattagatgtgattgggttatgcagtcaactagaggtctccttcccgccctctctccacacagagaggaacctctgctccttagctcttacagcaggactgtggcatctagtcacttcaatactagttcttgctcttcacagaggtagatttttctttaccctacagcactgttgggcatccctcccatcacatgggtctgtgggtgagatatgttatgctgttcctccctcgggaaggttggtattgaggggtgccttgctccagaggcgccagcccagcatctgtggtgagttggctaagatccagagtgacctgctcagagctccccagaggccttcactctttggggcagtctctctagggtcactttctgaatgtaccttctacctaaagtatacaaacacaaagagccagctgagctggttctagtgtgaaagccgtaagtgccacccagcaggcgtttgaaaacaagaaatcattcttctgtggaaggagaatgtgccatctcagctaccctcagtccgccaggcagcccagtctgtgtattcatatgaagttgtgaaaaccatgagtgtgtgccatggccatcgtgtctacacacagccactattgttcctgtgggctagtctccagcaaattaaaacactggcatggcctaggaagggcgttgcgagctcctaaatggaaagcttctctgggggtagggagatgaagagccaagatgctggtgaagcaggtgcagtgaggatccaaggcaaggaattgccctgagggaggtggctgcatatggagaaaggcagttctctgtgggcaaggccagcttgcttcaggctgtagagggaatttggtctgaagcaacagggcatgaactgtgactttgagctgccaggttgtcttcatctcagaactttcctatcctggcactctcgttacctttcttctataccttggcctctgtaactgcagtccaaaacaagttacagctgccttaatccactgagattctctatgaggatgtacagaaaagttttcctgtaataattttgcttatatgctaactcttttcatgttagcaaagaatattctatgaattagaatgttactgtggtagatctaaaggagaatgaacagaaggtgctggaggacctgttaaacaatctctggctattaaaaaacatcaagatgagaattaaaggcatatcctgatatacttgcctgcttgcacatgaggctgggagatcccatgcctgttgaagttaactctagccctgacctctattgatcttttgggaatgagggctgatttgaaggtgctgttgcaggatttcatttagctgctgccagttcaagtgacctgtccccagggctgcagctgtatccacctgattgcagtaggtgagggctaacagcagaatttaaagtggaccctgggctgtggagcaaagtgactatccatttggacttttggataatgtggcaggagtcccagctgtttaatttctagtcacattttccagaaagttgttctaagttgagattactgacaagatttctcaagggcaggaccagatatgtgagagacttctagttcagagctgacccctctaagcctctgacacttaaacacgagtcctgctgtccccagcacacaactgcactgaagccttgttcctctcggctggtgtagagctcatctgcatgttgtgtgcagataccagtagcctccctgcttgaacaggcctctcctaggctaggcaggtgttcagaggcatgaaggtctgggcaggggaagggcgtcttctgaaatgggagttaccaggtttttaaatgctgctattgttttatttaccatttaaggtcttttctattatatctgagtaactagtcagtttttcttacagtgctcatagcagttgtatttgaattgtattttcagtgaaatttgttttacattgccatttaaaattggcctttaacagcttcccaactggcttataagatttttttttttaatgaaaacataacccatgaggctcagatgctgttgaagaaataaatggtatgttgctgctgacagtagtgcttgcctattgtaacagcattggttctgctgtagcctcggtgaccatttaagttgaataaatctgtcattttcacccacaaacagttgttgagcccctggatttgggttgtcactgtggttctcctgccagtgctataatccagtgtcgtaggtgcagggtatgaatcagctcagcctcttaggagagaggggctctcagcgaggagggggcggggggggggtcactatttatcttccagaggcagggttcatggattcctgatgtttagaggcggaagggaccttaggtcacctacttccacggttttcatactgttctctggggcctcgtggagagggagcctccaggcccattcaaagctttattagatttaaaagtaagatctggtatgaagaaaggttttgtttgtttcttaaaataaaaagtctgaaaatcactaatccaatctcc

SEQ ID NO: 13512 - DNA, 287 bp, Homo sapiens
tgtcattctcaccttgtagacgagatgacccaagctcagagaagctgtctggctggaacgaggttcctgcagctcgaaaaccaagagtcgagataagcgtcaaacatagcctctcggcgggcgcagtggctcacacctgtaatcccagcactttgggaggctgaggcaggtggatcacctgagatgggtggctcgcttgagcccaggagtttgagaccagcctgggcaacataatgtgaccccatctgtacaaaaaattaaaaacacatgcacacacacaaacacaa

SEQ ID NO: 13513 - DNA, 323 bp, Homo sapiens
gagatggagtctcactctgttgccaggctggagtgctgtggcatcatctcgaaagctacttgaggctggtgtggtggctcacacttgtaatcccagcactttgggaggctgaggcaggagagctgcttgagcctaggagtttgaaccgagcccgggcaatgtggtaagaccctgtctctcattaaaacaaacaaacaaaacacacacacaccaagactacttgatttctcccacttgattttgagattcctcaaaaggagataatcttccaacagcatgttttatactacgtacaatctcaactccactttataaatgaaaca

SEQ ID NO: 13514 - DNA, 448 bp, Homo sapiens
ttttttagtatagaggggtttcaccatcttggccaggctggtctcgaactgctgacctcaagtgatctgccccgcttggcctcccatagtgctgggattaaggtgtgagtcaccacgcccggcctcaatgagatattttatactcctttttcataataggtctgaaattggtgtgtattttacatttacaacacatagcagtttggaatatccacgtttcaggtgcttgtatggctaaatggatactgtattggacagtgcctgtctgtatctgtaaatgtcatagacagctgatgatttgggaaaagcctagcttgtaatgatgaggctgggttttgttactagcttccttcatcagttgggaaaatcctgtaacatttgaatttggggattatctgtcctatctcatgggttaagaagctccggttgaataaatcactttacctta

SEQ ID NO: 13515 - DNA, 410 bp, Homo sapiens
tatgtggaaatgggaaatcctaataaattgcaaaagggcttgatgtttgggaagcttaactaatatgctggtttgctagtgtttaagatatacaaataggggccgggcgcgggggctcacgcctgtaatcccagcactttgggaggccgaggcgggcggatcacgaggtcaggagatcgagaccatcccggctaaaacggtgaaaccccgtctctactaaaaatacaaaaaattagccgggcgtagtggcgggcgcctgtagtcccagctacttgggaggctgaggcaggagaatggcgtgaacccgggaggcggagcttgcagtgagccgagatcccgccactgcactccagcctgggcaacagagcgagactccgtctcaaaaaaaaaaaaaaaaaaaaaagatatac

SEQ ID NO: 13516 - DNA, 6019 bp, Homo sapiens
attccccctcctcccccgggagcggcggcggcggccgggccggggccccagcgcgggccgggagggggcacggcggaggccacggaggcaggcgcgggagaagaccgcgctccgcttcccgggccgcgccgacctgctcggcggcctgcccgcccgcgcccaggggccccgaacggtggggccgggcaggcggctgaggcctgtcccctcagttcccaggtgccatgaggaagcctcgtcggaagtcccggcagaatgccgagggccggcgttccccgtccccctacagtctcaagtgctcacccacccgggagaccctgacatatgcccaggcccagcggattgtcgaggtagacattgatggacgcctgcatcgtatcagcatctatgacccactcaaaatcattactgaagatgagctaactgcccaggatatcaccgaatgcaatagtaacaaggaaaacagtgaacagcctcagttccctggcaagtccaagaaaccctcatccaagggcaaaaagaaggaatcctgctccaagcatgcatctggtacttccttccacctcccacagcccagcttccgtatggtggactcaggcatccagccagaagcacccccgctgcctgctgcctactaccgctacattgagaagccacctgaagacctggatgcagaggtagagtatgacatggatgaggaggaccttgcctggctggacatggtgaatgaaaaacggcgagtagatgggcacagtttggtgtctgcagatacctttgagctgctggtagaccggcttgagaaagagtcatacttggagagtcgcagcagtggggcccaacagtcactcatcgatgaagacgctttctgctgtgtgtgcctggatgatgaatgtcacaatagcaatgttattctcttctgtgacatctgcaacctggctgtacaccaggagtgctatggcgtcccatacatccctgagggccagtggctatgccgctgctgcctgcagtctccctcccggcctgtggattgcatcctttgccccaataagggtggcgccttcaaacagaccagtgatgggcactgggcccatgtggtgtgtgccatctggatccctgaagtctgctttgctaacaccgtgttcttggaacctattgagggcattgacaatatcccgcctgcccgctggaaactaacctgctatatctgcaagcagaaagggctaggtgcagccatccagtgccataaggtgaactgctacacagcattccatgtgacatgtgcacagcgggctgggctcttcatgaagattgagcccatgcgcgaaaccagcctcaatggcaccatctttacagtgcgcaagactgcctactgtgaggcccactcgccaccaggtgcggccactgctaggaggaagggcgactcccctagaagcatcagtgagactggcgatgaggaagggctgaaggagggtgatggagaggaggaagaagaggaagaggtggaggaagaagagcaggaagctcaaggcggggtgagtggctccctcaagggagtgcccaagaaaagcaagatgagtttgaagcagaagatcaagaaggagccagaggaagcaggccaagacacaccctccactctccccatgcttgctgtcccacagataccctcttacaggttgaacaagatctgtagtggtctctcctttcagaggaaaaaccagtttatgcagcggcttcacaattattggctgttgaagcggcaggcacggaatggtgtccctcttatccggcgcttgcactcccatctgcagtcccaaagaaacgctgagcagcgagagcaggatgagaagacaagtgcagtgaaggaggagctgaagtattggcagaagctccggcatgacttggagcgggcgcggctgctgattgagctgattcggaagagagagaagctcaaacgagagcaggtcaaagtccagcaggctgccatggagctggagctgatgccattcaatgttctgttgaggacaacactggacctgctgcaggagaaggatcctgcacacatcttcgcagaaccagtcaacttgagtgaggttccagattacctggaattcatatccaagccaatggatttttctactatgaggcggaagctggagtcccacctgtaccgcaccttggaggagtttgaggaggactttaaccttatagttaccaactgcatgaagtataatgctaaagacacaattttccaccgagcagctgtccgcctgcgggacctgggaggggccatcctacggcacgcccggcggcaggcagagaacatcggctatgaccccgagaggggcactcacctgcccgagtcacccaaattggaagacttttaccgcttctcctgggaagacgtggacaacatcctcatcccagagaaccgggcccatttgtccccagaggtgcagctgaaggagctgctggagaaactggacctggtgagcgccatgcggtccagtggggcccgcacccgtcgtgtccgcctgctacgccgggagatcaatgcccttcggcagaagctggcacagccaccaccaccacagccaccatcactcaacaagacagtatccaatggggagctgccagcagggccccagggggatgcagctgtgctggagcaggccttgcaggaggagccagaagacgatggggacagagatgactccaaactgcctcctccgccaaccctggagcccactgggcctgcaccttccttgtctgagcaagaatcccccccggagccccctactctgaaacccattaatgatagcaaacctccaagcaggttcctaaagcccagaaaggtggaagaagatgagctcttggaaaaatcaccactgcagctagggaatgagcctttgcaacgcttgctcagtgacaatggcatcaacagactatccctcatggcccctgacaccccggccggtaccccacttagtggtgtgggtcgccgcacatcagtcctcttcaagaaggccaagaatggggttaagctacagagaagcccagacagggtcctggagaatggcgaggaccatggtgtggcaggctctcctgcctctccagccagcatcgaggaagagcgccactcccggaagcggccaaggagcaggagctgtagtgagagcgaaggggagaggtccccccagcaggaggaagagacaggcatgaccaacggctttggaaaacacaccgaaagcgggtctgactctgaatgtagtttgggtctcagtggtggactggcatttgaagcttgcagtggtctgacgccccccaaacgcagccgtgggaagccagccctgtctcgagtgcccttcctggaaggtgtgaacggagactctgactacaatggctcaggcagaagcctcctgctgccctttgaagaccgcggagacctggagcccttggagctggtgtgggccaagtgccgaggctacccctcctaccctgccttgatcatcgatcccaagatgccccgggagggcctcctgcacaatggcgttcccatccctgtccccccgctggacgtgctgaagctgggagagcagaaacaggcagaggctggagagaagctcttccttgtcctcttctttgacaacaagcgcacctggcagtggcttccaagggacaaagtcctgcccttgggtgtggaagacaccgtggacaagctcaagatgctggaaggccgcaagaccagcatccgcaagtcagtgcaggtggcctatgaccgtgcgatgatccacctgagcagagtccgggggccccactccttcgtcacttccagctacctgtaagggcagggctggcctgcatccgcttgccctgcctccatcccgcagggcacagagaagcctcttctgcccctgccagatgtatggccggcagcttccccctctcatggtaggccagggactgggctttctccccactaagggcaaggccccagttttgaccaatcgcatggttctcctggcaggcctgctctgtgccaaaaactcccacccaaggtccctcaggggatatttcactgaagaaccagttagaagtagaaacagctgtggggcttgggcccagcttaggagattgcccagatggcaagaggtcctgggctccttcttgaggggctgcctggcccgctccatcctactcccactaactacacctcagggcgggtgaggttccgacactgatcccagagatgccgtggatacgccagggtcccagggggaatctccccaagctcacactctctcccgcttatcgcctattctcacacctcttctcggtcccatcttctgcacccattgcccagtcttgctttctctttcccatattccttttctttttctcttgtgccaaactgacagaaaccgtcaccacactggtctttttctttaatgtctcattccccttgaggccagctgctatgccaggtggtgtctctgccaggctcctcaggcccagacagaggccagcccacaacctatgaccccctcccccaggacaccacctcccacccacagaccttccctttagctgttgacacaacttcccagctctgcaagtgtgccccctggatcaaggcgggtcccctcttgtttttttctttgctgccacgaggtggtccaagccttcagggtgggctcctatcaggctgggtgtgcgagtgtccatctgtccacatggatgtcgagggtggtttgtgtggagctgtgctcgtcagctgggtctgccctcttcccccttttctccttcttctctcctcatggactttttctgcaattgcagtcttaagcttcactctccaccacctggatggcatggcgcctgccaccaaacatcttcctggcctgcgctctgccctgccctgcctagcctctgctactcccacttcccaactccagggaatgcattacttttatttcaaaccctctgcctccttccttctttctcttcaaccccctccccaccttcaccttctcaaaaatggaaggaaaaaaaaactgtgaatggggaatgctgactgacaaaccaacacaactttcagaggcttcagtgtctgttctctggacatttcttttcacctcctgagcaccaaagtcgcagggccagttgcaggccgctgattgccatgttgatttttaacctgatattctttttaattgttttaaatttttcataggggagttttggacaaaacagtcactggggagatcactgccatttttacacacttgactttttaaaaatacaaccaaccaaccaccacaacttcttatacatttgggacatgagccagagtttaaaagggaaccaacaaaacactataacttaaaaggatggggttttggattttgtataataataaaaacaatacagcatatggctagggaaggacatggtgtatataattgtaaaatactgttctaaattattcaggcctatagtttccattactggagtcctccattgtgtggccacacagtgtcgttgatttaaaggagccagtgcttcccctctccccaggtagttggtcagctgtggactctgtgacctttgtctaaacctgtgttgtaagatcttgggacttcctctctttctatgtctatctcttccccccaacactttctcttcttagtctctctctttatttttcaatctctgaatattttagtctctctctgagtctcattttttaaaatgctcttttagaacgggaaacggctcagatcctgctgtggcacggggcctatgtgtctctgtcgcgtctgctgtgaagcacatgatgctctatttattgtagagagtgactttatttgctttctagaattgtttataacagatggtataagagaggtaataaacagagaaaaatctatgcttgtaaagaatacaaaagttaattttacctactataatatgactgtctgaaacttattttctctctgagaaataaatgttctaatgggca

SEQ ID NO: 13517 - DNA, 535 bp, Homo sapiens
ctatcacatatattaaaatttaatacaatccccattaagaaattgtgcccatccaggccaaaaattcggcaccaagacccctctccccaggtagttggtcagctgtggactctgtgacctttgtctaaacctgtgttgtaagatcttgggacttcctctctttctatgtctatctcttccccccaacactttctcttcttagtctctctctttatttttcaatctctgaatattttagtctctctctgagtctcattttttaaaatgctcttttagaacgggaaacggctcagatcctgctgtggcacggggcctatgtgtctctgtcgcgtctgctgtgaagcacatgatgctctatttattgtagagagtgactttatttgctttctagaattgtttataacagatggtataagagaggtaataaacagagaaaaatctatgcttgtaaagaatacaaaagttaattttacctactataatatgactgtctgaaacttattttctctctgagaaataaatgttctaatgggca

SEQ ID NO: 13518 - DNA, 4497 bp, Homo sapiens
  misc_feature (1)..(1): n is a, c, g, or t
  misc_feature (54)..(54): n is a, c, g, or t
  misc_feature (66)..(66): n is a, c, g, or t
ngatcagagagagagagagagtgagagagacagactcaagcggtatgtcctcanggatgccagaancagatgatctgagcagagatcagaggagcagagagcagccaaacacacctcatctcccatgctgctgtccacaatacctctacagttgaacaagatctgtagtggtctctcctttcagaggaaaaaccagtttatgcagcggcttcacaattattggctgttgaagcggcaggcacggaatggtgtccctcttatccggcgcttgcactcccatctgcagtcccaaagaaacgctgagcagcgagagcaggatgagaagacaagtgcagtgaaggaggagctgaagtattggcagaagctccggcatgacttggagcgggcgcggctgctgattgagctgattcggaagagagagaagctcaaacgagagcaggtcaaagtccagcaggctgccatggagctggagctgatgccattcaatgttctgttgaggacaacactggacctgctgcaggagaaggatcctgcacacatcttcgcagaaccagtcaacttgagtgaggttccagattacctggaattcatatccaagccaatggatttttctactatgaggcggaagctggagtcccacctgtaccgcaccttggaggagtttgaggaggactttaaccttatagttaccaactgcatgaagtataatgctaaagacacaattttccaccgagcagctgtccgcctgcgggacctgggaggggccatcctacggcacgcccggcggcaggcagagaacatcggctatgaccccgagaggggcactcacctgcccgagtcacccaaattggaagacttttaccgcttctcctgggaagacgtggacaacatcctcatcccagagaaccgggcccatttgtccccagaggtgcagctgaaggagctgctggagaaactggacctggtgagcgccatgcggtccagtggggcccgcacccgtcgtgtccgcctgctacgccgggagatcaatgcccttcggcagaagctggcacagccaccaccaccacagccaccatcactcaacaagacagtatccaatggggagctgccagcagggccccagggggatgcagctgtgctggagcaggccttgcaggaggagccagaagacgatggggacagagatgactccaaactgcctcctccgccaaccctggagcccactgggcctgcaccttccttgtctgagcaagaatcccccccggagccccctactctgaaacccattaatgatagcaaacctccaagcaggttcctaaagcccagaaaggtggaagaagatgagctcttggaaaaatcaccactgcagctagggaatgagcctttgcaacgcttgctcagtgacaatggcatcaacagactatccctcatggcccctgacaccccggccggtaccccacttagtggtgtgggtcgccgcacatcagtcctcttcaagaaggccaagaatggggttaagctacagagaagcccagacagggtcctggagaatggcgaggaccatggtgtggcaggctctcctgcctctccagccagcatcgaggaagagcgccactcccggaagcggccaaggagcaggagctgtagtgagagcgaaggggagaggtccccccagcaggaggaagagacaggcatgaccaacggctttggaaaacacaccgaaagcgggtctgactctgaatgtagtttgggtctcagtggtggactggcatttgaagcttgcagtggtctgacgccccccaaacgcagccgtgggaagccagccctgtctcgagtgcccttcctggaaggtgtgaacggagactctgactacaatggctcaggcagaagcctcctgctgccctttgaagaccgcggagacctggagcccttggagctggtgtgggccaagtgccgaggctacccctcctaccctgccttgatcatcgatcccaagatgccccgggagggcctcctgcacaatggcgttcccatccctgtccccccgctggacgtgctgaagctgggagagcagaaacaggcagaggctggagagaagctcttccttgtcctcttctttgacaacaagcgcacctggcagtggcttccaagggacaaagtcctgcccttgggtgtggaagacaccgtggacaagctcaagatgctggaaggccgcaagaccagcatccgcaagtcagtgcaggtggcctatgaccgtgcgatgatccacctgagcagagtccgggggccccactccttcgtcacttccagctacctgtaagggcagggctggcctgcatccgcttgccctgcctccatcccgcagggcacagagaagcctcttctgcccctgccagatgtatggccggcagcttccccctctcatggtaggccagggactgggctttctccccactaagggcaaggccccagttttgaccaatcgcatggttctcctggcaggcctgctctgtgccaaaaactcccacccaaggtccctcaggggatatttcactgaagaaccagttagaagtagaaacagctgtggggcttgggcccagcttaggagattgcccagatggcaagaggtcctgggctccttcttgaggggctgcctggcccgctccatcctactcccactaactacacctcagggcgggtgaggttccgacactgatcccagagatgccgtggatacgccagggtcccagggggaatctccccaagctcacactctctcccgcttatcgcctattctcacacctcttctcggtcccatcttctgcacccattgcccagtcttgctttctctttcccatattccttttctttttctcttgtgccaaactgacagaaaccgtcaccacactggtctttttctttaatgtctcattccccttgaggccagctgctatgccaggtggtgtctctgccaggctcctcaggcccagacagaggccagcccacaacctatgaccccctcccccaggacaccacctcccacccacagaccttccctttagctgttgacacaacttcccagctctgcaagtgtgccccctggatcaaggcgggtcccctcttgtttttttctttgctgccacgaggtggtccaagccttcagggtgggctcctatcaggctgggtgtgcgagtgtccatctgtccacatggatgtcgagggtggtttgtgtggagctgtgctcgtcagctgggtctgccctcttcccccttttctccttcttctctcctcatggactttttctgcaattgcagtcttaagcttcactctccaccacctggatggcatggcgcctgccaccaaacatcttcctggcctgcgctctgccctgccctgcctagcctctgctactcccacttcccaactccagggaatgcattacttttatttcaaaccctctgcctccttccttctttctcttcaaccccctccccaccttcaccttctcaaaaatggaaggaaaaaaaaactgtgaatggggaatgctgactgacaaaccaacacaactttcagaggcttcagtgtctgttctctggacatttcttttcacctcctgagcaccaaagtcgcagggccagttgcaggccgctgattgccatgttgatttttaacctgatattctttttaattgttttaaatttttcataggggagttttggacaaaacagtcactggggagatcactgccatttttacacacttgactttttaaaaatacaaccaaccaaccaccacaacttcttatacatttgggacatgagccagagtttaaaagggaaccaacaaaacactataacttaaaaggatggggttttggattttgtataataataaaaacaatacagcatatggctagggaaggacatggtgtatataattgtaaaatactgttctaaattattcaggcctatagtttccattactggagtcctccattgtgtggccacacagtgtcgttgatttaaaggagccagtgcttcccctctccccaggtagttggtcagctgtggactctgtgacctttgtctaaacctgtgttgtaagatcttgggacttcctctctttctatgtctatctcttccccccaacactttctcttcttagtctctctctttatttttcaatctctgaatattttagtctctctctgagtctcattttttaaaatgctcttttagaacgggaaacggctcagatcctgctgtggcacggggcctatgtgtctctgtcgcgtctgctgtgaagcacatgatgctctatttattgtagagagtgactttatttgctttctagaattgtttataacagatggtataagagaggtaataaacagagaaaaatctatgcttgtaaagaatacaaaagttaattttacctactataatatgactgtctgaaacttattttctctctgagaaataaatgttctaatgggca

SEQ ID NO: 13519 - DNA, 4591 bp, Homo sapiens
ttcttttggaggattaggactgcaaggcaagaggtggaaaagcaaatgaaataactcatgctgaatctgagctgcttaactttactgtccttttcaagcctttctctgaggtgaggtatttggccattttattctgtcttcctgtataaggttcagaaatgaaccaggtctggataggatgcacaggctgtaatctgggctgcccactgaccttgtctttcacttccgtgtgcctctactcaaggttgaacaagatctgtagtggtctctcctttcagaggaaaaaccagtttatgcagcggcttcacaattattggctgttgaagcggcaggcacggaatggtgtccctcttatccggcgcttgcactcccatctgcagtcccaaagaaacgctgagcagcgagagcaggatgagaagacaagtgcagtgaaggaggagctgaagtattggcagaagctccggcatgacttggagcgggcgcggctgctgattgagctgattcggaagagagagaagctcaaacgagagcaggtcaaagtccagcaggctgccatggagctggagctgatgccattcaatgttctgttgaggacaacactggacctgctgcaggagaaggatcctgcacacatcttcgcagaaccagtcaacttgagtgaggttccagattacctggaattcatatccaagccaatggatttttctactatgaggcggaagctggagtcccacctgtaccgcaccttggaggagtttgaggaggactttaaccttatagttaccaactgcatgaagtataatgctaaagacacaattttccaccgagcagctgtccgcctgcgggacctgggaggggccatcctacggcacgcccggcggcaggcagagaacatcggctatgaccccgagaggggcactcacctgcccgagtcacccaaattggaagacttttaccgcttctcctgggaagacgtggacaacatcctcatcccagagaaccgggcccatttgtccccagaggtgcagctgaaggagctgctggagaaactggacctggtgagcgccatgcggtccagtggggcccgcacccgtcgtgtccgcctgctacgccgggagatcaatgcccttcggcagaagctggcacagccaccaccaccacagccaccatcactcaacaagacagtatccaatggggagctgccagcagggccccagggggatgcagctgtgctggagcaggccttgcaggaggagccagaagacgatggggacagagatgactccaaactgcctcctccgccaaccctggagcccactgggcctgcaccttccttgtctgagcaagaatcccccccggagccccctactctgaaacccattaatgatagcaaacctccaagcaggttcctaaagcccagaaaggtggaagaagatgagctcttggaaaaatcaccactgcagctagggaatgagcctttgcaacgcttgctcagtgacaatggcatcaacagactatccctcatggcccctgacaccccggccggtaccccacttagtggtgtgggtcgccgcacatcagtcctcttcaagaaggccaagaatggggttaagctacagagaagcccagacagggtcctggagaatggcgaggaccatggtgtggcaggctctcctgcctctccagccagcatcgaggaagagcgccactcccggaagcggccaaggagcaggagctgtagtgagagcgaaggggagaggtccccccagcaggaggaagagacaggcatgaccaacggctttggaaaacacaccgaaagcgggtctgactctgaatgtagtttgggtctcagtggtggactggcatttgaagcttgcagtggtctgacgccccccaaacgcagccgtgggaagccagccctgtctcgagtgcccttcctggaaggtgtgaacggagactctgactacaatggctcaggcagaagcctcctgctgccctttgaagaccgcggagacctggagcccttggagctggtgtgggccaagtgccgaggctacccctcctaccctgccttgatcatcgatcccaagatgccccgggagggcctcctgcacaatggcgttcccatccctgtccccccgctggacgtgctgaagctgggagagcagaaacaggcagaggctggagagaagctcttccttgtcctcttctttgacaacaagcgcacctggcagtggcttccaagggacaaagtcctgcccttgggtgtggaagacaccgtggacaagctcaagatgctggaaggccgcaagaccagcatccgcaagtcagtgcaggtggcctatgaccgtgcgatgatccacctgagcagagtccgggggccccactccttcgtcacttccagctacctgtaagggcagggctggcctgcatccgcttgccctgcctccatcccgcagggcacagagaagcctcttctgcccctgccagatgtatggccggcagcttccccctctcatggtaggccagggactgggctttctccccactaagggcaaggccccagttttgaccaatcgcatggttctcctggcaggcctgctctgtgccaaaaactcccacccaaggtccctcaggggatatttcactgaagaaccagttagaagtagaaacagctgtggggcttgggcccagcttaggagattgcccagatggcaagaggtcctgggctccttcttgaggggctgcctggcccgctccatcctactcccactaactacacctcagggcgggtgaggttccgacactgatcccagagatgccgtggatacgccagggtcccagggggaatctccccaagctcacactctctcccgcttatcgcctattctcacacctcttctcggtcccatcttctgcacccattgcccagtcttgctttctctttcccatattccttttctttttctcttgtgccaaactgacagaaaccgtcaccacactggtctttttctttaatgtctcattccccttgaggccagctgctatgccaggtggtgtctctgccaggctcctcaggcccagacagaggccagcccacaacctatgaccccctcccccaggacaccacctcccacccacagaccttccctttagctgttgacacaacttcccagctctgcaagtgtgccccctggatcaaggcgggtcccctcttgtttttttctttgctgccacgaggtggtccaagccttcagggtgggctcctatcaggctgggtgtgcgagtgtccatctgtccacatggatgtcgagggtggtttgtgtggagctgtgctcgtcagctgggtctgccctcttcccccttttctccttcttctctcctcatggactttttctgcaattgcagtcttaagcttcactctccaccacctggatggcatggcgcctgccaccaaacatcttcctggcctgcgctctgccctgccctgcctagcctctgctactcccacttcccaactccagggaatgcattacttttatttcaaaccctctgcctccttccttctttctcttcaaccccctccccaccttcaccttctcaaaaatggaaggaaaaaaaaactgtgaatggggaatgctgactgacaaaccaacacaactttcagaggcttcagtgtctgttctctggacatttcttttcacctcctgagcaccaaagtcgcagggccagttgcaggccgctgattgccatgttgatttttaacctgatattctttttaattgttttaaatttttcataggggagttttggacaaaacagtcactggggagatcactgccatttttacacacttgactttttaaaaatacaaccaaccaaccaccacaacttcttatacatttgggacatgagccagagtttaaaagggaaccaacaaaacactataacttaaaaggatggggttttggattttgtataataataaaaacaatacagcatatggctagggaaggacatggtgtatataattgtaaaatactgttctaaattattcaggcctatagtttccattactggagtcctccattgtgtggccacacagtgtcgttgatttaaaggagccagtgcttcccctctccccaggtagttggtcagctgtggactctgtgacctttgtctaaacctgtgttgtaagatcttgggacttcctctctttctatgtctatctcttccccccaacactttctcttcttagtctctctctttatttttcaatctctgaatattttagtctctctctgagtctcattttttaaaatgctcttttagaacgggaaacggctcagatcctgctgtggcacggggcctatgtgtctctgtcgcgtctgctgtgaagcacatgatgctctatttattgtagagagtgactttatttgctttctagaattgtttataacagatggtataagagaggtaataaacagagaaaaatctatgcttgtaaagaatacaaaagttaattttacctactataatatgactgtctgaaacttattttctctctgagaaataaatgttctaatgggca

SEQ ID NO: 13520 - DNA, 5077 bp, Homo sapiens
attccccctcctcccccgggagcggcggcggcggccgggccggggccccagcgcgggccgggagggggcacggcggaggccacggaggcaggcgcgggagaagaccgcgctccgcttcccgggccgcgccgacctgctcggcggcctgcccgcccgcgcccaggggccccgaacggtggggccgggcaggcggctgaggcctgtcccctcagttcccaggtgccatgaggaagcctcgtcggaagtcccggcagaatgccgagggccggcgttccccgtccccctacagtctcaagtgctcacccacccgggagaccctgacatatgcccaggcccagcggattgtcgaggtagacattgatggacgcctgcatcgtatcagcatctatgacccactcaaaatcattactgaagatgagctaactgcccaggatatcaccgaatgcaatagtaacaaggaaaacagtgaacagcctcagttccctggcaagtccaagaaaccctcatccaagggcaaaaagaaggaatcctgctccaagcatgcatctggtacttccttccacctcccacagcccagcttccgtatggtggactcaggcatccagccagaagcacccccgctgcctgctgcctactaccgctacattgagaagccacctgaagacctggatgcagaggtagagtatgacatggatgaggaggaccttgcctggctggacatggtgaatgaaaaacggcgagtagatgggcacagtttggtgtctgcagatacctttgagctgctggtagaccggcttgagaaagagtcatacttggagagtcgcagcagtggggcccaacagtcactcatcgatgaagacgctttctgctgtgtgtgcctggatgatgaatgtcacaatagcaatgttattctcttctgtgacatctgcaacctggctgtacaccaggagtgctatggcgtcccatacatccctgagggccagtggctatgccgctgctgcctgcagtctccctcccggcctgtggattgcatcctttgccccaataagggtggcgccttcaaacagaccagtgatgggcactgggcccatgtggtgtgtgccatctggatccctgaagtctgctttgctaacaccgtgttcttggaacctattgagggcattgacaatatcccgcctgcccgctggaaactaacctgctatatctgcaagcagaaagggctaggtgcagccatccagtgccataaggtgaactgctacacagcattccatgtgacatgtgcacagcgggctgggctcttcatgaagattgagcccatgcgcgaaaccagcctcaatggcaccatctttacagtgcgcaagactgcctactgtgaggcccactcgccaccaggtgcggccactgctaggaggaagggcgactcccctagaagcatcagtgagactggcgatgaggaagggctgaaggagggtgatggagaggaggaagaagaggaagaggtggaggaagaagagcaggaagctcaaggcggggtgagtggctccctcaagggagtgcccaagaaaagcaagatgagtttgaagcagaagatcaagaaggagccagaggaagcaggccaagacacaccctccactctccccatgcttgctgtcccacagataccctcttacaggttgaacaagatctgtagtggtctctcctttcagaggaaaaaccagtttatgcagcggcttcacaattattggctgttgaagcggcaggcacggaatggtgtccctcttatccggcgcttgcactcccatctgcagtcccaaagaaacgctgagcagcgagagcaggatgagaagacaagtgcagtgaaggaggagctgaagtattggcagaagctccggcatgacttggagcgggcgcggctgctgattgagctgattcggaagagagagaagctcaaacgagagcaggtcaaagtccagcaggctgccatggagctggagctgatgccattcaatgttctgttgaggacaacactggacctgctgcaggagaaggatcctgcacacatcttcgcagaaccagtcaacttgagtgaggttccagattacctggaattcatatccaagccaatggatttttctactatgaggcggaagctggagtcccacctgtaccgcaccttggaggagtttgaggaggactttaaccttatagttaccaactgcatgaagtataatgctaaagacacaattttccaccgagcagctgtccgcctgcgggacctgggaggggccatcctacggcacgcccggcggcaggcagagaacatcggctatgaccccgagaggggcactcacctgcccgagtcacccaaattggaagacttttaccgcttctcctgggaagacgtggacaacatcctcatcccagagaaccgggcccatttgtccccagaggtgcagctgaaggagctgctggagaaactggacctggtgagcgccatgcggtccagtggggcccgcacccgtcgtgtccgcctgctacgccgggagatcaatgcccttcggcagaagctggcacagccaccaccaccacagccaccatcactcaacaagacagtatccaatggggagctgccagcagggccccagggggatgcagctgtgctggagcaggccttgcaggaggagccagaagacgatggggacagagatgactccaaactgcctcctccgccaaccctggagcccactgggcctgcaccttccttgtctgagcaagaatcccccccggagccccctactctgaaacccattaatgatagcaaacctccaagcaggttcctaaagcccagaaaggtggaagaagatgagctcttggaaaaatcaccactgcagctagggaatgagcctttgcaacgtgcatccgcttgccctgcctccatcccgcagggcacagagaagcctcttctgcccctgccagatgtatggccggcagcttccccctctcatggtaggccagggactgggctttctccccactaagggcaaggccccagttttgaccaatcgcatggttctcctggcaggcctgctctgtgccaaaaactcccacccaaggtccctcaggggatatttcactgaagaaccagttagaagtagaaacagctgtggggcttgggcccagcttaggagattgcccagatggcaagaggtcctgggctccttcttgaggggctgcctggcccgctccatcctactcccactaactacacctcagggcgggtgaggttccgacactgatcccagagatgccgtggatacgccagggtcccagggggaatctccccaagctcacactctctcccgcttatcgcctattctcacacctcttctcggtcccatcttctgcacccattgcccagtcttgctttctctttcccatattccttttctttttctcttgtgccaaactgacagaaaccgtcaccacactggtctttttctttaatgtctcattccccttgaggccagctgctatgccaggtggtgtctctgccaggctcctcaggcccagacagaggccagcccacaacctatgaccccctcccccaggacaccacctcccacccacagaccttccctttagctgttgacacaacttcccagctctgcaagtgtgccccctggatcaaggcgggtcccctcttgtttttttctttgctgccacgaggtggtccaagccttcagggtgggctcctatcaggctgggtgtgcgagtgtccatctgtccacatggatgtcgagggtggtttgtgtggagctgtgctcgtcagctgggtctgccctcttcccccttttctccttcttctctcctcatggactttttctgcaattgcagtcttaagcttcactctccaccacctggatggcatggcgcctgccaccaaacatcttcctggcctgcgctctgccctgccctgcctagcctctgctactcccacttcccaactccagggaatgcattacttttatttcaaaccctctgcctccttccttctttctcttcaaccccctccccaccttcaccttctcaaaaatggaaggaaaaaaaaactgtgaatggggaatgctgactgacaaaccaacacaactttcagaggcttcagtgtctgttctctggacatttcttttcacctcctgagcaccaaagtcgcagggccagttgcaggccgctgattgccatgttgatttttaacctgatattctttttaattgttttaaatttttcataggggagttttggacaaaacagtcactggggagatcactgccatttttacacacttgactttttaaaaatacaaccaaccaaccaccacaacttcttatacatttgggacatgagccagagtttaaaagggaaccaacaaaacactataacttaaaaggatggggttttggattttgtataataataaaaacaatacagcatatggctagggaaggacatggtgtatataattgtaaaatactgttctaaattattcaggcctatagtttccattactggagtcctccattgtgtggccacacagtgtcgttgatttaaaggagccagtgcttcccctctccccaggtagttggtcagctgtggactctgtgacctttgtctaaacctgtgttgtaagatcttgggacttcctctctttctatgtctatctcttccccccaacactttctcttcttagtctctctctttatttttcaatctctgaatattttagtctctctctgagtctcattttttaaaatgctcttttagaacgggaaacggctcagatcctgctgtggcacggggcctatgtgtctctgtcgcgtctgctgtgaagcacatgatgctctatttattgtagagagtgactttatttgctttctagaattgtttataacagatggtataagagaggtaataaacagagaaaaatctatgcttgtaaagaatacaaaagttaattttacctactataatatgactgtctgaaacttattttctctctgagaaataaatgttctaatgggca

SEQ ID NO: 13521 - DNA, 2915 bp, Homo sapiens
ggctcagaaagtccagaccctgtagccagaactaagatacaaaacaagatcttgctccaaaggctgtatccttagccacatgttatattcacctggggagctttaaaaacacatacacagtgtgcaggtcccaccacagatgagtttatcagttcctggcatcagctctacttcctagccatcgccccctaattctccaacgcaaggcgaggctcagagccctccagggtggctcagctggccccagagggcagcaggtgggcctttcttagcctatggacccttacaactctccaaacagagtaagggcccagagaaggacctagctgcaaaattgattccatgccattcccccacccgactcctgcatatcctgcttgctgtcctcacctgctaggttcttggtggcctcctgcatggagtcccccaatttgcttccctctgccctgtaccctctccctggctttgctggtcctggccaagtggggccacaggagcccgagccccctgtgagacccactactgcccagcctcttactgtgcttgcatttcaggcagtggcttccaagggacaaagtcctgcccttgggtgtggaagacaccgtggacaagctcaagatgctggaaggccgcaagaccagcatccgcaagtcagtgcaggtggcctatgaccgtgcgatgatccacctgagcagagtccgggggccccactccttcgtcacttccagctacctgtaagggcagggctggcctgcatccgcttgccctgcctccatcccgcagggcacagagaagcctcttctgcccctgccagatgtatggccggcagcttccccctctcatggtaggccagggactgggctttctccccactaagggcaaggccccagttttgaccaatcgcatggttctcctggcaggcctgctctgtgccaaaaactcccacccaaggtccctcaggggatatttcactgaagaaccagttagaagtagaaacagctgtggggcttgggcccagcttaggagattgcccagatggcaagaggtcctgggctccttcttgaggggctgcctggcccgctccatcctactcccactaactacacctcagggcgggtgaggttccgacactgatcccagagatgccgtggatacgccagggtcccagggggaatctccccaagctcacactctctcccgcttatcgcctattctcacacctcttctcggtcccatcttctgcacccattgcccagtcttgctttctctttcccatattccttttctttttctcttgtgccaaactgacagaaaccgtcaccacactggtctttttctttaatgtctcattccccttgaggccagctgctatgccaggtggtgtctctgccaggctcctcaggcccagacagaggccagcccacaacctatgaccccctcccccaggacaccacctcccacccacagaccttccctttagctgttgacacaacttcccagctctgcaagtgtgccccctggatcaaggcgggtcccctcttgtttttttctttgctgccacgaggtggtccaagccttcagggtgggctcctatcaggctgggtgtgcgagtgtccatctgtccacatggatgtcgagggtggtttgtgtggagctgtgctcgtcagctgggtctgccctcttcccccttttctccttcttctctcctcatggactttttctgcaattgcagtcttaagcttcactctccaccacctggatggcatggcgcctgccaccaaacatcttcctggcctgcgctctgccctgccctgcctagcctctgctactcccacttcccaactccagggaatgcattacttttatttcaaaccctctgcctccttccttctttctcttcaaccccctccccaccttcaccttctcaaaaatggaaggaaaaaaaaactgtgaatggggaatgctgactgacaaaccaacacaactttcagaggcttcagtgtctgttctctggacatttcttttcacctcctgagcaccaaagtcgcagggccagttgcaggccgctgattgccatgttgatttttaacctgatattctttttaattgttttaaatttttcataggggagttttggacaaaacagtcactggggagatcactgccatttttacacacttgactttttaaaaatacaaccaaccaaccaccacaacttcttatacatttgggacatgagccagagtttaaaagggaaccaacaaaacactataacttaaaaggatggggttttggattttgtataataataaaaacaatacagcatatggctagggaaggacatggtgtatataattgtaaaatactgttctaaattattcaggcctatagtttccattactggagtcctccattgtgtggccacacagtgtcgttgatttaaaggagccagtgcttcccctctccccaggtagttggtcagctgtggactctgtgacctttgtctaaacctgtgttgtaagatcttgggacttcctctctttctatgtctatctcttccccccaacactttctcttcttagtctctctctttatttttcaatctctgaatattttagtctctctctgagtctcattttttaaaatgctcttttagaacgggaaacggctcagatcctgctgtggcacggggcctatgtgtctctgtcgcgtctgctgtgaagcacatgatgctctatttattgtagagagtgactttatttgctttctagaattgtttataacagatggtataagagaggtaataaacagagaaaaatctatgcttgtaaagaatacaaaagttaattttacctactataatatgactgtctgaaacttattttctctctgagaaataaatgttctaatgggca

SEQ ID NO: 13522 - DNA, 3128 bp, Homo sapiens
caagcaaaggtaaataatgagagcagtttattgtaagaaggggcccactgggacagcgtataggaagtaagatggctctgtctctggagaaggctgcttcctcagtaagttcctagtctttgctcccagagctattagctgtctgctctggaagcaggggctgtgtaggaggcagtgggctgtggaggcccaagccttgtttggttttagtaccaatgtggttttagccagctacattctgcttctgtgcttggtgttttcctcttgtcagctaacacctgttagcagacttctcagcatcagcaagagattgaaatgagatgatgtgtgaataattaggagctttggaaactttgaaagtgctccctagacctggattttgattgttgtgttgatgctgccaggcattttgctgagcacctgccgtctctgagccaggcaaggtggggctggatgccagaaggcagcaggtgggcctttcttagcctatggacccttacaactctccaaacagagtaagggcccagagaaggacctagctgcaaaattgattccatgccattcccccacccgactcctgcatatcctgcttgctgtcctcacctgctaggttcttggtggcctcctgcatggagtcccccaatttgcttccctctgccctgtaccctctccctggctttgctggtcctggccaagtggggccacaggagcccgagccccctgtgagacccactactgcccagcctcttactgtgcttgcatttcaggcagtggcttccaagggacaaagtcctgcccttgggtgtggaagacaccgtggacaagctcaagatgctggaaggccgcaagaccagcatccgcaagtcagtgcaggtggcctatgaccgtgcgatgatccacctgagcagagtccgggggccccactccttcgtcacttccagctacctgtaagggcagggctggcctgcatccgcttgccctgcctccatcccgcagggcacagagaagcctcttctgcccctgccagatgtatggccggcagcttccccctctcatggtaggccagggactgggctttctccccactaagggcaaggccccagttttgaccaatcgcatggttctcctggcaggcctgctctgtgccaaaaactcccacccaaggtccctcaggggatatttcactgaagaaccagttagaagtagaaacagctgtggggcttgggcccagcttaggagattgcccagatggcaagaggtcctgggctccttcttgaggggctgcctggcccgctccatcctactcccactaactacacctcagggcgggtgaggttccgacactgatcccagagatgccgtggatacgccagggtcccagggggaatctccccaagctcacactctctcccgcttatcgcctattctcacacctcttctcggtcccatcttctgcacccattgcccagtcttgctttctctttcccatattccttttctttttctcttgtgccaaactgacagaaaccgtcaccacactggtctttttctttaatgtctcattccccttgaggccagctgctatgccaggtggtgtctctgccaggctcctcaggcccagacagaggccagcccacaacctatgaccccctcccccaggacaccacctcccacccacagaccttccctttagctgttgacacaacttcccagctctgcaagtgtgccccctggatcaaggcgggtcccctcttgtttttttctttgctgccacgaggtggtccaagccttcagggtgggctcctatcaggctgggtgtgcgagtgtccatctgtccacatggatgtcgagggtggtttgtgtggagctgtgctcgtcagctgggtctgccctcttcccccttttctccttcttctctcctcatggactttttctgcaattgcagtcttaagcttcactctccaccacctggatggcatggcgcctgccaccaaacatcttcctggcctgcgctctgccctgccctgcctagcctctgctactcccacttcccaactccagggaatgcattacttttatttcaaaccctctgcctccttccttctttctcttcaaccccctccccaccttcaccttctcaaaaatggaaggaaaaaaaaactgtgaatggggaatgctgactgacaaaccaacacaactttcagaggcttcagtgtctgttctctggacatttcttttcacctcctgagcaccaaagtcgcagggccagttgcaggccgctgattgccatgttgatttttaacctgatattctttttaattgttttaaatttttcataggggagttttggacaaaacagtcactggggagatcactgccatttttacacacttgactttttaaaaatacaaccaaccaaccaccacaacttcttatacatttgggacatgagccagagtttaaaagggaaccaacaaaacactataacttaaaaggatggggttttggattttgtataataataaaaacaatacagcatatggctagggaaggacatggtgtatataattgtaaaatactgttctaaattattcaggcctatagtttccattactggagtcctccattgtgtggccacacagtgtcgttgatttaaaggagccagtgcttcccctctccccaggtagttggtcagctgtggactctgtgacctttgtctaaacctgtgttgtaagatcttgggacttcctctctttctatgtctatctcttccccccaacactttctcttcttagtctctctctttatttttcaatctctgaatattttagtctctctctgagtctcattttttaaaatgctcttttagaacgggaaacggctcagatcctgctgtggcacggggcctatgtgtctctgtcgcgtctgctgtgaagcacatgatgctctatttattgtagagagtgactttatttgctttctagaattgtttataacagatggtataagagaggtaataaacagagaaaaatctatgcttgtaaagaatacaaaagttaattttacctactataatatgactgtctgaaacttattttctctctgagaaataaatgttctaatgggca

SEQ ID NO: 13523 - DNA, 3278 bp, Homo sapiens
gatgctctctctgtgggggtagctggcatgcctgggaagctgggaagggggaggcagaggaagaggaggaagaactggaagagtgagtgctgtgcagagtactactagaggatgaataaggaaacctcatggggggcgctggagcagaagaggaagcaggaggcagagagtggggtgaaggagccagagttgggcccttctctgggccaggaggaagtaagatggctctgtctctggagaaggctgcttcctcagtaagttcctagtctttgctcccagagctattagctgtctgctctggaagcaggggctgtgtaggaggcagtgggctgtggaggcccaagccttgtttggttttagtaccaatgtggttttagccagctacattctgcttctgtgcttggtgttttcctcttgtcagctaacacctgttagcagacttctcagcatcagcaagagattgaaatgagatgatgtgtgaataattaggagctttggaaactttgaaagtgctccctagacctggattttgattgttgtgttgatgctgccaggcattttgctgagcacctgccgtctctgagccaggcaaggtggggctggatgccagaaggcagcaggtgggcctttcttagcctatggacccttacaactctccaaacagagtaagggcccagagaaggacctagctgcaaaattgattccatgccattcccccacccgactcctgcatatcctgcttgctgtcctcacctgctaggttcttggtggcctcctgcatggagtcccccaatttgcttccctctgccctgtaccctctccctggctttgctggtcctggccaagtggggccacaggagcccgagccccctgtgagacccactactgcccagcctcttactgtgcttgcatttcaggcagtggcttccaagggacaaagtcctgcccttgggtgtggaagacaccgtggacaagctcaagatgctggaaggccgcaagaccagcatccgcaagtcagtgcaggtggcctatgaccgtgcgatgatccacctgagcagagtccgggggccccactccttcgtcacttccagctacctgtaagggcagggctggcctgcatccgcttgccctgcctccatcccgcagggcacagagaagcctcttctgcccctgccagatgtatggccggcagcttccccctctcatggtaggccagggactgggctttctccccactaagggcaaggccccagttttgaccaatcgcatggttctcctggcaggcctgctctgtgccaaaaactcccacccaaggtccctcaggggatatttcactgaagaaccagttagaagtagaaacagctgtggggcttgggcccagcttaggagattgcccagatggcaagaggtcctgggctccttcttgaggggctgcctggcccgctccatcctactcccactaactacacctcagggcgggtgaggttccgacactgatcccagagatgccgtggatacgccagggtcccagggggaatctccccaagctcacactctctcccgcttatcgcctattctcacacctcttctcggtcccatcttctgcacccattgcccagtcttgctttctctttcccatattccttttctttttctcttgtgccaaactgacagaaaccgtcaccacactggtctttttctttaatgtctcattccccttgaggccagctgctatgccaggtggtgtctctgccaggctcctcaggcccagacagaggccagcccacaacctatgaccccctcccccaggacaccacctcccacccacagaccttccctttagctgttgacacaacttcccagctctgcaagtgtgccccctggatcaaggcgggtcccctcttgtttttttctttgctgccacgaggtggtccaagccttcagggtgggctcctatcaggctgggtgtgcgagtgtccatctgtccacatggatgtcgagggtggtttgtgtggagctgtgctcgtcagctgggtctgccctcttcccccttttctccttcttctctcctcatggactttttctgcaattgcagtcttaagcttcactctccaccacctggatggcatggcgcctgccaccaaacatcttcctggcctgcgctctgccctgccctgcctagcctctgctactcccacttcccaactccagggaatgcattacttttatttcaaaccctctgcctccttccttctttctcttcaaccccctccccaccttcaccttctcaaaaatggaaggaaaaaaaaactgtgaatggggaatgctgactgacaaaccaacacaactttcagaggcttcagtgtctgttctctggacatttcttttcacctcctgagcaccaaagtcgcagggccagttgcaggccgctgattgccatgttgatttttaacctgatattctttttaattgttttaaatttttcataggggagttttggacaaaacagtcactggggagatcactgccatttttacacacttgactttttaaaaatacaaccaaccaaccaccacaacttcttatacatttgggacatgagccagagtttaaaagggaaccaacaaaacactataacttaaaaggatggggttttggattttgtataataataaaaacaatacagcatatggctagggaaggacatggtgtatataattgtaaaatactgttctaaattattcaggcctatagtttccattactggagtcctccattgtgtggccacacagtgtcgttgatttaaaggagccagtgcttcccctctccccaggtagttggtcagctgtggactctgtgacctttgtctaaacctgtgttgtaagatcttgggacttcctctctttctatgtctatctcttccccccaacactttctcttcttagtctctctctttatttttcaatctctgaatattttagtctctctctgagtctcattttttaaaatgctcttttagaacgggaaacggctcagatcctgctgtggcacggggcctatgtgtctctgtcgcgtctgctgtgaagcacatgatgctctatttattgtagagagtgactttatttgctttctagaattgtttataacagatggtataagagaggtaataaacagagaaaaatctatgcttgtaaagaatacaaaagttaattttacctactataatatgactgtctgaaacttattttctctctgagaaataaatgttctaatgggca

SEQ ID NO: 13524 - DNA, 6076 bp, Homo sapiens
attccccctcctcccccgggagcggcggcggcggccgggccggggccccagcgcgggccgggagggggcacggcggaggccacggaggcaggcgcgggagaagaccgcgctccgcttcccgggccgcgccgacctgctcggcggcctgcccgcccgcgcccaggggccccgaacggtggggccgggcaggcggctgaggcctgtcccctcagttcccaggtgccatgaggaagcctcgtcggaagtcccggcagaatgccgagggccggcgttccccgtccccctacagtctcaagtgctcacccacccgggagaccctgacatatgcccaggcccagcggattgtcgaggtagacattgatggacgcctgcatcgtatcagcatctatgacccactcaaaatcattactgaagatgagctaactgcccaggatatcaccgaatgcaatagtaacaaggaaaacagtgaacagcctcagttccctggcaagtccaagaaaccctcatccaagggcaaaaagaaggaatcctgctccaagcatgcatctggtacttccttccacctcccacagcccagcttccgtatggtggactcaggcatccagccagaagcacccccgctgcctgctgcctactaccgctacattgagaagccacctgaagacctggatgcagaggtagagtatgacatggatgaggaggaccttgcctggctggacatggtgaatgaaaaacggcgagtagatgggcacagtttggtgtctgcagatacctttgagctgctggtagaccggcttgagaaagagtcatacttggagagtcgcagcagtggggcccaacagtcactcatcgatgaagacgctttctgctgtgtgtgcctggatgatgaatgtcacaatagcaatgttattctcttctgtgacatctgcaacctggctgtacaccaggagtgctatggcgtcccatacatccctgagggccagtggctatgccgctgctgcctgcagtctccctcccggcctgtggattgcatcctttgccccaataagggtggcgccttcaaacagaccagtgatgggcactgggcccatgtggtgtgtgccatctggatccctgaagtctgctttgctaacaccgtgttcttggaacctattgagggcattgacaatatcccgcctgcccgctggaaactaacctgctatatctgcaagcagaaagggctaggtgcagccatccagtgccataaggtgaactgctacacagcattccatgtgacatgtgcacagcgggctgggctcttcatgaagattgagcccatgcgcgaaaccagcctcaatggcaccatctttacagtgcgcaagactgcctactgtgaggcccactcgccaccaggtgcggccactgctaggaggaagggcgactcccctagaagcatcagtgagactggcgatgaggaagggctgaaggagggtgatggagaggaggaagaagaggaagaggtggaggaagaagagcaggaagctcaaggcggggtgagtggctccctcaagggagtgcccaagaaaagcaagatgagtttgaagcagaagatcaagaaggagccagaggaagcaggccaagacacaccctccactctccccatgcttgctgtcccacagataccctcttacaggttgaacaagatctgtagtggtctctcctttcagaggaaaaaccagtttatgcagcggcttcacaattattggctgttgaagcggcaggcacggaatggtgtccctcttatccggcgcttgcactcccatctgcagtcccaaagaaacgctgagcagcgagagcaggatgagaagacaagtgcagtgaaggaggagctgaagtattggcagaagctccggcatgacttggagcgggcgcggctgctgattgagctgattcggaagagagagaagctcaaacgagagcaggtcaaagtccagcaggctgccatggagctggagctgatgccattcaatgttctgttgaggacaacactggacctgctgcaggagaaggatcctgcacacatcttcgcagaaccagtcaacttgagtgaggttccagattacctggaattcatatccaagccaatggatttttctactatgaggcggaagctggagtcccacctgtaccgcaccttggaggagtttgaggaggactttaaccttatagttaccaactgcatgaagtataatgctaaagacacaattttccaccgagcagctgtccgcctgcgggacctgggaggggccatcctacggcacgcccggcggcaggcagagaacatcggctatgaccccgagaggggcactcacctgcccgagtcacccaaattggaagacttttaccgcttctcctgggaagacgtggacaacatcctcatcccagagaaccgggcccatttgtccccagaggtgcagctgaaggagctgctggagaaactggacctggtgagcgccatgcggtccagtggggcccgcacccgtcgtgtccgcctgctacgccgggagatcaatgcccttcggcagaagctggcacagccaccaccaccacagccaccatcactcaacaagacagtatccaatggggagctgccagcagggccccagggggatgcagctgtgctggagcaggccttgcaggaggagccagaagacgatggggacagagatgactccaaactgcctcctccgccaaccctggagcccactgggcctgcaccttccttgtctgagcaagaatcccccccggagccccctactctgaaacccattaatgatagcaaacctccaagcaggttcctaaagcccagaaaggtggaagaagatgagctcttggaaaaatcaccactgcagctagggaatgagcctttgcaacgcttgctcagtgacaatggcatcaacagactatccctcatggcccctgacaccccggccggtaccccacttagtggtgtgggtcgccgcacatcagtcctcttcaagaaggccaagaatggggttaagctacagagaagcccagacagggtcctggagaatggcgaggaccatggtgtggcaggctctcctgcctctccagccagcatcgaggaagagcgccactcccggaagcggccaaggagcaggagctgtagtgagagcgaaggggagaggtccccccagcaggaggaagagacaggcatgaccaacggctttggaaaacacaccgaaagcgggtctgactctgaatgtagtttgggtctcagtggtggactggcatttgaagcttgcagtggtctgacgccccccaaacgcagccgtgggaagccagccctgtctcgagtgcccttcctggaaggtgtgaacggagactctgactacaatggctcaggcagaagcctcctgctgccctttgaagaccgcggagacctggagcccttggagctggtgtgggccaagtgccgaggctacccctcctaccctgccttgatcatcgatcccaagatgccccgggagggcctcctgcacaatggcgttcccatccctgtccccccgctggacgtgctgaagctgggagagcagaaacaggcagaggctggagagaagctcttccttgtcctcttctttgacaacaagcgcacctggcagtggcttccaagggacaaagtcctgcccttgggtgtggaagacaccgtggacaagctcaagatgctggaaggccgcaagaccagcatccgcaagtcagtgcaggtggcctatgaccgtgcgatgatccacctgagcagagtccgggggccccactccttcgtcacttccagctacctgtaagggcagggctggcctgcatccgcttgccctgcctccatcccgcagggcacagagaagcctcttctgcccctgccagatgtatggccggcagcttccccctctcatggtaggccagggactgggctttctccccactaagggcaaggccccagttttgaccaatcgcatggttctcctggcaggcctgctctgtgccaaaaactcccacccaaggtccctcaggggatatttcactgaagaaccagttagaagtagaaacagctgtggggcttgggcccagcttaggagattgcccagatggcaagaggtcctgggctccttcttgaggggctgcctggcccgctccatcctactcccactaactacacctcagggcgggtgaggttccgacactgatcccagagatgccgtggatacgccagggtcccagggggaatctccccaagctcacactctctcccgcttatcgcctattctcacacctcttctcggtcccatcttctgcacccattgcccagtcttgctttctctttcccatattccttttctttttctcttgtgccaaactgacagaaaccgtcaccacactggtctttttctttaatgtctcattccccttgaggccagctgctatgccaggtggtgtctctgccaggctcctcaggcccagacagaggccagcccacaacctatgaccccctcccccaggacaccacctcccacccacagaccttccctttagctgttgacacaacttcccagctctgcaagtgtgccccctggatcaaggcgggtcccctcttgtttttttctttgctgccacgaggtggtccaagccttcagggtgggctcctatcaggctgggtgtgcgagtgtccatctgtccacatggatgtcgagggtggtttgtgtggagctgtgctcgtcagctgggtctgccctcttcccccttttctccttcttctctcctcatggactttttctgcaattgcagtcttaagcttcactctccaccacctggatggcatggcgcctgccaccaaacatcttcctggcctgcgctctgccctgccctgcctagcctctgctactcccacttcccaactccagggaatgcattacttttatttcaaaccctctgcctccttccttctttctcttcaaccccctccccaccttcaccttctcaaaaatggaaggaaaaaaaaactgtgaatggggaatgctgactgacaaaccaacacaactttcagaggcttcagtgtctgttctctggacatttcttttcacctcctgagcaccaaagtcgcagggccagttgcaggccgctgattgccatgttgatttttaacctgatattctttttaattgttttaaatttttcataggggagttttggacaaaacagtcactggggagatcactgccatttttacacacttgactttttaaaaatacaaccaaccaaccaccacaacttcttatacatttgggacatgagccagagtttaaaagggaaccaacaaaacactataacttaaaaggatggggttttggattttgtataataataaaaacaatacagcatatggctagggaaggacatggtgtatataattgtaaaatactgttctaaattattcaggcctatagtttccattactggagtcctccattgtgtggccacacagtgtcgttgatttaaaggagccagtgcttcccctctccccaggtagttggtcagctgtggactctgtgacctttgtctaaacctgtgttgtaagatcttgggacttcctctctttctatgtctatctcttccccccaacactttctcttcttagtctctctctttatttttcaatctctgaatattttagtctctctctgagtctcattttttaaaatgctcttttagaacgggaaacggctcagatcctgctgtggcacggggcctatgtgtctctgtcgcgtctgctgtgaagcacatgatgctctatttattgtagagagtgactttatttgctttctagaattgtttataacagatggtataagagaggtaataaacagagaaaaatctatgcttgtaaagaatacaaaagttaattttacctactataatatgactgtctgaaacttattttctctctgagaaataaatgttctaatgggcaaaaaaaaaaaataataacacaaaccaacccacaacatcagcacaataaaaaaagggg

SEQ ID NO: 13525 - DNA, 6359 bp, Homo sapiens
attccccctcctcccccgggagcggcggcggcggccgggccggggccccagcgcgggccgggagggggcacggcggaggccacggaggcaggcgcgggagaagaccgcgctccgcttcccgggccgcgccgacctgctcggcggcctgcccgcccgcgcccaggggccccgaacggtggggccgggcaggcggctgaggcctgtcccctcagttcccaggtgccatgaggaagcctcgtcggaagtcccggcagaatgccgagggccggcgttccccgtccccctacagtctcaagtgctcacccacccgggagaccctgacatatgcccaggcccagcggattgtcgaggtagacattgatggacgcctgcatcgtatcagcatctatgacccactcaaaatcattactgaagatgagctaactgcccaggatatcaccgaatgcaatagtaacaaggaaaacagtgaacagcctcagttccctggcaagtccaagaaaccctcatccaagggcaaaaagaaggaatcctgctccaagcatgcatctggtacttccttccacctcccacagcccagcttccgtatggtggactcaggcatccagccagaagcacccccgctgcctgctgcctactaccgctacattgagaagccacctgaagacctggatgcagaggtagagtatgacatggatgaggaggaccttgcctggctggacatggtgaatgaaaaacggcgagtagatgggcacagtttggtgtctgcagatacctttgagctgctggtagaccggcttgagaaagagtcatacttggagagtcgcagcagtggggcccaacagtcactcatcgatgaagacgctttctgctgtgtgtgcctggatgatgaatgtcacaatagcaatgttattctcttctgtgacatctgcaacctggctgtacaccaggagtgctatggcgtcccatacatccctgagggccagtggctatgccgctgctgcctgcagtctccctcccggcctgtggattgcatcctttgccccaataagggtggcgccttcaaacagaccagtgatgggcactgggcccatgtggtgtgtgccatctggatccctgaagtctgctttgctaacaccgtgttcttggaacctattgagggcattgacaatatcccgcctgcccgctggaaactaacctgctatatctgcaagcagaaagggctaggtgcagccatccagtgccataaggtgaactgctacacagcattccatgtgacatgtgcacagcgggctgggctcttcatgaagattgagcccatgcgcgaaaccagcctcaatggcaccatctttacagtgcgcaagactgcctactgtgaggcccactcgccaccaggtgcggccactgctaggaggaagggcgactcccctagaagcatcagtgagactggcgatgaggaagggctgaaggagggtgatggagaggaggaagaagaggaagaggtggaggaagaagagcaggaagctcaaggcggggtgagtggctccctcaagggagtgcccaagaaaagcaagatgagtttgaagcagaagatcaagaaggagccagaggaagcaggccaagacacaccctccactctccccatgcttgctgtcccacagataccctcttacaggttgaacaagatctgtagtggtctctcctttcagaggaaaaaccagtttatgcagcggcttcacaattattggctgttgaagcggcaggcacggaatggtgtccctcttatccggcgcttgcactcccatctgcagtcccaaagaaacgctgagcagcgagagcaggatgagaagacaagtgcagtgaaggaggagctgaagtattggcagaagctccggcatgacttggagcgggcgcggctgctgattgagctgattcggaagagagagaagctcaaacgagagcaggtcaaagtccagcaggctgccatggagctggagctgatgccattcaatgttctgttgaggacaacactggacctgctgcaggagaaggatcctgcacacatcttcgcagaaccagtcaacttgagtgaggttccagattacctggaattcatatccaagccaatggatttttctactatgaggcggaagctggagtcccacctgtaccgcaccttggaggagtttgaggaggactttaaccttatagttaccaactgcatgaagtataatgctaaagacacaattttccaccgagcagctgtccgcctgcgggacctgggaggggccatcctacggcacgcccggcggcaggcagagaacatcggctatgaccccgagaggggcactcacctgcccgagtcacccaaattggaagacttttaccgcttctcctgggaagacgtggacaacatcctcatcccagagaaccgggcccatttgtccccagaggtgcagctgaaggagctgctggagaaactggacctggtgagcgccatgcggtccagtggggcccgcacccgtcgtgtccgcctgctacgccgggagatcaatgcccttcggcagaagctggcacagccaccaccaccacagccaccatcactcaacaagacagtatccaatggggagctgccagcagggccccagggggatgcagctgtgctggagcaggccttgcaggaggagccagaagacgatggggacagagatgactccaaactgcctcctccgccaaccctggagcccactgggcctgcaccttccttgtctgagcaagaatcccccccggagccccctactctgaaacccattaatgatagcaaacctccaagcaggttcctaaagcccagaaaggtggaagaagatgagctcttggaaaaatcaccactgcagctagggaatgagcctttgcaacgcttgctcagtgacaatggcatcaacagactatccctcatggcccctgacaccccggccggtaccccacttagtggtgtgggtcgccgcacatcagtcctcttcaagaaggccaagaatggggttaagctacagagaagcccagacagggtcctggagaatggcgaggaccatggtgtggcaggctctcctgcctctccagccagcatcgaggaagagcgccactcccggaagcggccaaggagcaggagctgtagtgagagcgaaggggagaggtccccccagcaggaggaagagacaggcatgaccaacggctttggaaaacacaccgaaagcgggtctgactctgaatgtagtttgggtctcagtggtggactggcatttgaagcttgcagtggtctgacgccccccaaacgcagccgtgggaagccagccctgtctcgagtgcccttcctggaaggtgtgaacggagactctgactacaatggctcaggcagaagcctcctgctgccctttgaagaccgcggagacctggagcccttggagctggtgtgggccaagtgccgaggctacccctcctaccctgccttgatcatcgatcccaagatgccccgggagggcctcctgcacaatggcgttcccatccctgtccccccgctggacgtgctgaagctgggagagcagaaacaggcagaggctggagagaagctcttccttgtcctcttctttgacaacaagcgcacctggcagtggcttccaagggacaaagtcctgcccttgggtgtggaagacaccgtggacaagctcaagatgctggaaggccgcaagaccagcatccgcaagtcagtgcaggtggcctatgaccgtgcgatgatccacctgagcagagtccgggggccccactccttcgtcacttccagctacctgtaagggcagggctggcctgcatccgcttgccctgcctccatcccgcagggcacagagaagcctcttctgcccctgccagatgtatggccggcagcttccccctctcatggtaggccagggactgggctttctccccactaagggcaaggccccagttttgaccaatcgcatggttctcctggcaggcctgctctgtgccaaaaactcccacccaaggtccctcaggggatatttcactgaagaaccagttagaagtagaaacagctgtggggcttgggcccagcttaggagattgcccagatggcaagaggtcctgggctccttcttgaggggctgcctggcccgctccatcctactcccactaactacacctcagggcgggtgaggttccgacactgatcccagagatgccgtggatacgccagggtcccagggggaatctccccaagctcacactctctcccgcttatcgcctattctcacacctcttctcggtcccatcttctgcacccattgcccagtcttgctttctctttcccatattccttttctttttctcttgtgccaaactgacagaaaccgtcaccacactggtctttttctttaatgtctcattccccttgaggccagctgctatgccaggtggtgtctctgccaggctcctcaggcccagacagaggccagcccacaacctatgaccccctcccccaggacaccacctcccacccacagaccttccctttagctgttgacacaacttcccagctctgcaagtgtgccccctggatcaaggcgggtcccctcttgtttttttctttgctgccacgaggtggtccaagccttcagggtgggctcctatcaggctgggtgtgcgagtgtccatctgtccacatggatgtcgagggtggtttgtgtggagctgtgctcgtcagctgggtctgccctcttcccccttttctccttcttctctcctcatggactttttctgcaattgcagtcttaagcttcactctccaccacctggatggcatggcgcctgccaccaaacatcttcctggcctgcgctctgccctgccctgcctagcctctgctactcccacttcccaactccagggaatgcattacttttatttcaaaccctctgcctccttccttctttctcttcaaccccctccccaccttcaccttctcaaaaatggaaggaaaaaaaaactgtgaatggggaatgctgactgacaaaccaacacaactttcagaggcttcagtgtctgttctctggacatttcttttcacctcctgagcaccaaagtcgcagggccagttgcaggccgctgattgccatgttgatttttaacctgatattctttttaattgttttaaatttttcataggggagttttggacaaaacagtcactggggagatcactgccatttttacacacttgactttttaaaaatacaaccaaccaaccaccacaacttcttatacatttgggacatgagccagagtttaaaagggaaccaacaaaacactataacttaaaaggatggggttttggattttgtataataataaaaacaatacagcatatggctagggaaggacatggtgtatataattgtaaaatactgttctaaattattcaggcctatagtttccattactggagtcctccattgtgtggccacacagtgtcgttgatttaaaggagccagtgcttcccctctccccaggtagttggtcagctgtggactctgtgacctttgtctaaacctgtgttgtaagatcttgggacttcctctctttctatgtctatctcttccccccaacactttctcttcttagtctctctctttatttttcaatctctgaatattttagtctctctctgagtctcattttttaaaatgctcttttagaacgggaaacggctcagatcctgctgtggcacggggcctatgtgtctctgtcgcgtctgctgtgaagcacatgatgctctatttattgtagagagtgactttatttgctttctagaattgtttataacagatggtataagagaggtaataaacagagaaaaatctatgcttgtaaagaatacaaaagttaattttacctactataatatgactgtctgaaacttattttctctctgagaaataaatgttctaatgggcaaaaaaaaaaaaaaaaaaaaaaaaaaaaaaaaaaaaaaaaaaaaaaaaaaaaaaaaggggggggggggcaaaaaaataccccggagggggccacgaaatagccgaccccctcttttgtgttgaaacaggggcgcccaaaagagggcggcaaaaaaagggagagaggcggcggggtacaacaaccgcggcgcgggcaaacagcggcgcgggactctgggaagagaccctcctcgtgcgggcgctattggggacaccacccgaagataagaggcccggaaataaaactggggtcacgggacacaccatatcggccggaatgccacgaagatgaatagcgggaa

SEQ ID NO: 13526 - DNA, 427 bp, Homo sapiens
aaaagtgattgcagatctaacgccgttggctgccatcctccactctgcccctgttcacaaatgtaggtgagttcaagcttttatctcttggcagaagagcacagagttaggaagcaagagtctcataagcatttgggactttctcagttcagcatatgatcggttgcacacaaaagtaagtttccctatcctttctcgtaggcttctgtgaaagtacagatgagctggaaaatgctgtatttcatgaacttcataataacaggatccataatttttatggaaagaagaatttgaagaccactacttgttttaaccccaagaataacttgctaaaatagggcacagagggaaaatatggaactgaactatatacattctttttagtcatcaagtcaattggcagtgaaataaaagattacatggagaa

SEQ ID NO: 13527 - DNA, 340 bp, Homo sapiens
ttccttgtgatgcataaatagtcttattcttcaatgatgtattttgaatcttctgcttgcatgctgtaccaagcaaagagaaagagtatatactcagtatttttagattcatctcgactggtatgcacaaactcagcaagataccatgcaaagtgtgacactccttactaggaatcctgaaagtcatattagataacacagctcagctgggtacggtggtgtgtgccttaatcccagctactcaagaggttgaggcaggagaatcacttgaggccaggagttcaaatccagcctgggaaactacagtgtgacctcatctcttaaacaaaacaagaactaa

SEQ ID NO: 13528 - DNA, 598 bp, Homo sapiens
tccccgggctgggggtggtggtagaaacggagggagtggaccgggtcttgggctcttgagcatttctcttgccacctctcagcctacctgaacgtgtgagacatggtgcagataggctgagaggcggcgggagagatgcccatgaactcaagtacccggacacgccctccacttctaccaccacgagtaacaccgcccccacgggaccgctctcgaggtcccccaagccaaggtgaggcaagtcccagttgaatgtcatcccgttcctcttgggcacggcggaccgctctcgcccttaaaggtgcgttgacgtggaaggtgaatgtctctttgcgtgacagtgcctcagcgcacgggcgacgaggggcacacctatccccctggctcgctctctagctggattcaggtggaacggaggaccatgaaccctctggaccttttctgccttggtcctatgcttgtaaggtttccggcctaagaggcccatcgactccttctgccttctttcagttgattacaaaataaataaataaataaataaataaataaataaataaataaaaaagcaggacattaaacctgccacctccagagggtc

SEQ ID NO: 13529 - DNA, 721 bp, Homo sapiens
gtgccgtgggggagcggtagatggcccagccccaagtgttccgatcttcctgcccaaacatattctgtgacggaaagcctatgttgacctcgtccggcactcaaggcgtgggcagcggcctaacgtctgctgcgggaacacagtcgcgttgaatgctattctcaagacagacaaaacagtgggaagacactacgccaagctgctaactccctggccattgccggactctttcacccccatggactttccgctggcattttaaacaacatagtttcttttctctgtctctttctctttctctctctctttctctttctctctctctctctctctctctctctctctctcaatctcataatttctctctctcgtgccacgttcccacccaacgctctctcgcccacttctactggggcccacttcctctcctgctctctctgtctcaacgtgattgactttcttgtgctgcccaggacttcttgcccacgtgcgccttcaaaacggtaagagctgcaactgaacgtgtgagacatggtgcagataggctgagaggcggcgggagagatgcccatgaactcaagtacccggacacgccctccacttctaccaccacgagtaacaccgcccccacgggaccgctctcgaggtcccccaagccaaggtgaggcaagtcccagtgtggagagagccagtgtggagagagccagtgtagagagggtcc

SEQ ID NO: 13530 - DNA, 449 bp, Homo sapiens
gtgccgtgggggagcggtagatggcccagccccaagtgttccgatcttcctgcccaaacatattctgtgacggaaagcctatgttgacctcgtccggcactcaaggcgtgggcagcggcctaacgtctgctgcgggaacacagtcgcgttgaatgctattctcaagacagacaaaacagtgggaagacactacgccaagctgctaactccctggccattgccggactctttcacccccatggactttccgctggcattttaaacaacatagtttcttttctctgtctctttctctttctctctctctttctctttctctctctctctctctctctctctctctccatgtgtgtaccccactgaaaatctttttgcagaactatttgggagttttagacagctttgccccctataggctcgtcgacgcggccgcgaatttagtagtagta

SEQ ID NO: 13531 - DNA, 1027 bp, Homo sapiens
gtgccgtgggggagcggtagatggcccagccccaagtgttccgatcttcctgcccaaacatattctgtgacggaaagcctatgttgacctcgtccggcactcaaggcgtgggcagcggcctaacgtctgctgcgggaacacagtcgcgttgaatgctattctcaagacagacaaaacagtgggaagacactacgccaagctgctaactccctggccattgccggactctttcacccccatggactttccgctggcattttaaacaacatagtttcttttctctgtctctttctctttctctctctctttctctttctctctctctctctctctctctctctctctctcaatctcataatttctctctctcgtgccacgttcccacccaacgctctctcgcccacttctactggggcccacttcctctcctgctctctctgtctcaacgtgattgactttcttgtgctgcccaggacttcttgcccacgtgcgccttcaaaacggtaagagctgcaactgaacgtgtgagacatggtgcagataggctgagaggcggcgggagagatgcccatgaactcaagtacccggacacgccctccacttctaccaccacgagtaacaccgcccccacgggaccgctctcgaggtcccccaagccaaggtgaggcaagtcccagttgaatgtcatcccgttcctcttgggcacggcggaccgctctcgcccttaaaggtgcgttgacgtggaaggtgaatgtctctttgcgtgacagtgcctcagcgcacgggcgacgaggggcacacctatccccctggctcgctctctagctggattcaggtggaacggaggaccatgaaccctctggaccttttctgccttggtcctatgcttgtaaggtttccggcctaagaggcccatcgactccttctgccttctttcagttgattacaaaataaataaataaataaataaataaataaataaataaataaaaaagcaggacattaaacctgccacctccagagggtc

SEQ ID NO: 13532 - DNA, 777 bp, Homo sapiens
gactagatgagaggagcctaggcaacagggctgtccacacacggtgctgaatacccaggtgctcaatatgaacattactccatggcactggggagccacggacgggatttgagcagagcaggaatctcccatcttcacttgttcctctcctccaccagtacatcatccggtgctcagaaatcccaaagctccccgcagtctcactcctcattgggggggtctggtttaatctcacggcccaggattacgtcatccaggtaggtgtccgtcataatgacgccacagtgatgtaatatgactggagttgagagggtggagcctggtagttggacatcactagggccggaaggggccacagaaacatttcttgtccccggggttgggggcggagagagcacggactcccagggaaatggtggttcctgcggcctggacacccagttgccgccttgtcgccttgcagtttgctcagggtgacgtccgcctctgcttgtccggcttccgggccttggacatcgcttcgcctccagtacctgtgtggatcctcggcgacgttttcttgggggcgtatgtgaccgtcttcgaccgcggggacatgaagagcggcgcacgagtgggactggcgcgcgctcgccctcgcggagcggacctgggaaggcgcgagaccgcgcaggcgcagtaccgcgggtgccgcccaggtgatgcgcatgcgcaccgggtagcagagctagcgctactcagtaaaaatccaatatttccattgaaaaaaaaaaaata

SEQ ID NO: 13533 - DNA, 1367 bp, Homo sapiens
acacccggctccccagcaatgtctccaccactgctgctgctacccttgctgctgctgctgcctctgctgaatgtggagcctgctggggccacactgatccggatccctcttcgtcaagtccaccctggacgcaggaccctgaacctactgaggggatggggaaaaccagcagagctccccaagttgggggccccatcccctggggacaagcctgcctcggtacctctctccaaattcctggatgcccagtattttggggaaattgggctgggaacgcctccacaaaacttcactgttgcctttgacactggctcctccaatctctgggtcccgtccaggagatgccacttcttcagtgtgccctgctggttccaccaccgcttcaatcccaatgcctccagctccttcaagcccagtgggaccaagtttgccattcagtatggaactgggcgggtagatggaatcctgagtgaggacaagctgactattggtggaatcaagggtgcatccgtgattttcggggaagctctgtgggaatccagcctggtcttcactgtttcccgccccgatgggatattgggcctcggttttcccattctgtctgtggaaggagttcggcccccgctggatgtactggtggagcaggggctattggataagcctgtcttctccttttacttcaacagggaccctgaagtggctgatggaggagagctggtcctggggggctcagacccggcacactacatcccacccctcaccttcgtgccagtcacagtccccgcctactggcagatccacatggagcgtgtgaaggtgggctcacggctgactctctgtgcccagggctgtgctgccatcctggatacaggcacacctgtcatcgtaggacccactgaggagatccgggccctgcatgcagccattgggggaatccccttgctggctggggagtacatcatccggtgctcagaaatcccaaagctccccgcagtctcactcctcattgggggggtctggtttaatctcacggcccaggattacgtcatccagtttgctcagggtgacgtccgcctctgcttgtccggcttccgggccttggacatcgcttcgcctccagtacctgtgtggatcctcggcgacgttttcttgggggcgtatgtgaccgtcttcgaccgcggggacatgaagagcggcgcacgagtgggactggcgcgcgctcgccctcgcggagcggacctgggaaggcgcgagaccgcgcaggcgcagtaccgcgggtgccgcccaggtgatgcgcatgcgcaccgggtagcagagctagcgctactcagtaaaaatccaatatttccattgaaaaaaaaaaaata

SEQ ID NO: 13534 - DNA, 571 bp, Homo sapiens
gactagatgagaggagcctaggcaacagggctgtccacacacggtgctgaatacccaggtgctcaatatgaacattactccatggcactggggagccacggacgggatttgagcagagcaggaatctcccatcttcacttgttcctctcctccaccagtacatcatccggtgctcagaaatcccaaagctccccgcagtctcactcctcattgggggggtctggtttaatctcacggcccaggattacgtcatccagtttgctcagggtgacgtccgcctctgcttgtccggcttccgggccttggacatcgcttcgcctccagtacctgtgtggatcctcggcgacgttttcttgggggcgtatgtgaccgtcttcgaccgcggggacatgaagagcggcgcacgagtgggactggcgcgcgctcgccctcgcggagcggacctgggaaggcgcgagaccgcgcaggcgcagtaccgcgggtgccgcccaggtgatgcgcatgcgcaccgggtagcagagctagcgctactcagtaaaaatccaatatttccattgaaaaaaaaaaaata

SEQ ID NO: 13535 - DNA, 345 bp, Homo sapiens
  misc_feature (67)..(67): n is a, c, g, or t
  misc_feature (73)..(73): n is a, c, g, or t
  misc_feature (75)..(75): n is a, c, g, or t
  misc_feature (83)..(83): n is a, c, g, or t
cctttttttttttcccccccgggggggggggccccccccttctttggggggggaaaacccaaatttnccgggncntttttttngcccccctttccaggtacctgtgtggatcctcggcgacgttttcttgggggcgtatgtgaccgtcttcgaccgcggggacatgaagagcggcgcacgagtgggactggcgcgcgctcgccctcgcggagcggacctgggaaggcgcgagaccgcgcaggcgcagtaccgcgggtgccgcccaggtgatgcgcatgcgcaccgggtagcagagctagcgctactcagtaaaaatccaatatttccattgaaaaaaaaaaaata

SEQ ID NO: 13536 - DNA, 1667 bp, Homo sapiens
acacccggctccccagcaatgtctccaccactgctgctgctacccttgctgctgctgctgcctctgctgaatgtggagcctgctggggccacactgatccggatccctcttcgtcaagtccaccctggacgcaggaccctgaacctactgaggggatggggaaaaccagcagagctccccaagttgggggccccatcccctggggacaagcctgcctcggtacctctctccaaattcctggatgcccagtattttggggaaattgggctgggaacgcctccacaaaacttcactgttgcctttgacactggctcctccaatctctgggtcccgtccaggagatgccacttcttcagtgtgccctgctggttccaccaccgcttcaatcccaatgcctccagctccttcaagcccagtgggaccaagtttgccattcagtatggaactgggcgggtagatggaatcctgagtgaggacaagctgactgtgagtggcctttgactccaggaagcctcgagcctgggagaaccctgttgtctaagatcatctggcttagggaggggcttgaggtgcaggggcttcctgagccgatggatggggcttctcaaggagggggaggggttcctgggtgaagggataggaattctctcaagtccagaggcaaagtttgctaagcagttgggggcttgggtccagatgtccccagacctgggattaatgctttggttggagactcagacatgtgttgttgtctccaaattactagtccatttcatctacccctagattggtggaatcaagggtgcatccgtgattttcggggaagctctgtgggaatccagcctggtcttcactgtttcccgccccgatgggatattgggcctcggttttcccattctgtctgtggaaggagttcggcccccgctggatgtactggtggagcaggggctattggataagcctgtcttctccttttacttcaacagggaccctgaagtggctgatggaggagagctggtcctggggggctcagacccggcacactacatcccacccctcaccttcgtgccagtcacagtccccgcctactggcagatccacatggagcgtgtgaaggtgggctcacggctgactctctgtgcccagggctgtgctgccatcctggatacaggcacacctgtcatcgtaggacccactgaggagatccgggccctgcatgcagccattgggggaatccccttgctggctggggagtacatcatccggtgctcagaaatcccaaagctccccgcagtctcactcctcattgggggggtctggtttaatctcacggcccaggattacgtcatccagtttgctcagggtgacgtccgcctctgcttgtccggcttccgggccttggacatcgcttcgcctccagtacctgtgtggatcctcggcgacgttttcttgggggcgtatgtgaccgtcttcgaccgcggggacatgaagagcggcgcacgagtgggactggcgcgcgctcgccctcgcggagcggacctgggaaggcgcgagaccgcgcaggcgcagtaccgcgggtgccgcccaggtgatgcgcatgcgcaccgggtagcagagctagcgctactcagtaaaaatccaatatttccattgaaaaaaaaaaaata

SEQ ID NO: 13537 - DNA, 1862 bp, Homo sapiens
  misc_feature (119)..(119): n is a, c, g, or t
  misc_feature (124)..(124): n is a, c, g, or t
  misc_feature (212)..(212): n is a, c, g, or t
  misc_feature (217)..(218): n is a, c, g, or t
actctagaggttcccctctctccaaactgcatgctggtctaggatcctctacgcacaacgcctgctcgcctcctccgtgtggttgccaaccaagccgcctgctaccttcatcaccaatngcacncgctcctgcctggaatcctttttcctagcttcaccaccaaatcgtttagcgctccttccttcttcctagcttccttcaccaaatcgcnctggnnccttgactctgtctcttcttttgcctcctcaggcccagtattttggggaaattgggctgggaacgcctccacaaaacttcactgttgcctttgacactggctcctccaatctctgggtcccgtccaggagatgccacttcttcagtgtgccctgctgtgagcttctatgtgggagaataaggctgaatgggggtgaagggagaaggcggggctgggcctcagcttcccaaaggtttttgaggaactgttcttttctgacaccctcaaaggtcagaaggttaaaggggcagaaggcattcggaaagctcccctcccacagtgacacctctctgacttctgacctaggttccaccaccgcttcaatcccaatgcctccagctccttcaagcccagtgggaccaagtttgccattcagtatggaactgggcgggtagatggaatcctgagtgaggacaagctgactgtgagtggcctttgactccaggaagcctcgagcctgggagaaccctgttgtctaagatcatctggcttagggaggggcttgaggtgcaggggcttcctgagccgatggatggggcttctcaaggagggggaggggttcctgggtgaagggataggaattctctcaagtccagaggcaaagtttgctaagcagttgggggcttgggtccagatgtccccagacctgggattaatgctttggttggagactcagacatgtgttgttgtctccaaattactagtccatttcatctacccctagattggtggaatcaagggtgcatccgtgattttcggggaagctctgtgggaatccagcctggtcttcactgtttcccgccccgatgggatattgggcctcggttttcccattctgtctgtggaaggagttcggcccccgctggatgtactggtggagcaggggctattggataagcctgtcttctccttttacttcaacagggaccctgaagtggctgatggaggagagctggtcctggggggctcagacccggcacactacatcccacccctcaccttcgtgccagtcacagtccccgcctactggcagatccacatggagcgtgtgaaggtgggctcacggctgactctctgtgcccagggctgtgctgccatcctggatacaggcacacctgtcatcgtaggacccactgaggagatccgggccctgcatgcagccattgggggaatccccttgctggctggggagtacatcatccggtgctcagaaatcccaaagctccccgcagtctcactcctcattgggggggtctggtttaatctcacggcccaggattacgtcatccagtttgctcagggtgacgtccgcctctgcttgtccggcttccgggccttggacatcgcttcgcctccagtacctgtgtggatcctcggcgacgttttcttgggggcgtatgtgaccgtcttcgaccgcggggacatgaagagcggcgcacgagtgggactggcgcgcgctcgccctcgcggagcggacctgggaaggcgcgagaccgcgcaggcgcagtaccgcgggtgccgcccaggtgatgcgcatgcgcaccgggtagcagagctagcgctactcagtaaaaatccaatatttccattgaaaaaaaaaaaata

SEQ ID NO: 13538 - DNA, 1573 bp, Homo sapiens
acacccggctccccagcaatgtctccaccactgctgctgctacccttgctgctgctgctgcctctgctgaatgtggagcctgctggggccacactgatccggatccctcttcgtcaagtccaccctggacgcaggaccctgaacctactgaggggatggggaaaaccagcagagctccccaagttgggggccccatcccctggggacaagcctgcctcggtacctctctccaaattcctggatgcccagtattttggggaaattgggctgggaacgcctccacaaaacttcactgttgcctttgacactggctcctccaatctctgggtcccgtccaggagatgccacttcttcagtgtgccctgctggttccaccaccgcttcaatcccaatgcctccagctccttcaagcccagtgggaccaagtttgccattcagtatggaactgggcgggtagatggaatcctgagtgaggacaagctgactattggtggaatcaagggtgcatccgtgattttcggggaagctctgtgggaatccagcctggtcttcactgtttcccgccccgatgggatattgggcctcggttttcccattctgtctgtggaaggagttcggcccccgctggatgtactggtggagcaggggctattggataagcctgtcttctccttttacttcaacagggaccctgaagtggctgatggaggagagctggtcctggggggctcagacccggcacactacatcccacccctcaccttcgtgccagtcacagtccccgcctactggcagatccacatggagcgtgtgaaggtgggctcacggctgactctctgtgcccagggctgtgctgccatcctggatacaggcacacctgtcatcgtaggacccactgaggagatccgggccctgcatgcagccattgggggaatccccttgctggctggggagtacatcatccggtgctcagaaatcccaaagctccccgcagtctcactcctcattgggggggtctggtttaatctcacggcccaggattacgtcatccaggtaggtgtccgtcataatgacgccacagtgatgtaatatgactggagttgagagggtggagcctggtagttggacatcactagggccggaaggggccacagaaacatttcttgtccccggggttgggggcggagagagcacggactcccagggaaatggtggttcctgcggcctggacacccagttgccgccttgtcgccttgcagtttgctcagggtgacgtccgcctctgcttgtccggcttccgggccttggacatcgcttcgcctccagtacctgtgtggatcctcggcgacgttttcttgggggcgtatgtgaccgtcttcgaccgcggggacatgaagagcggcgcacgagtgggactggcgcgcgctcgccctcgcggagcggacctgggaaggcgcgagaccgcgcaggcgcagtaccgcgggtgccgcccaggtgatgcgcatgcgcaccgggtagcagagctagcgctactcagtaaaaatccaatatttccattgaaaaaaaaaaaata

SEQ ID NO: 13539 - DNA, 1068 bp, Homo sapiens
acacccggctccccagcaatgtctccaccactgctgctgctacccttgctgctgctgctgcctctgctgaatgtggagcctgctggggccacactgatccggatccctcttcgtcaagtccaccctggacgcaggaccctgaacctactgaggggatggggaaaaccagcagagctccccaagttgggggccccatcccctggggacaagcctgcctcggtacctctctccaaattcctggatgcccagtattttggggaaattgggctgggaacgcctccacaaaacttcactgttgcctttgacactggctcctccaatctctgggtcccgtccaggagatgccacttcttcagtgtgccctgctggttccaccaccgcttcaatcccaatgcctccagctccttcaagcccagtgggaccaagtttgccattcagtatggaactgggcgggtagatggaatcctgagtgaggacaagctgactattggtggaatcaagggtgcatccgtgattttcggggaagctctgtgggaatccagcctggtcttcactgtttcccgccccgatgggatattgggcctcggttttcccattctgtctgtggaaggagttcggcccccgctggatgtactggtggagcaggggctattggataagcctgtcttctccttttacttcaacaggtgctggggagggtgcacctatctatgagtcctattcctcagaaggaagtgaggccctccttcaggaagtctcttactccataaagaaagtcccagttcaggcacggtggctcatgcccgtaatcccagcaatttgggaggctgaggcagattgatcacctgaagtcaagagttccagaccagcctggctaacatggtgaaaccccatctgtactaaaactataaaaattagctgggtgcggtggcacatgcctgtaatcccatcctattctaatagcctaagccattatccctgtttagaccggggtgatagatcttcaaccatacaatgatttttactccgctatcccgtaatggataatgagatggaccctatccgaaa

SEQ ID NO: 13540 - DNA, 588 bp, Homo sapiens
attggtggaatcaagggtgcatccgtgattttcggggaagctctgtgggaatccagcctggtcttcactgtttcccgccccgatgggatattgggcctcggttttcccattctgtctgtggaaggagttcggcccccgctggatgtactggtggagcaggggctattggataagcctgtcttctccttttacttcaacaggtgctggggagggtgcacctatctatgagtcctattcctcagaaggaagtgaggccctccttcaggaagtctcttactccataaagaaagtcccagttcaggcacggtggctcatgcccgtaatcccagcaatttgggaggctgaggcagattgatcacctgaagtcaagagttccagaccagcctggctaacatggtgaaaccccatctgtactaaaactataaaaattagctgggtgcggtggcacatgcctgtaatcccagctacttgagaggctgaggcaggagaattgcttgaatccgggaggtggaggttgcagtgagccgagatcgcaccactgctctccagtctgggtgacagagagagaccgtctccaaaaaaaaaaaa

SEQ ID NO: 13541 - DNA, 499 bp, Homo sapiens
tcatactatcataggaatcagcaaagaaaatcatttcactataattctattggcattttaagaacattcaatggaaaacataaatttccaatttattaagaccttatttttgtacctaattattaaagagtaataccatctatgttctctaacagccccttcctaatccattgctttattaaatactcttctgattatgtctacttgataccaagcattatcaaacacttaaataatgaaatgaaatattttcatttccctttttgtttatgctgtttcttaattgttttatgagaaattgatatagttcaaagataacaaatgtaaatctaaaattaagatgaacacttgcattaatttattaaatacataaaattcatagaggtccaaggcaattagtgtgttgaaaacaaatattaatatatacaggaagttcaagggttacaactctttatgttacctggaaatgtaggagtagcattctctttttaaatttttg

SEQ ID NO: 13542 - DNA, 489 bp, Homo sapiens
caaaacctccagaaagaaccaaccctgttgatatcttgattttagatttctagcctccagaactgtgagaagacaaatttattttgttttaaaccacccactttgtggtacttttttacagtagcccttggaaactaaaatactctgtttcagcctctctagagaagaaagtcagacttctaatagaatgtgagaaaactttgtatcaagtaggagacctgtaaatctaatgattttataaacttttaaccagtcattctattttcttcacatcttcacaccctctcctcctgcagtaatacctttttctgtcattttctgggctctttgggggttcatcagtgacaatcaggttgcttttctggtctgtcccctattgaagtagaattccccattcttttctgttaaggcgcttttcaagtgttcatctcctttccaccttctggaatttacttgcttttttctccttctgtcctgtgggtttatgcc

SEQ ID NO: 13543 - DNA, 524 bp, Homo sapiens
ggatacaatccctagaacttgcgcaaatttctcaggtaaaaccacatgtgcatttgtgtgtatatacaactgcacagtcactgccgggctccttcatgctgctgtgtgtagctgcaccctgacccctggcaaccatgaatgtatttgaatttccaggaatctgttctccctccctatgattttgtcatttcaagaatgttatgtaaatggaattatacaatatgtaaccttttgagtttatctttttttcactcagcataatgcccttgagtttgcacctgacatttgatagttcattttattgctaaatagaattccttggtatagatgtgtcacagttggttaaactagtcacctgttgaagaacatttgggtaatttccagtttttggcttttatgaataaagctgctatgaacattcatgtacaagtttctacatgaacataagtttccatctctcttggatcactgcccaagagtacacttgctgggtgatttggtaagttcatttttagtttaaaagg

SEQ ID NO: 13544 - DNA, 523 bp, Homo sapiens
gcaggaccgggccgctgggccctcatgtgggagagaggtgaaaagcgtcccccactagggggctggcagtgcatgtgcttgagttaaatgtgcagggcagacagagccagaagggcctgtacccaggggctcgtcccctcctccggtttcccagacaaatccagacaccagcctttagggtggccttgggaggagagggccaggctgtcctgggtgtgagagaactagatagagcctcccaaccctgatttagaaatgcattccttattttgtctagaaattaataaatgaactagcttgttttgacaggtttatttcacatcctatgaatgtatgtaaataaactgtacataggtccatccacataaaatatcttttaataacatatcaacatttgtgtaaatttgaaatttaaaaaaatctatgaagctggtgtacatatgttacaattacgtatattttctttggtccttcataaaaatatatttactttgccaataaaaagaaaaagaactcacaaaat

SEQ ID NO: 13545 - DNA, 471 bp, Homo sapiens
gagaacccctcctatatccttccttcttttcctgtgctttgtacctctacagcaccacttatccctgaatcacttctccacaaagtcattgatacctgtaacaaaatgccataaactggaggctggggagtctgagaccagggtgccaacacggtcacgctttgatgagggccctcatttgggttacagactgccgacttctcaccgtgtcctcacagggcggaataacaactctctttagcccctcatgaaggcactcatcccatttggagggctctacctcatgacctcatcccttctcagaggtcccaccttctatgcatagtatccgcacattagggattaggtttttatatggatttggggggcacagacattcacatcacaatggtgcctcttacatttctcaagcacttatttttgctctgtattatggggataaaaatgattctgatttaagttgtaccttta

SEQ ID NO: 13546 - DNA, 346 bp, Homo sapiens
tactaacaaccccttcattgattgaatgtggaacctaaattaaggagtcaaaggaggccaggtaccttggctcatgcctgtaatcacagcattttgggaggctgaggcaggtggattgcttgagcccaggagcctgagacccacctgggcaacatggaaaaatcctgtctctacaaaagaaaagtagaaaaaaaaattatccggtcttggtggcgcaggcctgtggtcccagctactgaggaggttcaggcaggaggatcatctaagcccagggaggtcaaagcagtagagctgtgatcactccacagcactccagcctggacaacaaagtgagaccctgactcag

SEQ ID NO: 13547 - DNA, 680 bp, Homo sapiens
tggtactcaccgcctcatgacccctgtttctgactgaggttccccccagcttgaatcttgtagggaggcaaggagcagagaacaggccctgccctcacgttggtccacatggccccctgccactggctggccacatgaccttgggcaagtctcctgtaccttccaggccccagattcctcatctgtaagatggggagtaatgactcccccgtgctggggttgcacgtgttggcggagatggacaaggagccccttctagcaggcaagctctttccactctccctgcccctcgtagtggcccctagatgtgctggctggtccccatcatgcccagttcgccactcacagagccgagggcagagaggtcaccaagttcgtaccgtctgtgctacagcccatccccaagattgcatctccccagaaggtgcagtggaagaggagatagtggggggttgaggctgtcacagaaggtcagagccagagggtcctctaggacatggaggccaagccttccttttagagatagggtaactaaggccctgagtgggcaggtggctgcacagggtccccattactggctgccggctcccagtccagtgctcctctcactacacctacgcctctccctaagttcgggaggagttccaggtgcccgtgccccttggtgttcactccccttt

SEQ ID NO: 13548 - DNA, 4600 bp, Homo sapiens
ctgacgttgtgattctctcgggagtttgaagacagaaaggaaaggggagaaacctgcagagagcatcaaaggatggggggtgctataaaagaagcaggggggtcctttgaaagaaatctatcatgcactgaaatgctttctggagaaggtgccgttattttcctcccctcttgctcagatgaaaggagccagcaaggacagtcctgaaatattcctcaggggactttttgtcattgttcctctttcctcttgcacagagctatttgctgacctttccagaggaatctcagtccagctgagaagacagttcttaataaaaacaaaaaaatgcaaaaaccaattcctgctgtttgaatgggaatggtagcttgcttgctgcagttcttttcctgtgacattttggaatgtctgcagaaacttaaaaaaaagaaaaaaaaaaccttaaaaactccctggattaggcaagagaaaaggaagtttttttttgctaaacaggagtaaatgagaggtggtaacttatccctaagccaggacctggatgatcaaaaccttcaaattctagggatcagcacttcaaaaataacaagtaaacaagcatgaggagtggctgttgggtttcgctcagaggcaggttttaaaggaagccaaaaccgggttcagaacttcaggcctgtacgatgcctgaagaccggaattctggggggtgcccggctggtgccttagcctcaactcctttcatccctaaaactacatacagaagaatcaaacggtgttttagttttcggaaaggcatttttggacagaaactggaggatactgttcgttatgagaagagatatgggaaccgtctggctccgatgttggtggagcagtgcgtggactttatccgacaaagggggctgaaagaagagggtctctttcgactgccaggccaggctaatcttgttaaggagctccaagatgcctttgactgtggggagaagccatcatttgacagcaacacagatgtacacacggtggcatcacttcttaagctgtacctccgagaacttccagaaccagttattccttatgcgaagtatgaagattttttgtcatgtgccaaactgctcagcaaggaagaggaagcaggtgttaaggaattagcaaagcaggtgaagagtttgccagtggtaaattacaacctcctcaagtatatttgcagattcttggatgaagtacagtcctactcgggagttaacaaaatgagtgtgcagaacttggcaacggtctttggtcctaatatcctgcgccccaaagtggaagatcctttgactatcatggagggcactgtggtggtccagcagttgatgtcagtgatgattagcaaacatgattgcctctttcccaaagatgcagaactacaaagcaagccccaagatggagtgagcaacaacaatgaaattcagaagaaagccaccatggggcagttacagaacaaggagaacaataacaccaaggacagccctagtaggcagtgctcctgggacaagtctgagtcaccccagagaagcagcatgaacaatggatcccccacagctctatcaggcagcaaaaccaacagcccaaagaacagtgttcacaagctagatgtgtctagaagcccccctctcatggtcaaaaagaacccagcctttaataagggtagtgggatagttaccaatgggtccttcagcagcagtaatgcagaaggtcttgagaaaacccaaaccacccccaatgggagcctacaggccagaaggagctcttcactgaaggtatctggtaccaaaatgggcacgcacagtgtacagaatggaacggtgcgcatgggcattttgaacagcgacacactcgggaaccccacaaatgttcgaaacatgagctggctgccaaatggctatgtgaccctgagggataacaagcagaaagaacaagctggagagttaggccagcacaacagactgtccacctatgataatgtccatcaacagttctccatgatgaaccttgatgacaagcagagcattgacagtgctacctggtccacttcctcctgtgaaatctccctccctgagaactccaactcctgtcgctcttctaccaccacctgcccagagcaagacttttttggggggaactttgaggaccctgttttggatgggcccccgcaggacgacctttcccaccccagggactatgaaagcaaaagtgaccacaggagtgtgggaggtcgaagtagtcgtgccaccagtagcagtgacaacagtgagacatttgtgggcaacagcagcagcaaccacagtgcactgcacagtttagtttccagcctgaaacaggaaatgaccaaacagaagatagagtatgagtccaggataaagagcttagaacagcgaaacttgactttggaaacagaaatgatgagcctccatgatgaactggatcaggagaggaaaaagttcacaatgatagaaataaaaatgcgaaatgccgagcgagcaaaagaagatgccgagaaaagaaatgacatgctacagaaagaaatggagcagtttttttccacgtttggagaactgacagtggaacccaggagaaccgagagaggaaacacaatatggattcagtgagcctgctttcgcctgctgtctctgatggctctggcaaggactccagggattctggtgggatatgacttagaaccaggtggctggtcacctggatgtacagaagtctaactggtgaaggaatatcatttacagacattaaacatccatatctgcaatgtgtaccaaagttatatcatgccccataatgctactgtcaagtgttacaactggatatgtgtatatagagtagtttttcaaaagtaaactaaaaatgagaagcatatttcaagaattattttattgcaagtcttgtatttaaatgttaaatcaatatgttgttgcaatttagcttgctttcaagcttcaccccttgcacttaacataagctatttttggcattgtgttatcatcggcttattttatagatcaatatttttatttcccttttttgctgaggaaatgaagataagcaaaaatataaatatatatataaatatatgagttattaaaatcagaagaatactttgtggctgtgctgtttgtgccaatagactttgtcatgaccaaaaagagaaatgtaaatagttttataaaatacagtcgaatcaccaggaacctttgagctgcttttaaaattcttcccctggcaccactcagttttgcttttgcgaggcgatttgacataggaactttgagactccatgagaaagtccctttctgaggcccactgtctaccttgccagatcctcagtgcgtatcgccaatgcaggatgctccttagaaaagaaaaaatggtaaagaatggcatttaacgattcaggctttgaattactctgtccctctggaccgaatctctttaactgctggatagttttagaggaattctcctgctacttaggtactgggaaacaatgcttgctaaaccatgcccacgtgagcacctgtctcccactcaaacctctcccatctcccaacaactgcactttagaataccagcagtgaaatggtattactgtttccctctgagtgaaactgctagagtatatgtcacgtagtgacatttttttctcactcaggctattgccatctgggattctctccctactacagctggcaaagttggtttgcagcaagaagatagtgggagggggccaggctgcaggagaaggagaaaagtttagaagaaacaaaccattttgcttctaattttgacagtatcactttcctgttaaaacatacaataattttaaaaggtgaatgcctaaagttccaattttagcaaatatgggaacctcagcaatgctaattttctagaaaaacccagggctctttggagctagagttttgggagaacagttcttcacaataaggcaatggttttgagaggccaggcaaataatctttctcaccgtagaacaaaaagttacaaaaggcataatcggaaatagagactacatacttgagtttatggggtttgtgttgtttgaaggttcaatgcttgcatgtgtttatttattttcaagagggaaagtggtctgtactgctttcatccttgccactgtcttgcttttattttttactctcccactgagcaagcgtctgtggtcctatggtatcaaccagtatctttatagcaataatttctttaattcccttttctctctctttccaattatttaaccagttacttccacctggacatacgataggaaattcaaactcaaaatatgaaaattgatcttaataactctcccttcatatcttttcacctatttccagtccttatcatagttgataaaaacctcagactcatccagaaagctatatgatgcactagtaaaaaaaacaaagatattcaaactgcttgggttcaaatggtatacaatttgccagctgttactgaaccttctatgcataactttttttttcctctgtgcaattggaataataaaaatactactcccaaaaaaaaatta

SEQ ID NO: 13549 - DNA, 440 bp, Homo sapiens
attttatattttagaataacttcaaaagcttagttttaaaagttggcatttttggacagaaactggaggatactgttcgttatgagaagagatatgggaaccgtctggctccgatgttggtggagcagtgcgtggactttatccgacaaagggggctgaaagaagagggtctctttcgactgccaggccaggctaatcttgttaaggagctccaagatgcctttgactgtggggagaagccatcatttgacaggtagatgtcacaattttactagccatcttcactgagaaattcagactcaactgacaggatgcagtgagctgaggaggcataaccttgattgatgtggtaacagtttacaacatagattatttggccacaggagtttgcattgtttctattaagttacaaagtcaaaaattgggcaccttagatatct

SEQ ID NO: 13550 - DNA, 698 bp, Homo sapiens
  misc_feature (108)..(108): n is a, c, g, or t
  misc_feature (628)..(628): n is a, c, g, or t
  misc_feature (664)..(664): n is a, c, g, or t
tagtagaggcctgggtttaaatcggcgaggattctcaagtgcatgtggcaacacagcccagctccgggtggaaaccagcagggctctggaggggctcggagaccaggngagctgtcaaggctgcggcggggaccagagaggagcctggcgggggtggctgggtggctgggggaatccccccaacttcccatcgcaggcgcactctctcggccgcctatttcctccgaaacccgcgctgcggagcgcccagtgcatagagttcaacacttccccttgttgtggaaagtaaaggagcctcactaccacctttttttctttgcgttttcttactgctggtcctgggagccttttccttcggagcagcagccctgtccggcatctgtcttgagctcccagcaaggaaagtccatcagcttgataatggaggagaacaatgactccacggagaacccccaacaaggccaagggcggcagaatgccatcaagtgtgggtggctgaggaagcaaggaggctttgtcaagacttggcatactcgctggtttgtgctcaagggggatcagctctattatttcaaagatgaagatgaaaccaagcccttggaatatttgacaacgtctggagacagtntctggcttgtccacagttgggggaagataccacagntatcttcgtggggtagaagccggggtgcatttaa

SEQ ID NO: 13551 - DNA, 392 bp, Homo sapiens
  misc_feature (56)..(56): n is a, c, g, or t
  misc_feature (75)..(75): n is a, c, g, or t
  misc_feature (88)..(88): n is a, c, g, or t
gggcgggccgccggggcggcccgcccgtttttccccgcttttcgaggtgttaaagnatatataagacagtgaaanatttgccagtggntaaatacaacctcctcagtatatttgcaggtttcatcaaagacatttgtaactgaattctgttagaaaaataattgtgccagaaaaataattgtgcctggaaaatatacctctcaatgtataactcaagacctgggatgggatatgccatatatgtgctcctgtttaagaaaccaaatatgcaaaattgaaacagaataaatttaaatagagagtgatgattggcactacaagtcactgcagggtgtcttacatgatagcttcccagtccattttaaaataaaattcaaagttttaattgagta

SEQ ID NO: 13552 - DNA, 4634 bp, Homo sapiens
  misc_feature (3)..(3): n is a, c, g, or t
  misc_feature (11)..(11): n is a, c, g, or t
  misc_feature (24)..(24): n is a, c, g, or t
  misc_feature (33)..(33): n is a, c, g, or t
  misc_feature (41)..(41): n is a, c, g, or t
  misc_feature (56)..(56): n is a, c, g, or t
tanagtaggantatcttaaccccntactattcngcaagaanccgacagaatggggntttttgaagacagaaaggaaaggggagaaacctgcagagagcatcaaaggatggggggtgctataaaagaagcaggggggtcctttgaaagaaatctatcatgcactgaaatgctttctggagaaggtgccgttattttcctcccctcttgctcagatgaaaggagccagcaaggacagtcctgaaatattcctcaggggactttttgtcattgttcctctttcctcttgcacagagctatttgctgacctttccagaggaatctcagtccagctgagaagacagttcttaataaaaacaaaaaaatgcaaaaaccaattcctgctgtttgaatgggaatggtagcttgcttgctgcagttcttttcctgtgacattttggaatgtctgcagaaacttaaaaaaaagaaaaaaaaaaccttaaaaactccctggattaggcaagagaaaaggaagtttttttttgctaaacaggagtaaatgagaggtggtaacttatccctaagccaggacctggatgatcaaaaccttcaaattctagggatcagcacttcaaaaataacaagtaaacaagcatgaggagtggctgttgggtttcgctcagaggcaggttttaaaggaagccaaaaccgggttcagaacttcaggcctgtacgatgcctgaagaccggaattctggggggtgcccggctggtgccttagcctcaactcctttcatccctaaaactacatacagaagaatcaaacggtgttttagttttcggaaaggcatttttggacagaaactggaggatactgttcgttatgagaagagatatgggaaccgtctggctccgatgttggtggagcagtgcgtggactttatccgacaaagggggctgaaagaagagggtctctttcgactgccaggccaggctaatcttgttaaggagctccaagatgcctttgactgtggggagaagccatcatttgacagcaacacagatgtacacacggtggcatcacttcttaagctgtacctccgagaacttccagaaccagttattccttatgcgaagtatgaagattttttgtcatgtgccaaactgctcagcaaggaagaggaagcaggtgttaaggaattagcaaagcaggtgaagagtttgccagtggtaaattacaacctcctcaagtatatttgcagattcttggatgaagtacagtcctactcgggagttaacaaaatgagtgtgcagaacttggcaacggtctttggtcctaatatcctgcgccccaaagtggaagatcctttgactatcatggagggcactgtggtggtccagcagttgatgtcagtgatgattagcaaacatgattgcctctttcccaaagatgcagaactacaaagcaagccccaagatggagtgagcaacaacaatgaaattcagaagaaagccaccatggggcagttacagaacaaggagaacaataacaccaaggacagccctagtaggcagtgctcctgggacaagtctgagtcaccccagagaagcagcatgaacaatggatcccccacagctctatcaggcagcaaaaccaacagcccaaagaacagtgttcacaagctagatgtgtctagaagcccccctctcatggtcaaaaagaacccagcctttaataagggtagtgggatagttaccaatgggtccttcagcagcagtaatgcagaaggtcttgagaaaacccaaaccacccccaatgggagcctacaggccagaaggagctcttcactgaaggtatctggtaccaaaatgggcacgcacagtgtacagaatggaacggtgcgcatgggcattttgaacagcgacacactcgggaaccccacaaatgttcgaaacatgagctggctgccaaatggctatgtgaccctgagggataacaagcagaaagaacaagctggagagttaggccagcacaacagactgtccacctatgataatgtccatcaacagttctccatgatgaaccttgatgacaagcagagcattgacagtgctacctggtccacttcctcctgtgaaatctccctccctgagaactccaactcctgtcgctcttctaccaccacctgcccagagcaagacttttttggggggaactttgaggaccctgttttggatgggcccccgcaggacgacctttcccaccccagggactatgaaagcaaaagtgaccacaggagtgtgggaggtcgaagtagtcgtgccaccagtagcagtgacaacagtgagacatttgtgggcaacagcagcagcaaccacagtgcactgcacagtttagtttccagcctgaaacaggaaatgaccaaacagaagatagagtatgagtccaggataaagagcttagaacagcgaaacttgactttggaaacagaaatgatgagcctccatgatgaactggatcaggagaggaaaaagttcacaatgatagaaataaaaatgcgaaatgccgagcgagcaaaagaagatgccgagaaaagaaatgacatgctacagaaagaaatggagcagtttttttccacgtttggagaactgacagtggaacccaggagaaccgagagaggaaacacaatatggattcagtgagcctgctttcgcctgctgtctctgatggctctggcaaggactccagggattctggtgggatatgacttagaaccaggtggctggtcacctggatgtacagaagtctaactggtgaaggaatatcatttacagacattaaacatccatatctgcaatgtgtaccaaagttatatcatgccccataatgctactgtcaagtgttacaactggatatgtgtatatagagtagtttttcaaaagtaaactaaaaatgagaagcatatttcaagaattattttattgcaagtcttgtatttaaatgttaaatcaatatgttgttgcaatttagcttgctttcaagcttcaccccttgcacttaacataagctatttttggcattgtgttatcatcggcttattttatagatcaatatttttatttcccttttttgctgaggaaatgaagataagcaaaaatataaatatatatataaatatatgagttattaaaatcagaagaatactttgtggctgtgctgtttgtgccaatagactttgtcatgaccaaaaagagaaatgtaaatagttttataaaatacagtcgaatcaccaggaacctttgagctgcttttaaaattcttcccctggcaccactcagttttgcttttgcgaggcgatttgacataggaactttgagactccatgagaaagtccctttctgaggcccactgtctaccttgccagatcctcagtgcgtatcgccaatgcaggatgctccttagaaaagaaaaaatggtaaagaatggcatttaacgattcaggctttgaattactctgtccctctggaccgaatctctttaactgctggatagttttagaggaattctcctgctacttaggtactgggaaacaatgcttgctaaaccatgcccacgtgagcacctgtctcccactcaaacctctcccatctcccaacaactgcactttagaataccagcagtgaaatggtattactgtttccctctgagtgaaactgctagagtatatgtcacgtagtgacatttttttctcactcaggctattgccatctgggattctctccctactacagctggcaaagttggtttgcagcaagaagatagtgggagggggccaggctgcaggagaaggagaaaagtttagaagaaacaaaccattttgcttctaattttgacagtatcactttcctgttaaaacatacaataattttaaaaggtgaatgcctaaagttccaattttagcaaatatgggaacctcagcaatgctaattttctagaaaaacccagggctctttggagctagagttttgggagaacagttcttcacaataaggcaatggttttgagaggccaggcaaataatctttctcaccgtagaacaaaaagttacaaaaggcataatcggaaatagagactacatacttgagtttatggggtttgtgttgtttgaaggttcaatgcttgcatgtgtttatttattttcaagagggaaagtggtctgtactgctttcatccttgccactgtcttgcttttattttttactctcccactgagcaagcgtctgtggtcctatggtatcaaccagtatctttatagcaataatttctttaattcccttttctctctctttccaattatttaaccagttacttccacctggacatacgataggaaattcaaactcaaaatatgaaaattgatcttaataactctcccttcatatcttttcacctatttccagtccttatcatagttgataaaaacctcagactcatccagaaagctatatgatgcactagtaaaaaaaacaaagatattcaaactgcttgggttcaaatggtatacaatttgccagctgttactgaaccttctatgcataactttttttttcctctgtgcaattggaataataaaaatactactcccaaaaaaaaatta

SEQ ID NO: 13553 - DNA, 4138 bp, Homo sapiens
aagagtttatatccccttctacaagaaaacttaaatatagctaccaccgctttgaaaggaatggtttgtgtccaaacagcattttccagacaagctctgtacttttttgccaaaagaattaactttaaactgaaggcagtggacagttaaacaagagtcggcactgggaacagctgtgcgtagaccagaccagtgacttataaggaggcgatcgagatcggatgacagcaaatcatgaaagctacctcctcatggcaagcacccagaatgatatggaagactgggtgaagtcaatccgccgagtcatatggggacctttcggaggaggcatttttggacagaaactggaggatactgttcgttatgagaagagatatgggaaccgtctggctccgatgttggtggagcagtgcgtggactttatccgacaaagggggctgaaagaagagggtctctttcgactgccaggccaggctaatcttgttaaggagctccaagatgcctttgactgtggggagaagccatcatttgacagcaacacagatgtacacacggtggcatcacttcttaagctgtacctccgagaacttccagaaccagttattccttatgcgaagtatgaagattttttgtcatgtgccaaactgctcagcaaggaagaggaagcaggtgttaaggaattagcaaagcaggtgaagagtttgccagtggtaaattacaacctcctcaagtatatttgcagattcttggatgaagtacagtcctactcgggagttaacaaaatgagtgtgcagaacttggcaacggtctttggtcctaatatcctgcgccccaaagtggaagatcctttgactatcatggagggcactgtggtggtccagcagttgatgtcagtgatgattagcaaacatgattgcctctttcccaaagatgcagaactacaaagcaagccccaagatggagtgagcaacaacaatgaaattcagaagaaagccaccatggggcagttacagaacaaggagaacaataacaccaaggacagccctagtaggcagtgctcctgggacaagtctgagtcaccccagagaagcagcatgaacaatggatcccccacagctctatcaggcagcaaaaccaacagcccaaagaacagtgttcacaagctagatgtgtctagaagcccccctctcatggtcaaaaagaacccagcctttaataagggtagtgggatagttaccaatgggtccttcagcagcagtaatgcagaaggtcttgagaaaacccaaaccacccccaatgggagcctacaggccagaaggagctcttcactgaaggtatctggtaccaaaatgggcacgcacagtgtacagaatggaacggtgcgcatgggcattttgaacagcgacacactcgggaaccccacaaatgttcgaaacatgagctggctgccaaatggctatgtgaccctgagggataacaagcagaaagaacaagctggagagttaggccagcacaacagactgtccacctatgataatgtccatcaacagttctccatgatgaaccttgatgacaagcagagcattgacagtgctacctggtccacttcctcctgtgaaatctccctccctgagaactccaactcctgtcgctcttctaccaccacctgcccagagcaagacttttttggggggaactttgaggaccctgttttggatgggcccccgcaggacgacctttcccaccccagggactatgaaagcaaaagtgaccacaggagtgtgggaggtcgaagtagtcgtgccaccagtagcagtgacaacagtgagacatttgtgggcaacagcagcagcaaccacagtgcactgcacagtttagtttccagcctgaaacaggaaatgaccaaacagaagatagagtatgagtccaggataaagagcttagaacagcgaaacttgactttggaaacagaaatgatgagcctccatgatgaactggatcaggagaggaaaaagttcacaatgatagaaataaaaatgcgaaatgccgagcgagcaaaagaagatgccgagaaaagaaatgacatgctacagaaagaaatggagcagtttttttccacgtttggagaactgacagtggaacccaggagaaccgagagaggaaacacaatatggattcagtgagcctgctttcgcctgctgtctctgatggctctggcaaggactccagggattctggtgggatatgacttagaaccaggtggctggtcacctggatgtacagaagtctaactggtgaaggaatatcatttacagacattaaacatccatatctgcaatgtgtaccaaagttatatcatgccccataatgctactgtcaagtgttacaactggatatgtgtatatagagtagtttttcaaaagtaaactaaaaatgagaagcatatttcaagaattattttattgcaagtcttgtatttaaatgttaaatcaatatgttgttgcaatttagcttgctttcaagcttcaccccttgcacttaacataagctatttttggcattgtgttatcatcggcttattttatagatcaatatttttatttcccttttttgctgaggaaatgaagataagcaaaaatataaatatatatataaatatatgagttattaaaatcagaagaatactttgtggctgtgctgtttgtgccaatagactttgtcatgaccaaaaagagaaatgtaaatagttttataaaatacagtcgaatcaccaggaacctttgagctgcttttaaaattcttcccctggcaccactcagttttgcttttgcgaggcgatttgacataggaactttgagactccatgagaaagtccctttctgaggcccactgtctaccttgccagatcctcagtgcgtatcgccaatgcaggatgctccttagaaaagaaaaaatggtaaagaatggcatttaacgattcaggctttgaattactctgtccctctggaccgaatctctttaactgctggatagttttagaggaattctcctgctacttaggtactgggaaacaatgcttgctaaaccatgcccacgtgagcacctgtctcccactcaaacctctcccatctcccaacaactgcactttagaataccagcagtgaaatggtattactgtttccctctgagtgaaactgctagagtatatgtcacgtagtgacatttttttctcactcaggctattgccatctgggattctctccctactacagctggcaaagttggtttgcagcaagaagatagtgggagggggccaggctgcaggagaaggagaaaagtttagaagaaacaaaccattttgcttctaattttgacagtatcactttcctgttaaaacatacaataattttaaaaggtgaatgcctaaagttccaattttagcaaatatgggaacctcagcaatgctaattttctagaaaaacccagggctctttggagctagagttttgggagaacagttcttcacaataaggcaatggttttgagaggccaggcaaataatctttctcaccgtagaacaaaaagttacaaaaggcataatcggaaatagagactacatacttgagtttatggggtttgtgttgtttgaaggttcaatgcttgcatgtgtttatttattttcaagagggaaagtggtctgtactgctttcatccttgccactgtcttgcttttattttttactctcccactgagcaagcgtctgtggtcctatggtatcaaccagtatctttatagcaataatttctttaattcccttttctctctctttccaattatttaaccagttacttccacctggacatacgataggaaattcaaactcaaaatatgaaaattgatcttaataactctcccttcatatcttttcacctatttccagtccttatcatagttgataaaaacctcagactcatccagaaagctatatgatgcactagtaaaaaaaacaaagatattcaaactgcttgggttcaaatggtatacaatttgccagctgttactgaaccttctatgcataactttttttttcctctgtgcaattggaataataaaaatactactcccaaaaaaaaatta

SEQ ID NO: 13554 - DNA, 2360 bp, Homo sapiens
ttacatcctttaaatcattgaaagggctttattccaatttcctaagcatcataaagagtttagaaaatatttgtatgtctcttgcatttcaagtgaataaaatcactttatctcttactcttgcgtccccaccccccacccccccccaacatcctttgtagcttagaacagcgaaacttgactttggaaacagaaatgatgagcctccatgatgaactggatcaggagaggaaaaagttcacaatgatagaaataaaaatgcgaaatgccgagcgagcaaaagaagatgccgagaaaagaaatgacatgctacagaaagaaatggagcagtttttttccacgtttggagaactgacagtggaacccaggagaaccgagagaggaaacacaatatggattcagtgagcctgctttcgcctgctgtctctgatggctctggcaaggactccagggattctggtgggatatgacttagaaccaggtggctggtcacctggatgtacagaagtctaactggtgaaggaatatcatttacagacattaaacatccatatctgcaatgtgtaccaaagttatatcatgccccataatgctactgtcaagtgttacaactggatatgtgtatatagagtagtttttcaaaagtaaactaaaaatgagaagcatatttcaagaattattttattgcaagtcttgtatttaaatgttaaatcaatatgttgttgcaatttagcttgctttcaagcttcaccccttgcacttaacataagctatttttggcattgtgttatcatcggcttattttatagatcaatatttttatttcccttttttgctgaggaaatgaagataagcaaaaatataaatatatatataaatatatgagttattaaaatcagaagaatactttgtggctgtgctgtttgtgccaatagactttgtcatgaccaaaaagagaaatgtaaatagttttataaaatacagtcgaatcaccaggaacctttgagctgcttttaaaattcttcccctggcaccactcagttttgcttttgcgaggcgatttgacataggaactttgagactccatgagaaagtccctttctgaggcccactgtctaccttgccagatcctcagtgcgtatcgccaatgcaggatgctccttagaaaagaaaaaatggtaaagaatggcatttaacgattcaggctttgaattactctgtccctctggaccgaatctctttaactgctggatagttttagaggaattctcctgctacttaggtactgggaaacaatgcttgctaaaccatgcccacgtgagcacctgtctcccactcaaacctctcccatctcccaacaactgcactttagaataccagcagtgaaatggtattactgtttccctctgagtgaaactgctagagtatatgtcacgtagtgacatttttttctcactcaggctattgccatctgggattctctccctactacagctggcaaagttggtttgcagcaagaagatagtgggagggggccaggctgcaggagaaggagaaaagtttagaagaaacaaaccattttgcttctaattttgacagtatcactttcctgttaaaacatacaataattttaaaaggtgaatgcctaaagttccaattttagcaaatatgggaacctcagcaatgctaattttctagaaaaacccagggctctttggagctagagttttgggagaacagttcttcacaataaggcaatggttttgagaggccaggcaaataatctttctcaccgtagaacaaaaagttacaaaaggcataatcggaaatagagactacatacttgagtttatggggtttgtgttgtttgaaggttcaatgcttgcatgtgtttatttattttcaagagggaaagtggtctgtactgctttcatccttgccactgtcttgcttttattttttactctcccactgagcaagcgtctgtggtcctatggtatcaaccagtatctttatagcaataatttctttaattcccttttctctctctttccaattatttaaccagttacttccacctggacatacgataggaaattcaaactcaaaatatgaaaattgatcttaataactctcccttcatatcttttcacctatttccagtccttatcatagttgataaaaacctcagactcatccagaaagctatatgatgcactagtaaaaaaaacaaagatattcaaactgcttgggttcaaatggtatacaatttgccagctgttactgaaccttctatgcataactttttttttcctctgtgcaattggaataataaaaatactactcccaaaaaaaaatta

SEQ ID NO: 13555 - DNA, 1266 bp, Homo sapiens
  misc_feature (108)..(108): n is a, c, g, or t
tagtagaggcctgggtttaaatcggcgaggattctcaagtgcatgtggcaacacagcccagctccgggtggaaaccagcagggctctggaggggctcggagaccaggngagctgtcaaggctgcggcggggaccagagaggagcctggcgggggtggctgggtggctgggggaatccccccaacttcccatcgcaggcgcactctctcggccgcctatttcctccgaaacccgcgctgcggagcgcccagtgcatagagttcaacacttccccttgttgtggaaagtaaaggagcctcactaccacctttttttctttgcgttttcttactgctggtcctgggagccttttccttcggagcagcagccctgtccggcatctgtcttgagctcccagcaaggaaagtccatcagcttgataatggaggagaacaatgactccacggagaacccccaacaaggccaagggcggcagaatgccatcaagtgtgggtggctgaggaagcaaggaggctttgtcaagacttggcatactcgctggtttgtgctcaagggggatcagctctattatttcaaagatgaagatgaaaccaagcccttgggtactatttttctgcctggaaataaagtttctgagcatccctgcaatgaagagaacccagggaagttcctttttgaagtagttccaggaggcgatcgagatcggatgacagcaaatcatgaaagctacctcctcatggcaagcacccagaatgatatggaagactgggtgaagtcaatccgccgagtcatatggggacctttcggaggaggcatttttggacagaaactggaggatactgttcgttatgagaagagatatgggaaccgtctggctccgatgttggtggagcagtgcgtggactttatccgacaaagggggctgaaagaagagggtctctttcgactgccaggccaggctaatcttgttaaggagctccaagatgcctttgactgtggggagaagccatcatttgacagcaacacagatgtacacacggtggcatcacttcttaagctgtacctccgagaacttccagaaccagttattccttatatcacatcaactatgtgtacctagaacagtccttggatggttgacgtgcttgataaataaatatttgttgcatgaatgaatgagtgaatatttagagctctatgtcaaatttctggttcagatgttcagggatgttctcagttggaccttttaataaaaaaacaataaatg

SEQ ID NO: 13556 - DNA, 1113 bp, Homo sapiens
  misc_feature (108)..(108): n is a, c, g, or t
tagtagaggcctgggtttaaatcggcgaggattctcaagtgcatgtggcaacacagcccagctccgggtggaaaccagcagggctctggaggggctcggagaccaggngagctgtcaaggctgcggcggggaccagagaggagcctggcgggggtggctgggtggctgggggaatccccccaacttcccatcgcaggcgcactctctcggccgcctatttcctccgaaacccgcgctgcggagcgcccagtgcatagagttcaacacttccccttgttgtggaaagtaaaggagcctcactaccacctttttttctttgcgttttcttactgctggtcctgggagccttttccttcggagcagcagccctgtccggcatctgtcttgagctcccagcaaggaaagtccatcagcttgataatggaggagaacaatgactccacggagaacccccaacaaggccaagggcggcagaatgccatcaagtgtgggtggctgaggaagcaaggaggctttgtcaagacttggcatactcgctggtttgtgctcaagggggatcagctctattatttcaaagatgaagatgaaaccaagcccttgggtactatttttctgcctggaaataaagtttctgagcatccctgcaatgaagagaacccagggaagttcctttttgaagtagttccagaggtctacttttccattcagtctgctagctgcaaggaggtttcatcttttggtgaagaagttctcaagtaatatagacggatattttcaatactgttttagagagagccatgtcttcaagaccaggaagtaacagataaaacctcttctccaacattgctattctaaatcatctgtttcacatgcagtgcgtatgacataatggcttttgatgaacaaagcctaagaagtttaagactgtgtaatatggaatatgaaggttgtcctttcaaacaaatttataggaaattcaagcttgcttctgtaattatggacttaaatatagtatgtgagtagatcatttgaaaagatgcttcctgaattattaatacagtatgtaatagctgctaaattaggttttataattctaaatcatcttacggagtg

SEQ ID NO: 13557 - DNA, 4622 bp, Homo sapiens
  misc_feature (108)..(108): n is a, c, g, or t
tagtagaggcctgggtttaaatcggcgaggattctcaagtgcatgtggcaacacagcccagctccgggtggaaaccagcagggctctggaggggctcggagaccaggngagctgtcaaggctgcggcggggaccagagaggagcctggcgggggtggctgggtggctgggggaatccccccaacttcccatcgcaggcgcactctctcggccgcctatttcctccgaaacccgcgctgcggagcgcccagtgcatagagttcaacacttccccttgttgtggaaagtaaaggagcctcactaccacctttttttctttgcgttttcttactgctggtcctgggagccttttccttcggagcagcagccctgtccggcatctgtcttgagctcccagcaaggaaagtccatcagcttgataatggaggagaacaatgactccacggagaacccccaacaaggccaagggcggcagaatgccatcaagtgtgggtggctgaggaagcaaggaggctttgtcaagacttggcatactcgctggtttgtgctcaagggggatcagctctattatttcaaagatgaagatgaaaccaagcccttgggtactatttttctgcctggaaataaagtttctgagcatccctgcaatgaagagaacccagggaagttcctttttgaagtagttccaggaggcgatcgagatcggatgacagcaaatcatgaaagctacctcctcatggcaagcacccagaatgatatggaagactgggtgaagtcaatccgccgagtcatatggggacctttcggaggaggcatttttggacagaaactggaggatactgttcgttatgagaagagatatgggaaccgtctggctccgatgttggtggagcagtgcgtggactttatccgacaaagggggctgaaagaagagggtctctttcgactgccaggccaggctaatcttgttaaggagctccaagatgcctttgactgtggggagaagccatcatttgacagcaacacagatgtacacacggtggcatcacttcttaagctgtacctccgagaacttccagaaccagttattccttatgcgaagtatgaagattttttgtcatgtgccaaactgctcagcaaggaagaggaagcaggtgttaaggaattagcaaagcaggtgaagagtttgccagtggtaaattacaacctcctcaagtatatttgcagattcttggatgaagtacagtcctactcgggagttaacaaaatgagtgtgcagaacttggcaacggtctttggtcctaatatcctgcgccccaaagtggaagatcctttgactatcatggagggcactgtggtggtccagcagttgatgtcagtgatgattagcaaacatgattgcctctttcccaaagatgcagaactacaaagcaagccccaagatggagtgagcaacaacaatgaaattcagaagaaagccaccatggggcagttacagaacaaggagaacaataacaccaaggacagccctagtaggcagtgctcctgggacaagtctgagtcaccccagagaagcagcatgaacaatggatcccccacagctctatcaggcagcaaaaccaacagcccaaagaacagtgttcacaagctagatgtgtctagaagcccccctctcatggtcaaaaagaacccagcctttaataagggtagtgggatagttaccaatgggtccttcagcagcagtaatgcagaaggtcttgagaaaacccaaaccacccccaatgggagcctacaggccagaaggagctcttcactgaaggtatctggtaccaaaatgggcacgcacagtgtacagaatggaacggtgcgcatgggcattttgaacagcgacacactcgggaaccccacaaatgttcgaaacatgagctggctgccaaatggctatgtgaccctgagggataacaagcagaaagaacaagctggagagttaggccagcacaacagactgtccacctatgataatgtccatcaacagttctccatgatgaaccttgatgacaagcagagcattgacagtgctacctggtccacttcctcctgtgaaatctccctccctgagaactccaactcctgtcgctcttctaccaccacctgcccagagcaagacttttttggggggaactttgaggaccctgttttggatgggcccccgcaggacgacctttcccaccccagggactatgaaagcaaaagtgaccacaggagtgtgggaggtcgaagtagtcgtgccaccagtagcagtgacaacagtgagacatttgtgggcaacagcagcagcaaccacagtgcactgcacagtttagtttccagcctgaaacaggaaatgaccaaacagaagatagagtatgagtccaggataaagagcttagaacagcgaaacttgactttggaaacagaaatgatgagcctccatgatgaactggatcaggagaggaaaaagttcacaatgatagaaataaaaatgcgaaatgccgagcgagcaaaagaagatgccgagaaaagaaatgacatgctacagaaagaaatggagcagtttttttccacgtttggagaactgacagtggaacccaggagaaccgagagaggaaacacaatatggattcagtgagcctgctttcgcctgctgtctctgatggctctggcaaggactccagggattctggtgggatatgacttagaaccaggtggctggtcacctggatgtacagaagtctaactggtgaaggaatatcatttacagacattaaacatccatatctgcaatgtgtaccaaagttatatcatgccccataatgctactgtcaagtgttacaactggatatgtgtatatagagtagtttttcaaaagtaaactaaaaatgagaagcatatttcaagaattattttattgcaagtcttgtatttaaatgttaaatcaatatgttgttgcaatttagcttgctttcaagcttcaccccttgcacttaacataagctatttttggcattgtgttatcatcggcttattttatagatcaatatttttatttcccttttttgctgaggaaatgaagataagcaaaaatataaatatatatataaatatatgagttattaaaatcagaagaatactttgtggctgtgctgtttgtgccaatagactttgtcatgaccaaaaagagaaatgtaaatagttttataaaatacagtcgaatcaccaggaacctttgagctgcttttaaaattcttcccctggcaccactcagttttgcttttgcgaggcgatttgacataggaactttgagactccatgagaaagtccctttctgaggcccactgtctaccttgccagatcctcagtgcgtatcgccaatgcaggatgctccttagaaaagaaaaaatggtaaagaatggcatttaacgattcaggctttgaattactctgtccctctggaccgaatctctttaactgctggatagttttagaggaattctcctgctacttaggtactgggaaacaatgcttgctaaaccatgcccacgtgagcacctgtctcccactcaaacctctcccatctcccaacaactgcactttagaataccagcagtgaaatggtattactgtttccctctgagtgaaactgctagagtatatgtcacgtagtgacatttttttctcactcaggctattgccatctgggattctctccctactacagctggcaaagttggtttgcagcaagaagatagtgggagggggccaggctgcaggagaaggagaaaagtttagaagaaacaaaccattttgcttctaattttgacagtatcactttcctgttaaaacatacaataattttaaaaggtgaatgcctaaagttccaattttagcaaatatgggaacctcagcaatgctaattttctagaaaaacccagggctctttggagctagagttttgggagaacagttcttcacaataaggcaatggttttgagaggccaggcaaataatctttctcaccgtagaacaaaaagttacaaaaggcataatcggaaatagagactacatacttgagtttatggggtttgtgttgtttgaaggttcaatgcttgcatgtgtttatttattttcaagagggaaagtggtctgtactgctttcatccttgccactgtcttgcttttattttttactctcccactgagcaagcgtctgtggtcctatggtatcaaccagtatctttatagcaataatttctttaattcccttttctctctctttccaattatttaaccagttacttccacctggacatacgataggaaattcaaactcaaaatatgaaaattgatcttaataactctcccttcatatcttttcacctatttccagtccttatcatagttgataaaaacctcagactcatccagaaagctatatgatgcactagtaaaaaaaacaaagatattcaaactgcttgggttcaaatggtatacaatttgccagctgttactgaaccttctatgcataactttttttttcctctgtgcaattggaataataaaaatactactcccaaaaaaaaatta

SEQ ID NO: 13558 - DNA, 4135 bp, Homo sapiens
cactagtgctggggagcgagccgtggtttccattcctgggtgatggagtcatgggagaaactgcagtgagcaaacacagtaggacctgagttgggctcgaatgtgctttaagcgactcaggacagagcagctgctctgtctcccagcttgcaagtgcagcctgcatttgtcactgaccactgaagtgtatgtttgtgcaaggaggcgatcgagatcggatgacagcaaatcatgaaagctacctcctcatggcaagcacccagaatgatatggaagactgggtgaagtcaatccgccgagtcatatggggacctttcggaggaggcatttttggacagaaactggaggatactgttcgttatgagaagagatatgggaaccgtctggctccgatgttggtggagcagtgcgtggactttatccgacaaagggggctgaaagaagagggtctctttcgactgccaggccaggctaatcttgttaaggagctccaagatgcctttgactgtggggagaagccatcatttgacagcaacacagatgtacacacggtggcatcacttcttaagctgtacctccgagaacttccagaaccagttattccttatgcgaagtatgaagattttttgtcatgtgccaaactgctcagcaaggaagaggaagcaggtgttaaggaattagcaaagcaggtgaagagtttgccagtggtaaattacaacctcctcaagtatatttgcagattcttggatgaagtacagtcctactcgggagttaacaaaatgagtgtgcagaacttggcaacggtctttggtcctaatatcctgcgccccaaagtggaagatcctttgactatcatggagggcactgtggtggtccagcagttgatgtcagtgatgattagcaaacatgattgcctctttcccaaagatgcagaactacaaagcaagccccaagatggagtgagcaacaacaatgaaattcagaagaaagccaccatggggcagttacagaacaaggagaacaataacaccaaggacagccctagtaggcagtgctcctgggacaagtctgagtcaccccagagaagcagcatgaacaatggatcccccacagctctatcaggcagcaaaaccaacagcccaaagaacagtgttcacaagctagatgtgtctagaagcccccctctcatggtcaaaaagaacccagcctttaataagggtagtgggatagttaccaatgggtccttcagcagcagtaatgcagaaggtcttgagaaaacccaaaccacccccaatgggagcctacaggccagaaggagctcttcactgaaggtatctggtaccaaaatgggcacgcacagtgtacagaatggaacggtgcgcatgggcattttgaacagcgacacactcgggaaccccacaaatgttcgaaacatgagctggctgccaaatggctatgtgaccctgagggataacaagcagaaagaacaagctggagagttaggccagcacaacagactgtccacctatgataatgtccatcaacagttctccatgatgaaccttgatgacaagcagagcattgacagtgctacctggtccacttcctcctgtgaaatctccctccctgagaactccaactcctgtcgctcttctaccaccacctgcccagagcaagacttttttggggggaactttgaggaccctgttttggatgggcccccgcaggacgacctttcccaccccagggactatgaaagcaaaagtgaccacaggagtgtgggaggtcgaagtagtcgtgccaccagtagcagtgacaacagtgagacatttgtgggcaacagcagcagcaaccacagtgcactgcacagtttagtttccagcctgaaacaggaaatgaccaaacagaagatagagtatgagtccaggataaagagcttagaacagcgaaacttgactttggaaacagaaatgatgagcctccatgatgaactggatcaggagaggaaaaagttcacaatgatagaaataaaaatgcgaaatgccgagcgagcaaaagaagatgccgagaaaagaaatgacatgctacagaaagaaatggagcagtttttttccacgtttggagaactgacagtggaacccaggagaaccgagagaggaaacacaatatggattcagtgagcctgctttcgcctgctgtctctgatggctctggcaaggactccagggattctggtgggatatgacttagaaccaggtggctggtcacctggatgtacagaagtctaactggtgaaggaatatcatttacagacattaaacatccatatctgcaatgtgtaccaaagttatatcatgccccataatgctactgtcaagtgttacaactggatatgtgtatatagagtagtttttcaaaagtaaactaaaaatgagaagcatatttcaagaattattttattgcaagtcttgtatttaaatgttaaatcaatatgttgttgcaatttagcttgctttcaagcttcaccccttgcacttaacataagctatttttggcattgtgttatcatcggcttattttatagatcaatatttttatttcccttttttgctgaggaaatgaagataagcaaaaatataaatatatatataaatatatgagttattaaaatcagaagaatactttgtggctgtgctgtttgtgccaatagactttgtcatgaccaaaaagagaaatgtaaatagttttataaaatacagtcgaatcaccaggaacctttgagctgcttttaaaattcttcccctggcaccactcagttttgcttttgcgaggcgatttgacataggaactttgagactccatgagaaagtccctttctgaggcccactgtctaccttgccagatcctcagtgcgtatcgccaatgcaggatgctccttagaaaagaaaaaatggtaaagaatggcatttaacgattcaggctttgaattactctgtccctctggaccgaatctctttaactgctggatagttttagaggaattctcctgctacttaggtactgggaaacaatgcttgctaaaccatgcccacgtgagcacctgtctcccactcaaacctctcccatctcccaacaactgcactttagaataccagcagtgaaatggtattactgtttccctctgagtgaaactgctagagtatatgtcacgtagtgacatttttttctcactcaggctattgccatctgggattctctccctactacagctggcaaagttggtttgcagcaagaagatagtgggagggggccaggctgcaggagaaggagaaaagtttagaagaaacaaaccattttgcttctaattttgacagtatcactttcctgttaaaacatacaataattttaaaaggtgaatgcctaaagttccaattttagcaaatatgggaacctcagcaatgctaattttctagaaaaacccagggctctttggagctagagttttgggagaacagttcttcacaataaggcaatggttttgagaggccaggcaaataatctttctcaccgtagaacaaaaagttacaaaaggcataatcggaaatagagactacatacttgagtttatggggtttgtgttgtttgaaggttcaatgcttgcatgtgtttatttattttcaagagggaaagtggtctgtactgctttcatccttgccactgtcttgcttttattttttactctcccactgagcaagcgtctgtggtcctatggtatcaaccagtatctttatagcaataatttctttaattcccttttctctctctttccaattatttaaccagttacttccacctggacatacgataggaaattcaaactcaaaatatgaaaattgatcttaataactctcccttcatatcttttcacctatttccagtccttatcatagttgataaaaacctcagactcatccagaaagctatatgatgcactagtaaaaaaaacaaagatattcaaactgcttgggttcaaatggtatacaatttgccagctgttactgaaccttctatgcataactttttttttcctctgtgcaattggaataataaaaatactactcccaaaaaaaaatta

SEQ ID NO: 13559 - DNA, 4551 bp, Homo sapiens
  misc_feature (108)..(108): n is a, c, g, or t
tagtagaggcctgggtttaaatcggcgaggattctcaagtgcatgtggcaacacagcccagctccgggtggaaaccagcagggctctggaggggctcggagaccaggngagctgtcaaggctgcggcggggaccagagaggagcctggcgggggtggctgggtggctgggggaatccccccaacttcccatcgcaggcgcactctctcggccgcctatttcctccgaaacccgcgctgcggagcgcccagtgcatagagttcaacacttccccttgttgtggaaagtaaaggagcctcactaccacctttttttctttgcgttttcttactgctggtcctgggagccttttccttcggagcagcagccctgtccggcatctgtcttgagctcccagcaaggaaagtccatcagcttgataatggaggagaacaatgactccacggagaacccccaacaaggccaagggcggcagaatgccatcaagtgtgggtggctgaggaagcaaggaggctttgtcaagacttggcatactcgctggtttgtgctcaagggggatcagctctattatttcaaagatgaagatgaaaccaagcccttgggtactatttttctgcctggaaataaagtttctgagcatccctgcaatgaagagaacccagggaagttcctttttgaagtagttccaggaggcgatcgagatcggatgacagcaaatcatgaaagctacctcctcatggcaagcacccagaatgatatggaagactgggtgaagtcaatccgccgagtcatatggggacctttcggaggaggcatttttggacagaaactggaggatactgttcgttatgagaagagatatgggaaccgtctggctccgatgttggtggagcagtgcgtggactttatccgacaaagggggctgaaagaagagggtctctttcgactgccaggccaggctaatcttgttaaggagctccaagatgcctttgactgtggggagaagccatcatttgacagcaacacagatgtacacacggtggcatcacttcttaagctgtacctccgagaacttccagaaccagttattccttatgcgaagtatgaagattttttgtcatgtgccaaactgctcagcaaggaagaggaagcaggtgttaaggaattagcaaagcaggtgaagagtttgccagtggtaaattacaacctcctcaagtatatttgcagattcttggatgaagtacagtcctactcgggagttaacaaaatgagtgtgcagaacttggcaacggtctttggtcctaatatcctgcgccccaaagtggaagatcctttgactatcatggagggcactgtggtggtccagcagttgatgtcagtgatgattagcaaacatgattgcctctttcccaaagatgcagaactacaaagcaagccccaagatggagtgagcaacaacaatgaaattcagaagaaagccaccatggggcagttacagaacaaggagaacaataacaccaaggacagccctagtaggcagtgctcctgggacaagtctgagtcaccccagagaagcagcatgaacaatggatcccccacagctctatcaggcagcaaaaccaacagcccaaagaacagtgttcacaagctagatgtgtctagaagcccccctctcatggtcaaaaagaacccagcctttaataagggtagtgggatagttaccaatgggtccttcagcagcagtaatgcagaaggtcttgagaaaacccaaaccacccccaatgggagcctacaggccagaaggagctcttcactgaaggtatctggtaccaaaatgggcacgcacagtgtacagaatggaacggtgcgcatgggcattttgaacagcgacacactcgggaaccccacaaatgttcgaaacatgagctggctgccaaatggctatgtgaccctgagggataacaagcagaaagaacaagctggagagttaggccagcacaacagactgtccacctatgataatgtccatcaacagttctccatgatgaaccttgatgacaagcagagcattgacagtgctacctggtccacttcctcctgtgaaatctccctccctgagaactccaactcctgtcgctcttctaccaccacctgcccagagcaagacttttttggggggaactttgaggaccctgttttggatgggcccccgcaggacgacctttcccaccccagggactatgaaagcaaaagtgaccacaggagtgtgggaggtcgaagtagtcgtgccaccagtagcagtgacaacagtgagacatttgtgggcaacagcagcagcaaccacagtgcactgcacagtttagtttccagcctgaaacaggaaatgaccaaacagaagatagagtatgagtccaggataaagagcttagaacagcgaaacttgactttggaaacagaaatgatgagcctccatgatgaactggatcaggagaggaaaaagttcacaatgatagaaataaaaatgcgaaatgccggccgagaaaagaaatgacatgctacagaaagaaatggagcagtttttttccacgtttggagaactgacagtggaacccaggagcaatatggattcagtgagcctgctttcgcctgctgtctctgatggctctggcaaggactccagggattctggtgggatatgacttagctggatgtacagaagtctaactggtgaaggaatatcatttacagacattaaacatccatatctgcaatgtgtaccaaagttatatcatgcctgttacaactggatatgtgtatatagagtagtttttcaaaagtaaactaaaaatgagaagcatatttcaagaattattttattgcaagtcttgtatttaaatgttaaatcaatatgttgttgcaatttagcttgctttcaagcttcaccccttgcacttaacataagctatttttggcattgtgttatcatcggcttattttatagatcaatatttttatttcccttttttgctgaggaaatgaagataagcaaaaatataaatatatatataaatatatgagttattaaaatcagaagaatactttgtggctgtgctgtttgtgccaatagactttgtcatgaccaaaaagagaaatgtaaatagttttataaaatacagtcgaatcaccaggaacctttgagctgcttttaaaattcttcccctggcaccactcagttttgcttttgcgaggcgatttgacataggaactttgagactccatgagaaagtccctttctgaggcccactgtctaccttgccagatcctcagtgcgtatcgccaatgcaggatgctccttagaaaagaaaaaatggtaaagaatggcatttaacgattcaggctttgaattactctgtccctctggaccgaatctctttaactgctggatagttttagaggaattctcctgctacttaggtactgggaaacaatgcttgctaaaccatgcccacgtgagcacctgtctcccactcaaacctctcccatctcccaacaactgcactttagaataccagcagtgaaatggtattactgtttccctctgagtgaaactgctagagtatatgtcacgtagtgacatttttttctcactcaggctattgccatctgggattctctccctactacagctggcaaagttggtttgcagcaagaagatagtgggagggggccaggctgcaggagaaggagaaaagtttagaagaaacaaaccattttgcttctaattttgacagtatcactttcctgttaaaacatacaataattttaaaaggtgaatgcctaaagttccaattttagcaaatatgggaacctcagcaatgctaattttctagaaaaacccagggctctttggagctagagttttgggagaacagttcttcacaataaggcaatggttttgagaggccaggcaaataatctttctcaccgtagaacaaaaagttacaaaaggcataatcggaaatagagactacatacttgagtttatggggtttgtgttgtttgaaggttcaatgcttgcatgtgtttatttattttcaagagggaaagtggtctgtactgctttcatccttgccactgtcttgcttttattttttactctcccactgagcaagcgtctgtggtcctatggtatcaaccagtatctttatagcaataatttctttaattcccttttctctctctttccaattatttaaccagttacttccacctggacatacgataggaaattcaaactcaaaatatgaaaattgatcttaataactctcccttcatatcttttcacctatttccagtccttatcatagttgataaaaacctcagactcatccagaaagctatatgatgcactagtaaaaaaaacaaagatattcaaactgcttgggttcaaatggtatacaatttgccagctgttactgaaccttctatgcataactttttttttcctctgtgcaattggaataataaaaatactactcccaaaaaaaaatta

SEQ ID NO: 13560 - DNA, 1501 bp, Homo sapiens
  misc_feature (108)..(108): n is a, c, g, or t
tagtagaggcctgggtttaaatcggcgaggattctcaagtgcatgtggcaacacagcccagctccgggtggaaaccagcagggctctggaggggctcggagaccaggngagctgtcaaggctgcggcggggaccagagaggagcctggcgggggtggctgggtggctgggggaatccccccaacttcccatcgcaggcgcactctctcggccgcctatttcctccgaaacccgcgctgcggagcgcccagtgcatagagttcaacacttccccttgttgtggaaagtaaaggagcctcactaccacctttttttctttgcgttttcttactgctggtcctgggagccttttccttcggagcagcagccctgtccggcatctgtcttgagctcccagcaaggaaagtccatcagcttgataatggaggagaacaatgactccacggagaacccccaacaaggccaagggcggcagaatgccatcaagtgtgggtggctgaggaagcaaggaggctttgtcaagacttggcatactcgctggtttgtgctcaagggggatcagctctattatttcaaagatgaagatgaaaccaagcccttgggtactatttttctgcctggaaataaagtttctgagcatccctgcaatgaagagaacccagggaagttcctttttgaagtagttccaggaggcgatcgagatcggatgacagcaaatcatgaaagctacctcctcatggcaagcacccagaatgatatggaagactgggtgaagtcaatccgccgagtcatatggggacctttcggaggaggcatttttggacagaaactggaggatactgttcgttatgagaagagatatgggaaccgtctggctccgatgttggtggagcagtgcgtggactttatccgacaaagggggctgaaagaagagggtctctttcgactgccaggccaggctaatcttgttaaggagctccaagatgcctttgactgtggggagaagccatcatttgacagcaacacagatgtacacacggtggcatcacttcttaagctgtacctccgagaacttccagaaccagttattccttatgcgaagtatgaagattttttgtcatgtgccaaactgctcagcaaggaagaggaagcaggtgttaaggaattagcaaagcaggtgaagagtttgccagtggtaaattacaacctcctcaagtatatttgcaggtttcatcaaagacatttgtaactgaattctgttagaaaaataattgtgccagaaaaataattgtgcctggaaaatatacctctcaatgtataactcaagacctgggatgggatatgccatatatgtgctcctgtttaagaaaccaaatatgcaaaattgaaacagaataaatttaaatagagagtgatgattggcactacaagtcactgcagggtgtcttacatgatagcttcccagtccattttaaaataaaattcaaagttttaattgagta

SEQ ID NO: 13561 - DNA, 1102 bp, Homo sapiens
  misc_feature (108)..(108): n is a, c, g, or t
tagtagaggcctgggtttaaatcggcgaggattctcaagtgcatgtggcaacacagcccagctccgggtggaaaccagcagggctctggaggggctcggagaccaggngagctgtcaaggctgcggcggggaccagagaggagcctggcgggggtggctgggtggctgggggaatccccccaacttcccatcgcaggcgcactctctcggccgcctatttcctccgaaacccgcgctgcggagcgcccagtgcatagagttcaacacttccccttgttgtggaaagtaaaggagcctcactaccacctttttttctttgcgttttcttactgctggtcctgggagccttttccttcggagcagcagccctgtccggcatctgtcttgagctcccagcaaggaaagtccatcagcttgataatggaggagaacaatgactccacggagaacccccaacaaggccaagggcggcagaatgccatcaagtgtgggtggctgaggaagcaaggaggctttgtcaagacttggcatactcgctggtttgtgctcaagggggatcagctctattatttcaaagatgaagatgaaaccaagcccttgggtactatttttctgcctggaaataaagtttctgagcatccctgcaatgaagagaacccagggaagttcctttttgaagtagttccaggtaagatattttcctagtctgattaaattattgtcatcctgtgttggtaaaggtgaagatgggtcagacaggtttcattcttttttgaatcatgactgagaaccttaatttgaggcttggttagtgttgacgcagataatgactgcaggtttatatactagtacaaatgaatgcactcacacacacatactctgaccacataactactagattttcatttgtccatgagactccatagttgaccacaagtcatgatacagtatttgttcaggactattggagatgaatttgattttacagcgctcttgtgatgtgaaatttgacaaggggttataggttgaatgctttgcccagtggaatcactgacatatttcctcacaaaattgtatcttcaaggaggttttgcaaaaaaca

SEQ ID NO: 13562 - DNA, 4220 bp, Homo sapiens
atgaagaccagggggttcagctttccaagacaaaggcaagtcctgtttctttttcttttctggggagtgtccttggcaggttctgggtttggacgttattcggtgactgaggaaacagagaaaggatcctttgtggtcaatctggcaaaggatctgggactagcagagggggagctggctgcaaggggaaccagggtggtttccgatgataacaaacaatacctgctcctggattcacataccgggaatttgctcacaaatgagaaactggaccgagagaagctgtgtggccctaaagagccctgtatgctgtatttccaaattttaatggatgatccctttcagatttaccgggctgagctgagagtcagggatataaatgatcactcgccagtgtttcggcacaaagagatggtcttaaaaatatcagaaaatacagctgaagggacagcatttagactagaaagagcacaggatccagatgaaggtcataacagtatccaaaactacacgatcagctccaactcttttttccatattaaaattagtggcagtgatgaaggcatgatatatccagagctagtgttggacaaagcactggatcgggaggagcaggaagagctcagcttaaccctcacagcgctggatggtgggtctccatccaggtctgggacctccactatacgcattgtggtcttggatgtcaatgacaatgccccacagtttgcccaggctctgtatgagacccaggctccagaaaacagtccagtagggtcccttattgttaaagtgtctgcaggagatgcagactcaggagtcaatgcagaagtatcctattcattttttgatgcttctgaagatattttaacaacgtttcaaatcaatcctttttctggggaaatctttctcagagaattgcttgattatgagttagtaaattcttacaaaataaatatacaggcaatggacggcggaggcctttctgcaagatgtacagttttgataaaagtattagattccaatgacaatcctcctgaactgatcatatcatcactttccaactctgttgctgaaaactctcctgggatagtattggctgtttttaagattaaagacagagactccggagaaaatggaaagacaatttgctatgttcaagataatctgcctttttttctgaaaccgtctgttgacaatttttacatcctaatgactgaaggtgcactggacagagagagcaaagctgagtacaacatcaccatcaccgtcactgacttggggacacccaggctgaaaaccgagcacagcataaccctgcaggtctccgacgtcaatgacaacgcccccgccttcacccaaacctcctacaccctgttcgtccgggagaacaacagccccgccctgcacatcggcagtgtcagcgccacagacagagactcaggcaccaacgcccaggtcacctactcgctgctgccgccccaggacccacacctgcccctcgcctccctggtctccatcaacgcggacaatggccacctgtttgccctcaggtcgctggactacgaggccctgcaggctttcgacttccgcgtgggcgcctcagaccgcggctccccggctttgagcagcgaggcgctggtgcgcgtactggtgctggacgccaacgacaactcgcccttcgtgctgtacccgctgcagaacggctccgcgccctgcaccgagctggtgccccgggcggccgagccgggctacctggtgaccaaggtggtggcggtggacggcgactcgggccagaacgcctggctgtcgtaccagctgctcaaggccacggagcccgggctgttcggtgtgtgggcgcacaatggggaggtgcgcaccgccaggctgctgagcgagcgcgacgcagccaagcacaggctggtggtgcttgtcaaggacaatggcgagcctcctcgctcggccaccgccacgctgcacgtgctcctggtggacggcttctcccagccctacctgcctctcccggaggcggccccggcccaggcccaggccgacttgctcaccgtctacctggtggtggcgttggcctcggtgtcttcgctcttcctcctctcggtgctcctgttcgtggcggtgcggctgtgcaggaggagcagggcggcctcggtgggtcgctgctcggtgcccgagggtccttttccagggcatctggtggacgtgagcggcaccgggaccctgttccagagctaccagtacgaggtgtgtctgactggaggttcagagaccggcgagttcaagttcttgaagccgattaccccccacctcccgccccataggggtgggaaagaaatagaggaaaattctactctccccaatagctttggatttaattattgaaaggaacccacttaataaagacatttacttctttaatatattcttgttggctaactaaattgtgtatgcccaccacaaagaaggtactattttttgtttgattcatcttcaactttgcgtattatgcttaacttcacaagttaactttttcttattttgtatcctgatgaggcatttcttactagaatcccataagtgaaatataatatttttcaaagttgatatcatttaaaaatttttggtcgttttaaatgtctttattgactttaaattcattgcctctacattattcattagttcttcttttcctaaaactttttacttgttaaaatagtctgctgcatgtaatatgtgcttttactatttgatatttcttctatttttcttttgaaaccggtgttcttattggtttgccatccttgttcattacaactgttttttgtttgtttgtttgttttttggtttgtttgttttttttttttttgagacggagtctcgctctgtcgcccaggctggagtgcagtggcgcgatctcagctcactgcaacctccgcctcccaggttcaagcgattctcctgcctcagcctccagagtatctgggactacagttgcatgtcaccacgttcggctaatttttgtattttcagtagagacgggtttcatcatggtggccaggatggtctatctcttgacctcgtgatccaccccactcagcctcccaaattgctgggatttacaggcatgagccaccgcacccagcctacaataattttcttaaactttaccttttattttaaagttctagtttcccggcattgatagttccctatttgaaatataatgtttctcttgtaagtgatatgataaataaacccctaattagccttagaagaaaaaccactgcaagatattaagcgtgtgtaaatgggctttagtctggaaaccaaaaaaaaaaaaaaaatttagtcattctataggatcatgtgaaaatatttaatttgctccttttaattctgtataaacaaatcagaggttcctgaggttcctgttaaatttttaatggctaatagcccagtgccatccagttgaaaaaacaacagcaatcacaaagtagaggtttatattgtgcggcttttatattcagctattagagtgttattggtagtgtctagccttttcctccacgacattccttgacttaatccatttgggcctattatagacaaaatagagcttctttctagatataaggtctttgaggcagggctcagtggctcattcctgtaatcccagcactttgggaggccaaggcgggcagatcaccttaggtcacgagtttgagaccagcctgaccaacgttaagtaaccccgtctttactaaaaatacaaaattagccaggcatggtggcacatgcttgtaatcccagctactcgggaggctgaggcaggagaatcgcttgaacccaggaggtggaagttgctttgagccgagattgcaccattgtactccagcctgggcaataagagcaaaactccatcaaaataaaataaaataaaatataaaataacttaaaaagaactttgaataaaattctatgaaaaaagacactagaatgctgttcttaattttaatagtgttaagataggtgttagtgtggtctgttctttacctccctttatttggtgcagagaagttagatcctgctaaatttcaattaagaggggaccttaaaataaggatcaatctcttatttaaccctgtaagttactttaaagctaatacaagaaaaacaaagacaagtgaaagtaaggaaacagaaattgc

SEQ ID NO: 13563 - DNA, 422 bp, Homo sapiens
atgaagaccagggggttcagctttccaagacaaaggcaagtcctgtttctttttcttttctggggagtgtccttggcaggttctgggtttggacgttattcggtgactgaggaaacagagaaaggatcctttgtggtcaatctggcaaaggatctgggactagcagagggggagctggctgcaaggggaaccagggtggtttccgatgataacaaacaatacctgctcctggattcacataccgggaatttgctcacaaatgagaaactggaccgagagaagctgtgtggccctaaagagccctgtatgctgtatttccaaattttaatggatgatccctttcagatttaccgggctgagacaggagaatcacttgggcccgggaggcagaggttgcagtgagccgggatcttgcactgcgc

SEQ ID NO: 13564 - DNA, 562 bp, Homo sapiens
gtagctacttggagggtatggcctgcgataacctgacacaggcttccaggacactgttagaggtgatcgccatcttcatgggcagtggggcagtcctttgtacatatgcagcctcacgtttgcctttattttcccggcttctgctccgtgatgcaatttcctgtccataaatggtgcagatctaattccctgaccaccatatagtaaaggtttactttgacatattgtccttcctaaaaagaaattttactgcacagttataattatcacatttttcttaattagcaacctcttctgatttctttttcatcttctagttttataaaacattttctttatcttattttaacccaacttactgaattctatgactattttcttagttccttttttttgtacttgataagatctctgagctactctttactgcttagatttttcaagtatatggtattatatcttgattttggtgtaatctcagaactccagctattcttccagtctatgggtagaataattatgtcattagagacattggagcctgcctctcccatgacggcca

SEQ ID NO: 13565 - DNA, 321 bp, Homo sapiens
gattcaggcaggaaaacattccaggtgttatgcttcttcaaagagggcatgaaagtgaaaaatggtcttgtgtcattgtcactgagttgtttgtatccagcacagtgtctggtgtataataggtgttcagtaattatttgtcacccctcactcattctatacacaagaattaactcaaaatggaccatagacctaaatgtcagagccaacattatacaacttttagaataaaatatgattaaaccttcatgactttgggttaggcaaagacttcttaggtgatgccaaaaactcaagtgacaaaagaaaaatagataaatt

SEQ ID NO: 13566 - DNA, 412 bp, Homo sapiens
catttaaaaacttaaattatgatccaggtccttaaaaaaaggacataaatgtactgtacaattgaattttatgaggtgccccaatgtactataaagtatacatagagcatataaaattctaactccgctgtatcataaatttgacctcactgaaatgaataggctcactgtatggcaagcattaatgaaacgtttaattaacattcccttcacttgcatttttagaattttaaagggcttcctggggactatttcaatggctgaggtttttgcaaaacaaaagaacaaaaccttctcataaaaactgatctcttttgctcaataactcctccaatagagacatttaatttaattagactgatgaacctgaatttgaattttatacccaaacctatgatcatccttaaaaaaa

SEQ ID NO: 13567 - DNA, 423 bp, Homo sapiens
accatagactgagggaaggagaatgcctagatattttgaggactgttatagaaggagtttgagttaataatgacacccaaagaccctgttaaagtgggaacacatagggctcagggaataaaaggaatcctagaaaagcttacagtaggtttacagggtctgcagaccccctggatgttattttcccagtcccaagatattacaataaaattaagctcaaatcaaagattcacctagagaaggattctgtttgtccagcctttattaaggttttagtccagtagtgaacctaaatgtcttgaagcaaaatcgttggctctgttttaataaactgctagaggcatactaattgctttctttttccatgcactctaggatatttatatctcagcctttttgacccacatttgatgctccatcctt

SEQ ID NO: 13568 - DNA, 401 bp, Homo sapiens
gcaagagcaaaaattctgaaacaggaggtaagttagtgttttcaaggaaaagctggagcttttatctgaaaatcagattctgaagctaagaaccaatttgaaaatacaatacaatatcacttcgactaggaaattatggcataaaccaggagtctccaaaagctttttgtgtttacttaaaaattcatacaaaatttgcattctaggtcataatatactaatttaattggaggaaacaaaggcactggtatgatatcatcatgcctactttattcatccgtgtatccccagaatctagcacagttcccgattggtatttatagtagcatattggttgaataagcaaggaaggaggtgaagggagggagaaggagagagaagcagagagggagaggaaagga

SEQ ID NO: 13569 - DNA, 297 bp, Homo sapiens
tataagttcaacttaagtaaaacatcaagttactatttacacatatatggtaaaaaaaaaaaatgactggcacataagtgagtaaggcttagaagacatggtatgaactaaatatgactatttttataattctgagcaaatgtgattgttctaaagattaaagtgatttttattcatcaattgtaaagtttctagcataaaaaaggtagatttatgaaatacaaatccaaacttctaacctaaggacacaaaagtcttggtttccagtaacttattttcaggacacagagataaaaa

SEQ ID NO: 13570 - DNA, 861 bp, Homo sapiens
ccttttttattccccccagcttctggggggaggcatattcaaactaggaagtttgaatagcagtaaaacacacatttttataccctttacaaagatctattccttccattttctttctccttccattccccaaatccttctttctcatagaaacatttcaaaatatagatgagtctttcaatatttcagcatacgttttctaagaatcaagaatggtctcttacataatcaacactattatcacacccaagaatattaacaggaatttagtaatattatttaatatatgattcataattggatttctccagttgtctgtagccgtctttttgtattttgtttttccagttcaggattaatttttcatttggttaaatctgtagttttttcaaatttgaaagagtacctcattcatgttttttgttttctataacactaatttaacttttcatgttgcagtaatttcagatttacagaatagttacaaagatagtataaatcactcttatgtacgctttacccagcttcctcaaatattaacatgttatagaactgtaccacagttaacaaaagtagacagttaatactggtatgttattactaactaatctgtagaccttactcaaatgctgtcacttttctcacaagtgtcctttttctggttcaagacagttgaggcctccacgttgcatttagttggtgtgtctcctttgtctcttgtatttaatcagtgtataaatttgtatttaatcatcttgacaatttagaagagtgccagtctgtaattatgtggaatgtcttttatttttgagtttgcctaatgtttcctcatgaataaattaagattattcatttttggca

SEQ ID NO: 13571 - DNA, 420 bp, Homo sapiens
atcactttgacaccatcataaagttgaaaaattccaagtcaaaccattgtaagtcaggggctatcagtattcagtggtaaatgctggctctaactattcttccaagtcagtggttgactgctgtttattctataaagggttacaatttatagattctctcacttgtagaatgagagattcagaattaatagcagacagagtccctaccttgatggagctttcatttaagtgtgaaagtcaggtgacctaacaaggccttggcataagtttaggatttggattgttatgggagcttgggtagggacatgtcataggtaaggcaacagcaggggtagagataagcttgacatatgtcaaaaatcatgaagacatcagtaatccttgaagttggctgaaaggtatagagttgagaaagtagtt

SEQ ID NO: 13572 - DNA, 607 bp, Homo sapiens
atattgcacctatagtcaacaatactgcagtgtacactgaacaatttgttaagatagatctcaccttgtgttcttactgaaaaaaaaaaagaaagaaaatagaacagaaaagcaattggattttaattctggaaactcctttctcttccttacatccaggaaatttgctgtttattttgaaaagcaaatttaaacctatttaagggagagagagctcttgtaaaaattcatttattagttctggaccaatgttatttataagctattatttcaaatgataaaaaataaatgcataatacatttgatgatagaacatttttctttttaaataaggcctgatttttcaaaaagcattgaatatgtttgtttctaatttccaaagcttgacagtttcttatgtttcattaaaagcagaagaattgttatgtatgcatgttcatatcacttttgaatgactcatgtggctacaaatgcagcaatctgtggttatcatggaccatgaactagataaacattcctgcttttcttaacattcctttcctgtgcctcattaactaatgtacataataaaacatctttatttcattttctttgcaaaagcaaaatg

SEQ ID NO: 13573 - DNA, 436 bp, Homo sapiens
tcatttcagatcgtcttttgccccaactttgccccaagtggctgtggattggatttgatctcaccagtctcctctttcttgctcgtctcaaaggaagacctgcctattatctccctgcttttttgttattacagaaaaactgagaatgacaaaaacataccttggaaaatttattatgaaatctgaaatgtgacatgttacaaagttcataagctccttgttccatagtatattgttatctccattcttaggatattctgttgtgatactgttttctgctttttattttgaagttggtacttatccaggccctcttaccattttaccattatccagtgaaaatttatggattctacctttatgtgtgctccttctgcccacagtggaaaatgaagataatccagatcacaaatgaaaagtatgtatctttgagcca

SEQ ID NO: 13574 - DNA, 415 bp, Homo sapiens
tatggtcaatttaacaatgatactgttcctgttgttgaaataacgtttgccaaaagttatattctagatattcttaaattaaaagagtaatattcttattgcaataaagttatttttatgtatttcacaaacaactttattgaatattgaaagtttttaaataagaacaccaattatagcattctttgcactaaaatcctctagaggctcagatttttacttttagttttagaataaagcagtgaaacctctttctgcttttaacagatctttttttttctttatccactctcttttcttcttttatagcatcccttttcaccaattattttcatttctcttatttttttaacttacaactttttattagagcttttcctctgtcttcaaatatgcttaaaattcttctgtcctc

SEQ ID NO: 13575 - DNA, 388 bp, Homo sapiens
ggatactcaagctgtagaaaccaaaatggtaaggaaatcatcttcattttcatttagaaatgagttttgcaaaatacaaaatgtcaaataggttcatggctgtattatttttgtgattaattatcaagactgaagatttgacctgaaagcaggaaaaaaaacatgaataaaacatattatcacatatgagaagtggcgattcttattgctgcctacactattccagcttcaataaccaaagaacaatattgaaggtggcatttcagaatgacatacagtgtcttttctggaaggaaagaaaaatgttgctacctacaaatgttaaattgggtcacatttttgctaagatttgacaaggactagactaagattgactctgcttattgtg

SEQ ID NO: 13576 - DNA, 349 bp, Homo sapiens
ggaaaattcaccctgctccagaatccactggcttaaaattccctaattggattggaaaataaaccaaacaaaccaacaggaagataaatattaccaatattttgagtcaattctgtcttgaattcatcaaagccaaaggtactaatatctgtgtttatgctgttcttagggtttctattttttgtttgttgtgttttgtggttgttaattaactgagcattccttcaatctctaaatttcttaaaaatatcaagtgtgtcttgtgaccaccatcagctgcaaacacagcatcaacttaccaaaacagtctttggtgattaatccataatgacagggctgttctcccgac

SEQ ID NO: 13577 - DNA, 326 bp, Homo sapiens
gattcctacctaggcctactgcacacaacagtatgaacgaggtatgaacagttaaagaaaggggagagaataggattcactcattacatttttcttttggatttctctataaaagtggagtctatagaaaatggcatcaattccattacaaagctactctcaacaagaacaaggttagaaggaaatggaatagattcatcagggttgttggacaaaataagtataaaatcatcttagcactatgcttagcatgtagtaactgctcataaatgcttcactgatatgacttgtctttgaaactctcaagtacagagtccatagtggtt

SEQ ID NO: 13578 - DNA, 563 bp, Homo sapiens
agaaaagctgagcatgggagacatgccccaccttttaactcaaccattataagcctgctggctttctgtgcaagccctcttcatgttaataggctacatcaaaggagaccaggagagttaatggcgcccatcacatagtgaagtaatcccatggtgagctcttatggaggaatctgagtccagatttggtgtgatagggttactaatacaggattcaatggttatgtttggggacagtcctgactttttatatagaaatcacctctctgaagtatactagactcaccgctgcaaaaactgccttcatagtaaaacaaatagagcctaacccgaagatttagcagttgctcgtacacagctgaatctgtaactacagacatgtgtttgggcctgcctttactgctcgctttttgggtagggctgcccaatggcccagtaagttctttggatttaacaacattgtggaagcaactaggttggggctctttaagtgggcactgtccaaaattccagaattccaaatctttgaaaactactgaaatagaaagaagcacgcaatgagt

SEQ ID NO: 13579 - DNA, 458 bp, Homo sapiens
acacaaacttcattttcaaatgaaaatgctatcagatgtttgacgttacaggttaaagcattttcacatctgtcttacttcgcaacttctctaaggtgggtattaatcacattttacatatgtgaaaactgagactcagtttaaataaatggcttgccataagtcatacagctaataagtggcagcactgggccatgaagagccactatctcttcaagatctctttttccccctcagtaatacacagctgcatcacctatgacaaatgcccattgcccagtataactttgtggggaagaatctctttccctaagttgcacccttctgacaactcaaactgtagctgtcagggctggatttttttttttttttcatctcctgccggaatggggttctctgttaattttggagagggggtttctgagaaaatggcaaagggtactgtttgtatgacatgg

SEQ ID NO: 13580 - DNA, 3007 bp, Homo sapiens
ttttttttttatattacttttgtttaaaattggttttgattcatattttattatatacacaatttattagcttcataatttaccatgcaagattttagactgattaggaaattcactaggaagagtagcaggtataatgtttgtatcatattaattttattattgtcttttatttttattaaaaattttatttcagtagtctttttttattttattaaagtatatactggtttttggttacatggatgaattgtctaatggtgaagtctgagattttagtgtacccatcacctgagtagtgtacattgtacccaacttgtagctttttatcccttaccctaccttccaccctccccatttggagtctgcatagtccattatatcactctgtatgcctttgcatacccatagcttaactcccacttataagtgaaaacacggtatttggttttccattcctgagttacttcacttagaataatagcctccagctccatccaagttgctgcaaaagacattatttcatttttttatggctgaatagtattccatggtgaatatataccatattttctttatccactcattggttgatgggcacttaggttggttccatgtctttgaaattgtgaattgtgctgtaataaatataggcatgcaggtgtccttttgatgtaaggacttcttttcctttgggtagatagtagtgggattgctggatcaaatggtagatccacttttagttctttagagaatctccatactgtatttcatagaggttgtactaatttaccttcacaccagcagtgtataggcgtttcttttcaccacacccatgtcaacatctattgtttttcgtcttttatttctatcaagtattttacatatgatacttggtttagttcgaaattggcctcatccaaaccaaagattatggtgcacttgaaaaatacaaactgaatgttgtctatactcatgagagtttcctgccatggcctaagtgaaatcttgataacactgaacaaaggcttcacttgtcctcatcctttaattctgtattctgataggagacaagatccaaactgagatggagactgtttcagaagcaggaacacatcaagagtggtccttccagcaaatctgggaaaaaattgcaagtgatttaaccaggtctcaagacttggtgataaatagctctcagttctccaaagaaggtgatttcccctgccagactgaggcaaggactatctgtaattcacacaagacagaaatcttcccaagggcaattggatataaaccatccttcagtgatgtctccctctttgattttcatcaacaattacactcaggagagaaatctcatacgtgtgatgagtgtggaaagaacttttgttacatctcagcccttcgtattcatcagagagtccacatgggagagaaatgctataagtgtgacgtgtgtggtaaggaattcagtcagagttcacatctgcaaactcatcagagagtccacactggagagaaaccgttcaaatgtgtggaatgtgggaaaggcttcagtcgtagatcagcacttaatgttcatcacaaattacacacaggagagaaaccttataattgtgaggaatgcgggaaggccttcattcacgactcccagcttcaagaacatcagagaatccatacgggggagaagccattcaaatgtgatatatgtggtaagagcttctgtggtagatcaagacttaataggcattccatggttcacacggcagagaaaccattccgatgtgatacgtgtgataagagctttcgtcagagatcagcacttaatagtcatcgcatgatccacacaggagagaaaccatacaaatgtgaggagtgtggaaaaggctttatttgtaggcgagatctttatacgcatcatatggtccacacgggagagaagccatataattgtaaagagtgtgggaagagcttcagatgggcctcgtgtcttttgaaacatcagcgagtccacagtggagaaaaaccaattcaatgtgaagaatgtgggaaaggattttacacaatttcacaatgctattcccaccagagatcccatagtggagaaaaaccatacaaatgtgtggagtgtgggaagggctacaaaaggaggttggatcttgactttcaccagcgcgtccatacaggagagaaactgtataattgtaaggaatgtgggaagagctttagtcgggccccatgtcttttgaaacatgagagactccacagtggagaaaaaccattccaatgtgaagagtgtgggaagagatttactcaaaattcacatcttcattcccatcagagagttcacactggagaaaagccatacaaatgtgagaagtgtggaaagggccacaatagtaagtttaatcttgatatgcaccagaaggtccacacaggagagagaccatacaattgtaaggaatgtgggaagagttttggctgggcctcgtgtcttttgaaacatcagagactgcacagtggggaaaaacctttcaaatgtgaagagtgtgggaaaagatttactcagaattcacagcttcattctcatcaaagagtgcacactggagaaaagccatacaaatgtgatgagtgtgggaagggcttcagctggtcctcaactcgtctgacccatcagagacgccacagcagagaaacacctctcaaatgtgagcagcatgggaagaacattgtacagaattcattctctgaagtgcaagaaaaagttcacagtgtagaaaagccatacaaatgtgaggactgtgggaagggctacaacaggcgcttgaatcttgatatgcatcagagggtccacatgggagagaaaacatggaagtgtagggagtgtgatatgtgctttagtcaggcctcaagccttcgacttcatcagaatgttcatgttggagaaaaaccttagtgatgtgatggtgcaataaagtcttcactcagtcttcatgaaaaaaaa

SEQ ID NO: 13581 - DNA, 462 bp, Homo sapiens
taggtgggccacagaatggaaagatgagaaacttcaagctgtggcaaaccttggagaacagtgagtctcctgagcgaggggcaggcttggccacatggaatctccaccaagctggccttgcttgggacccaggcttctgaccttcctgcaggtcatttcctctcatcattggagggaaaaaacatcacatctcggagccactttggaaacaggtttattttagtttcagaccaataataaaatatcctgtagagattcccttctcagaaaagtgctgtttgccctcagggaggttgtagtcaaactgggagtgcagtgagatgaatccaagtgaggagatgtgtggtattacagcgcagccagcgaggataaagcagcgctcacctgccatgatcctggctagttttcactctcagtgctgttgtgcattttgcctggtggcagatatcaacactaaaaaaa

SEQ ID NO: 13582 - DNA, 883 bp, Homo sapiens
ttctgtgtccttccctgggtcagggacgagccagtgacttgactcttgggcgctaagcttgggagggagcgcaggaggccgctgtccttcctttccggttcacgtcacccttctctccctctgttgctccacctgcagccacttggacggctccgggactgattgcctggggcaggggtggcagtcgaggccgccggggccgaggtgaggctgcagctctccgggcggcggtagcgctggggaggaggaggagagaagatggcgtcggagctagagccagaggtgcaggccatcgaccggagcttgctggaatgttcggccgaggagattgcggggaaatggctgcaagcaactgacctcactagagaagtgtaccagcatttagcccactatgtacccaaaatctactgcaggggtcccaacccttttccacagaaagaagacatgctggcacagcatgttttgttgggaccaatggaatggtacctttgtggtgaagatcctgcatttggatttccaaaacttgagcaagcaaacaaaccttctcatctttgtggtcgtgtttttaaagtaggagagcctacatattcttgcagagactgtgcagttgatccaacttgtgttttgtgcatggagtgctttttgggaagtattcacagagatcatcgatataggatgacaacatcaggaggtggaggtttctgtgactgtggtgatactgaagcctggaaagagggtccttactgtcaaaaacatgaacttaacacctctgaaattgaggaagaagaggatcctcttgttcatttatcagaagatgtgatagcaagaacttataacatttttgctattacgtttcggtatgcagtagaaatattaacctggg

SEQ ID NO: 13583 - DNA, 156 bp, Homo sapiens
ccagtttatgtaaataacaatttgcttacatgttcacatagtaattgcattagataatactggcagaggagctgacatggcaggagtttaatgataattttttccagcttttagctgtctttgtcacttgattgtccgcatataacaaggaatatg

SEQ ID NO: 13584 - DNA, 386 bp, Homo sapiens
gtcattcatgagttgagactgccctgaactgaggttctttgtgtctctgtgttaaatcggaatgtttaacaagtaggagtttggaagactccattcctggtgacagtcaggtatgggaccagtcctttataacgtttagtaatgactgccagttgactttgtaaagtgctgtgtcctcataacgttgcttacttccttaatttctctgtgatgagaaagagccttatcttcctttgtaagtgtgcagcagggaagggcccatctttggagtctggaaaggcactggtttaagtttagacggaaacgttatttcacagtccaatggaataataaggtttaaatgcaatgtctcccaaaacgttacttgccctagatgaatcaaagaa

SEQ ID NO: 13585 - DNA, 373 bp, Homo sapiens
caatgttaattcaattaatgactgtactgaaagtttgtcttagtgtgcagtgaaaacaggagagcagcctctaataatctatggatttaatgactgcaactttgaagagtgttaagctaaagtgaagttcagaatggcttgttaactgggtttattagctgttgaccttccctttcagcataatagtggcagtcagaccgaagagagcactaacgtcctgattagcatttatctaaagataggctgctgcctgttacacagtaaattagttcaatcagccataaagagcttgagaaacattttctgctttataaaaagaattagatgttagaacagttcatctggcatagctcagtgaagatggattgagccc

SEQ ID NO: 13586 - DNA, 529 bp, Homo sapiens
gctctcaaaaggggtaataatatttcaaaacatctggaacacggtttgagccattaggccgcacagccccaagtttttattaatttgtactccagacttcactagaggaaaaagcagcacgatttttaggcgaaggaataagccacttgaggtccgcctctgaatcagtttcacaaagaaaagtccatcagtgcagaggaaggccagcggacctgagtacctatgtcgtggttaaagaaggatgactgggccgggcgcggtggctcacgccagtaatcccagcactttgggaggccaagatgggcggatcacgacaaaccatcctgactaacacggtgaaaccctttctctactaaaaatacaaaaaattagccaggcgtggtggcgtgcgcctgtagtcccagctactcggaaggctgaggcaggagaatggcatgaacctgggaggcggagcttgcagtgagacaacatcgcgccactgcactccagcctgggcgacaaagcgagactccgtctcaaaaaaaaaaaa

SEQ ID NO: 13587 - DNA, 486 bp, Homo sapiens
ctatttgtcttctttattataagaataatatgttcccagagtcctgaaaggcaagaagtatgagtgaacaagcggggagtcagagaaggtgagaaaggaaaacatacactgtctgagaacgtcagatgtgatgggagagcagtggggggaagatagattgcaagccttaggatggattgataagtcttagaaaagacagatcattaattaattaatcagtcaattaactaaaaacatactgatgactagctggataatgagaacatgtaattgacttaaacatgttttcaactgagtgaggtagacatagacattgcaacagcggtgctatgctagaggagagaccaaggtgtggtgctggcagtagagacatagaggaaggacctctaacctaccttaagggctcagagaaggcttcctagaagagaccatattaagtgcacatgtaccctaaaacttaaagtataataataaaaataaataaat

SEQ ID NO: 13588 - DNA, 532 bp, Homo sapiens
aaagggaatcagcgctgactgagctcctactatgtgcccttcctgggcctggcactggaatcacaggatgaatgaataaggcatatttcctgccctgaggaggcgtctataggggaagtcggaattaaggcacctccagaattctgaggtcaagggaatgtcaacagagctgtgaacaaaatgcccaaagccatgaaaatctacagagagagactcgaaggggaggaatggggccaggctgaggtcgggatggtggaggaggtggtggaggtgatgaggtaccagagcaacctcgaagaaagctgagaggcaggagaccgccaaaggcaaacttggaacacctggtgactccgactaactctccatgtggtgtccttgaggacttttatgatactgctaccactgctaatagtaataaaagccactatttaatgtgtttactatgcgctgggtgtgcaaatattgtggaaagagtgaacatatgtgcagaatgcttaataaacgtgatctccttttatcttcaaaagaacaa

SEQ ID NO: 13589 - DNA, 786 bp, Homo sapiens
aaagggaatcagcgctgactgagctcctactatgtgcccttcctgggcctggcactggaatcacaggatgaatgaataaggcatatttcctgccctgaggaggcgtctataggggaagtcggaattaaggcacctccagaattctgaggtcaagggaatgtcaacagagctgtgaacaaaatgcccaaagccatgaaaatctacagagagagactcgaaggggaggaatggggtaggagctggtgccgaggatgagaggggagaattcacctggtggagaactgataggtgggggctgttttcaaagtattttcacaaacgtttattctcttgactctcacaataaacgaagccagccagaaagtattctccccatttcagtgataaggaaatggaggctcagaagggtggaatggcccagggcagggcaaagctggggtggaagcatcggtcttgtgcttccacactcattgcactttcttccaggccaggctgaggtcgggatggtggaggaggtggtggaggtgatgaggtaccagagcaacctcgaagaaagctgagaggcaggagaccgccaaaggcaaacttggaacacctggtgactccgactaactctccatgtggtgtccttgaggacttttatgatactgctaccactgctaatagtaataaaagccactatttaatgtgtttactatgcgctgggtgtgcaaatattgtggaaagagtgaacatatgtgcagaatgcttaataaacgtgatctccttttatcttcaaaagaacaa

SEQ ID NO: 13590 - DNA, 588 bp, Homo sapiens
aaagggaatcagcgctgactgagctcctactatgtgcccttcctgggcctggcactggaatcacaggatgaatgaataaggcatatttcctgccctgaggaggcgtctataggggaagtcggaattaaggcacctccagaattctgaggtcaagggaatgtcaacagagctgtgaacaaaatgcccaaagccatgaaaatctacagagagagactcgaaggggaggaatggggtaggagctggtgccgaggatgagaggggagaattcacctggtggagaactgataggccaggctgaggtcgggatggtggaggaggtggtggaggtgatgaggtaccagagcaacctcgaagaaagctgagaggcaggagaccgccaaaggcaaacttggaacacctggtgactccgactaactctccatgtggtgtccttgaggacttttatgatactgctaccactgctaatagtaataaaagccactatttaatgtgtttactatgcgctgggtgtgcaaatattgtggaaagagtgaacatatgtgcagaatgcttaataaacgtgatctccttttatcttcaaaagaacaa

SEQ ID NO: 13591 - DNA, 1029 bp, Homo sapiens
ggcttaggttatcctcccacctcagcctcccaagttgctgctgggactacaggtgtacgccatcacacctgtctaattttttgtaattttaattgagacaggggttcgccatgttgtccaggctgatcttgaactcctgggttcgagcgatctgcccgccttggcctcccaaagtgctgggattacaggcatgaaccacctaacctggctaggatcgcactttgagacttttctcttttttcttttttttcaaaggaagcaaatcagaaatgagatggagtatcatgattagcatctcagagctaatttaaggaaaattgggagagggtgtttgatcatgtcagatctaatctctttcagtaaagtctctttcctcccccataccttcattgtctagagccaagagttggttggatataatgttggctctttttaatccaagttgccatcgctaaaagtagcatcatgacacctgtctggtgctttcaagtctcaagtaaatttctggcagtttgaaaatgatgttaaaaagcacttgggttttaaaaaaaggcacttgaaggagatggtttattctcctcctgtacacacatatgtacataccttgtcaaatgttacttctcttccttattctccctgtgctagaaacgttctccaggtaattgctttttgaaaccgaggttgagcattgcccagcctaaatatgaatatctctaccagtagggaatgaatacttcttgatagccagttttaaaagtaagttgttaatagaaaatactgagcatggcataattctttgtctagagccaggaggacataactctgtgttattctagttgaaacttttcctctaacctaacagtgatcaacagccttctatcctagtgttcagcttacagtttatctgtcttgtgtgcaaagatatcccatataaggtcatccgatcacttgtaaatgtttgcgaaagtattgtgtagaatcctagtcttagatgtgatttatagtaaattaggcattagaccagggaaa

SEQ ID NO: 13592 - DNA, 414 bp, Homo sapiens
ctttgaaatagatttgggctttgataggtttgttggcaattggtaaacccatcctaatttcccacagatggagcagagaaggatcacttagaggaatcagaaagcccaggacaacagggaagtaatgataactaccaattattaagctgccctccccatcacaaactatgaccaccatgatctccattttgtagaagaagcaaagttttagttgacaggggatgagtgctttgcccgagatcacacagaagtgttagagccagctgaattgctttccccttagccacaatatctcaatcaacacaagtaacgtactttccttgggacattcacctttcttcagattcagaaccagagagcaaaaaagaaatcaccccttcttccttctgcctttactttctagtagaagttata

SEQ ID NO: 13593 - DNA, 445 bp, Homo sapiens
ccttatgtcttcaccatctttgtaattccagtagagcgcctagcctgtattaaatcagtgattttcaactctggctgcacattagaatcaactggagagtttataaacaaaatgaacgcacaggctcctcttgtgggtgaggcctggagtgtctgtaattcctttttgttgttgttgttgttgttgttttaaagcttcccaggtgatctgaatgtgcaactaggattgagtctcactgtatcactgtattaggggctcaataaatgttgactaaaggatgaggagtggagacagtaagtacaaattattcttgaaaaaaattggtagtgaaacaaaagagaaaaatatgtattactactttgttttttcctgctatttcattttaagaatactttttttttgtaagagaacattctagggtgtataagggaaatgattcagaagg

SEQ ID NO: 13594 - DNA, 689 bp, Homo sapiens
accaacattatgtattgagcatcgtatctttcctactgagcctagacacagcctcagaacctctcaacatagcacttggagcaacaattgccgcttgattggaattgccatttgagcttgagttagccccaatggcagaacgacaggctcgcactagtgtccacctgtggctgtcaggggcggtaccacagaaaggggaaaggccacttgcctctacccactgcccttttggacaacaattccaattgaaggaacaccaatcactgatggatcccattccaaaatgtctcttcattcacatcatttaattctgttgaatgaatatgttcctccctcaccttttataaacagaaaattaatataagtcccagttacttgcttcttagactctgtgagactcatgtaccaaaacaatgtgacattcttttcgagactttgacttgtacggtcagtatgaatttagtgcctttccaggcagcaaaatgtttcttctttgctgatttcataggacaaatatcctagcatactcacaccaccagtgtcccaccctcacagactggcacattagaatcatattaatctgcttgtttgcatgttacaactgatactgcaaaagcctattcaagtcggactgaactaggctaagcagaggacccttgtggaacctggagcatttctcagggacaggt

SEQ ID NO: 13595 - DNA, 202 bp, Homo sapiens
cggcgcccaggctctttagctcggccaaagacccctcctccactcattttttccttcattcattctctcattcactctcgagtattttctgaaccagactgtgcgctgagggtacggtagggaacaacacagagtcccccgccctcgcttcctcctgactgagataaaagacaaaatgtgaataaagggttataatatggat

SEQ ID NO: 13596 - DNA, 784 bp, Homo sapiens
cattggtgacggtgctaggttgtaggatatgcactttgagtccaaggaggcaatgttttatccatttcatcctccataggagctagcaccaatatgaacacataatatgtatcaaataaattacctcatggaaatcagaagagacctcagttttctctaacaatctagatttcttcacaagtggctcttcaaatatgttaaaaagtgtattctgttctcaataatttagtattaaggaaaatgtacctaatatgtgtacttgaactatttctgtggtatgtgatagaaaatccatcttaaattattataagaaataaaagcacaatttattaacaaaggaattggagaatctgagagcatattggatttaggtttgggttgatctgggagctcagatgaaggcatagagaccaggtgtcttactccatcttcctacatccctgctctaaagaggctctgctctctgccaggcttatctgttgcagctaggcctcacaagaccccaggttcaaatccagcaggaaaaaaagtctctagtaactcttgcacaacccccaggactcacttggactagcggagcttgggacagatgcttatcccttaacagttcctgaagagtattctactgccagaggaaaggaggagtggacgccaggtggcctgtatgcagtaagagtccactccatctatggaccccttggttaccttttccaggcctttgtagctcactcctcctcaggtaaaatttagagaagtgatattatttttaataagatcacgagag

SEQ ID NO: 13597 - DNA, 519 bp, Homo sapiens
cctgtagtcccagctactcgagagcctgaggcaggagaatggcatgaacctggaaggcggagcttgcagtgagctgagatggtgccactgcactctaacctgggcgacagagtgagacaccgtctcaaaaaaaaaaacaaaaaacaaaaattatccaggtgtggcggtgggcgcctgtgaggcaggcgaatctcttgaacccgggaggcggaggttgcagtgagccaagatcacaccattgcactccagcctgggcaacaagagtgaaattccatctcaaaaagaaaccaaaaaaacaaaaaaaaaacatgccgtttgagtactgtgtttttggtgttgtccaaggaaaattaaaaacctgtagcatgaataatgtttgtttttcatttcgaatcttgtgaatgtattaaatatatcgctcttaagagacggtgaagttcctatttcaagttttttttgttttgttttgtttttaaagctgttttttaatacattaaatggtgctgagtaaaggaaata

SEQ ID NO: 13598 - DNA, 457 bp, Homo sapiens
tacagtagcctgcagattagggtttccctacatggccagtcattgcagtcaggtagggcacttattcaaaatgagatactagggccccaccacaaacctacccaatcaggatctgtactttaaagaagctccctgtgagattctgggaaacactactgaagatgtaggaagagagtgaggaagcagggcccctggccagaggttgctgcagtcacccagggccagcagatgtgtatgcccagaggggtggaatggcaaggttttgggacagcctcttggtataaagtgaaagagcggagagaaagaaaatgagatcatcatttatgatcacggtcatggggaacaagagcccaggtcagtcctggtgagcaggtggccccagtgaggtcttctccactttcccctctgtaacttgaccttggacttcttctggtatcaaattccagttattaccccc

SEQ ID NO: 13599 - DNA, 582 bp, Homo sapiens
aatatgattttctatgtgtgccatgcagatcaggagcactgtagcaggcccctctctctatcaccagtgcatcactttcatcatggagcaggttgggaaacaagccaaaggctggccccacagacacaaagaataagtcacaactcacccacgtggtgtgtttcctcctaactctttagtttgaaattttcaaacttgacagaaaagttaagaaccttcgtccagattcactcattgttgccattttgccacgttttctttatctcactctctttcacgtggttttgctgagtcatttgaaagtgagttgcagacagcccaccgttaagtacgtcagcaggtatctttcaggagtgtggacttccccatttgcaaccacggtgccatcatcacacctaagaaattaccactgtccaataatatccaatctacaacccattcatatttccccagttgaactccaaaaatgttttcgtatggctgttttcctgatccaaaaatcttcatgcattacatttgggtgttgcgtttctttaccttcttttaatctagaacagcctccctgctctgtgtgtgtgtgtg

SEQ ID NO: 13600 - DNA, 255 bp, Homo sapiens
cctgtccagccacccagaaaaagcaatggctttggtaacatgacatgttatgtataaaatgcttcctgccaggtgaggtggctcacgcctataatcccatcactttgggaggccagagggggtggatcacttgaggctggcttgaactcctgacctcaggtgatccacccgcctcagccttccaaagtgctgggattacaggcgagagccaccgtgcccggcgcctgtgcctctttgtattttccatgctaaccg

SEQ ID NO: 13601 - DNA, 762 bp, Homo sapiens
gcaaccacggtgccatcatcacacctaagaaattaccactgtccaataatatccaatctacaacccattcatatttccccagttgaactccaaaaatgttttcgtatggctgttttcctgatccaaaaatcttcatgcattacatttgggtgttgcgtttctttaccttcttttaatctagaacagcctccctgctctgtgtgtgtgtgtgtgtgtgtgtgtgtgtgtgtgagacattggctttgaagagtccaggaaggccagctgtgttacacaatagatttgtgtaatcgaatatgttcaggttaagtttgcatagtttcaaaactcacctgataattgcttcattgtgtccaggaaagtcctaaggcagagaggctatctctttggctgtctgtccctgtgtgtgttgtggggcatcctgtccagccacccagaaaaagcaatggctttggtaacatgacatgttatgtataaaatgcttcctgccaggtgaggtggctcacgcctataatcccatcactttgggaggccagagggggtggatcacttgaggccagaagttcaagaccagcctggccaacatagtgaaccccatctctactaaaaatacaaaaattagccaggcgtggtggcaggcgcctgtaaccccagctactcgggaggctgaggcaggagaatcgcttgaacccaggaggtggaggttgcagtgagctgagattgtgcactgcctccagcctggatgcagacgagactgtctca

SEQ ID NO: 13602 - DNA, 532 bp, Homo sapiens
gtgcatataagtaagaaagtcttaagtgtttagctagctcaatgaagcttgtggcccaaaattacctgagacaggtctcaaccaacttagaaagtttattttgccaaggttaacagcctcaggaggtcctgacgacatgtgtccatgatggtccgggtacggcttgcttttatacattttagggagacataatacatcaatcaatacatgtaagatttacattggtttgatctggaaggagggtacaatttcaactgggatggggggcacttcttggtcataggtagatttaaaatgtttctacctggcaattggttgaaagagttactatcaatagaaaggaatgtgtgggttatactaaggggttgtgaaggccaaggctttatcatgcagctgaagcctccaagtagcaggcttcagagagaagagtttgtaaatgtttcttgtcagacctaaggtctgtgttgatgataatgctggagggtagatgaggcaggtccgatcctctcttccatcgtgtcctgaactcgtt

SEQ ID NO: 13603 - DNA, 356 bp, Homo sapiens
tgttcagatttatttgtagttctgcctccccttcctctccacacacacacaaacacaactataccatattcttctgacccttgcttatgcctctgcctttgcctgggctgccctgtggctaatccccctcattctttttattaactaaattactcctcatggttcaagtccaaattcagatgccactttttcaggaaccaagactgaattgtgtatcttcctgtgtgttcatatagtttctgtcaaagcacttacccacacgtattttcatgttcagctcctcatctagattgtgtgtgtagtgtgggtgagaatgtcttattcatttatattcctggtgactaatatactacctg

SEQ ID NO: 13604 - DNA, 442 bp, Homo sapiens
tgacaaccaaaattgtatccagatattgccaaatgcccgctgaggggcaaaattggccccagctgagaaccattgaatggatttttagtaaatcctgatgttaatgtaaattctccatttttgttgttttcccaagattttagatcttttgtgtttcaattatgaattttagaataggcttgctaattactataaaaaggagtatgattatgctgagactgtaattggggttgggttgaatttgtagatcactttggagacattttaacagttttgaaagttctagtcatgaacatggcacatctctccatttatttaggtcatctttaattttcctcagcaacattttgtagttttggtagaggtcttgtatatcctttgttaaatttattactaaggattttatgttgtatgatgcaaaaataaatggaattgtttttta

SEQ ID NO: 13605 - DNA, 3121 bp, Homo sapiens
  misc_feature (2977)..(2978): n is a, c, g, or t
  misc_feature (2982)..(2982): n is a, c, g, or t
  misc_feature (2988)..(2988): n is a, c, g, or t
  misc_feature (2990)..(2990): n is a, c, g, or t
  misc_feature (3002)..(3002): n is a, c, g, or t
  misc_feature (3007)..(3007): n is a, c, g, or t
  misc_feature (3009)..(3009): n is a, c, g, or t
  misc_feature (3012)..(3012): n is a, c, g, or t
gcggggcctccgtatccccacgtgggccctgcaggaactggcggggcgcgtgacccggcgaggcccagagacaggggaggggcgccgggagccgggcggatccgcgtccccgatgcgcgctgcatttccggcgggcggcgctgggggcagcgtggagccacccagtgctcggcccgccccgcaacccgccggaaccgccgcccgcagcgaggaagcgcccgcgcgggcgcaggcggccggaatggcggggcccggctggggtcccccgcgcctggacggcttcatcctcaccgagcgcctgggcagcggcacgtacgccacggtgtacaaggcctacgccaagaaggacactcgtgaagtggtagccataaagtgtgtagccaagaaaagtctgaacaaggcatcggtggagaacctcctcacggagattgagatcctcaagggcattcgacatccccacattgtgcagctgaaagactttcagtgggacagtgacaatatctacctcatcatggagttttgcgcagggggcgacctgtctcgcttcatccatacccgcaggattctgcctgagaaggtggcgcgtgtcttcatgcagcaattagctagcgccctgcaattcctgcatgaacggaatatctctcacctggatctgaagccacagaacattctactgagctccttggagaagccccacctaaaactggcagactttggtttcgcacaacacatgtccccgtgggatgagaagcacgtgctccgtggctcccccctctacatggcccccgagatggtgtgccagcggcagtatgacgcccgcgtggacctctggtccatgggggtcatcctgtatggtgagacctcttttccctgcttctcaccctgaggcctacagtttcctcaggcaaggcctctctgggccacttctgaagggttctgatgaaaactgactgctggcccagggcccctgctgaggggcgtcaggccaggcttgacccattccctcccagcctccgctctgcctcccttccacagaagccctcttcgggcagcccccctttgcctccaggtcgttctcggagctggaagagaagatccgtagcaaccgggtcatcgagctccccttgcggcccctgctctcccgagactgccgggacctactgcagcggctcctggagcgggaccccagccgtcgcatctccttccaggacttttttgcgcacccctgggtggacctggagcacatgcccagtggggagagtctggggcgagcaaccgccctggtggtgcaggctgtgaagaaagaccaggagggggattcagcagctgccttatcactctactgcaaggctctggacttctttgtacctgccctgcactatgaagtggatgcccagcggaaggaggcaattaaggcaaaggtggggcagtacgtgtcccgggctgaggagctcaaggccatcgtctcctcttccaatcaggccctgctgaggcaggggacctctgcccgagacctgctcagagagatggcccgggacaagccacgcctcctagctgccctggaagtggcttcagctgccatggccaaggaggaggccgccggcggggagcaggatgccctggacctgtaccagcacagcctgggggagctactgctgttgctggcagcggagcccccgggccggaggcgggagctgcttcacactgaggttcagaacctcatggcccgagctgaatacttgaaggagcaggtcaagatgagggaatctcgctgggaagctgacaccctggacaaagagggactgtcggaatctgttcgtagctcttgcacccttcagtgaccctagaagaatgattggacagatgtgagccatctggagcagaggggcactaacccaggctgacgccaagaatgaagtggcccactgcagccctggcgagcaggcttcttggatggacagtgctgagacccccatatcccagagtccccagcctccctcaggttactctgcaccccacagatggtttgatggctgtgctgtatactggaggggagggcaggactctgggagaacagcacttctttcatgagacctttgttactcggtggttactgggtcctgtgcctgtccgttttggggcatgcagccctctatcatttttggctccgagaagagggcaaggggcccccgcagggtacttctgtgcttgccctcgccctgccagcaggcagctgtgcccctggcctgcccttcccgggaccccttattccaactcagctcctctttgcactggaatggggcactccaacacccctcagggaccaccctccccacagtatgcactcagccccacagaacccaccagtctttctgggaactcacacctgcccgccatcttggtactttaggttaatccctcaagcatgaaagctggatcttttggggtttaagaagcccaagccttgttcctgccctggcctagggagcactcaggagggttccttggtcctcatctctcccacctccgttccctctgggccccacactagccacagcgcgggccttgtgctggagtttgagcctgggacagggagagggaggcttggagacagtctgacccagtgccctctaggccacccacttctaggcctgccctgccgccgtggagccctgggcaagctctttcccctttctgggcctgggtctccccatctcttcaatggggctgataccttcacagcccacagcatgggcacttatgaggacaaagtgaatttaacctggaaaagaatgtatttgagagtttcttttaaataatcagcgggtgttggtgatttgtagcccttctgcccttaaatgcttccttgggcaagagctgtctgtcctccctgcaggaggctgagtgtgaagagtatcattcattgtttctctattaaattattttctctaaaaaaaaaaacaaaaagaacaaaaannaaanaaagananaaaaaaagaaanacaananaanacaaagaaaaagagcacaagagcgaagaaaggaacgaagagaaaagagacgggagaagagggggggggggggggggggcggaggcgcggggggggcgcggggggcgagc

SEQ ID NO: 13606 - DNA, 381 bp, Homo sapiens
gtctgacccagtgccctctaggccaaaagccccccccccccaaaacccttttttttccttttaaaaggggggcccccttgcctgccctgccgccgtggagccctgggcaagctctttcccctttctgggcctgggtctccccatctcttcaatggggctgataccttcacagcccacagcatgggcacttatgaggacaaagtgaatttaacctggaaaagaatgtatttgagagtttcttttaaataatcagcgggtgttggtgatttgtagcccttctgcccttaaatgcttccttgggcaagagctgtctgtcctccctgcaggaggctgagtgtgaagagtatcattcattgtttctctattaaattattttctcta

SEQ ID NO: 13607 - DNA, 1663 bp, Homo sapiens
gcggggcctccgtatccccacgtgggccctgcaggaactggcggggcgcgtgacccggcgaggcccagagacaggggaggggcgccgggagccgggcggatccgcgtccccgatgcgcgctgcatttccggcgggcggcgctgggggcagcgtggagccacccagtgctcggcccgccccgcaacccgccggaaccgccgcccgcagcgaggaagcgcccgcgcgggcgcaggcggccggaatggcggggcccggctggggtcccccgcgcctggacggcttcatcctcaccgagcgcctgggcagcggcacgtacgccacggtgtacaaggcctacgccaagaaggacactcgtgaagtggtagccataaagtgtgtagccaagaaaagtctgaacaaggcatcggtggagaacctcctcacggagattgagatcctcaagggcattcgacatccccacattgtgcagctgaaagactttcagtgggacagtgacaatatctacctcatcatggagttttgcgcagggggcgacctgtctcgcttcatccatacccgcaggattctgcctgagaaggtggcgcgtgtcttcatgcagcaattagctagcgccctgcaattcctgcatgaacggaatatctctcacctggatctgaagccacagaacattctactgagctccttggagaagccccacctaaaactggcagactttggtttcgcacaacacatgtccccgtgggatgagaagcacgtgctccgtggctcccccctctacatggcccccgagatggtgtgccagcggcagtatgacgcccgcgtggacctctggtccatgggggtcatcctgtatggtgagacctcttttccctgcttctcaccctgaggcctacagtttcctcaggcaaggcctctctgggccacttctgaagggttctgatgaaaactgactgctggcccagggcccctgctgaggggcgtcaggccaggcttgacccattccctcccagcctccgctctgcctcccttccacagaagccctcttcgggcagcccccctttgcctccaggtcgttctcggagctggaagagaagatccgtagcaaccgggtcatcgagctccccttgcggcccctgctctcccgagactgccgggacctactgcagcggctcctggagcgggaccccagccgtcgcatctccttccaggacttttttgcgcacccctgggtggacctggagcacatgcccagtggggagagtctggggcgagcagtgagcagacggctggggctggggtgggctgagggtgggctggaggtctccttgcccccgttggtggtgaattggtgactcacccaacagagacagagggcgggctcaggggagctgatctcccatcttggtgagtgtgggagggtagggaggtggacctgacccctgatctgcccatccccagaccgccctggtggtgcaggctgtgaagaaagaccaggagggggattcagcagctgccttatcactctactgcaaggctctggacttctttgtacctgcccttctgcccttaaatgcttccttgggcaagagctgtctgtcctccctgcaggaggctgagtgtgaagagtatcattcattgtttctctattaaattattttctcta

SEQ ID NO: 13608 - DNA, 2951 bp, Homo sapiens
gcggggcctccgtatccccacgtgggccctgcaggaactggcggggcgcgtgacccggcgaggcccagagacaggggaggggcgccgggagccgggcggatccgcgtccccgatgcgcgctgcatttccggcgggcggcgctgggggcagcgtggagccacccagtgctcggcccgccccgcaacccgccggaaccgccgcccgcagcgaggaagcgcccgcgcgggcgcaggcggccggaatggcggggcccggctggggtcccccgcgcctggacggcttcatcctcaccgagcgcctgggcagcggcacgtacgccacggtgtacaaggcctacgccaagaaggacactcgtgaagtggtagccataaagtgtgtagccaagaaaagtctgaacaaggcatcggtggagaacctcctcacggagattgagatcctcaagggcattcgacatccccacattgtgcagctgaaagactttcagtgggacagtgacaatatctacctcatcatggagttttgcgcagggggcgacctgtctcgcttcatccatacccgcaggattctgcctgagaaggtggcgcgtgtcttcatgcagcaattagctagcgccctgcaattcctgcatgaacggaatatctctcacctggatctgaagccacagaacattctactgagctccttggagaagccccacctaaaactggcagactttggtttcgcacaacacatgtccccgtgggatgagaagcacgtgctccgtggctcccccctctacatggcccccgagatggtgtgccagcggcagtatgacgcccgcgtggacctctggtccatgggggtcatcctgtatggtgagacctcttttccctgcttctcaccctgaggcctacagtttcctcaggcaaggcctctctgggccacttctgaagggttctgatgaaaactgactgctggcccagggcccctgctgaggggcgtcaggccaggcttgacccattccctcccagcctccgctctgcctcccttccacagaagccctcttcgggcagcccccctttgcctccaggtcgttctcggagctggaagagaagatccgtagcaaccgggtcatcgagctccccttgcggcccctgctctcccgagactgccgggacctactgcagcggctcctggagcgggaccccagccgtcgcatctccttccaggacttttttgcgcacccctgggtggacctggagcacatgcccagtggggagagtctggggcgagcaaccgccctggtggtgcaggctgtgaagaaagaccaggagggggattcagcagctgccttatcactctactgcaaggctctggacttctttgtacctgccctgcactatgaagtggatgcccagcggaaggaggcaattaaggcaaaggtggggcagtacgtgtcccgggctgaggagctcaaggccatcgtctcctcttccaatcaggccctgctgaggcaggggacctctgcccgagacctgctcagagagatggcccgggacaagccacgcctcctagctgccctggaagtggcttcagctgccatggccaaggaggaggccgccggcggggagcaggatgccctggacctgtaccagcacagcctgggggagctactgctgttgctggcagcggagcccccgggccggaggcgggagctgcttcacactgaggttcagaacctcatggcccgagctgaatacttgaaggagcaggtcaagatgagggaatctcgctgggaagctgacaccctggacaaagagggactgtcggaatctgttcgtagctcttgcacccttcagtgaccctagaagaatgattggacagatgtgagccatctggagcagaggggcactaacccaggctgacgccaagaatgaagtggcccactgcagccctggcgagcaggcttcttggatggacagtgctgagacccccatatcccagagtccccagcctccctcaggttactctgcaccccacagatggtttgatggctgtgctgtatactggaggggagggcaggactctgggagaacagcacttctttcatgagacctttgttactcggtggttactgggtcctgtgcctgtccgttttggggcatgcagccctctatcatttttggctccgagaagagggcaaggggcccccgcagggtacttctgtgcttgccctcgccctgccagcaggcagctgtgcccctggcctgcccttcccgggaccccttattccaactcagctcctctttgcactggaatggggcactccaacacccctcagggaccaccctccccacagtatgcactcagccccacagaacccaccagtctttctgggaactcacacctgcccgccatcttggtactttaggttaatccctcaagcatgaaagctggatcttttggggtttaagaagcccaagccttgttcctgccctggcctagggagcactcaggagggttccttggtcctcatctctcccacctccgttccctctgggccccacactagccacagcgcgggccttgtgctggagtttgagcctgggacagggagagggaggcttggagacagtctgacccagtgccctctaggccacccacttctaggcctgccctgccgccgtggagccctgggcaagctctttcccctttctgggcctgggtctccccatctcttcaatggggctgataccttcacagcccacagcatgggcacttatgaggacaaagtgaatttaacctggaaaagaatgtatttgagagtttcttttaaataatcagcgggtgttggtgatttgtagcccttctgcccttaaatgcttccttgggcaagagctgtctgtcctccctgcaggaggctgagtgtgaagagtatcattcattgtttctctattaaattattttctcta

SEQ ID NO: 13609 - DNA, 1310 bp, Homo sapiens
cccacgcgtccgcccacgtgtccgcagcggagcccccgggccggaggcgggagctgcttcacactgaggttcagaacctcatggcccgagctgaatacttgaaggagcaggtcaagatgagggaatctcgctgggaagctgacaccctggacaaagagggactgtcggaatctgttcgtagctcttgcacccttcagtgaccctagaagaatgattggacagatgtgagccatctggagcagaggggcactaacccaggctgacgccaagaatgaagtggcccactgcagccctggcgagcaggcttcttggatggacagtgctgagacccccatatcccagagtccccagcctccctcaggttactctgcaccccacagatggtttgatggctgtgctgtatactggaggggagggcaggactctgggagaacagcacttctttcatgagacctttgttactcggtggttactgggtcctgtgcctgtccgttttggggcatgcagccctctatcatttttggctccgagaagagggcaaggggcccccgcagggtacttctgtgcttgccctcgccctgccagcaggcagctgtgcccctggcctgcccttcccgggaccccttattccaactcagctcctctttgcactggaatggggcactccaacacccctcagggaccaccctccccacagtatgcactcagccccacagaacccaccagtctttctgggaactcacacctgcccgccatcttggtactttaggttaatccctcaagcatgaaagctggatcttttggggtttaagaagcccaagccttgttcctgccctggcctagggagcactcaggagggttccttggtcctcatctctcccacctccgttccctctgggccccacactagccacagcgcgggccttgtgctggagtttgagcctgggacagggagagggaggcttggagacagtctgacccagtgccctctaggccacccacttctaggcctgccctgccgccgtggagccctgggcaagctctttcccctttctgggcctgggtctccccatctcttcaatggggctgataccttcacagcccacagcatgggcacttatgaggacaaagtgaatttaacctggaaaagaatgtatttgagagtttcttttaaataatcagcgggtgttggtgatttgtagcccttctgcccttaaatgcttccttgggcaagagctgtctgtcctccctgcaggaggctgagtgtgaagagtatcattcattgtttctctattaaattattttctcta

SEQ ID NO: 13610 - DNA, 1204 bp, Homo sapiens
agtgactctacagatgcttatctgaggaggagctgacaccctggacaaagagggactgtcggaatctgttcgtagctcttgcacccttcagtgaccctagaagaatgattggacagatgtgagccatctggagcagaggggcactaacccaggctgacgccaagaatgaagtggcccactgcagccctggcgagcaggcttcttggatggacagtgctgagacccccatatcccagagtccccagcctccctcaggttactctgcaccccacagatggtttgatggctgtgctgtatactggaggggagggcaggactctgggagaacagcacttctttcatgagacctttgttactcggtggttactgggtcctgtgcctgtccgttttggggcatgcagccctctatcatttttggctccgagaagagggcaaggggcccccgcagggtacttctgtgcttgccctcgccctgccagcaggcagctgtgcccctggcctgcccttcccgggaccccttattccaactcagctcctctttgcactggaatggggcactccaacacccctcagggaccaccctccccacagtatgcactcagccccacagaacccaccagtctttctgggaactcacacctgcccgccatcttggtactttaggttaatccctcaagcatgaaagctggatcttttggggtttaagaagcccaagccttgttcctgccctggcctagggagcactcaggagggttccttggtcctcatctctcccacctccgttccctctgggccccacactagccacagcgcgggccttgtgctggagtttgagcctgggacagggagagggaggcttggagacagtctgacccagtgccctctaggccacccacttctaggcctgccctgccgccgtggagccctgggcaagctctttcccctttctgggcctgggtctccccatctcttcaatggggctgataccttcacagcccacagcatgggcacttatgaggacaaagtgaatttaacctggaaaagaatgtatttgagagtttcttttaaataatcagcgggtgttggtgatttgtagcccttctgcccttaaatgcttccttgggcaagagctgtctgtcctccctgcaggaggctgagtgtgaagagtatcattcattgtttctctattaaattattttctcta

SEQ ID NO: 13611 - DNA, 2561 bp, Homo sapiens
gcggggcctccgtatccccacgtgggccctgcaggaactggcggggcgcgtgacccggcgaggcccagagacaggggaggggcgccgggagccgggcggatccgcgtccccgatgcgcgctgcatttccggcgggcggcgctgggggcagcgtggagccacccagtgctcggcccgccccgcaacccgccggaaccgccgcccgcagcgaggaagcgcccgcgcgggcgcaggcggccggaatggcggggcccggctggggtcccccgcgcctggacggcttcatcctcaccgagcgcctgggcagcggcacgtacgccacggtgtacaaggcctacgccaagaaggacactcgtgaagtggtagccataaagtgtgtagccaagaaaagtctgaacaaggcatcggtggagaacctcctcacggagattgagatcctcaagggcattcgacatccccacattgtgcagctgaaagactttcagtgggacagtgacaatatctacctcatcatggagttttgcgcagggggcgacctgtctcgcttcatccatacccgcaggattctgcctgagaaggtggcgcgtgtcttcatgcagcaattagctagcgccctgcaattcctgcatgaacggaatatctctcacctggatctgaagccacagaacattctactgagctccttggagaagccccacctaaaactggcagactttggtttcgcacaacacatgtccccgtgggatgagaagcacgtgctccgtggctcccccctctacatggcccccgagatggtgtgccagcggcagtatgacgcccgcgtggacctctggtccatgggggtcatcctgtatggtgagacctcttttccctgcttctcaccctgaggcctacagtttcctcaggcaaggcctctctgggccacttctgaagggttctgatgaaaactgactgctggcccagggcccctgctgaggggcgtcaggccaggcttgacccattccctcccagcctccgctctgcctcccttccacagaagccctcttcgggcagcccccctttgcctccaggtcgttctcggagctggaagagaagatccgtagcaaccgggtcatcgagctccccttgcggcccctgctctcccgagactgccgggacctactgcagcggctcctggagcgggaccccagccgtcgcatctccttccaggacttttttgcgcacccctgggtggacctggagcacatgcccagtggggagagtctggggcgagcaaccgccctggtggtgcaggctgtgaagaaagaccaggagggggattcagcagctgccttatcactctactgcaaggctctggacttctttgtacctgccctgcactatgaagtggatgcccagcggaaggaggcaattaaggcaaaggtggggcagtacgtgtcccgggctgaggagctcaaggccatcgtctcctcttccaatcaggccctgctgaggcaggggacctctgcccgagacctgctcagagagatggcccgggacaagccacgcctcctagctgccctggaagtggcttcagctgccatggccaaggaggaggccgccggcggggagcaggatgccctggacctgtaccagcacagcctgggggagctactgctgttgctggcagcggagcccccgggccggaggcgggagctgcttcacactgaggttcagaacctcatggcccgagctgaatacttgaaggagcaggtcaagatgagggaatctcgctgggaagctgacaccctggacaaagagggactgtcggaatctgttcgtagctcttgcacccttcagtgaccctagaagaatgattggacagatgtgagccatctggagcagaggggcactaacccaggctgacgccaagaatgaagtggcccactgcagccctggcgagcaggcttcttggatggacagtgctgagacccccatatcccagagtccccagcctccctcaggttactctgcaccccacagatggtttgatggctgtgctgtatactggaggggagggcaggactctgggagaacagcacttctttcatgagacctttgttactcggtggttactgggtcctgtgcctgtccgttttggggcatgcagccctctatcatttttggctccgagaagagggcaaggggcccccgcagggtacttctgtgcttgccctcgccctgccagcaggcagctgtgcccctggcctgcccttcccgggaccccttattccaactcagctcctctttgcactggaatggggcactccaacacccctcagggaccaccctccccacagtatgcacttcacagcccacagcatgggcacttatgaggacaaagtgaatttaacctggaaaagaatgtatttgagagtttcttttaaataatcagcgggtgttggtgatttgtagcccttctgcccttaaatgcttccttgggcaagagctgtctgtcctccctgcaggaggctgagtgtgaagagtatcattcattgtttctctattaaattattttctcta

SEQ ID NO: 13612 - DNA, 2218 bp, Homo sapiens
gcggggcctccgtatccccacgtgggccctgcaggaactggcggggcgcgtgacccggcgaggcccagagacaggggaggggcgccgggagccgggcggatccgcgtccccgatgcgcgctgcatttccggcgggcggcgctgggggcagcgtggagccacccagtgctcggcccgccccgcaacccgccggaaccgccgcccgcagcgaggaagcgcccgcgcgggcgcaggcggccggaatggcggggcccggctggggtcccccgcgcctggacggcttcatcctcaccgagcgcctgggcagcggcacgtacgccacggtgtacaaggcctacgccaagaaggacactcgtgaagtggtagccataaagtgtgtagccaagaaaagtctgaacaaggcatcggtggagaacctcctcacggagattgagatcctcaagggcattcgacatccccacattgtgcagctgaaagactttcagtgggacagtgacaatatctacctcatcatggagttttgcgcagggggcgacctgtctcgcttcatccatacccgcaggattctgcctgagaaggtggcgcgtgtcttcatgcagcaattagctagcgccctgcaattcctgcatgaacggaatatctctcacctggatctgaagccacagaacattctactgagctccttggagaagccccacctaaaactggcagactttggtttcgcacaacacatgtccccgtgggatgagaagcacgtgctccgtggctcccccctctacatggcccccgagatggtgtgccagcggcagtatgacgcccgcgtggacctctggtccatgggggtcatcctgtatggtgagacctcttttccctgcttctcaccctgaggcctacagtttcctcaggcaaggcctctctgggccacttctgaagggttctgatgaaaactgactgctggcccagggcccctgctgaggggcgtcaggccaggcttgacccattccctcccagcctccgctctgcctcccttccacagaagccctcttcgggcagcccccctttgcctccaggtcgttctcggagctggaagagaagatccgtagcaaccgggtcatcgagctccccttgcggcccctgctctcccgagactgccgggacctactgcagcggctcctggagcgggaccccagccgtcgcatctccttccaggacttttttgcgcacccctgggtggacctggagcacatgcccagtggggagagtctggggcgagcaaccgccctggtggtgcaggctgtgaagaaagaccaggagggggattcagcagctgccttatcactctactgcaaggctctggacttctttgtacctgccctgcactatgaagtggatgcccagcggaaggaggcaattaaggcaaaggtggggcagtacgtgtcccgggctgaggagctcaaggccatcgtctcctcttccaatcaggccctgctgaggcaggggacctctgcccgagacctgctcagagagatggcccgggacaagccacgcctcctagctgccctggaagtggcttcagctgccatggccaaggaggaggccgccggcggggagcaggatgccctggacctgtaccagcacagcctgggggagctactgctgttgctggcagcggagcccccgggccggaggcgggagctgcttcacactgaggttcagaacctcatggcccgagctgaatacttgaaggagcaggtcaagatgagggaatctcgctgggaagctgacaccctggacaaagagggactgtcggaatctgttcgtagctcttgcacccttcagtgaccctagaagaatgattggacagatgtgagccatctggagcagaggggcactaacccaggctgacgccaagaatgaagtggcccactgcagccctggcgagcaggcttcttggatggacagtgctgactgggtctccccatctcttcaatggggctgataccttcacagcccacagcatgggcacttatgaggacaaagtgaatttaacctggaaaagaatgtatttgagagtttcttttaaataatcagcgggtgttggtgatttgtagcccttctgcccttaaatgcttccttgggcaagagctgtctgtcctccctgcaggaggctgagtgtgaagagtatcattcattgtttctctattaaattattttctcta

SEQ ID NO: 13613 - DNA, 502 bp, Homo sapiens
gccgcaccgcgctgcccattccctgccagaccttccccgcctgccaccgcaatggaggtgacgcggcctgcacacacctgtgcacagcggggctggctgggggatctcccggggtctagctgcacctgtcctgacttcctctcacctgttcacgtctgtgcccagggccctaaatcctcataccacatctccacccctttttcccttctgatgaggcaggggcagcctggaccattcaagggcaggggactgggaactaggggaggggtacctgaggcccctgcactcctcactcctccttcttccacctcagacttcacgggaggctaccgcctggggcgctccgcctccacctccggagtccggcaggtcgtgctccacacaccccggccctgcagccagcccagggatgccctgagccaggtgaggcttggtttttcttttatttgtgaaggagcaggtggagaaggcttgaatatgcaaagaaaagcaataaaggggc

SEQ ID NO: 13614 - DNA, 298 bp, Homo sapiens
ttagtgaattgtactcattcgtgttcattggctggaagttagtgaattaatgggaaaatgttaggatttatggctcactcttttgaaaaatgagtgtcatgtgaggggaagaatattaacccaggaatcaggaaaattagattcaaggtctgtctccaccatgggactctgggcatgccagttaattgctttcagtctaattacctataaagtgaagtagatggacttttaatgtgcatttgaatgaggacaaatggagtttcatggagtttcaagtagaatggaagctaaaacgttt

SEQ ID NO: 13615 - DNA, 435 bp, Homo sapiens
gagtataaaaaaaaagtccacacctagtcatattatgttcaaatcacagaaaactaaagacaaccagaaaacatgaaagaagctacagaagagaagaaatttacctaaggagggacaaggataagaattacatcagaaatctcattggcaaccatgcaagaaagaagaaggtagcgtgaaatatttaaagtgtttaaaggataaaactagaattctggatacagtgaaactatccttcaaaagcaaagaagaaatgctttctcagacaaaggctgaatctgtcaccagtagacctgccttgaaataaatgttgaaagaaatttttcggtcagaaatgaaatgacataggtcaaaaactgaaatctacgtaaagaaaagaagagctttcaagaaggaataaatgagcataaaataaactctttaatattccttaac

SEQ ID NO: 13616 - DNA, 386 bp, Homo sapiens
agagacggggtttcgccatgttgcccaggctggtcttgaactcctgagctcaagtgatccgcctgccttagcctctcaaagtgctgggattacaggcatgtgctactgtgcctggccagactttttataagcttagattatgagggtagtagtagtatgtccagcaggtatttttgacatatgtgctaggcactagattttctttttttttttttggttcaataacacaagtatgtattgaacacctactatttcctgacacagttaatattaggcattatcttgttgaacattagttaaaacaccatttttttttctcttgagatggagtctcgctctgtcgccgaggctggagtgcaacggtgtaatctcggctcactgcaacc

SEQ ID NO: 13617 - DNA, 553 bp, Homo sapiens
ctgagaatggcatccagacatggccttcaaggctctgtctgcctcggtgaccccatctccagccactgttcccagttcacatcggggaattctccggccctcctagagaggcagcccaggttgctaaagaggcacttcaagcacatttcaaagaacgcaagaattctggagaggtggagagcaggagaatagcacaagcaagagccagctccagggtcaggctggagatgggaggtcaggcatggtggggaggacgggaagtggggctgggttcaaagcctggctcagcttggaggacctggcaggggctcggggtgggggtggagtgtctcaatcctggtgcacactggagttattcgaagggcttttaaaaattatcaaagttgttccaggttcattccccgggtggcccacacgctgtttttaagtttagctctccaacccttcttcctggttctccccttcccttggaagaaagtccctggtccagcctgggtgttggcactggcatttgccctcccagggccactgggactgggaatccccaggaggg

SEQ ID NO: 13618 - DNA, 621 bp, Homo sapiens
actgaggacaggaaagagttcagttaagaaatccctaaggttctgtcaagacaattacttcactagatatgaagacgatagcaataactggattaggaatttagcaatatttagaatctaagagtaactatatggtgaacaataatcacataatttcgaatgaacaatccataaagttgtttccaattccgtatgaatttatgttgccaagcaatgtatttaaattcacagatcaataaaatcaataaagcagaattcttacatcaataaaacagaattcttacctcactactcagattttcctaaaatcacattacaaaattcgtaaccgtatttaagctatttttaaaactgttacataaacgcagtactgtaacaagccgcctttacgtacaaaacagtaaataaaatcaattttaatgtaaagaatattaacgcttccagaaaaagcattaataccacactgtagtaagagttttcctaataagataggcactttttagtcctacaaagttgggtaacagaaactccgccctgtgagaacgcttcctgaagattaaggcgcctctgggtgagacacggaagctagttctcctcccgccccgaaaagaaaaaaaaaaa

SEQ ID NO: 13619 - DNA, 314 bp, Homo sapiens
gatcagcctgggcaacatagtgagaccccatgtatacacaaagagaaaaaaaaaattctcctgcttgtagcttaggctattcatttttagaagcagtttacttaagcagccaatgcatcctagttctcttaaattaacactttagtttttcatttttttgagacagtctctcgctctgttgccaggctggaatgtggtggcgcagtcttggctcactgcaacctctacctccctggttcaagcgattctcctgcctcagcctcccgagtagctgggactacaggcgtgcgccaccatgcccagctagtttttgt

SEQ ID NO: 13620 - DNA, 571 bp, Homo sapiens
ccagaggatatttggtgatatctggaagatctggagatattttttcattgacatcctagggggatagtaagggcattcagcaggtagaggccaagggtgctactaaatgtcctacaatgtacagggcagcctcccacaacaaatctagctaaatgtcggtagtactgaggttgagaaaccctgtgctctagctggaagcctggtgtcctggctggttttaccctgaaggagtcccagtgtgatgactgcttgggagtggactttggtgaaggtggtgagagatacttgagcatgggagtggagagaaggtttggagggcaaacctccaaggatttcatgatccttgaaggacaaatattatcccaagttagttcaagggaagatcacacagagcttctggttaatagcagtggctgagctctgaaggcaccccttttcctcgaccaggaagctcctagggtaatgtagtggaccaggcatttcctaccctcctcccaactcccctgtaaacgtgtacactgatggccgggcacatctgtaatcctgtgtagctcacacctgtaatcccagc

SEQ ID NO: 13621 - DNA, 263 bp, Homo sapiens
caaatcaattgttgaaaatatttatttagaaaaaaatatttagttggaaaacagaagaaaccaaagaaaaacacacttcatgcaactgggcataatgacattttctttaaattagactctattttgaattaaaagagttttattataaaccgtgtgtttttggtttttctaagtatatagaaagcttgtataattcagatttatcaatttcctgatttaatgtagactttgacttttttattaaaaacctttgtattaaagca

SEQ ID NO: 13622 - DNA, 871 bp, Homo sapiens
cgcgagagttcagggaggccgccctgagattccggcgaggccgcgggtcccacctcccgggggcggggcgagggcggagcggggagaagggagctgacgggcgcccggccggctgcggtccgtgcggaggctgagccggccgcgggcgcgaccggaggcagtttccgttactatggcaatgacggcagggactacaacaacctttcctatgagcaaccatacccgggaaagagtgactgtagccaagctcacattggagaatttttatagcaacctaattttacagcatgaagagagagaaaccaggtatagtaagggctaatcaaaactttttttagttaaataagctgttgtgctgtgagtggaatagaaacttgtttaccatgaatgatatgaatattatggatccctgcatgctgtttttgagtttcctgtactgacagtgcacatagacatgtgttttattttcacagagtagtttcctgaggtgccccaagtcttgtgcatctatatacccgtatgacgtgccaattaacgttttaaacaaaccttttccaaacatgaaattatgatatgtctttacattttcttttaaagggatgcctggcttggtgtggtgtggctcatgcctataatcccagcactttgggaagccgaggtgggcagatcacctgaggtcaggagttcaagaccagcctggccaacatggtgaaaccccatctctactgaaaatacaaaacattagccgggtgtggtggcgggtgcctgtaatcccagctactcaggaggctgaggcaggagaattgcttgaaggcagcagtgagccaaggctgcagtgagccaagatcacaccactgcactccagcctggg

SEQ ID NO: 13623 - DNA, 5079 bp, Homo sapiens
cgcgagagttcagggaggccgccctgagattccggcgaggccgcgggtcccacctcccgggggcggggcgagggcggagcggggagaagggagctgacgggcgcccggccggctgcggtccgtgcggaggctgagccggccgcgggcgcgaccggaggcagtttccgttactatggcaatgacggcagggactacaacaacctttcctatgagcaaccatacccgggaaagagtgactgtagccaagctcacattggagaatttttatagcaacctaattttacagcatgaagagagagaaaccaggcagaagaaattagaagtggccatggaagaagaaggattagcagatgaagagaaaaagttacgtcgatcacaacacgctcgcaaagaaacagagttcttacggctcaaaaggaccagacttggcttggatgactttgagtctctgaaagttataggaagaggagcttttggagaggtgcggttggtccagaagaaagatacaggccatatctatgcaatgaagatattgagaaagtctgatatgcttgaaaaagagcaggtggcccatatccgagcagaaagagatattttggtagaagcagatggtgcctgggtggtgaagatgttttacagttttcaggataagaggaatctttatctaatcatggaatttctccctggaggtgacatgatgacattgctaatgaagaaagacaccttgacagaagaggaaacacagttctacatttcagagactgttctggcaatagatgcgatccaccagttgggtttcatccatcgggatattaagccagacaaccttttattggatgccaagggtcatgtaaaattatctgattttggtttatgtacgggattaaagaaagctcacaggactgaattttatagaaatctcacacacaacccaccaagtgacttctcatttcagaacatgaactcaaagaggaaagcagaaacttggaagaagaacaggagacaactggcatattccacagttgggacaccagattacattgctccagaagtattcatgcagactggttacaacaaattgtgtgactggtggtctttgggagtgattatgtatgaaatgctaataggatatccacctttctgctctgaaacacctcaagaaacatacagaaaagtgatgaactggaaagaaactctggtatttcctccagaggtacctatatctgagaaagccaaggacttaattctcagattttgtattgattctgaaaacagaattggaaatagtggagtagaagaaataaaaggtcatcccttttttgaaggtgtcgactgggagcacataagggaaaggccagcagcaatccctatagaaatcaaaagcattgatgatacttcaaattttgatgacttccctgaatctgatattttacaaccagtgccaaataccacagaaccggactacaaatccaaagactgggtttttctcaattatacctataaaaggtttgaagggttgactcaacgtggctctatccccacctacatgaaagctgggaagttatgaatgaagataacattcacccataaccaagagaactcaggtagctgcatcaccaggcttgcttggcgtagataacaatacactgaaatactcctgaagatggtggtgcttattgactacaagaggaaattctacaggattaggatttctaagactactataggaattggttggcagtgccagctggctcttttttttaatattttattatttttgttaactttattatatgaaggtactggaataaaaggaacagacatccctttctaactgcactgcctacatgcgtattaaggtccattctgcctgtgtgtgctgtggctttgaactgtaacacctctaatcaattcaggagaaacacatatcatttaaagcaacataggctaacctgtaggtaacactgcagtattgatgttttactgcaaatcttatgggtctagataatcagtaaaagccatcttccatagttggtgttagaacattgccctattggtttggacatctgtagaatatatatgaagacaatttctgtaatggttttaagagatttaaaaagaaattcactggttctttacaaaatagaatttatcatcaagttattacacaaacttcacagtaaggagtgacaagtttataataaggaagacaaagtttaacaccttcactcaagcactccactaatatatttacgttgcattcagaaatactgatgaccttcatatacgtagtctgtatactcatagggagatgtactgtattatataacatgtaaagttgattttcttgtgacaagagaacttctttttttaacaagaggacatggcattattttaatttgattatggtgagttgaatttaagacatgaccatgaaggctgcttgtagaattagtgtatttttattaaactatttttttaaatgtcaaacttctatcatgtaaatggacttatagagaacaaaaagctatttactttggttttctagaaagttgttacatatcatggctggttaacttttatttcttttgatgaaaatttttcctttgatagtacttgtattattgtgccattattttcttatgctccaaatgtaccaaagatcttgaacagagtggatgttcacaactgagtagaattttcctttcctgtgggcatgctgtgttcagacctgacagatctttgatagaggtcagcttattaaagggcaatattgttcttgtttagctacatcactgtggtgaatatagatggaattaaggaagtaaatgcaggccagggggttgtgatgagaggataggggagataatatcagcatcaaattctttgggtatctctctaagaattaaataatcttttctagcttaatattttaattctaattcaaacaactctgaggttttggtttcattagtaatagttgaggaataatatactagcaaagaatggcctaatgtttgtcataactgttaatggatgaaattttttaaagatacaaccatgataaccattataaatgatctatgatcaaaatctaaagtgatgaattatttgtaggaatgtcttcctaatggggaagaattgcataggagcattatgcaaatctacacaagcttttataaatgttgctgctgggtagctccacagtgtttcataaggccatcctgtttcccccaactcccccatttttggtttgtttctttttaaatatttgttgagtacttacgtgtttatctaacagttcacttccatttttctagtctggattttttgagtatttaggaaagagagctattaaaaactctggggatttctcaatgtgactaactctaatttttctaattataactgcctttaattaacataatattaacttttgctgaggtttatgagattttctcaccccacatcgctcccctttttttaaaaaggactgttttgctagtgtgataatgaataggtaagatatgagataattgcaacattgtctagttctagtatggtaactattcttgaaatggtattgaaaaataccgttaattcaaattgacagagattgataaaaagaaactgatttacctaagtttactttttaattgcataatagagcattttttgttttgagttccctcattcttattaccagaaagagcttgcaaatagttttactttcttggcactggaagggtagttctggaaagctactttgttgagagtctcattcttccctggagttaatagagtgattcacaatctttggggttttctcctcatcaaaagcatttcttaagtgcctatctaaaagcaattaaagactgtgtctgccctttagaagctaagaatttgattcatgatgcaaattaactagataatttgcaaagtacccttgagattgaattttctctattatatatttcccatatttcaggtgaataatttaatttaaatgacaaaaccctatctagtcaactgggcataatgacattttctttaaattagactctattttgaattaaaagagttttattataaaccgtgtgtttttggtttttctaagtatatagaaagcttgtataattcagatttatcaatttcctgatttaatgtagactttgacttttttattaaaaacctttgtattaaagcaagttatgttatttttcttttatgcatttattactaacatagctttaaatctttaaatgtattgaagcattgtgctgtctgaaaataaggaattgcttataaaccagccacttctgaatacaatatgtagctgatttaataagctagttagtgaatggaaaataagtgtggagtattaaaaatgttctttggttggtaaggcctaagatagggtttcatttatttctatactttttctgttttttaaacacctgcatatttttatgtaaatctctaaatttaaaatattttaagtacatttatttttggtgttttattgtataaaaccttagacaatcaatcagtcagtctttactgacaggagcagcagctatctgtcttttgctgatctacaaataaatgaattgagaatttagtccatagaggtccctggctaccaaacacattctcctttgaattgttaaaattcagaacattcaaaataactgttttgctacaacccatgattattttcctgttgtgtttatttaaatttactttctctttagaagtgcacttatttctgaaaaatcttaatgaaacaaacgcttagaacaaatataaatatgagacacttgggactactagagatattttagatttttatgaaaaaaatgtgaggggatattgctgctttaaaaaggaataaagtaataaaaatatatctcagctatttttttaaagcaatataattcagcaattgtctagaaaagtaatcatgaggctactgagtttggtgttcagttactgagtttcaaaaatgttttggtggcatgaggacaaaatttcattgaaggtaagataagaataaaaactatgtttacaaaaaaactg

SEQ ID NO: 13624 - DNA, 4207 bp, Homo sapiens
cgcgagagttcagggaggccgccctgagattccggcgaggccgcgggtcccacctcccgggggcggggcgagggcggagcggggagaagggagctgacgggcgcccggccggctgcggtccgtgcggaggctgagccggccgcgggcgcgaccggaggcagtttccgttactatggcaatgacggcagggactacaacaacctttcctatgagcaaccatacccgggaaagagtgactgtagccaagctcacattggagaatttttatagcaacctaattttacagcatgaagagagagaaaccaggcagaagaaattagaagtggccatggaagaagaaggattagcagatgaagagaaaaagttacgtcgatcacaacacgctcgcaaagaaacagagttcttacggctcaaaaggaccagacttggcttggatgactttgagtctctgaaagttataggaagaggagcttttggagaggtgcggttggtccagaagaaagatacaggccatatctatgcaatgaagatattgagaaagtctgatatgcttgaaaaagagcaggtggcccatatccgagcagaaagagatattttggtagaagcagatggtgcctgggtggtgaagatgttttacagttttcaggataagaggaatctttatctaatcatggaatttctccctggaggtgacatgatgacattgctaatgaagaaagacaccttgacagaagaggaaacacagttctacatttcagagactgttctggcaatagatgcgatccaccagttgggtttcatccatcgggatattaagccagacaaccttttattggatgccaagggtcatgtaaaattatctgattttggtttatgtacgggattaaagaaagctcacaggactgaattttatagaaatctcacacacaacccaccaagtgacttctcatttcagaacatgaactcaaagaggaaagcagaaacttggaagaagaacaggagacaactggcatattccacagttgggacaccagattacattgctccagaagtattcatgcagactggttacaacaaattgtgtgactggtggtctttgggagtgattatgtatgaaatgctaataggatatccacctttctgctctgaaacacctcaagaaacatacagaaaagtgatgaactggaaagaaactctggtatttcctccagaggtacctatatctgagaaagccaaggacttaattctcagattttgtattgattctgaaaacagaattggaaatagtggagtagaagaaataaaaggtcatcccttttttgaaggtgtcgactgggagcacataagggaaaggccagcagcaatccctatagaaatcaaaagcattgatgatacttcaaattttgatgacttccctgaatctgatattttacaaccagtgccaaataccacagaaccggactacaaatccaaagactgggtttttctcaattatacctataaaaggtttgaagggttgactcaacgtggctctatccccacctacatgaaagctgggaagttatgaatgaagataacattcacccataaccaagagaactcaggtagctgcatcaccaggcttgcttggcgtagataacaatacactgaaatactcctgaagatggtggtgcttattgactacaagaggaaattctacaggattaggatttctaagactactataggaattggttggcagtgccagctggctcttttttttaatattttattatttttgttaactttattatatgaaggtactggaataaaaggaacagacatccctttctaactgcactgcctacatgcgtattaaggtccattctgcctgtgtgtgctgtggctttgaactgtaacacctctaatcaattcaggagaaacacatatcatttaaagcaacataggctaacctgtaggtaacactgcagtattgatgttttactgcaaatcttatgggtctagataatcagtaaaagccatcttccatagttggtgttagaacattgccctattggtttggacatctgtagaatatatatgaagacaatttctgtaatggttttaagagatttaaaaagaaattcactggttctttacaaaatagaatttatcatcaagttattacacaaacttcacagtaaggagtgacaagtttataataaggaagacaaagtttaacaccttcactcaagcactccactaatatatttacgttgcattcagaaatactgatgaccttcatatacgtagtctgtatactcatagggagatgtactgtattatataacatgtaaagttgattttcttgtgacaagagaacttctttttttaacaagaggacatggcattattttaatttgattatggtgagttgaatttaagacatgaccatgaaggctgcttgtagaattagtgtatttttattaaactatttttttaaatgtcaaacttctatcatgtaaatggacttatagagaacaaaaagctatttactttggttttctagaaagttgttacatatcatggctggttaacttttatttcttttgatgaaaatttttcctttgatagtacttgtattattgtgccattattttcttatgctccaaatgtaccaaagatcttgaacagagtggatgttcacaactgagtagaattttcctttcctgtgggcatgctgtgttcagacctgacagatctttgatagaggtcagcttattaaagggcaatattgttcttgtttagctacatcactgtggtgaatatagatggaattaaggaagtaaatgcaggccagggggttgtgatgagaggataggggagataatatcagcatcaaattctttgggtatctctctaagaattaaataatcttttctagcttaatattttaattctaattcaaacaactctgaggttttggtttcattagtaatagttgaggaataatatactagcaaagaatggcctaatgtttgtcataactgttaatggatgaaattttttaaagatacaaccatgataaccattataaatgatctatgatcaaaatctaaagtgatgaattatttgtaggaatgtcttcctaatggggaagaattgcataggagcattatgcaaatctacacaagcttttataaatgttgctgctgggtagctccacagtgtttcataaggccatcctgtttcccccaactcccccatttttggtttgtttctttttaaatatttgttgagtacttacgtgtttatctaacagttcacttccatttttctagtctggattttttgagtatttaggaaagagagctattaaaaactctggggatttctcaatgtgactaactctaatttttctaattataactgcctttaattaacataatattaacttttgctgaggtttatgagattttctcaccccacatcgctcccctttttttaaaaaggactgttttgctagtgtgataatgaataggtaagatatgagataattgcaacattgtctagttctagtatggtaactattcttgaaatggtattgaaaaataccgttaattcaaattgacagagattgataaaaagaaactgatttacctaagtttactttttaattgcataatagagcattttttgttttgagttccctcattcttattaccagaaagagcttgcaaatagttttactttcttggcactggaagggtagttctggaaagctactttgttgagagtctcattcttccctggagttaatagagtgattcacaatctttggggttttctcctcatcaaaagcatttcttaagtgcctatctaaaagcaattaaagactgtgtctgccctttagaagctaagaatttgattcatgatgcaaattaactagataatttgcaaagtacccttgagattgaattttctctattatatatttcccatatttcaggtgaataatttaatttaaatgacaaaaccctatctagtcaactgggcataatgacattttctttaaattagactctattttgaattaaaagagttttattataaaccgtgtgtttttggtttttctaagtatatagaaagcttgtataattcagatttatcaatttcctgatttaatgtagactttgacttttttattaaaaacctttgtattaaagca

SEQ ID NO: 13625 - DNA, 4125 bp, Homo sapiens
tgtgtatatgcggggaaacgccatatcgggggcaccgattattaggggaactaggcagggactacaacaacctttcctatgagcaaccatacccgggaaagagtgactgtagccaagctcacattggagaatttttatagcaacctaattttacagcatgaagagagagaaaccagaggagaaaactggaaatcattcaacaagcagcactgaagtgcctaggggcagaagaaattagaagtggccatggaagaagaaggattagcagatgaagagaaaaagttacgtcgatcacaacacgctcgcaaagaaacagagttcttacggctcaaaaggaccagacttggcttggatgactttgagtctctgaaagttataggaagaggagcttttggagaggtgcggttggtccagaagaaagatacaggccatatctatgcaatgaagatattgagaaagtctgatatgcttgaaaaagagcaggtggcccatatccgagcagaaagagatattttggtagaagcagatggtgcctgggtggtgaagatgttttacagttttcaggataagaggaatctttatctaatcatggaatttctccctggaggtgacatgatgacattgctaatgaagaaagacaccttgacagaagaggaaacacagttctacatttcagagactgttctggcaatagatgcgatccaccagttgggtttcatccatcgggatattaagccagacaaccttttattggatgccaagggtcatgtaaaattatctgattttggtttatgtacgggattaaagaaagctcacaggactgaattttatagaaatctcacacacaacccaccaagtgacttctcatttcagaacatgaactcaaagaggaaagcagaaacttggaagaagaacaggagacaactggcatattccacagttgggacaccagattacattgctccagaagtattcatgcagactggttacaacaaattgtgtgactggtggtctttgggagtgattatgtatgaaatgctaataggatatccacctttctgctctgaaacacctcaagaaacatacagaaaagtgatgaactggaaagaaactctggtatttcctccagaggtacctatatctgagaaagccaaggacttaattctcagattttgtattgattctgaaaacagaattggaaatagtggagtagaagaaataaaaggtcatcccttttttgaaggtgtcgactgggagcacataagggaaaggccagcagcaatccctatagaaatcaaaagcattgatgatacttcaaattttgatgacttccctgaatctgatattttacaaccagtgccaaataccacagaaccggactacaaatccaaagactgggtttttctcaattatacctataaaaggtttgaagggttgactcaacgtggctctatccccacctacatgaaagctgggaagttatgaatgaagataacattcacccataaccaagagaactcaggtagctgcatcaccaggcttgcttggcgtagataacaatacactgaaatactcctgaagatggtggtgcttattgactacaagaggaaattctacaggattaggatttctaagactactataggaattggttggcagtgccagctggctcttttttttaatattttattatttttgttaactttattatatgaaggtactggaataaaaggaacagacatccctttctaactgcactgcctacatgcgtattaaggtccattctgcctgtgtgtgctgtggctttgaactgtaacacctctaatcaattcaggagaaacacatatcatttaaagcaacataggctaacctgtaggtaacactgcagtattgatgttttactgcaaatcttatgggtctagataatcagtaaaagccatcttccatagttggtgttagaacattgccctattggtttggacatctgtagaatatatatgaagacaatttctgtaatggttttaagagatttaaaaagaaattcactggttctttacaaaatagaatttatcatcaagttattacacaaacttcacagtaaggagtgacaagtttataataaggaagacaaagtttaacaccttcactcaagcactccactaatatatttacgttgcattcagaaatactgatgaccttcatatacgtagtctgtatactcatagggagatgtactgtattatataacatgtaaagttgattttcttgtgacaagagaacttctttttttaacaagaggacatggcattattttaatttgattatggtgagttgaatttaagacatgaccatgaaggctgcttgtagaattagtgtatttttattaaactatttttttaaatgtcaaacttctatcatgtaaatggacttatagagaacaaaaagctatttactttggttttctagaaagttgttacatatcatggctggttaacttttatttcttttgatgaaaatttttcctttgatagtacttgtattattgtgccattattttcttatgctccaaatgtaccaaagatcttgaacagagtggatgttcacaactgagtagaattttcctttcctgtgggcatgctgtgttcagacctgacagatctttgatagaggtcagcttattaaagggcaatattgttcttgtttagctacatcactgtggtgaatatagatggaattaaggaagtaaatgcaggccagggggttgtgatgagaggataggggagataatatcagcatcaaattctttgggtatctctctaagaattaaataatcttttctagcttaatattttaattctaattcaaacaactctgaggttttggtttcattagtaatagttgaggaataatatactagcaaagaatggcctaatgtttgtcataactgttaatggatgaaattttttaaagatacaaccatgataaccattataaatgatctatgatcaaaatctaaagtgatgaattatttgtaggaatgtcttcctaatggggaagaattgcataggagcattatgcaaatctacacaagcttttataaatgttgctgctgggtagctccacagtgtttcataaggccatcctgtttcccccaactcccccatttttggtttgtttctttttaaatatttgttgagtacttacgtgtttatctaacagttcacttccatttttctagtctggattttttgagtatttaggaaagagagctattaaaaactctggggatttctcaatgtgactaactctaatttttctaattataactgcctttaattaacataatattaacttttgctgaggtttatgagattttctcaccccacatcgctcccctttttttaaaaaggactgttttgctagtgtgataatgaataggtaagatatgagataattgcaacattgtctagttctagtatggtaactattcttgaaatggtattgaaaaataccgttaattcaaattgacagagattgataaaaagaaactgatttacctaagtttactttttaattgcataatagagcattttttgttttgagttccctcattcttattaccagaaagagcttgcaaatagttttactttcttggcactggaagggtagttctggaaagctactttgttgagagtctcattcttccctggagttaatagagtgattcacaatctttggggttttctcctcatcaaaagcatttcttaagtgcctatctaaaagcaattaaagactgtgtctgccctttagaagctaagaatttgattcatgatgcaaattaactagataatttgcaaagtacccttgagattgaattttctctattatatatttcccatatttcaggtgaataatttaatttaaatgacaaaaccctatctagtcaactgggcataatgacattttctttaaattagactctattttgaattaaaagagttttattataaaccgtgtgtttttggtttttctaagtatatagaaagcttgtataattcagatttatcaatttcctgatttaatgtagactttgacttttttattaaaaacctttgtattaaagca

SEQ ID NO: 13626 - DNA, 4154 bp, Homo sapiens
cgcgagagttcagggaggccgccctgagattccggcgaggccgcgggtcccacctcccgggggcggggcgagggcggagcggggagaagggagctgacgggcgcccggccggctgcggtccgtgcggaggctgagccggccgcgggcgcgaccggaggcagtttccgttactatggcaatgacggcagggactacaacaacctttcctatgagcaaccatacccgggaaagagtgactgtagccaagctcacattggagaatttttatagcaacctaattttacagcatgaagagagagaaaccaggcagaagaaattagaagtggccatggaagaagaaggattagcagatgaagagaaaaagttacgtcgatcacaacacgctcgcaaagaaacagagttcttacggctcaaaaggaccagacttggcttggatgactttgagtctctgaaagttataggaagaggagcttttggagaggtgcggttggtccagaagaaagatacaggccatatctatgcaatgaagatattgagaaagtctgatatgcttgaaaaagagcaggtggcccatatccgagcagaaagagatattttggtagaagcagatggtgcctgggtggtgaagatgttttacagttttcaggataagaggaatctttatctaatcatggaatttctccctggaggtgacatgatgacattgctaatgaagaaagacaccttgacagaagaggaaacacagttctacatttcagagactgttctggcaatagatgcgatccaccagttgggtttcatccatcgggatattaagccagacaaccttttattggatgccaagggtcatgtaaaattatctgattttggtttatgtacgggattaaagaaagctcacaggactgaattttatagaaatctcacacacaacccaccaagtgacttctcatttcagaacatgaactcaaagaggaaagcagaaacttggaagaagaacaggagacaactggcatattccacagttgggacaccagattacattgctccagaagtattcatgcagactggttacaacaaattgtgtgactggtggtctttgggagtgattatgtatgaaatgctaataggatatccacctttctgctctgaaacacctcaagaaacatacagaaaagtgatgaactggaaagaaactctggtatttcctccagaggtacctatatctgagaaagccaaggacttaattctcagattttgtattgattctgaaaacagaattggaaatagtggagtagaagaaataaaaggtcatcccttttttgaaggtgtcgactgggagcacataagggaaaggccagcagcaatccctatagaaatcaaaagcattgccaaataccacagaaccggactacaaatccaaagactgggtttttctcaattatacctataaaaggtttgaagggttgactcaacgtggctctatccccacctacatgaaagctgggaagttatgaatgaagataacattcacccataaccaagagaactcaggtagctgcatcaccaggcttgcttggcgtagataacaatacactgaaatactcctgaagatggtggtgcttattgactacaagaggaaattctacaggattaggatttctaagactactataggaattggttggcagtgccagctggctcttttttttaatattttattatttttgttaactttattatatgaaggtactggaataaaaggaacagacatccctttctaactgcactgcctacatgcgtattaaggtccattctgcctgtgtgtgctgtggctttgaactgtaacacctctaatcaattcaggagaaacacatatcatttaaagcaacataggctaacctgtaggtaacactgcagtattgatgttttactgcaaatcttatgggtctagataatcagtaaaagccatcttccatagttggtgttagaacattgccctattggtttggacatctgtagaatatatatgaagacaatttctgtaatggttttaagagatttaaaaagaaattcactggttctttacaaaatagaatttatcatcaagttattacacaaacttcacagtaaggagtgacaagtttataataaggaagacaaagtttaacaccttcactcaagcactccactaatatatttacgttgcattcagaaatactgatgaccttcatatacgtagtctgtatactcatagggagatgtactgtattatataacatgtaaagttgattttcttgtgacaagagaacttctttttttaacaagaggacatggcattattttaatttgattatggtgagttgaatttaagacatgaccatgaaggctgcttgtagaattagtgtatttttattaaactatttttttaaatgtcaaacttctatcatgtaaatggacttatagagaacaaaaagctatttactttggttttctagaaagttgttacatatcatggctggttaacttttatttcttttgatgaaaatttttcctttgatagtacttgtattattgtgccattattttcttatgctccaaatgtaccaaagatcttgaacagagtggatgttcacaactgagtagaattttcctttcctgtgggcatgctgtgttcagacctgacagatctttgatagaggtcagcttattaaagggcaatattgttcttgtttagctacatcactgtggtgaatatagatggaattaaggaagtaaatgcaggccagggggttgtgatgagaggataggggagataatatcagcatcaaattctttgggtatctctctaagaattaaataatcttttctagcttaatattttaattctaattcaaacaactctgaggttttggtttcattagtaatagttgaggaataatatactagcaaagaatggcctaatgtttgtcataactgttaatggatgaaattttttaaagatacaaccatgataaccattataaatgatctatgatcaaaatctaaagtgatgaattatttgtaggaatgtcttcctaatggggaagaattgcataggagcattatgcaaatctacacaagcttttataaatgttgctgctgggtagctccacagtgtttcataaggccatcctgtttcccccaactcccccatttttggtttgtttctttttaaatatttgttgagtacttacgtgtttatctaacagttcacttccatttttctagtctggattttttgagtatttaggaaagagagctattaaaaactctggggatttctcaatgtgactaactctaatttttctaattataactgcctttaattaacataatattaacttttgctgaggtttatgagattttctcaccccacatcgctcccctttttttaaaaaggactgttttgctagtgtgataatgaataggtaagatatgagataattgcaacattgtctagttctagtatggtaactattcttgaaatggtattgaaaaataccgttaattcaaattgacagagattgataaaaagaaactgatttacctaagtttactttttaattgcataatagagcattttttgttttgagttccctcattcttattaccagaaagagcttgcaaatagttttactttcttggcactggaagggtagttctggaaagctactttgttgagagtctcattcttccctggagttaatagagtgattcacaatctttggggttttctcctcatcaaaagcatttcttaagtgcctatctaaaagcaattaaagactgtgtctgccctttagaagctaagaatttgattcatgatgcaaattaactagataatttgcaaagtacccttgagattgaattttctctattatatatttcccatatttcaggtgaataatttaatttaaatgacaaaaccctatctagtcaactgggcataatgacattttctttaaattagactctattttgaattaaaagagttttattataaaccgtgtgtttttggtttttctaagtatatagaaagcttgtataattcagatttatcaatttcctgatttaatgtagactttgacttttttattaaaaacctttgtattaaagca

SEQ ID NO: 13627 - DNA, 4153 bp, Homo sapiens
cgcgagagttcagggaggccgccctgagattccggcgaggccgcgggtcccacctcccgggggcggggcgagggcggagcggggagaagggagctgacgggcgcccggccggctgcggtccgtgcggaggctgagccggccgcgggcgcgaccggaggcagtttccgttactatggcaatgacggcagggactacaacaacctttcctatgagcaaccatacccgggaaagagtgactgtagccaagctcacattggagaatttttatagcaacctaattttacagcatgaagagagagaaaccaggcagaagaaattagaagtggccatggaagaagaaggattagcagatgaagagaaaaagttacgtcgatcacaacacgctcgcaaagaaacagagttcttacggctcaaaaggaccagacttggcttggatgactttgagtctctgaaagttataggaagaggagcttttggagaggtgcggttggtccagaagaaagatacaggccatatctatgcaatgaagatattgagaaagtctgatatgcttgaaaaagagcaggtggcccatatccgagcagaaagagatattttggtagaagcagatggtgcctgggtggtgaagatgttttacagttttcaggataagaggaatctttatctaatcatggaatttctccctggaggtgacatgatgacattgctaatgaagaaagacaccttgacagaagaggaaacacagttctacatttcagagactgttctggcaatagatgcgatccaccagttgggtttcatccatcgggatattaagccagacaaccttttattggatgccaagggtcatgtaaaattatctgattttggtttatgtacgggattaaagaaagctcacaggactgaattttatagaaatctcacacacaacccaccaagtgacttctcatttcagaacatgaactcaaagaggaaagcagaaacttggaagaagaacaggagacaactggcatattccacagttgggacaccagattacattgctccagaagtattcatgcagactggttacaacaaattgtgtgactggtggtctttgggagtgattatgtatgaaatgctaataggatatccacctttctgctctgaaacacctcaagaaacatacagaaaagtgatgaactggaaagaaactctggtatttcctccagaggtacctatatctgagaaagccaaggacttaattctcagattttgtattgattctgaaaacagaattggaaatagtggagtagaagaaataaaaggtcatcccttttttgaaggtgtcgactgggagcacataagggaaaggccagcagcaatccctatagaaatcaaaagcattgatgatacttcaaattttgatgacttccctgaatctgatattttacaaccagtgccaaataccacagaaccggactacaaatccaaagactgggtttttctcaattatacctataaaaggtttgaagggttgactcaacgtggctctatccccacctacatgaaagctgggaagttatgaatgaagataacattcacccataaccaagagaactcaggtagctgcatcaccaggcttgcttggcgtagataacaatacactgaaatactcctgaagatggtggtgcttattgactacaagaggaaattctacaggattaggatttctaagactactataggaattggttggcagtgccagctggctcttttttttaatattttattatttttgttaactttattatatgaaggtactggaataaaaggaacagacatccctttctaactgcactgcctacatgcgtattaaggtccattctgcctgtgtgtgctgtggctttgaactgtaacacctctaatcaattcaggagaaacacatatcatttaaagcaacataggctaacctgtaggtaacactgcagtattgatgttttactgcaaatcttatgggtctagataatcagtaaaagccatcttccatagttggtgttagaacattgccctattggtttggacatctgtagaatatatatgaagacaatttctgtaatggttttaagagatttaaaaagaaattcactggttctttacaaaatagaatttatcatcaagttattacacaaacttcacagtaaggagtgacaagtttataataaggaagacaaagtttaacaccttcactcaagcactccactaatatatttacgttgcattcagaaatactgatgaccttcatatacgtagtctgtatactcatagggagatgtactgtattatataacatgtaaagttgattttcttgtgacaagagaacttctttttttaacaagaggacatggcattattttaatttgattatggtgagttgaatttaagacatgaccatgaaggctgcttgtagaattagtgtatttttattaaactatttttttaaatgtcaaacttctatcatgtaaatggacttatagagaacaaaaagctatttactttggttttctagaaagttgttacatatcatggctggttaacttttatttcttttgatgaaaatttttcctttgatagtacttgtattattgtgccattattttcttatgctccaaatgtaccaaagatcttgaacagagtggatgttcacaactgagtagaattttcctttcctgtgggcatgctgtgttcagacctgacagatctttgatagaggtcagcttattaaagggcaatattgttcttgtttagctacatcactgtggtgaatatagatggaattaaggaagtaaatgcaggccagggggttgtgatgagaggataggggagataatatcagcatcaaattctttgggtatctctctaagaattaaataatcttttctagcttaatattttaattctaattcaaacaactctgaggttttggtttcattagtaatagttgaggaataatatactagcaaagaatggcctaatgtttgtcataactgttaatggatgaaattttttaaagatacaaccatgataaccattataaatgatctatgatcaaaatctaaagtgatgaattatttgtaggaatgtcttcctaatggggaagaattgcataggagcattatgcaaatctacacaagcttttataaatgttgctgctgggtagctccacagtgtttcataaggccatcctgtttcccccaactcccccatttttggtttgtttctttttaaatatttgttgagtacttacgtgtttatctaacagttcacttccatttttctagtctggattttttgagtatttaggaaagagagctattaaaaactctggggatttctcaatgtgactaactctaatttttctaattataactgcctttaattaacataatattaacttttgctgaggtttatgagattttctcaccccacatcgctcccctttttttaaaaaggactgttttgctagtgtgataatgaataggtaagatatgagataattgcaacattgtctagttctagtatggtaactattcttgaaatggtattgaaaaataccgttaattcaaattgacagagattgatatgttttgagttccctcattcttattaccagaaagagcttgcaaatagttttactttcttggcactggaagggtagttctggaaagctactttgttgagagtctcattcttccctggagttaatagagtgattcacaatctttggggttttctcctcatcaaaagcatttcttaagtgcctatctaaaagcaattaaagactgtgtctgccctttagaagctaagaatttgattcatgatgcaaattaactagataatttgcaaagtacccttgagattgaattttctctattatatatttcccatatttcaggtgaataatttaatttaaatgacaaaaccctatctagtcaactgggcataatgacattttctttaaattagactctattttgaattaaaagagttttattataaaccgtgtgtttttggtttttctaagtatatagaaagcttgtataattcagatttatcaatttcctgatttaatgtagactttgacttttttattaaaaacctttgtattaaagca

SEQ ID NO: 13628 - DNA, 3687 bp, Homo sapiens
  misc_feature (3637)..(3637): n is a, c, g, or t
cgcgagagttcagggaggccgccctgagattccggcgaggccgcgggtcccacctcccgggggcggggcgagggcggagcggggagaagggagctgacgggcgcccggccggctgcggtccgtgcggaggctgagccggccgcgggcgcgaccggaggcagtttccgttactatggcaatgacggcagggactacaacaacctttcctatgagcaaccatacccgggaaagagtgactgtagccaagctcacattggagaatttttatagcaacctaattttacagcatgaagagagagaaaccaggcagaagaaattagaagtggccatggaagaagaaggattagcagatgaagagaaaaagttacgtcgatcacaacacgctcgcaaagaaacagagttcttacggctcaaaaggaccagacttggcttggatgactttgagtctctgaaagttataggaagaggagcttttggagaggtgcggttggtccagaagaaagatacaggccatatctatgcaatgaagatattgagaaagtctgatatgcttgaaaaagagcaggtggcccatatccgagcagaaagagatattttggtagaagcagatggtgcctgggtggtgaagatgttttacagttttcaggataagaggaatctttatctaatcatggaatttctccctggaggtgacatgatgacattgctaatgaagaaagacaccttgacagaagaggaaacacagttctacatttcagagactgttctggcaatagatgcgatccaccagttgggtttcatccatcgggatattaagccagacaaccttttattggatgccaagggtcatgtaaaattatctgattttggtttatgtacgggattaaagaaagctcacaggactgaattttatagaaatctcacacacaacccaccaagtgacttctcatttcagaacatgaactcaaagaggaaagcagaaacttggaagaagaacaggagacaactggcatattccacagttgggacaccagattacattgctccagaagtattcatgcagactggttacaacaaattgtgtgactggtggtctttgggagtgattatgtatgaaatgctaataggatatccacctttctgctctgaaacacctcaagaaacatacagaaaagtgatgaactggaaagaaactctggtatttcctccagaggtacctatatctgagaaagccaaggacttaattctcagattttgtattgattctgaaaacagaattggaaatagtggagtagaagaaataaaaggtcatcccttttttgaaggtgtcgactgggagcacataagggaaaggccagcagcaatccctatagaaatcaaaagcattgatgatacttcaaattttgatgacttccctgaatctgatattttacaaccagtgccaaataccacagaaccggactacaaatccaaagactgggtttttctcaattatacctataaaaggtttgaagggttgactcaacgtggctctatccccacctacatgaaagctgggaagttatgaatgaagataacattcacccataaccaagagaactcaggtagctgcatcaccaggcttgcttggcgtagataacaatacactgaaatactcctgaagatggtggtgcttattgactacaagaggaaattctacaggattaggatttctaagactactataggaattggttggcagtgccagctggctcttttttttaatattttattatttttgttaactttattatatgaaggtactggaataaaaggaacagacatccctttctaactgcactgcctacatgcgtattaaggtccattctgcctgtgtgtgctgtggctttgaactgtaacacctctaatcaattcaggagaaacacatatcatttaaagcaacataggctaacctgtaggtaacactgcagtattgatgttttactgcaaatcttatgggtctagataatcagtaaaagccatcttccatagttggtgttagaacattgccctattggtttggacatctgtagaatatatatgaagacaatttctgtaatggttttaagagatttaaaaagaaattcactggttctttacaaaatagaatttatcatcaagttattacacaaacttcacagtaaggagtgacaagtttataataaggaagacaaagtttaacaccttcactcaagcactccactaatatatttacgttgcattcagaaatactgatgaccttcatatacgtagtctgtatactcatagggagatgtactgtattatataacatgtaaagttgattttcttgtgacaagagaacttctttttttaacaagaggacatggcattattttaatttgattatggtgagttgaatttaagacatgaccatgaaggctgcttgtagaattagtgtatttttattaaactatttttttaaatgtcaaacttctatcatgtaaatggacttatagagaacaaaaagctatttactttggttttctagaaagttgttacatatcatggctggttaacttttatttcttttgatgaaaatttttcctttgatagtacttgtattattgtgccattattttcttatgctccaaatgtaccaaagatcttgaacagagtggatgttcacaactgagtagaattttcctttcctgtgggcatgctgtgttcagacctgacagatctttgatagaggtcagcttattaaagggcaatattgttcttgtttagctacatcactgtggtgaatatagatggaattaaggaagtaaatgcaggccagggggttgtgatgagaggataggggagataatatcagcatcaaattctttgggtatctctctaagaattaaataatcttttctagcttaatattttaattctaattcaaacaactctgaggttttggtttcattagtaatagttgaggaataatatactagcaaagaatggcctaatgtttgtcataactgttaatggatgaaattttttaaagatacaaccatgataaccattataaatgatctatgatcaaaatctaaagtgatgaattatttgtaggaatgtcttcctaatggggaagaattgcataggagcattatgcaaatctacacaagcttttataaatgttgctgctgggtagctccacagtgtttcataaggccatcctgtttcccccaactcccccatttttggtttgtttctttttaaatatttgttgagtacttacgtgtttatctaacagttcacttccatttttctagtctggattttttgagtatttaggaaagagagctattaaaaactctggggatttctcaatgtgactaactctaatttttctaattataactgcctttaattaacataatattaacttttgctgaggtttatgagattttctcaccccacatcgctcccctttttttaaaaaggactgttttgctagtgtgataatgaataggtaagatatgagataattgcaacattgtctagttctagtatggtaactattcttgaaatggtattgaaaaataccgttaattcaaattgacagagattgataaaatgaacctgattnccccctaattaccttttaaaacgcataattttgggggtcccccgcctcct

SEQ ID NO: 13629 - DNA, 660 bp, Homo sapiens
tagatattttttaaatgttaagaatgctggtttgacgagttgctcctttgtaggcatattccacagttgggacaccagattacattgctccagaagtattcatgcagactggttacaacaaattgtgtgactggtggtctttgggagtgattatgtatgaaatgctaataggtatgttttatcattcatttatgtacaaaatatatacatttccttgagtgccattgtttgaacatattacagatatcattgactaaaatatttgaagtcttttaagcttaattctgatgttcccccaatgttaaatacatactgatcaataccagtgagctccccacggatcctgtttcaggaaggtgggtatttaacccaaactcccacgtataaaagtggttatctacatagcttttcaggtaaaaggggaggcagtgctttcaatcctttattttattgactttattagcaatgtgattgtaaattgatgaatggtggcatttttgactgttaaatagagcactcagggttgtttggtttcttgtcgcacatgtttggtgggtataaacttcactgcttacaaagctgatgaaacatttttgatttatttgatacataggatatccacctttctgctctgaaacacctcaagaaacatacagaaaa

SEQ ID NO: 13630 - DNA, 204 bp, Homo sapiens
actttttaaaataatgactgcacctttgttatccaccaacattcaacttaggtttcatttttattgcatcatcaacagatttggtgtttttaaaaaaatttatagtggccattctaatgtgtgtgaggtgattttgtttgtcattgtgtttttttttttcatttctctataaactagtaattttctgtgtcctttcaaatgctt

SEQ ID NO: 13631 - DNA, 762 bp, Homo sapiens
ggccaccctattcacacacacacacctatgtgtgtatagatatttgtatatatgtgtttttatttttaaatgattctgtcagggtctcagatagaggtgaaattctaacctactcagagtgatttcttttaggttcccagacctgggatccacattttttgctctactgaggtaggaaggtgtcactagatccattaagaactgcaaattcaacatctgtgagaatggttgaagctcaaaagactggccagcttctcaaatacccagtgactgaaatacgtaactggccagcttctcaaatagccaaggcagtgccaaggttactactcaggagaatgtcttccatgtgcctggggcagacaggaagtgttctgaccctctgcccacagctttgttcctgtacccaccaactcaagtgattaatggggtggcaggtggtgcagcagccaagtgaccttcacacactgtaactccttttgtttcctatgggacactttccagatggggttttcagcactcaggaaacctctttgtggctggcagtaatgcaagaagtgcagtgtttatccatttcctctcctgaagccctgccctttggagcctcgtccttgtattgctgcccaggtatttcacaaattccagatcattcccacactgttcctgcacacacagcgctatgccctgtcccctgctgtcctcttgcatgtgacaagccacagtgactttatttcctatgtgtctaaccacaaggctcttacagaa

SEQ ID NO: 13632 - DNA, 1195 bp, Homo sapiens
agcttgacatcatagtatatccgtgagtcaagcggctgtgggtttttggctcttgcatctgctatagttctgtctcgggtgccatttgctaactctgttctctgtgtagctgcttttggcagctcctcatctctcttctaatccaccactcacagtcctagagaacagaccacaagttaagaccgtcacctacagaatcccaagggccaaaactgggcagaggacaactccatccttcttacaaaagggcttctccacaagaagcatttccgttagactctagcagtgagataccctgcttcaagaatttctcatggagccagaagcctttgaaatttgcccttatgatcctcaccaccgaatcccactcagcagattccagtaccacctggcatcgtgcaggagaaagaaccccaagaaagccaaaaagatggccacctgcaaatacaacgcctgccacgtggtccccatcaaaaatctggaggaacatgaggctgtttgtgtcaacaggagcgctgtggaagaagaggacaccgagaaccctctgaaagtcagtcctcctagttcagagcagaacgatgacacccagcaggtctcaccctgccttcccagccccgatatctggaatgtcgatggcgctaattgccagcatgtgtttgtccttaagactttttttcctcaaaaggttgtttgtgaaaatgacacgaaagagtcagcaagagagaccagtccccagaagatcctcagaccaggacagtaaactgccagctgaggaaggagcacacgcctcatcaatgcatggaagaacgtgcaatgcatcagaataaaagacatgcaaagtaaaaaaaaaaaaacaaaacacaacaacaaaaaacaacacaacaaaacaaaacaaagaagacaaagaaacacaacacaaacaaaaacaaagaaacaaaagacagagagagaaccaacaacacacaacaacaaaagacaaaaagacagagacacagacacagaaaagaagagagagcgacgagagaggacggcgagcgcagctagagcactctccacctgcgcactctccggggagaggagccacgcggcacgcaaggagtccactgcactctacggccgctcagcctctcgttttgtatattgccgattgaggacgcgacgcgctatggctcgcagcacagccacctcccggctc

SEQ ID NO: 13633 - DNA, 1120 bp, Homo sapiens
agcttgacatcatagtatatccgtgagtcaagcggctgtgggtttttggctcttgcatctgctatagttctgtctcgggtgccatttgctaactctgttctctgtgtagctgcttttggcagctcctcatctctcttctaatccaccactcacagtcctagagaacagaccacaagttaagaccgtcacctacagaatcccaagggccaaaactgggcagaggacaactccatccttcttacaaaagggcttctccacaagaagcatttccgttagactctagcagtgagataccctgcttcaagaatttctcatggagccagaagcctttgaaatttgcccttatgatcctcaccaccgaatcccactcagcagattccagtaccacctggcatcgtgcaggagaaagaaccccaagaaagccaaaaagatggccacctgcaaatacaacgcctgccacgtggtccccatcaaaaatctggaggaacatgaggctgtttgtgtcaacaggagcgctgtggaagaagaggacaccgagaaccctctgaaagtcagtcctcctagttcagagcagaacgatgacacccagcagactttttttcctcaaaaggttgtttgtgaaaatgacacgaaagagtcagcaagagagaccagtccccagaagatcctcagaccaggacagtaaactgccagctgaggaaggagcacacgcctcatcaatgcatggaagaacgtgcaatgcatcagaataaaagacatgcaaagtaaaaaaaaaaaaacaaaacacaacaacaaaaaacaacacaacaaaacaaaacaaagaagacaaagaaacacaacacaaacaaaaacaaagaaacaaaagacagagagagaaccaacaacacacaacaacaaaagacaaaaagacagagacacagacacagaaaagaagagagagcgacgagagaggacggcgagcgcagctagagcactctccacctgcgcactctccggggagaggagccacgcggcacgcaaggagtccactgcactctacggccgctcagcctctcgttttgtatattgccgattgaggacgcgacgcgctatggctcgcagcacagccacctcccggctc

SEQ ID NO: 13634 - DNA, 1060 bp, Homo sapiens
agcttgacatcatagtatatccgtgagtcaagcggctgtgggtttttggctcttgcatctgctatagttctgtctcgggtgccatttgctaactctgttctctgtgtagctgcttttggcagctcctcatctctcttctaatccaccactcacagtcctagagaacagaccacaagttaagaccgtcacctacagaatcccaagggccaaaactgggcagaggacaactccatccttcttacaaaagggcttctccacaagaagcatttccgttagactctagcagtgagataccctgcttcaagaatttctcatggagccagaagcctttgaaatttgcccttatgatcctcaccaccgaatcccactcagcagattccagtaccacctggcatcgtgcaggagaaagaaccccaagaaagccaaaaagatggccacctgcaaatacaacgcctgccacgtggtccccatcaaaaatctggaggaacatgaggctgtttgtgtcaacaggagcgctgtggaagaagaggacaccgagaaccctctgaaagttgtttgtgaaaatgacacgaaagagtcagcaagagagaccagtccccagaagatcctcagaccaggacagtaaactgccagctgaggaaggagcacacgcctcatcaatgcatggaagaacgtgcaatgcatcagaataaaagacatgcaaagtaaaaaaaaaaaaacaaaacacaacaacaaaaaacaacacaacaaaacaaaacaaagaagacaaagaaacacaacacaaacaaaaacaaagaaacaaaagacagagagagaaccaacaacacacaacaacaaaagacaaaaagacagagacacagacacagaaaagaagagagagcgacgagagaggacggcgagcgcagctagagcactctccacctgcgcactctccggggagaggagccacgcggcacgcaaggagtccactgcactctacggccgctcagcctctcgttttgtatattgccgattgaggacgcgacgcgctatggctcgcagcacagccacctcccggctc

SEQ ID NO: 13635 - DNA, 348 bp, Homo sapiens
tcttgccgcttgtccagagcgtaattccagtggcaggaatttcaggttccgtggcaaagggggcctcctcacagcaggcagcagggagaaggaattccgcagaatgggcagggccctgcgtctctcagatttcaaaggaggcgccattgcttttatctgagcaggggcggctgagatgaatgcacagatgccattttagagaagacagtaggccaggcactgtggctgacgcctgtgcctctcccagcactttaggaggccgaggcgggtggctcacctgcggacggatcacctgaggtcaggagttcgagaccaccctgaccaatatggtgaaaacccatctctact

SEQ ID NO: 13636 - DNA, 866 bp, Homo sapiens
tttccatgaagcctattagcaattagagtacatttctgttttcctgtagccccaccaaaactggcattgtcatattaattttccttattttacaagttatttccatattttaaaggaagttgtgcttttttttcctgcatgggaatttgttgtattatatttagctaggttacattgcagtaacaagcaaaccccaagtctcagagacttaaactaacacaaatgtctttctcgcttgatctgtgtgtcccttgtaggatggctgggggtgcggttccacagagtccctcaggccaggctgattaaggagacagcactctctgagagctgccactcgaggcctgctcagtggacaacacagtagacaggagaggctgggggctttgtgtggacttttcactactgatgtggccaggactaccaacacagtctggcttagcaggtagaacttagtgagcattcctgtctctgcccagccatctcctcttctgtttgttcctctccagcaacttctttgtccagtggaattggatcctctgtcttcatatcagctcttaatgtattttaggtaataagatttttatcaattgtgtctttttctttctttgctttccatattgtattgtgcaaaagtttaacgtaagttttggacacattcatgttttcctctgataccttattatcacaaatttcttttctcaaagccagagaataagctgcttttctttgagttgcttaaaatggattttatttggctccttatgacacttgaaattcatcaaaatatataatgtcaggtggttttaatctaagttaattaggtccttggtgatgcctgttctgcaacattaaaacaaaacaaaaga

SEQ ID NO: 13637 - DNA, 618 bp, Homo sapiens
tttactgtcaaatactcaatcttattcattctaattacatttttgtatgcattatttgaagaaatttatccactctgccagtctcccatttttcttatttatttaatcctaatttctcttttaagaccaaatccagatgaaaacttggcgtataatcttatagcagttcccttgtttgttttgaatcacatttcaacccaaaggattccctttagcattccttgcagagtagatctagtaaaaacatactcccttagctggtgttcatctgggaatgtcctcattattgacaggcatgtttgccaggcgtagaattctcagctacagctttttctttcagcactttgaatatatcagtccagtgccttctaacctccaaggtttctgctgatgatcttttttttttttttgagacggagtctcactttgccacccaggctagagtgcagtggcgcgatctcggcccactgcaagctccgcctcccgggtttttgcagtctctattttaatttctagtcatgtgtggtcactgaattctctctctttagcttgtgttcaggtactgttttaacaggcatttttcctggaaggccaggattcaaacaacaaccaccaaaa

SEQ ID NO: 13638 - DNA, 508 bp, Homo sapiens
tttactgtcaaatactcaatcttattcattctaattacatttttgtatgcattatttgaagaaatttatccactctgccagtctcccatttttcttatttatttaatcctaatttctcttttaagaccaaatccagatgaaaacttggcgtataatcttatagcagttcccttgtttgttttgaatcacatttcaacccaaaggattccctttagcattccttgcagagtagatctagtaaaaacatactcccttagctggtgttcatctgggaatgtcctcattattgacaggcatgtttgccaggcgtagaattctcagctacagctttttctttcagcactttgaatatatcagtccagtgccttctaacctccaaggtttctgctgatgatcttttttttttttttgagacggagtctcactttgccacccaggctagagtgcagtgagccgacatcatgccactgcactccagcctgggcaacagagtgagactcttgtctca

SEQ ID NO: 13639 - DNA, 416 bp, Homo sapiens
tcgacattccttttgcatgatggtattttcggagaccagtctagttgggaatatctaaggccctagaaaactacctccaaatttttaattggccttttagataggttatattacacatgtatcaaacataccttgttttaaaagtttaaataaatgctctgcctcccgggctcaagcaattctcctgcctcagcttcacgagtagctgggattactggcatgtgccactaccgccaagctaatttttgtatttttagtagagacgggttttcaccaccttggccaggctggccttgaattcctttcctcaaatgaccacccaccttggcctctcaaagtgctgggattacaggcgtgagccaccacacccagcccagtttctaatagaaaattttctccatattttccagctagtc

SEQ ID NO: 13640 - DNA, 428 bp, Homo sapiens
agatggtctcgatctcttgaccttgtgatctgccccccctcggccctacctagcccaacttttaaggacaagtccagcccatcccttatccctcacagcaaataacaaacatagtgatttgtgggggtgaagagatgttggtcaaggggtatgaaagtacagtcagataaaaggaatgtgtccctagatttgatagaatactagggaaattacagttaacaaaaatttattgtacacttcaaagtagctagaagcaaagaactgtaatgtccccaacacaaagaaaagataaatgtttggggtgataatatctcaattactctgatttgatcattacacattgtatgcaggtatcaaaatatcacatatccccccaaaatatgtacaactgttgtatattaataaaaataaatacaaacaaaaaaaac

SEQ ID NO: 13641 - DNA, 165 bp, Homo sapiens
ttcttcaggcttatttcaaggtattctctttgtctttggttttctggagttttaaggtgatatgctaggtgtagattagttttgtagtttttgggatttattcagtttactgttctctgggctccctgaatctgtggtttggtgtttgtcattaatactggaaag

SEQ ID NO: 13642 - DNA, 560 bp, Homo sapiens
gaaaccatgtagagtatgttgtgtgaccatagaggaattagaaatcaacacagaaataaatttggaggtcacaagatatttggaaattaacacactttacagagcccattggtcaaaaatatatatattaaactagaaaggccgggggtggttgcttacacctgtaattccagcactttgggaggcgtaggtgggcacatcacttgaggccaggagttcaagaccaacctgggcaacatggcaaaaccccatctctacaaaaaaatacaaaaaatgagttgagcatggtggtgcatgcctgtagtcccagctactcaggaggctgaggtaggggaatcacctgagcccagcaggtagaagctgcattgaaccaagattgcaccactgcataccagcctgggcgacaaagtgagaccctgtctaaaaaataaaaggaatccagaaaacatcttgcatagaatttgatacaactaaagacatgcttagagggatatttatagttttaaataactgtatcagaaaaaaagggaagataaataaatgacataagcttccacctt

SEQ ID NO: 13643 - DNA, 446 bp, Homo sapiens
ctaccctgtcaggagttaacttttatgcaagaggattttttttccttttagaagacattttactaggccgggacccaaattcacaagacacccttttctctcccttgttggaggagggctcaattccacagcttcaccttagtatttggcttatgctaaggagtccgtgtaacccctgagacatatttctgtcccaaactcaattccaagcttataaacttgaaggctactgacagcagggggacagggtgtgcataggcaagagtggacaatcccaccacctagacccgttaacatgggtgaaagccacactgacacccatgggcagcaccctttcgtggtcagtggaacttagggatatacggatggaagaagtaaagaaggcccttgtttcttctcttcctcacacaccccaggcatttgctaggaagagaaaggaaacaggg

SEQ ID NO: 13644 - DNA, 1961 bp, Homo sapiens
tgtgtgtatatgcatgtgtgcacatgtgtgtatgtatagttgattcattcattctgacctactgaatttactgaaggaataagaagaaataccttgaactgagggacctggcttagctcaacatctgtaccatctacctttgagtatccattcctttactatgaagcatggatgctaaaactaaaattgcatttgctaaactactttgtagctagattcctgggtgagattagatttggtcaattagatgttcttgtgtaacatttagaaggtgatagtaaggcaaaggtcatgtgactggctgattttatttatgttcaatgatctttattggggtacactttatatataataataaataatgcacacattttaagtgtacaatttgatgagttctgacaaatttatatgcatgtataaccagcatcaatatcaagatatataatgatcccctcattccagaatagtctcttgtgttctttccagccaatgccccacccctggattctggcaacaattgatctgctttttattaccatggattatatttgtctttcctagagatacaaataaatgaaataatgtagtgtgtcctctttaactttggcttatttctctcggcacactatttctgaaatttgtccatactgttgatatggcagacagaattttaagatggttcctaaaattcttgcctcctggtatgtataattttctctcggttttccgctgaacactaacctaggtgctattgtaaagggatttctcaagtgtaattaaagtccctaataagtttattttaagttagaaaaattttcccaggtgagcttgagctaagtgagtgacctaagcaggtgagttgttagaaaaaaattaagagatatttgaagcgtagacaaaattctgttggcttttaaaagaaaacttccatgtgatagagaaagccagatgatagggaacacaaggttacctctaaattgacaaccagcaaaaaagctgagacttcagtcttatcatcataaggaattgaattctgtcaacagccacgtgaccttagaggaggcccctgagccgcagatgagatcatggccctggccaataccttaaattcatcctggtgagatatgagcagagaactcagctatgccatgctcagatttctcacctgtagagcagtaaattaataagtgagcattatttgaagctgctaagtttgtggtgatttgttacacatcaagagaaaacatatgctgtatatattattagatttttcctttatattggtgggtgtatttgttatctattacttcctaacaaatcgacaataattaagtgtcttaagacaacacatatttattacctcatagtttctgtgggtcagaaatctgggcatggtttatgtgagttctttgatttaaagttgttggcaaatctgtaaacaaggaagcagtcaggaccgaggtctcatctgaaagtcaacttgggatgggtctgcttccagcctcacttaacataacagctggcaggattcagttgctcttgggtagttggattgatggcctcagataactaggtagctattagctagatttcaccctcagtttgttgccgtgtgggcctccctaaggtggcaatttacttcatcaaaaccagcaagggagagagttggctacaatctctagtaatgtagctacagaaatgacatccccttagcaatgagatattttattaattagaaagaaattactcaacaggaggggattacacaatgtagtgaataccaggaggctgagatcagaaggagctagtgtagaagctgcctaccacagtgagtagtattctattacatgaatataccagaatgtctgaatccacccaactgggcatagacgtttgtgttcattcaagatacagactattattattttaaaaataaaagttactatgaacatttaagtata

SEQ ID NO: 13645 - DNA, 390 bp, Homo sapiens
tatgtcaatggtgttccagctggtctccccgtcttgcccttctcccgattttctgcccccactttctaaagcatgaaactctttatgtaagccccctgctcaccatcctgcgtggagttcccgcctcaaggccctgcccctgggcctgacactcggagcccttcccagtctaccctcatccttcccctgcccacaggccctcacatcttatctggtcatggaattatctggcattctctggcaattttcagccacctccttccccagctcccaggcctcttggccctgacatctttttataaaccaggacagtgtttaggaattaatgagaacccagacctcagacctggatcctgagcagcagagcagtggatgcccaggctctcgctt

SEQ ID NO: 13646 - DNA, 466 bp, Homo sapiens
ccggagtctctagtctccagtcactgctacaatttatcgttaaatgctcaccagtcaggactgagttaattaaggaaaaacaagctataatcaacccaagtggcaatataaacgtttcttttcaatattgaatttacctaattcgaagctcgggaagcctgactgatggcgttcaggtagtgaatgtgcttggggaagagtggcaaagcgggatttctcagtgtctgctgtttaaggggtctctcactactcttccatcctgagactccatctcagaaactgtcaactccatccagcctcttcccacctgctgccaagggattgccctgggaagcctctcttaaagcccttgtttcttagcaactgtctcactttgaaacaattcagttctacccaatgttgcctgaaagcccatttgtgagagaggttgcagctctcttatgattctatggccagaattgagcct

SEQ ID NO: 13647 - DNA, 1134 bp, Homo sapiens
ttctcactctacagtgcaaatttccttgttgcttcatgggatgtgcataagcatcataagcatcagttttttaattgctgcatgatttttcatcaaggggttacatcgctatatacgtacatattgcggcatattcaggttgcattataattttcaccattacaaataatgtggcaaagaccatttttgtgcatgagcctctttaaatatttactcccaaggcctaggataattttaccagaaaggcctgattagatctaaaagtagaaacacttctatggctcttgagcagtcaatgacttcaggtctccttggcttcctcttctaaagccaaactgtcaccaaggcctctgtatcaaaactgcaattgggaaactgaggctcgctttctttgttaagtggaaattttaggaatggcacatggcaaaagacaagaaacctaaagggaaaacaaacgtccactgaataatccatacctgaacgttaaggcattattgcttccacttcgagaatctaaaagctcatgattctctgaatgatacttaaacattcacaaatgggagaatacaggcattgtatagtactagcttggtgcaaaagtaattgcagtttttaaatggcaaaaccgcaatacttttgcaccaacctaataaatcctaacttttaacttctgtgcaagatatcatttatgtcttccattccagcaaaatgtctggagcttgaagtatttgggatgaactttgttcctggttgagtgggtaactagatgcattgaatagaatgagtgaacacacgccatacgctggctgaagaacttgagtaagaacatgtaagaacttctgagtgatgctctcaaattataaaagctggattttaagaaaaattgaaagactttgtcataattcacttgagagaattaagtatttaccaagagagatgagtgtacagaaaatgatccaaatttaactctgaggaattgaacagtgtctcatgctaaggaatttcttgtgtggctagtatttttatactcatttatttttttggctacgctctaatcgtggttttcttacaaggtggattttgggaaaaaaaatcacagtttttttagtaatgcaatcgatgtaaatataacta

SEQ ID NO: 13648 - DNA, 177 bp, Homo sapiens
ttttttttaatatattgaaggttttttttcagttgattgccttggcccatttttctactgagtggtcattttcttatacatttcaaggagctctttatatgttagggaaattagccctttgtctttaatatgagtggcaatttttccagtttacctcttacttgactttgtttatga

SEQ ID NO: 13649 - DNA, 363 bp, Homo sapiens
atgttttttttcatggaaatacaaaacaatatgtgcttctttcacaactggggtttggaaacagccaaatgatccggactgaaggtcaggcctggttatctatgcaggtattcagggttaaatgcaggtgtgcctacggaaggagtaaaagcagtgacagatagcctggatgtcggtgatctaggagaggaatgtaattccagaaaagaatgaacctaacagaaaagcaattaaacagggatggaataataattaaaatgcagttatcataaaccataatggtagtataataccaacgtatcagtatagacaggagaaaggcaggtaagcctttagaagttaatgcgtcagaaaatgtcagat

SEQ ID NO: 13650 - DNA, 328 bp, Homo sapiens
accttgtacacttctgtgaatgtttttttaaaagcatttttccttttattttttataaattacataaggggatactgggaagatggtgactggaatattttttggtatacttccacacccagttccagtctaggtgcttttcttaaacccaattcagaaaacaagagtataggtaagctgtgaagccctggggctgggagggcagaggagaaccagaaagccacggatccaggggagactttggccgtctcagggagaaagtacaggctcagcacaagtatactcagtctccttggcctccaaaaagtcaagaaggagtttaatgggt

SEQ ID NO: 13651 - DNA, 306 bp, Homo sapiens
ttactcaattacgctttaggcaaagatgtactatccacagctaaaataaatttctactttctgtttcttctcacttctcacaagagttcagcacaaaacaagtgttattaagagagattttttggcttaaattggtacgttaaatatgcttctgttttaaaatattttaatttcatagagcaattttacatgcagaatgtgatcccacttgttcaaatcttggaccgtggtagagaaatgttttggaaagcagcccactttgacctcttctttcccttttatctcgacatctgtgagttttaaagc

SEQ ID NO: 13652 - DNA, 469 bp, Homo sapiens
atttacatataaaatgacattaatcctggaggcaatatgttgtaagttaaattatgtaggatttgaatccaaatcctggatctgcatctcagcagatgttttaccttgtgttatggactgtttatgtctccctaaatgtgtatgttgaaatcccaacccttgttgtaatggtattaggaggtggggtctttgggaagtgatgaggacctgagagtggagccctcatgaactggattagtgccctcataaaaggagcctcaaggagctgggcctgaagaggccctgcaccagatccagacatgctgacacactgatctgagatttccagctcctagaactatgagacatgagtttctgctgtttataagtcacgcagtctatggcactttgacatagaagccggaactaagacaccatggaaaggtatttcagtctatttaagctctagttagttcccttgtggaaaaaa

SEQ ID NO: 13653 - DNA, 339 bp, Homo sapiens
ctgctatttaataaaaccacttctttgcttcctgtaattgtcaaagaaatttaaaatactcaacttcaattaccatctagctgaagaaaatctgagattattttctaaatcaaaaataagttgatggctgaccacagtgactcacaccaataatcccaaaactttgggaagccaaggtgggaggatggcttgagctcaggagttcaagatcggcctgggcaacacagtgagacttcatctctgtaaaaactttttaaaaattagccaggtgtggtggtgcatgcctataatcccgactactggagaagctgaggcagcaggattgctagaacctgggag

SEQ ID NO: 13654 - DNA, 380 bp, Homo sapiens
attctaagtacatcatttcagcagcagtataggacttggatttgaggaagataaaactggaggccttgccaatcaactggaaggtgattgctaagaaagtggtagggggctaggcacggtggctcacacctgtaatcccagcactttgggaggccgaggcaggtggatcacgaggtcaggagatcgagaccatcttggccaacatggtgaaatcccgtctctactaaaatacaaaaaattagccaggtgtggtggcacgtgcctgtaatcccagctacttgggaggctgaggcaggggaatcacttgaacctgggaagcggaggttggagtgagctgagatcacgccactgcactccagcctagagacagagcaagactc

SEQ ID NO: 13655 - DNA, 475 bp, Homo sapiens
ggcacaccctctcttcttgggaattgtaactgtcttgtcagtggcaatcatctccctgatatggtggcccttactgtcaccctcatttaaaaaaattaatactgtatattttaaaacaagcccatgaactggtaacaccttaaataggaattttgacagattccctagaggctgagtgtggactagactgagagtgacaaactgctgggggcacttggtgaagtagccacattggcttctcatggtgaggaacagagaatcctacagtggctctggcaggtggagtggaaaagtaaccattttaaaatagaccaaagcattctcaataacagttctactcaccagggaaaaagactttaccagggccttatccactgctgcagaagggaatttctccaactctagtaccctttggccttcttgtctccccagtatgggagagagaaggggaagggaagaagacaaagccaaaaaa

SEQ ID NO: 13656 - DNA, 710 bp, Homo sapiens
ggcccatggcaaaccaccctatgatggacttcaggtaagaaaaataacctgggaggagttgtgcaggaataacccaaaggtccctataagtgactatgtaagtgcctataactcctgacaaggtcaggccctagaagatgtcacctgagctgggcgcagtggctcacacctgtaatctaacactttcagaagtcaagtcagggtattacttgagctcaggagttcaagaccagcctgggcaacatggcaaaaccacatctctacagaaaaattagctgggcgtggtggtgtgtgtctgtagtcccaactattcaggaggctgagatgagaggatggcttgagcctgggaggtagaggttgcaatgagctgagatcatgccactgcactccagcttgggcaacagagccagaccctgactcaaaaaaaaaaagaaaagaaaatgtcacctggagaaagggacagaaccttgggcacagaggcatcataattttggacagagtcaccagtacagaaagcgaacagacctagtgagatccactgggcaaaccacaagtctcatgaccccaaacccttggctgcacggcttcaggactactcagcaagtagggaggacactccatacagcttagccctggcatcttgagcacctactccaggaaactggtgaaggaagcggtgctcatgatcccaccataggaagaacagagtg

SEQ ID NO: 13657 - DNA, 370 bp, Homo sapiens
ttgattcccaattggaaaataattcacatttagaggaccgagcttcacctgagtgaagacacgggagtgtttggtactagagacctggctgcagtcaagggctgtccctgcccgctgccacctcttgcaggcatctcctttcctcccccatcctggattgagaaccttccgtctgtctgtctgtcctgcacctctgtcccaggcccttcacaggttcctggctgcctctgttgcaggagcctggggctcattctgggctcatgggtgctgttttgtgcttctcttcccaagctgccaaagaagattcttctgcctggtgcctgcatagtgttttcagagtagggatgacaaaaggttttgaattcccctt

SEQ ID NO: 13658 - DNA, 473 bp, Homo sapiens
gcgcggctgggccgggctgctctgcaaaccgctcacgtgctcctgcctttccgagccggggactgcgccagggcgcgcaggaaaaaacacagcccggagctgcaagaagcccttctttcttttctttaatcactcactccccggctttgcgtctcctcccctcgcttgcgggaatgttatgaatggaatgtacggattccagcctgtgcgcgcgcggccaggaatgcagggcgcagcgacctctcgacccacggccagcgcaccgccccagcgccacagcctgggatcccagagccacagcctgggatccctgagccacagcctgggatccctgagccggcccggccgccacgaacactcagggccacgtggcctgacgtctgcagtgggagattcagacggtaagcattcaaagtgaggcgagagagccaagcagcgccgccgggacacaccggggccactctcacgcttcg

SEQ ID NO: 13659 - DNA, 448 bp, Homo sapiens
aaatgaagaggacaacaatgagaaggaacataaagggttagctagcactgtctcctggtgcatggggctgtgcagatgtcccggccacttcttccttcatacttcccttagagaacttgctctgctacaagcagtgggcttggactaaaagtgattaaaataccacaggcataaggagaaaaggagtatatgtagtagtaataattactagtataaattattttcttcacatgctatgagtaataatattaaaaaactcattttaccattaagattccttatgctgaagctcttccatttagaatactgtcaatgtcatttactggtatgaactaaagtcccccttcttttccactcactgggaaccttagtaaaacaccagcatatcttacctctctttctgactggccgatgcttccagagactgaatgttgggaaaacctagtag

SEQ ID NO: 13660 - DNA, 274 bp, Homo sapiens
tttttgactgaaagtacagatacaacttccctttccagccaagatggaggagcaggggccaagtttatcctcctgcctgaaacaaccaaccaaacagtaaatacatgaaataatgagtttcaagacactggacatgaggtaacaaaagacagtgatctctcagaggcaagaaacaaacaaggagaacccctcggttgcccagcttaccgcttgagaggatgtatttcacggagggagaacccaggcaaagcaagtgactctgaggtgaggggat

SEQ ID NO: 13661 - DNA, 431 bp, Homo sapiens
ttcaatattatgaattattccctgagacattacagaagttgagaatgaattgtgccccataaacagaaaacatattaaccctatacaatacactcgttttcccttttagagacacgaatacccctagcctcaaggagtcgatatgtataaaataggcaactaggggcatgcaaatattgtggaaatggtgtttctgattggcactggcagatttattattcgaaataatcctgttggcaaaaaaaggaaattttttttccgtatcataaaatctgatttcaaaaacttgctcctttttgactttctctataagcttgtaagtctgcattcttctctcatttttatatccaggctctattgtaatttatctgttgctaaccagttttcaataaaatatataataaataagattttcggtttttatttttcaa

SEQ ID NO: 13662 - DNA, 676 bp, Homo sapiens
aaaatagggtagaattgttacagctggacttgtaaaaatatgtctttttactcagggtttaaaatgtcccatttaaatatgaaatgtaaacaaatttgttttttaaggttaaggccaaatgtaacaataaaaccctgtcgatggttttagctaaattagaggaagttgtatgagacttaatgatctaaaaacttaaaattgaattggtttgattaaaaataaagcttgcaattttaaaagtagctcacatttaatttcttgtgtgaaatagaacatgctttaaaggaagtatttttatgtgaatttgcattccagtataaatagtattcacaaaaaagattttcctagattttatctattgaataggtgtcaatatggcatgcatattgtaactttcattagaaataagttgctttgacttttaaaaatgacatagttagattatttaaagtcaatgtatatagtatatattatgtatggatttatataccaaattttggaatacagcctatctcatgaccatattgaaatgtacggaatttgatccatgcgatactatgtgtgcattatttgaaagttattggaaattttattcaaaccgtggaacaaatgtatgtgattttgttatacttcttaatttaaataaaatatttaatgcactattaaaaaaaaaaat

SEQ ID NO: 13663 - DNA, 639 bp, Homo sapiens
aaaatagggtagaattgttacagctggacttgtaaaaatatgtctttttactcagggtttaaaatgtcccatttaaatatgaaatgtaaacaaatttgttttttaaggttaaggccaaatgtaacaataaaaccctgtcgatggttttagctaaattagaggaagttgtatgagacttaatgatctaaaaacttaaaattgaattggtttgattaaaaataaagcttgcaattttaaaagtagctcacatttaatttcttgtgtgaaatagaacatgctttaaaggaagtatttttatgtgaatttgcattccagtataaatagtattcacaaaaaagattttcctagattttatctattgaataggtgtcaatatggcatgcatattgtaactttcattagaaataagttgctttgacttttaaaaatgacatagttagattatttaaagtcaatgtatatagtatatattatgtatggatttatataccaaattttggaatacagccatttaggtaacagccatttaggtaacagccatttaggtaacagccatttaggtaacagccatttaggtaacagccatataggtaacagccattcaggtcacagccataaaggtaacagccattaaggtag

SEQ ID NO: 13664 - DNA, 409 bp, Homo sapiens
ccacctttctctgggaaatcgatagcttgaccctgaaggcttaccatgtgtcagacaatgtgctaaaagctttacattcattactcgttcttgcaacagcctttcaaaataggtgtttatgcccagtgtattgttaggaaaacacgtgaggttaaactacccactgtcacatatgggataggtggcaaaatcacagaatccaggtctgtatgacaagtgagtgcttcactatattcgtaaacaaagtatccaccctgggatcaaaaaacaaaagctcaataaatgccaactgttggcctagcaaaaaatagaaaattgtgaatatttacactctgaaataattgatttcaccccagtttagaaaagaatgtttaagggttgagaatttaaaggcttggtttcctgtttg

SEQ ID NO: 13665 - DNA, 2582 bp, Homo sapiens
ttcttaacgttacatatattatcttatagaaataactaagggaagttagtgccttgtgaccacatctatgtgactttaaggcagtaagaaactataaggaaaggagctaacagtcgtgctgtaagtagctacagggaattggcttaaagggcaagcttggttagtacttagctgtgtttttattcaaagtctacattttatgtagtggttaatgtttgctgttcattaggatggtttcacagttaccatacaaatgtagaagcaacaggtccaaaaagtagggcatgattttctccatgtaatccagggagaaaacaagccatgaccattgttggttgggagactgaaggtgattgaaggttcaccatcatcctcaccaacttttgggccataattcacccaaccctttggtggagcctgaaaaaaatctgggcagaatgtaggacttctttattttgtttaaaggggtaacacagagtgcccttatgaaggagttggagatcctgcaaggaagagaaggagtgaaggagagatcaagagagagaaacaatgaggaacatttcatttgacccaacatcctttaggagcataaatgttgacactaagttatcccttttgtgctaaaatggacagtattggcaaaatgataccacaacttcttattctctggctctatattgctttggaaacacttaaacatcaaatggagttaaatacatatttgaaatttaggttaggaaatattggtgaggaggcctcaaaaagggggaaacatcttttgtctgggaggatattttccattttgtggatttccctgatctttttctaccaccctgaggggtgtgggggaattatcattttgctacattttagaggtcatccaggatttttgaaactttacattctttacggttaagcaagatgtacagctcagtcaaagacactaaattcttcttagaaaaatagtgctaaggagtatagcagatgacctatatgtgtgttggctgggagaatatcatcttaaagtgagagtgatgttgtggagacagttgaaatgtcaatgctagagcctctgtggtgtgaatgggcacgttaggttgttgcattagaaagtgactgtttctgacagaaatttgtagctttgtgcaaactcacccaccatctacctcaataaaatatagagaaaagaaaaatagagcagtttgagttctatgaggtatgcaggcccagagagacataagtatgttcctttagtcttgcttcctgtgtgccacactgcccctccacaaccatagctgggggcaattgtttaaagtcattttgttcccgactagctgccttgcacattatcttcattttcctggaatttgatacagagagcaatttatagccaattgatagcttatgctgtttcaatgtaaattcgtggtaaataacttaggaactgcctcttctttttctttgaaaacctacttataactgttgctaataagaatgtgtattgttcaggacaacttgtctccatacagttgggttgtaaccctcatgcttggcccaaataaactctctacttatatcagtttttcctacacttcttccttttaggtcaacaataccaagaggggttactgtgctgggtaatgtgtaaacttgtgtcttgtttagaaagataaatttaaagactatcacattgctttttcataaaacaagacaggtctacaattaatttattttgacgcaaattgataggggggccaagtaagccccatatgcttaatgatcagctgatgaataatcatctcctagcaacataactcaatctaatgctaaggtacccacaagatggcaaggctgatcaaagtcgtcatggaatcctgcaaccaaaagccatgggaatttggaagccctcaaatcccattcctaatctgatgagtctatggaccaatttgtggaggacagtagattaaatagatctgatttttgccatcaatgtaaggaggataaaaacttgcatacccaattgtacacccttgcaaaatctttctctgatgttggagaaaatgggccagtgagatcatggatatagaagtacagtcaatgttcagctgtaccctcccacaatcccacttccttcctcaacacaattcaaacaaatagactcagactgtttcaggctccaggacaggaagtgcagtgtaggcaaaattgcaaaaattgagggcacaggggtggagatgggggggttgaataacaagctgtgctaaataattacgtgtaaatatattttttcatttttaaaaattgatttcttttgcacattccatgacaatatatgtcacatttttaaaataaatgcaaagaagcatacatccaagccactgagctcatttgtcttctgttttgataaagtggtaaagaaggaactaacatgggaatgcattgctacaatttaaataagcataccaagataaattcatttatggtgctttgagtatatgagaccctcttctaccagacagatgatcagtgttagatttatagagaagggattatcaaattcccatggccaagaaggtcagaga

SEQ ID NO: 13666 - DNA, 408 bp, Homo sapiens
catttattagccatttgtttatcttcctttgtgaaatgtcttttcaagttctttatccattttaaaaattggattttgtttttattgagttgtaggagttcttttagtttttttttggtatatatatattctgcttttaagtcttttctcagtagttttgctaggttgtgaagatgtttttaatgcatttttctagagggtttaccaatttatcatttaacctttgttaaggtctatgatttattttgagctactatatggagggaagtagggatcaagtttcttcttccttttttttgtgtatggatatcctgttgttctagaacctactttggaaaacactttttccattgagttgctttgtcacctttattgagtagttgacctaagtggtctacttctggagtc

SEQ ID NO: 13667 - DNA, 422 bp, Homo sapiens
cccaccaccatgcctggctaatttttgtatttttagtagagaaggggttttgccatgttggccaggctggtcttgaacccctggcctcaagtgatctgcctgcctcggcctccaaaattgttgggattacaggcatgagatactgtgcccagcccagaataatgtttttaatcgtgcagaatcaatcactatggaaactatgttgaaatgcgggtgctgtctttgagaccctgatagcagtgtcttccacagtgtagcaagtgtgtgagcttttacttttggaatggtatctctaatggtttctttctttctttttttttttgagatggagtgtcactctgttgtccaggctggagtgctgtggcgtgatcgagcttacaccaccgcactctagcctgggcaacagagcgagattccgactc

SEQ ID NO: 13668 - DNA, 366 bp, Homo sapiens
atgaactgtcatttactatgtattagctaggtacagtactgtaggccaccagctttttcatgaaattgtgtgctttggtatctgtgtgctttctctcgtttcctctgtatctctgtgtgtcattctctatgtgttactccttgtgggtcattctgtgggacgctcaatatctgggttggaaagtctgagcggatgcctctgtctcttcgtttctcactttgtatgtttgtgaatgtgacccctgtgggcttgtctcctccctggggccctctcttctttccatcccattttatttaatgtgggtcttctatacccattcagtcccggtttcccctctccatatactccatcatatgctaggttttg

SEQ ID NO: 13669 - DNA, 651 bp, Homo sapiens
gttacactttgagatttttatggtgaattctagtggtgagatccagtctattttgtctctctctctttttttaatttttttctttttccctcatacccatatgaagtaatccaatggggaatgcaatattagaaatagatttttaagagagaacaaggaaaaaaatgcaagatcttatatttttcatgtgatgacctgttctgtatttatgaggaagtccattctatggaaaagaaaagaaagtaagcaaacaacagattaatttacatatgagcatctataaaacccatgacttttaaacaactctagaaccagaatttgtagttaaaaagctaaaaataagattataaataaaatattgtcggtttttctgtacctggacacaactcatttgtagtatggctcaaatgtgagaaacttgaaggtaattagattttctgctttctaagaaagaaaatatgacagtattctttagtcacaaaatcaaatctctacagggtcctgtttgactagttgacttgagttttagatgtatgtttaaggatgctgtggtattttttccttctcattaattaggcttaccctttgtagaatgctcaggttcaaaaataatgattttgtgaagtaaatttaattctacttgaaaaaaaa

SEQ ID NO: 13670 - DNA, 284 bp, Homo sapiens
aaaatatatatatatatatgtgtgtgtgtatatatatatcaattaaatagttaaagtcagaggtctaaaatagcagtttccaaaatgctagtttctcaatcttttttcttcgttgtccctaagcataaaaatcaattaattagataattttccatttaaattggatccaatgtttccctaatgagataaattaaatactaaggaatacaattttgtcaggtagaggtgacctttggaaggccataaaccattgtaataactaagatttttttttcacttttcaa

SEQ ID NO: 13671 - DNA, 351 bp, Homo sapiens
aaagggaaataaagcagccactgcacatctgcacatataacctgtagatctgggggctctaataaaaaagttaatggcaatgtcaaaatctggtgttttatcttagataacttcatagtcattgattgagccccttaaaaataacatttaaaggacatgtagtcattctgtttctttattgccaagttttcagcaatttttctcatgagaatgagtgctaagaaacttttggtggagcgtggtggctcaagcctgcagtcttgcactttgggacgccaaggctggccaattacttgagatcagtagtttgagaccaccctggccaacatggtgaaaccttgtctctactaa

SEQ ID NO: 13672 - DNA, 809 bp, Homo sapiens
tgattctcctgcctcaaccttcctgagtagctgggattacaaccatgagccaccatgcctagataatttttgtatttttagtagagacgggggtttctccatattgctcaggctggtctcgaactcctgacctcaggtgatctgcctgccttggcctcccaaagtgctgtgattacaggcctcagccaccctgcctggcctccctgttttcaaggtcagtagctgtgtgttttcacttctgcattttatatatgttactataattttcttgtaagaagaattaaatgttgaaagtcaatagcatcagaacgttgcaaaagaagtttctttagcccaggtatgtgaaagatgcttctctaattttcaaagagaggtgataagaccaaccctttccattagcccttctgggcccccatgtaagaattcagacacaccttctcactcatctcagaccttctcagggtaactcggtgaatatgtccccactctgaggatatcacagctaaatgtaaagcaggtcacatcagtccctggcagggaaccctccaccagcttcccgtgttccccaggacaaaagcccaactcatcagtgtggctccacagccctgtgtccagggcccctgccagtgtccagcctcctctgacatgaaggtgtccaaaccctcctgtgattgtgtgggccaaagggatcaggagacagagagagagcagtaaaaaacctgagacagagaaaagaagaatgagaaaggcccataacagatggcaaagtagaagatgggtgagggatttgccaaaaaacagcaaaagtg

SEQ ID NO: 13673 - DNA, 464 bp, Homo sapiens
tgaaggtcacaccacagcgcgtgagtttcgctctgttttatgtgtgcttcccagtcctgtggtgctgctataccggggacgttgagtccccacagacctggaaattgcggcccctctttctcaacccagagcaaattgagacgtccgggctggagtgcaatggcgcgatcttggctcaccacaacctccgcctcctgggttcaagtgatctcctgcctcagcctccccagtagccgggattacaggctgtgagtgcagtctcctgatcttggctcactgcaacctctgtctcctgggttcaagtgattcttgtgcctcagcctaccaagtagctgagatacaggattgacttctaaagactcttggtacctgaggaagaaacccagaagaggaagaggaaagcaaaggagtcggggatggctctttctcagggtctgttgacattcagggacgtggccatgttc

SEQ ID NO: 13674 - DNA, 188 bp, Homo sapiens
gtggaggtgatggagtttcgctgtgtcccccaggctggagggcagttgtgcgatcttgattcacttcaacctctgctttccgggctcaagcaattctcccacctcagcctggtgagtagctttggttgtgtcctctccaggtttttgcttataccttctgaacgcaagttaatttaagtgtgtgtgga

SEQ ID NO: 13675 - DNA, 883 bp, Homo sapiens
tgaaggtcacaccacagcgcgtgagtttcgctctgttttatgtgtgcttcccagtcctgtggtgctgctataccggggacgttgagtccccacagacctggaaattgcggcccctctttctcaacccagagcaaattgagacgtccgggctggagtgcaatggcgcgatcttggctcaccacaacctccgcctcctgggttcaagtgatctcctgcctcagcctccccagtagccgggattacaggctggagggcagttgtgcgatcttgattcacttcaacctctgctttccgggctcaagcaattctcccacctcagcctggctggagtgcactggtgccatctcagctcactgcaacttctgactcccgagttcaagtgattcttttgcctcagtctcccaagtagctgggacaacaggggcgtgccgagaagcccagctaattttgtacttgtagtagagagcgggtttcaccacgctggccaaaattgtctcaacctcttgatctcatgatccaccgcctcaccctcccaaagtgctgggattacaggcatgaggtaatgcgtgtggccaagcccatggtttacgtagaaaacacagcatttgcaatatatatacataattattattgttattattattattttgagaaagtcttgctctgttgcccaggcccgcattggggaggtgcctggggcctatatggtggcacaaggtgttcttccctgcccagtgccagcccctggaaaatgggctcctctgacatgaaggtgtccaaaccctcctgtgattgtgtgggccaaagggatcaggagacagagagagagcagtaaaaaacctgagacagagaaaagaagaatgagaaaggcccataacagatg

SEQ ID NO: 13676 - DNA, 953 bp, Homo sapiens
ccatctgatccgccacgatgtgccctacctgttccagaagtacgtgaaggagtcccatggaaaggacatccgggtggtggtggtagggggccaggtcataggctctatgcttcgctgctccactgatggacggatgcagacaactgtctcttcggtggcgtgggcgtcaagtgtccgctgacagaacaaggcaagcagttggctattcaggtgtccaacatcctaggcatggacttctgtggcattgatctccttatcatggacgatggctcctttgtggtgtgtgaggcaaatgctaatgttggcttcctagcctttgaccaggcatgcaacttagatgtgggtgggatcattgcagactataccatgtccttgctgccaaataggcagactggaaagatggctgtcctcccaggactgtcgagtccaagggagaagaacgagccggatggctgtgcttcagctcagggagttgcagagagcgtctataccatcaacagtgggtctacctctagcgaaagtgagcctgaactgggagagatccgggattcctcagcaagcacaatgggggccccaccctccatgctgcccgaacctggctacaacattaacaacaggattgcttctgagttaaaacttaagtgaattcctgctttttggcagcatttaaaccaaatcctactgcttccctagtagttttgagtgaataaaatctggactaatgtgatttcatttgcacagaaactagaaatcccatctgggcactcagcattttttctaacgatgatttaagcaaatggcctagctttgtggtttttacaaagacaaatataaaaacactcacaagaacaacgtcccgactgatcagtatgagactgatgtctgctgtgagcacgtggatattacggctgacgctaaggcactgactctgctgttgcttctgacttttagca

SEQ ID NO: 13677 - DNA, 4163 bp, Homo sapiens
  misc_feature (1062)..(1062): n is a, c, g, or t
  misc_feature (2022)..(2022): n is a, c, g, or t
  misc_feature (2173)..(2173): n is a, c, g, or t
caaggacagcctaaacatttatagcgggtccatgctttttggctttctagtggcaaccaagtagcttgatgtgattttaagtgagttttacacatgctctttctcttatatatgatctcagacataagaggcaatttaaggaatcttgtagcaaaatctaaagcaaagaattagaaagtataaaaaaattctcaatatatcttttggtaaggtagaacatacatatctgaagttgcattcaagtacatggagatatacatgtatttcttctctcgagtgttgcctgtgtatatgtatgtgtttgtgggaagctatgcaaatacagatcctgtgagtagaaatatacctttattttttgaaatggtttattttacaacccaagataaagtagaaatcagggtaaaatatactgtttagctacttttttgagacaggaaaggaatgacattcctaattcatagcaaagagtgcgtgtaggtaacattatttattcacatatttgtgcacacaaaatccactcaaatatccatttaaacagctaatatatttatatgtactactctaacttgtatttttactaaaattatttatgtatgttatcactagtctcaaaaactgatgcccaagttaaatgtggacatatctttttttacagtgaactaaagcaaaaagaccggggtatatttaaaaatatatttaaaatatttaaaaaatctaaatttatgccatcttctgggataatgccaaagacaatttcaactgtagcactctgtataattaaacatgttttatgtcattgttcttgaattttttgttgctttattgttcattagaattactctttttttttttttttttttgaaaaaagagtcttgctttgttgcccaggctggagtacagtggcaccatcttggctcactgcaacctctgccttctgggttcaagtaattctcatgcctcagcctcccaagtagctgggattacgggcatgtgccaccatgtctggctaatttttgtatttttagtagagacagggtttcaccatgtgggccatgctggtcncgaactcctggcctcaagtgatccacccgccttggcctcccaaagtgctgacattgccagcattacaggcatgagccactgtgccgagacagaattattcaattctaagtaggtatgacttctgcttgtgtcttaggatttggggcatttctatgcagaagaaatactgttcattttagttagttagtgataagtatttagttccctaatgaactgcgaataataattgctgaaaaccagttacacttggggggtgtttacacttgggagttgcttctggatccatagctgagtagaagacatgacagagtgattaatcagatctcgtctacagacttccatttatactgataatgaccataatagatgggcctgtcactaggctaagaaatttacatgtgtttttatttaatctttccaacagtcttacgggatgtgcgtactgttattccagttttgcagatgaagaagctgggatttagtgaagttaaataactagtaaatagagagggctatgttccatcctaagttgcttttgattccaagactgctatggtattttgagacggctgatttggtacaaaagaacttgattgaaatcattttagtctaatctcctggagccatgctactttctatggtactatattaaaaagagataatacacagatagcagatacaaaggttgaaatcagaaacctatagtattccctgtgtaataatggatttcttgttgcttttataataagtttttaaatagctaatgcatacacatagtaaaaaataattcagatagccagagtgtctatagagtgcaaagtatgtctttttcccacaccagcctcctattcccccacacagaagcaaccattgtatctaaattgtggttattcttccaaatatggtgttaacatgaatttatttttatttttattttgcccaggctggagtgcagtggcncaatcatagttcactgcagtgccaaactcttgagctcaagcaatcttcctgcctcagcttccgtagtagttgggactagcaagcatgtgtcaccaggcccagctattatttttattattttatagacctggtgtctccgtatgttgcccangctggacttgaactcctagtgtcaagcagttctcctgccttggcctcccaaagcactgagattacaggcatgagccaatgtgcctggccattagttgtttttttaaaaaatgacatttgagcatcaattcttaagaaaactagaagagccagatcttgtaccagattgacatctgaatgggccaagctagagaaggctggagaaggatgcagatgacacaccttcagtgatgagagtgtcagatagggcgtcagcattacccaccatccccataggggtaacagaaagcccttgcagcaggtttgtcttgtttcatagatgagaaaattggttacttaggtcatgtagggagttgcaggtagagcagaactcagatgcagaaatatgcttctcatttttccaattctacttcagcacaaatgacttgtggatttgagagtgtaacgaagaattgtacaattgaaattgtacaattccaaaattgactaagggtttctactggtaagccagatagcaaacttcagaaagccaaagtcagtagcagatattaaaaaaaaaaaaaaacttttaaaatacatctttttattttagaataaatttagatttacagaaagcatgtgaagatattaaacagagttcccatgtatgctacacccagtttcccctattattaataggtttatccactatcaggttactctggaaggaagtcactatatgcagcctacacataagaagtggaagattatgttccaccttcctgagggctaagtaaattatttggaatgcttctgcacaagaaatttgtctgtcattctgtttatttattttttcagtcaaaacttatttattatctttttgagactctctctgttgcccaggctggagtgcagtggcgtaatcgtagctcactgccgcctcgacctcctgggcttgagccatcctcctacctcagcttcctaagtagctgggactacagacacgccaccatgccctgctaatatttgtaattttttgagagatggggtttcaccatgttgcctaggctgatcttgaactcctgggctcaagtgaacttcctacttcagcctcccaaagttctgagattgcaggtgtgagtccctgtgcccagcctcagtcatttacatatataaatatggctcatggattatatgatttttgggttataatccagtactacagttttattgctcaaattgttccaactttggccattgagagctcttttagttgacttctatatctctttaacacactttcatcattgtgttttatttttgttttctattttgagcgcttcgctttcctacactgcaggatgctccagattcgccttttatatttcctgcttcactcctagaatcagctttttctccatggaagtccgattctttttattggaaaatagtattggaaaccaagatctgggtgccagttgtaattgcagctcttttaaaaccaaatattgaatagaaaaggaagttttagccattttcccaggtagtactaaattaagtcattgcaataatttatataagttcactggattgaatggaatgatcctaaggatttttaagggaaaattctaagaattcttattactgttttctgttacttttttaaaaaaattctgtaatgatatcacttgatttgattttttttgtgtgtccttgaccaaaaaacttgaggcaaaacttcaaaacatggtaatttgaagcaggttgggattaactctgggatattggaaagactttaaactccattaggaaaattaacaagcatgtagtctataaaagacatgtaattcatatttatataaagaataatactttcttccaccttcagacatctaagatttaaaaaaatgttctttttaaaagaaagaatagtactttcttttgtatcactaaacatttcaaatttgtgtattgaacagaggattggggagaatgttttgttaaggaaagag

SEQ ID NO: 13678 - DNA, 3621 bp, Homo sapiens
  misc_feature (1062)..(1062): n is a, c, g, or t
  misc_feature (2022)..(2022): n is a, c, g, or t
  misc_feature (2173)..(2173): n is a, c, g, or t
  misc_feature (3479)..(3479): n is a, c, g, or t
  misc_feature (3528)..(3528): n is a, c, g, or t
  misc_feature (3552)..(3552): n is a, c, g, or t
  misc_feature (3574)..(3574): n is a, c, g, or t
caaggacagcctaaacatttatagcgggtccatgctttttggctttctagtggcaaccaagtagcttgatgtgattttaagtgagttttacacatgctctttctcttatatatgatctcagacataagaggcaatttaaggaatcttgtagcaaaatctaaagcaaagaattagaaagtataaaaaaattctcaatatatcttttggtaaggtagaacatacatatctgaagttgcattcaagtacatggagatatacatgtatttcttctctcgagtgttgcctgtgtatatgtatgtgtttgtgggaagctatgcaaatacagatcctgtgagtagaaatatacctttattttttgaaatggtttattttacaacccaagataaagtagaaatcagggtaaaatatactgtttagctacttttttgagacaggaaaggaatgacattcctaattcatagcaaagagtgcgtgtaggtaacattatttattcacatatttgtgcacacaaaatccactcaaatatccatttaaacagctaatatatttatatgtactactctaacttgtatttttactaaaattatttatgtatgttatcactagtctcaaaaactgatgcccaagttaaatgtggacatatctttttttacagtgaactaaagcaaaaagaccggggtatatttaaaaatatatttaaaatatttaaaaaatctaaatttatgccatcttctgggataatgccaaagacaatttcaactgtagcactctgtataattaaacatgttttatgtcattgttcttgaattttttgttgctttattgttcattagaattactctttttttttttttttttttgaaaaaagagtcttgctttgttgcccaggctggagtacagtggcaccatcttggctcactgcaacctctgccttctgggttcaagtaattctcatgcctcagcctcccaagtagctgggattacgggcatgtgccaccatgtctggctaatttttgtatttttagtagagacagggtttcaccatgtgggccatgctggtcncgaactcctggcctcaagtgatccacccgccttggcctcccaaagtgctgacattgccagcattacaggcatgagccactgtgccgagacagaattattcaattctaagtaggtatgacttctgcttgtgtcttaggatttggggcatttctatgcagaagaaatactgttcattttagttagttagtgataagtatttagttccctaatgaactgcgaataataattgctgaaaaccagttacacttggggggtgtttacacttgggagttgcttctggatccatagctgagtagaagacatgacagagtgattaatcagatctcgtctacagacttccatttatactgataatgaccataatagatgggcctgtcactaggctaagaaatttacatgtgtttttatttaatctttccaacagtcttacgggatgtgcgtactgttattccagttttgcagatgaagaagctgggatttagtgaagttaaataactagtaaatagagagggctatgttccatcctaagttgcttttgattccaagactgctatggtattttgagacggctgatttggtacaaaagaacttgattgaaatcattttagtctaatctcctggagccatgctactttctatggtactatattaaaaagagataatacacagatagcagatacaaaggttgaaatcagaaacctatagtattccctgtgtaataatggatttcttgttgcttttataataagtttttaaatagctaatgcatacacatagtaaaaaataattcagatagccagagtgtctatagagtgcaaagtatgtctttttcccacaccagcctcctattcccccacacagaagcaaccattgtatctaaattgtggttattcttccaaatatggtgttaacatgaatttatttttatttttattttgcccaggctggagtgcagtggcncaatcatagttcactgcagtgccaaactcttgagctcaagcaatcttcctgcctcagcttccgtagtagttgggactagcaagcatgtgtcaccaggcccagctattatttttattattttatagacctggtgtctccgtatgttgcccangctggacttgaactcctagtgtcaagcagttctcctgccttggcctcccaaagcactgagattacaggcatgagccaatgtgcctggccattagttgtttttttaaaaaatgacatttgagcatcaattcttaagaaaactagaagagccagatcttgtaccagattgacatctgaatgggccaagctagagaaggctggagaaggatgcagatgacacaccttcagtgatgagagtgtcagatagggcgtcagcattacccaccatccccataggggtaacagaaagcccttgcagcaggtttgtcttgtttcatagatgagaaaattggttacttaggtcatgtagggagttgcaggtagagcagaactcagatgcagaaatatgcttctcatttttccaattctacttcagcacaaatgacttgtggatttgagagtgtaacgaagaattgtacaattgaaattgtacaattccaaaattgactaagggtttctactggtaagccagatagcaaacttcagaaagccaaagtcagtagcagatattaaaaaaaaaaaaaaacttttaaaatacatctttttattttagaataaatttagatttacagaaagcatgtgaagatattaaacagagttcccatgtatgctacacccagtttcccctattattaataggtttatccactatcaggttactctggaaggaagtcactatatgcagcctacacataagaagtggaagattatgttccaccttcctgagggctaagtaaattatttggaatgcttctgcacaagaaatttgtctgtcattctgtttatttattttttcagtcaaaacttatttattatctttttgagactctctctgttgcccaggctggagtgcagtggcgtaatcgtagctcactgccgcctcgacctcctgggcttgagccatcctcctacctcagcttcctaagtagctgggactacagacacgccaccatgccctgctaatatttgtaattttttgagagatggggtttcaccatgttgcctaggctgatcttgaactcctgggctcaagtgaacttcctacttcagcctcccaaagttctgagattgcaggtgtgagtccctgtgcccagcctcagtcatttacatatataaatatggctcatggattatatgatttttgggttataatccagtactacagttttattgctcaaattgttccaactttggccattgagagctcttttagttgacttctatatctctttaacacactttcatcattgtgttatttagttctattngagcctccttctcatgagatgtcaatcgcttatttctgtcatcagatanttttcatgagccatctttatgaangatgacaactgggcgtgaattnagtttaacattgatgaagagtagcatttttcccaggaggactttagt

SEQ ID NO: 13679 - DNA, 3637 bp, Homo sapiens
tttttcttttggattatatccctggaaagaattcccaggggtgggaattacttggtcaaaaaacatgatttacatatgtttatttacatataattatgtaatttatatgctgtcttttaaagaagtgttggaatagctttgaccaactacccagtttcattgtgaatccagaggtgtacagttttacccaaattttgaagaattgaagctcatatgcttgaaaaataatataatcacagttttactctactcattaaaaattatttccaatgtaaattttttataattttcagtgaccagtgtaaccaatattttaattttttcagagtacatgtgatgcagaaaagtcttacgaagtattactgagctttgtgataagtgaactatttaaaggaaagttataccatgaagaaggaactcaggaatgtgcaatggtatgtttctgcaaaaatcagatgtagcggttatttagtaaaaaatttacattttcttgccattatgaatgtaatttttaaaaactctttattgtagactgacttgttcaaattttcttttttaactttaggttaaccctattgcttggtctcctgaatccatggaaaaatgcttacaggacttctgcttaccttttctcagaatcaccagccttcttcagcaccacctttttggggaagatttacctagctgccaggaagaagaagaattttcagttcttgccagctgcctgggacttctgccaacgttttaccaaacagaacatccattcatcagtgcctcctgtctggattggccagttccagcatttgatattataactcagtggtgttttgagataaaatcatttactgaaagacatgcagaacaaggaaaggccttgcttatccaagagtcaaaatggaaattaccacacctactacagttgcctgagaattataacaccatttttcagtactaccacagaaaaacctgtagtgtctgcaccaaggttcctaaagatcctgctgtttgccttgtgtgtggtacttttgtatgcctgaaaggactttgctgcaagcaacaaagttactgtgaatgtgtactgcactctcagaactgtggtgcaggaacaggtattttccttttgatcaatgcatcggtaattatcatcattcgaggtcaccgcttctgcctctggggttccgtgtatttggatgctcatggagaggaagaccgggatcttaggcgaggcaaacctctctacatttgtaaggaaagatacaaagttcttgagcaacagtggatttctcatacttttgatcacatcaataaaagatggggtccacattacaatgggctgtgactctccacctcagcattgcatcgtatcatcattttcgctacgaatttatttttcaacaataagctttaacttaatttgggggattaacacttttgctgagggagaaaaagaaaacatacattatgaagcctttccaaaattaggtgcttggtaatcacgttaatggtataattttttttttttaatatctggagaacattaataacaagttaaattattctttagtggtcattttttaagtgcacaattaataagaagcacaacttgttcacaaactcattcagaaatgattctcccaacaatgcatatcagctattcattgatacttagagtgggtgtgatttatttgacattttactgcttctttctgtctgtgtgttttaatttgcatctgccaagcataatgcatcttttttcctctgccattcttgtgttgattggagaatttttctgtatgtaattagaaaaaaatgtaaaacatgatttatgtgaaatactgtatagtaaaagttggtctaatagtagaactttaaaattttttcttattgtgaggaatctgttaaaagtttaaagctttgctgaaaactgaattcattctcaggaatttcataaatcttctccccaggtaaataattgaaatagctgtaaaataagtagatagctgctgttaatataatacagtacattttggggggcatatgtgtggttggggggtccttaaaaatcaaaatttgccatttcagttggatgaattactagaggtaataacaaatcttactataaaatcaagaggtttaagaacatacactgggcagatgttgattccgtgcatgcccaccttttattaccaaacaaggttttgtttatatgattgtattagaaatgctcagacttccccagaaatgaaccataaattttggaacttcctttcagctcaagaggttcagctatattgtatttgtgcagtgtaatcactactatttctgctcggtttcctaaaaggaaaaaaaaggcgcagtggtgatgaccctcatgaatgagccacgcttctgcattcttcttagaaactgctgtgaaaaacaatttatgtttgcagggtttaaaaatcagtaaaaatgggaatgattgagctaaaacccactctatgagaaggaagattactgaaaagcatgtgacatattgctacaaagattttttttcctaaatgattcagtaattgaatgattatttaatatatagtgctatcaagcaatccctggtactttggacttccatggcttgttatataaaattacatttttacatgtaaaaataaactaaacaaatctaatgataaaatataatgtcagatccatgttctaaaaaatttttgtaatgacatgacattacaagagtataaaaatggacattaaatcatggccttgcattaaaatatggaaagcagagcagtacatattcaaatgtattcagaaagtcaaaagattacctatcgttctacaataaaatacatggaaatagcttgctatttttatatacatttccaaaatattaagataactttctgtaagagtcaatgattctgttcgactaaatagctgtcctttccaacacattgctacttttttaaatactgtatcataagttcagcctgtcatactttttgcattgatcgttatgaataccagaccatttgtaagtgtggttgaagagcaaaatgctaattgacatctctagtaaatactgttacaggattcatgaacttgaataattctacagtttgaaactctgatgctatatatacatggtataatgtattcagactttgattactacttatttaaaatggaatgttttatggttgtgcatatggatgtgaagtgaaaatattagccttaactttaaaatttgggtgtttgatagtgtttattttgatattggtgaattagtcaccagtaaattttaaaaaagcacttggttgaaaattgtacttgaatacatacatgcatgctgctaaactagaactttaatttttccccataacttttataagtcccatttataaacccacttttaaaaataacaggtccaagttagagtgatgtgtgtatattattcaaaaaaatgtactggtgtgatatcttgtatgaatgatcatttaaatacagtacattactgtagaagctaaattgatctttataattaagcagaaattacaaaactaggaataatcaacattgtaagatatgttaataaaaacctgctgtcatttggtttgtgaaaggtccttaaaatgtttac

SEQ ID NO: 13680 - DNA, 3506 bp, Homo sapiens
tttttcttttggattatatccctggaaagaattcccaggggtgggaattacttggtcaaaaaacatgatttacatatgtttatttacatataattatgtaatttatatgctgtcttttaaagaagtgttggaatagctttgaccaactacccagtttcattgtgaatccagaggtgtacagttttacccaaattttgaagaattgaagctcatatgcttgaaaaataatataatcacagttttactctactcattaaaaattatttccaatgtaaattttttataattttcagtgaccagtgtaaccaatattttaattttttcagagtacatgtgatgcagaaaagtcttacgaagtattactgagctttgtgataagtgaactatttaaaggaaagttataccatgaagaaggaactcaggaatgtgcaatggttaaccctattgcttggtctcctgaatccatggaaaaatgcttacaggacttctgcttaccttttctcagaatcaccagccttcttcagcaccacctttttggggaagatttacctagctgccaggaagaagaagaattttcagttcttgccagctgcctgggacttctgccaacgttttaccaaacagaacatccattcatcagtgcctcctgtctggattggccagttccagcatttgatattataactcagtggtgttttgagataaaatcatttactgaaagacatgcagaacaaggaaaggccttgcttatccaagagtcaaaatggaaattaccacacctactacagttgcctgagaattataacaccatttttcagtactaccacagaaaaacctgtagtgtctgcaccaaggttcctaaagatcctgctgtttgccttgtgtgtggtacttttgtatgcctgaaaggactttgctgcaagcaacaaagttactgtgaatgtgtactgcactctcagaactgtggtgcaggaacaggtattttccttttgatcaatgcatcggtaattatcatcattcgaggtcaccgcttctgcctctggggttccgtgtatttggatgctcatggagaggaagaccgggatcttaggcgaggcaaacctctctacatttgtaaggaaagatacaaagttcttgagcaacagtggatttctcatacttttgatcacatcaataaaagatggggtccacattacaatgggctgtgactctccacctcagcattgcatcgtatcatcattttcgctacgaatttatttttcaacaataagctttaacttaatttgggggattaacacttttgctgagggagaaaaagaaaacatacattatgaagcctttccaaaattaggtgcttggtaatcacgttaatggtataattttttttttttaatatctggagaacattaataacaagttaaattattctttagtggtcattttttaagtgcacaattaataagaagcacaacttgttcacaaactcattcagaaatgattctcccaacaatgcatatcagctattcattgatacttagagtgggtgtgatttatttgacattttactgcttctttctgtctgtgtgttttaatttgcatctgccaagcataatgcatcttttttcctctgccattcttgtgttgattggagaatttttctgtatgtaattagaaaaaaatgtaaaacatgatttatgtgaaatactgtatagtaaaagttggtctaatagtagaactttaaaattttttcttattgtgaggaatctgttaaaagtttaaagctttgctgaaaactgaattcattctcaggaatttcataaatcttctccccaggtaaataattgaaatagctgtaaaataagtagatagctgctgttaatataatacagtacattttggggggcatatgtgtggttggggggtccttaaaaatcaaaatttgccatttcagttggatgaattactagaggtaataacaaatcttactataaaatcaagaggtttaagaacatacactgggcagatgttgattccgtgcatgcccaccttttattaccaaacaaggttttgtttatatgattgtattagaaatgctcagacttccccagaaatgaaccataaattttggaacttcctttcagctcaagaggttcagctatattgtatttgtgcagtgtaatcactactatttctgctcggtttcctaaaaggaaaaaaaaggcgcagtggtgatgaccctcatgaatgagccacgcttctgcattcttcttagaaactgctgtgaaaaacaatttatgtttgcagggtttaaaaatcagtaaaaatgggaatgattgagctaaaacccactctatgagaaggaagattactgaaaagcatgtgacatattgctacaaagattttttttcctaaatgattcagtaattgaatgattatttaatatatagtgctatcaagcaatccctggtactttggacttccatggcttgttatataaaattacatttttacatgtaaaaataaactaaacaaatctaatgataaaatataatgtcagatccatgttctaaaaaatttttgtaatgacatgacattacaagagtataaaaatggacattaaatcatggccttgcattaaaatatggaaagcagagcagtacatattcaaatgtattcagaaagtcaaaagattacctatcgttctacaataaaatacatggaaatagcttgctatttttatatacatttccaaaatattaagataactttctgtaagagtcaatgattctgttcgactaaatagctgtcctttccaacacattgctacttttttaaatactgtatcataagttcagcctgtcatactttttgcattgatcgttatgaataccagaccatttgtaagtgtggttgaagagcaaaatgctaattgacatctctagtaaatactgttacaggattcatgaacttgaataattctacagtttgaaactctgatgctatatatacatggtataatgtattcagactttgattactacttatttaaaatggaatgttttatggttgtgcatatggatgtgaagtgaaaatattagccttaactttaaaatttgggtgtttgatagtgtttattttgatattggtgaattagtcaccagtaaattttaaaaaagcacttggttgaaaattgtacttgaatacatacatgcatgctgctaaactagaactttaatttttccccataacttttataagtcccatttataaacccacttttaaaaataacaggtccaagttagagtgatgtgtgtatattattcaaaaaaatgtactggtgtgatatcttgtatgaatgatcatttaaatacagtacattactgtagaagctaaattgatctttataattaagcagaaattacaaaactaggaataatcaacattgtaagatatgttaataaaaacctgctgtcatttggtttgtgaaaggtccttaaaatgtttac

SEQ ID NO: 13681 - DNA, 2507 bp, Homo sapiens
gatgagaaccgtccagctcaatgtctgcagcagcgaagaggtggagaaagtggtggagatgtccgctcgagcctgaaggaccctgagaaaggcgaggcaaacctctctacatttgtaaggaaagatacaaagttcttgagcaacagtggatttctcatacttttgatcacatcaataaaagatggggtccacattacaatgggctgtgactctccacctcagcattgcatcgtatcatcattttcgctacgaatttatttttcaacaataagctttaacttaatttgggggattaacacttttgctgagggagaaaaagaaaacatacattatgaagcctttccaaaattaggtgcttggtaatcacgttaatggtataattttttttttttaatatctggagaacattaataacaagttaaattattctttagtggtcattttttaagtgcacaattaataagaagcacaacttgttcacaaactcattcagaaatgattctcccaacaatgcatatcagctattcattgatacttagagtgggtgtgatttatttgacattttactgcttctttctgtctgtgtgttttaatttgcatctgccaagcataatgcatcttttttcctctgccattcttgtgttgattggagaatttttctgtatgtaattagaaaaaaatgtaaaacatgatttatgtgaaatactgtatagtaaaagttggtctaatagtagaactttaaaattttttcttattgtgaggaatctgttaaaagtttaaagctttgctgaaaactgaattcattctcaggaatttcataaatcttctccccaggtaaataattgaaatagctgtaaaataagtagatagctgctgttaatataatacagtacattttggggggcatatgtgtggttggggggtccttaaaaatcaaaatttgccatttcagttggatgaattactagaggtaataacaaatcttactataaaatcaagaggtttaagaacatacactgggcagatgttgattccgtgcatgcccaccttttattaccaaacaaggttttgtttatatgattgtattagaaatgctcagacttccccagaaatgaaccataaattttggaacttcctttcagctcaagaggttcagctatattgtatttgtgcagtgtaatcactactatttctgctcggtttcctaaaaggaaaaaaaaggcgcagtggtgatgaccctcatgaatgagccacgcttctgcattcttcttagaaactgctgtgaaaaacaatttatgtttgcagggtttaaaaatcagtaaaaatgggaatgattgagctaaaacccactctatgagaaggaagattactgaaaagcatgtgacatattgctacaaagattttttttcctaaatgattcagtaattgaatgattatttaatatatagtgctatcaagcaatccctggtactttggacttccatggcttgttatataaaattacatttttacatgtaaaaataaactaaacaaatctaatgataaaatataatgtcagatccatgttctaaaaaatttttgtaatgacatgacattacaagagtataaaaatggacattaaatcatggccttgcattaaaatatggaaagcagagcagtacatattcaaatgtattcagaaagtcaaaagattacctatcgttctacaataaaatacatggaaatagcttgctatttttatatacatttccaaaatattaagataactttctgtaagagtcaatgattctgttcgactaaatagctgtcctttccaacacattgctacttttttaaatactgtatcataagttcagcctgtcatactttttgcattgatcgttatgaataccagaccatttgtaagtgtggttgaagagcaaaatgctaattgacatctctagtaaatactgttacaggattcatgaacttgaataattctacagtttgaaactctgatgctatatatacatggtataatgtattcagactttgattactacttatttaaaatggaatgttttatggttgtgcatatggatgtgaagtgaaaatattagccttaactttaaaatttgggtgtttgatagtgtttattttgatattggtgaattagtcaccagtaaattttaaaaaagcacttggttgaaaattgtacttgaatacatacatgcatgctgctaaactagaactttaatttttccccataacttttataagtcccatttataaacccacttttaaaaataacaggtccaagttagagtgatgtgtgtatattattcaaaaaaatgtactggtgtgatatcttgtatgaatgatcatttaaatacagtacattactgtagaagctaaattgatctttataattaagcagaaattacaaaactaggaataatcaacattgtaagatatgttaataaaaacctgctgtcatttggtttgtgaaaggtccttaaaatgtttac

SEQ ID NO: 13682 - DNA, 3581 bp, Homo sapiens
tttttcttttggattatatccctggaaagaattcccaggggtgggaattacttggtcaaaaaacatgatttacatatgtttatttacatataattatgtaatttatatgctgtcttttaaagaagtgttggaatagctttgaccaactacccagtttcattgtgaatccagaggtgtacagttttacccaaattttgaagaattgaagctcatatgcttgaaaaataatataatcacagttttactctactcattaaaaattatttccaatgtaaattttttataattttcagtgaccagtgtaaccaatattttaattttttcagagtacatgtgatgcagaaaagtcttacgaagtattactgagctttgtgataagtgaactatttaaaggaaagttataccatgaagaaggaactcaggaatgtgcaatggtatgtttctgcaaaaatcagatgtagcggttatttagtaaaaaatttacattttcttgccattatgaatgtaatttttaaaaactctttattgtagactgacttgttcaaattttcttttttaactttaggttaaccctattgcttggtctcctgaatccatggaaaaatgcttacaggacttctgcttaccttttctcagaatcaccagccttcttcagcaccacctttttggggaagatttacctagctgccaggaagaagaagaattttcagttcttgccagctgcctgggacttctgccaacgttttaccaaacagaacatccattcatcagtgcctcctgtctggattggccagttccagcatttgatattataactcagtggtgttttgagataaaatcatttactgaaagacatgcagaacaaggaaaggccttgcttatccaagagtcaaaatggaaattaccacacctactacagttgcctgagaattataacaccatttttcagtactaccacagaaaaacctgtagtgtctgcaccaaggttcctaaagatcctgctgtttgccttgtgtgtggtacttttgtatgcctgaaaggactttgctgcaagcaacaaagttactgtgaatgtgtactgcactctcagaactgtggtgcaggaacaggtattttccttttgatcaatgcatcggtaattatcatcattcgaggtcaccgcttctgcctctggggttccgtgtatttggatgctcatggagaggaagaccgggatcttaggcgaggcaaacctctctacatttgtaaggaaagatacaaagttcttgagcaacagtggatttctcatacttttgatcacatcaataaaagatggggtccacattacaatgggctgtgactctccacctcagcattgcatcgtatcatcattttcgctacgaatttatttttcaacaataagctttaacttaatttgggggattaacacttttgctgagggagaaaaagaaaacatacattatgaagcctttccaaaattaggtgcttggtaatcacgttaatggtataattttttttttttaatatctggagaacattaataacaagttaaattattctttagtggtcattttttaagtgcacaattaataagaagcacaacttgttcacaaactcattcagaaatgattctcccaacaatgcatatcagctattcattgatacttagagtgggtgtgatttatttgacattttactgcttctttctgtctgtgtgttttaatttgcatctgccaagcataatgcatcttttttcctctgccattcttgtgttgattggagaatttttctgtatgtaattagaaaaaaatgtaaaacatgatttatgtgaaatactgtatagtaaaagttggtctaatagtagaactttaaaattttttcttattgtgaggaatctgttaaaagtttaaagctttgctgaaaactgaattcattctcaggaatttcataaatcttctccccaggtaaataattgaaatagctgtaaaataagtagatagctgctgttaatataatacagtacattttggggggcatatgtgtggttggggggtccttaaaaatcaaaatttgccatttcagttggatgaattactagaggtaataacaaatcttactataaaatcaagaggtttaagaacatacactgggcagatgttgattccgtgcatgcccaccttttattaccaaacaaggttttgtttatatgattgtattagaaatgctcagacttccccagaaatgaaccataaattttggaacttcctttcagctcaagaggttcagctatattgtatttgtgcagtgtaatcactactatttctgctcggtttcctaaaaggaaaaaaaaggcgcagtggtgatgaccctcatgaatgagccacgcttctgcattcttcttagaaactgctgtgaaaaacaatttatgtttgcagggtttaaaaatcagtaaaaatgggaatgattgagctaaaacccactctatgagaaggaagataattgaatgattatttaatatatagtgctatcaagcaatccctggtactttggacttccatggcttgttatataaaattacatttttacatgtaaaaataaactaaacaaatctaatgataaaatataatgtcagatccatgttctaaaaaatttttgtaatgacatgacattacaagagtataaaaatggacattaaatcatggccttgcattaaaatatggaaagcagagcagtacatattcaaatgtattcagaaagtcaaaagattacctatcgttctacaataaaatacatggaaatagcttgctatttttatatacatttccaaaatattaagataactttctgtaagagtcaatgattctgttcgactaaatagctgtcctttccaacacattgctacttttttaaatactgtatcataagttcagcctgtcatactttttgcattgatcgttatgaataccagaccatttgtaagtgtggttgaagagcaaaatgctaattgacatctctagtaaatactgttacaggattcatgaacttgaataattctacagtttgaaactctgatgctatatatacatggtataatgtattcagactttgattactacttatttaaaatggaatgttttatggttgtgcatatggatgtgaagtgaaaatattagccttaactttaaaatttgggtgtttgatagtgtttattttgatattggtgaattagtcaccagtaaattttaaaaaagcacttggttgaaaattgtacttgaatacatacatgcatgctgctaaactagaactttaatttttccccataacttttataagtcccatttataaacccacttttaaaaataacaggtccaagttagagtgatgtgtgtatattattcaaaaaaatgtactggtgtgatatcttgtatgaatgatcatttaaatacagtacattactgtagaagctaaattgatctttataattaagcagaaattacaaaactaggaataatcaacattgtaagatatgttaataaaaacctgctgtcatttggtttgtgaaaggtccttaaaatgtttac

SEQ ID NO: 13683 - DNA, 1492 bp, Homo sapiens
  misc_feature (1448)..(1448): n is a, c, g, or t
tttttcttttggattatatccctggaaagaattcccaggggtgggaattacttggtcaaaaaacatgatttacatatgtttatttacatataattatgtaatttatatgctgtcttttaaagaagtgttggaatagctttgaccaactacccagtttcattgtgaatccagaggtgtacagttttacccaaattttgaagaattgaagctcatatgcttgaaaaataatataatcacagttttactctactcattaaaaattatttccaatgtaaattttttataattttcagtgaccagtgtaaccaatattttaattttttcagagtacatgtgatgcagaaaagtcttacgaagtattactgagctttgtgataagtgaactatttaaaggaaagttataccatgaagaaggaactcaggaatgtgcaatggtatgtttctgcaaaaatcagatgtagcggttatttagtaaaaaatttacattttcttgccattatgaatgtaatttttaaaaactctttattgtagactgacttgttcaaattttcttttttaactttaggttaaccctattgcttggtctcctgaatccatggaaaaatgcttacaggacttctgcttaccttttctcagaatcaccagccttcttcagcaccacctttttggggaagatttacctagctgccaggaagaagaagaattttcagttcttgccagctgcctgggacttctgccaacgttttaccaaacagaacatccattcatcagtgcctcctgtctggattggccagttccagcatttgatattataactcagtggtgttttgagataaaatcatttactgaaagacatgcagaacaaggaaaggccttgcttatccaagagtcaaaatggaaattaccacacctactacagttgcctgagaattataacaccatttttcagtactaccacagaaaaacctgtagtgtctgcaccaaggttcctaaagatcctgctgtttgccttgtgtgtggtacttttgtatgcctgaaaggactttgctgcaagcaacaaagttactgtgaatgtgtactgcactctcagaactgtggtgcaggaacaggtattttccttttgatcaatgcatcggtaattatcatcattcgaggtcaccgcttctgcctctggggttccgtgtatttggatgctcatggagaggaagaccgggatcttaggcgaggcaaacctctctacatttgtaaggaaagatacaaagttcttgagcaacagtggatttctcatacttttgatcacatcaataaaagatggggtccacattacaatgggctgtgactctccacctcagcattgcatcgtatcatcattttcgctacgaatttatttttcaacaataagctttaacttaatttgggggattaacacttttgctgaggggagtggnataatttttttttaaatctggggaacatattaacagttaattat

SEQ ID NO: 13684 - DNA, 223 bp, Homo sapiens
aaaatcatagtatatatatataggatttggtgcttccatactttcaggcatccactgggagtcttgaaacgtgtcgccctgggataagggggacaactgtatgcacaattctttgtccaaaggactcatcctccagggaggaagggagaagggtgaagatgctcagagtacaggtgggccactggctctcccaagacattccatccatttctggaacgtcatt

SEQ ID NO: 13685 - DNA, 458 bp, Homo sapiens
ctgtggatctcctaaagcaggaggtgatattcaatgttgtccgcctggctgctaccatcatcacctgccattgggtttcctgctgatgctgttgcctgaggaatgggatgaaatcaccctgaggttcatcaacagcctgaaggaaaagaagagtgaggagcatgtggatgatgtgactgatcccagcataacacctgcggggcagaggcagagccaatgggacagtgtctataccactggcttagagagggacatattttgaatgcacgtgtatgtatattctgtgaatataacaaaattttctcactacctgtacactcaaacgacagtattaactctgaatttggataaatcatatgtgaaataatgccaacaataaaagtttacatttatatgcttatcaaggaattggtgtaaataatcataatggatttttttattaaaacacatttgtcctt

SEQ ID NO: 13686 - DNA, 351 bp, Homo sapiens
cttttcaccttgcactctgagctacctggcaccccaaaactcctcctggtagtggggttgagctcttgtaaggagcctgaggaagaaagaccagtattgggagctcatgtcccagcccctcatgcacagttcacctagactagagccaggaagtttagggagtcccagtgcatggctaggggtgccctgagggcgctgtctgaacctcaggctgtcacagttcatcaatcagccagccatgcacctgtcaggtgtgcctgccaacagcctgccccatctttctcatcctcccagccaaggcagaccactccagagggacctgcacagccccttcctcaagaccaccacagg

SEQ ID NO: 13687 - DNA, 334 bp, Homo sapiens
caacaacatttgtattcactgactgtagcaatcataagtaattctcatccatgtatgagaccttctaagacaaattccccctctcacatcgacagcaagaattcatttctttttaaatctcctagaacagatgtttactgtcaggctgacctttctgccaagtagtgaggttctgggcatttgtggtgatgatgtctgtttctgagctgctgcaatccctccccagacattcaccagctgctcccaaaccattactgattctatccagggcttccctctgggatctcctccatattcaaagcatatattagaacaaatatgaaccaaaaggttt

SEQ ID NO: 13688 - DNA, 465 bp, Homo sapiens
tgaagaaattatctgtgggttaaaagttagctggcaaaatggagacatctgagacatcacaatgcgtttgttagatctgggataatgctatcattttaaagggataatgctatccagaagagaatggctggaatggtgaagaatgtgaaaaatttgacatgacaggtgagtggactgtgagggagatatttcgcctagataagaaaatgtgacattagtggtggtagtaaggatcgttagtattttcacatattttatgctttgtctctggaaggctaagcatgtaacttgcttaggctgaagcaggctttttacccggagaggtgaactattagagcttttattttactctctttaattatgagcattccccacataggatagttaaacatgtaaaacagacccttatgtccagcccccagttttgttgaatcttaacatttctcatgtatgttttagccttaa

SEQ ID NO: 13689 - DNA, 420 bp, Homo sapiens
gtcacctgttgcccttacagtccccgcccatcccaggtctccctcagaccctgcccgagcgcccccgtccttgcccagcgggccgggaagcacctcgggcaggtggaagccggcccaggcacccagcctgcctctgttggtcggttagaaagacagaccccaaacaccagttccaagaccccggagggcggagggcccgcaaaggaaaggagcccaccatgcgcgtctcagaacaagccttgatgtcttagcgcaggatggggcaggcccccggagttcctgcctgcgtggtctttaggaagtttagtctctggcccagttgggccgggacagcccagaccttcactttgcaagactccgctggtgctcggatctctgccctcttcccaggaggggaagaagcttctttcttcctggccc

SEQ ID NO: 13690 - DNA, 504 bp, Homo sapiens
aaagaactaaatttattcttattttgcatttgacaaaatgaactggttgccattaagtttccatagttggcagaggaaagtaaaatagggcaaggttatgttagaaaaccccaactccagaactctctaaagctcccttggtctccctgggaacagcaggattttagctgtcgctgtctcttgctctgcttgaagcaatgatttcaataaccatttgacaataccaaaagatcagggcacggacaacaaggcctcctggagaattactttggtttagctactttagcaactcttgtccttggagtctatttaaattacagaatagcaccaccaccgtttgtcaggctaggcttcatagcaggagctccaggaaaagcatgacttcagatccctgtgcgtatcctgctagtggtgaatgagaacctggcagagctgtgctccctgcgttcttgagtttcggattctggacttggatgccccattatatgggatttgatccaaagt

SEQ ID NO: 13691 - DNA, 365 bp, Homo sapiens
taaaaatttaaacatttgtgtcaattacatattcatgtaggtaataaaaaaatctcactggccaggcgtggtggctcgtgcctgtaattccagcattttgtgagaccaaggcaggagaattacttgagcctaggagtttgagaccagcctgaacaacatggtgaaatcctctgtctacaaaaaatagaaataaaaaaattagccaagtgtggtcccatgcctgtggtcctgggacccatgcctgtggtcccagctacttaggaggctgagatgggaggattgcttgagcccaggaggtcgaggctgcagtgagtcatcatcctgccactgcactccagcctaggtgacaggatgagaaccttaaa

SEQ ID NO: 13692 - DNA, 370 bp, Homo sapiens
aagcaagaaagaaagaatatgtatttaatttgtgtgagaaagggaggtgcaaggttctgtatatctctaatgatctaactttttgcttgcattgctcatatttcctatttactgttactgacttgagcaatgtggtagattattatggtaatctcattatggtagatttgtcagtttctctgtgagttctagcaatttttggttcatatatgttgacagtattttattaggtgtgaataaccttatacttttcatcttcctgttgagctgtacttaggtttatggccttttccattccgaataaatgcttttattttcttggtcttcattgtctgatattaatataattactccagctttgttttgtttg

SEQ ID NO: 13693 - DNA, 324 bp, Homo sapiens
ggtatactaaaaaccctaacctcagcaatatacaattcatccatgtaatcaaaaaccacgtgtatttccaaagctattgaaacaaaaaaaattgttttaattcaaaacagggaaacaataaatgataagaataagaaactgaatagagagcttggaattttttttaaatcaaacaaatcctggagctgaaaaaaaaaagaaattaaaaaaatgcaatagagaacatcacagcagaattgatcatggagaaaaagtacttgtgtacttgaatacaggttatttgaaaaaatatagtcagaagaaaaataaaaaagaaagaaaagg

SEQ ID NO: 13694 - DNA, 351 bp, Homo sapiens
ctcctgcctcagtctcccaagtagctgggattacaggcgcatgccaccacgcccggctactttttgtatgtttagtagagactggattttgccatgttggccaggctggtctcgaactcctgacttcaggtgatcacctgccttggcctcccaaagtgctgggattacaggcatgagccccagtggccggccacgcatttttttttttttttttaatagttggttctttctatgttgcccaggatggcctcgaactcgggctcaagtgatgcttctgttttagcctcctaaatactttggactatgggcatgcctgtcttagatgcacatttttaaaagttttttgaaatt

SEQ ID NO: 13695 - DNA, 359 bp, Homo sapiens
ggactcaagctgttttcctgcctcagccccccatgtcgctgggactacaggtgcacaccaacatgtacaattgactttaaaattagtttttgtagagatggagccatgaactcctggccacaagcattcctcctgcctcaaccttccaataaaggttttaaaaaatgaaaatgtaatgctttatatttgagaaatgtctttaataatttgtcacataataaattgtcatgacaatattagtacttcagattcttcatttacagtagaagagccactgatctagaattatctaaaactactatttttctaaccacctaataattattgaaattaagcaataaagctatcaataataacac

SEQ ID NO: 13696 - DNA, 983 bp, Homo sapiens
gtaactgaaagcaatttaaaagatttccagagacatgggaagtgtcacccaaagatatgagatctgtatgtgatgaaaatgattagtgagggcagactactaataatgatgtgtcagtcaactgagttcagagacagattaaagagatgcaccaagttctattgtttaataattttttttttcccgagactctgtctgtcgcccaggctggagtgcagtagtgccatctcagctcactgcaagctccgcctcctgggttcaaatgattctcctgtctcagcctccctagtagctgggattacaggcatccaccatcatgcctggctaatttttgtatttttgttagagacagggttttcaccatgttggccaggctggtcttgaactcctgacctcaagtgatctgtgggcctcagcctcccaaagtgttgggattacaggcgtgagccactgtgcctggctgggtttttgttttatgtatttttttattattatttttttaatttttaatttaattttattttttgtaggggcaaggctttgccgtgttgcctaagctggtttcgaactcctgaactcaagcaatctgcttgactcagtctcccagagtgctgggattacaggtgtgagccacccaggcctggccatatttatttttgagagaaaggggggtctcgctctgtcacccaggctggaatgcagtggagcaatcatagctcgttgcagcctcaaactcctgggctcaagcaatcctcccacctcgccctcccaagtatcttgaactatagatgctcgccaccacgcccctgttttatttttttattttgtttttccctactttcagggtgatttcatcaacattcttttctaacctttcaattgaattttttatttctgatttcatgtttttaatatccaattaactccttattttggtaatgtttcttttttatagtattccaatcagtcagcattcacttaaa

SEQ ID NO: 13697 - DNA, 764 bp, Homo sapiens
gtaactgaaagcaatttaaaagatttccagagacatgggaagtgtcacccaaagatatgagatctgtatgtgatgaaaatgattagtgagggcagactactaataatgatgtgtcagtcaactgagttcagagacagattaaagagatgcaccaagttctattgtttaataattttttttttcccgagactctgtctgtcgcccaggctggagtgcagtagtgccatctcagctcactgcaagctccgcctcctgggttcaaatgattctcctgtctcagcctccctagtagctgggattacaggcatccaccatcatgcctggctaatttttgtatttttgttagagacagggttttcaccatgttggccaggctggtcttgaactcctgacctcaagtgatctgtgggcctcagcctcccaaagtgttgggattacaggcgtgagccactgtgcctggctgggtttttgttttatgtatttttttattattatttttttaatttttaatttaattttattttttgtaggggcaaggctttgccgtgttgcctaagctggtttcgaactcctgaactcaagcaatctgcttgactcagtctcccagagtgctgggattacaggtgtgagccacccaggcctggccatatttatttttgagagaaaggggggtctcgctctgtcacccaggagttcaaggctgcagcaagctttgattgcgccactgcactccagccttggcgacagactaagacgctgtctca

SEQ ID NO: 13698 - DNA, 487 bp, Homo sapiens
  misc_feature (486)..(486): n is a, c, g, or t
cattgcagccttgacctgagcttaaaatgatcctcccacctcagcccccacaaagtagctggggacttaccaagcatgccatccaccataccctgctaatttttggaagtttttttttgtggagttgggttcttgctatgttgcttaggctgatctcaaactcctgggctcaagtgatcctcctacctcattctcccaaagtgctgggattacaggtgtgagtcactgcacctagcttaaaaagtttaaattgcaaacaaatctccataggcatgaacagggaaatggataatcctttccctttttaagattatcattgtgttggtaaggaaatgaactcttctccaaaagagtcctgatggtagtgtatttgtttgatttataaaggttgacttttttattagctaagtacttcatttgtctactttatctgatcagtagatcaggcatgaatccacttcagattggtaaccctagtgccgaatnt

SEQ ID NO: 13699 - DNA, 466 bp, Homo sapiens
gatatattcacttattatttcctagaacctgtggatattaccttatgtaggaaaagagtgagtattaccttatacgggaaaagtgatgaaggatgttgagaggaactgtttatcctggattatctggatgggataattcttgataatttttgaaatcctaagtgctatcacatgcatacatataagagagagcagagggaatttgagacatacccatgcagaggagacagccatgtgaagatggaggcagagatgggagtgagtctgccacaagccaaggaagcctggggccaccaaaagctggaaggaagaggccccagagcctctcggaggagtgtggctctcttgatgccttgatttaggatttctgacctctagaactatgagagaatacatttctactgttttaacccattatgctggaggttgcagatttttttgtgtgaaaaatcagaccttggtgatg

SEQ ID NO: 13700 - DNA, 383 bp, Homo sapiens
ggcatatacctgctgtggggtcaaagggcaagattcaacaggtgacactaatgaggaaatcataacatttattcaagagaggagaataatattggggattcttcaaaagcaaggagcatcttgtgtctacttatcctgcaaggtccctggaattctcagtatttctgatgaatggagtgtgtgtattggagggatgcatggaagagatggacagcatcttctgcctgccgagtgttgttgagcagtaaatgcatatgatccagaggtgagaatattcacactactctgggacaggcagagaaagcttgctgaaagcgtgacagtttgaaatgtgtgggatcttgcatcatttctcaaggccctactccctgaagtgtcagcac

SEQ ID NO: 13701 - DNA, 482 bp, Homo sapiens
tgtcatgtcttttgatggagcacatgtattcaaggcctttttcctccagattctgtgctttttacattctatgctacaagactgatattttgtctgtttgtaattacccagttgtggtcatttgcattaaatgacatgagaatttagagtagaaatgccattttcaaaaagcgctgggagtcatcatgtcaaagttcattcaactcattgggagttttccctcaagcagcaaccaaaggctgggtgcggtggctcacgctggtaatcccagcactttgggaggccaaggcaggaggatctcttgagcccaggagctcaagaccagcctgaacaacacagtgagaccttgtctctataaaacagtttaaaaattagccaggtgtgttggcacatgcctatagtcccagctacttgggaggctgagacgggagatcactcgagtccaaaagtctgaggctgcagtgagctatgatcgtgccact

SEQ ID NO: 13702 - DNA, 353 bp, Homo sapiens
tttttaatggttttattctcttattagactctaacatcttagtcatataaaaatgctattttcatctacaagctatcagatttctatgtggtatcttgaagatcaataaactgctgtatacattttaaagtacattttctaaatacttagtatgatataaattgtagatttatggcacattagatctaaggctatatccttatctctcaaaacattttaagatttttttcactgttgaagaatacaggcttttagcttgacatgctctgaaaaattatttttaaggccgatttttctatatatttaggtatggtttcatcctttcctcaatatagttgttataaattccaatt

SEQ ID NO: 13703 - DNA, 1215 bp, Homo sapiens
gccccggcccttctcccctcatcacgctccttccaaaccactatgcccacgcacgcacccacccaaacagagcgttttctggtccccgagctcctcccgaccccacccgctcctacggcctccaaccggccccccccaggtgtgtgcagtggcctcagggatccggaaagtctaggactgaacttctcctaacatccagtaatggggacctggaacctgggcgtactagagtgccgcgcgtagggctccaggtcgctggcttctgcgctttcttcctctccaaagttgagtatctcctatctgtgtcctcatacatactgccgcctgaggtgccatggcccccaagccgggggccgagtggagcacagccctgtcccatctggtgctgggagtggtgtctctgcacgcagccgtgagcacagccgaggcaagtcgaggggctgctgctggcttcctgctccaggtcttggctgccaccaccacgctggccccagggctgagcacacatgaagactgccttgctggagcctgggtggccaccgtcatcggccttccccttctggccttcgatttccactgggtgaatggggaccgctcctctgccaacctgctcctgggaggaggcatggtgctggcagtggctggcggccacctcggccctgagggccgctctgtggctggtcaggcaatgctgttggtggtcgcagtgaccatcctcattgtagctgtcttcacggccaacacttatgggatgtgggggggggcgatgctgggtgtggcaggcctcctgagccggctggaggaggacaggctgctgctgctaccgaaggaggatgtctgtcgctgggccttggctgtaggcagctgggcttactgccgggccctgcatacacagcgcctccagtgggagtgacagttggatacagccaggcagggtttctgccctgccgaacactttccctcccacctgcctgctcctggcgccttctccctaggggtagactcttctgcctactgaagtgggtttgctgcacattgactggtcaggggcagagtctgggtgctgtcctttggccacgtgtggggacttgtctagaccagaatgaaagggacagggtcccagacacgtttgggggtcctgattctgggctggacacggttgtggatccagagaagaggcctagtctccaataaatcttaggaattttgcaggaa

SEQ ID NO: 13704 - DNA, 1485 bp, Homo sapiens
aaggctaggtgacgaggcctgggtgtcgttcccgaccgcgctcgctcccgcaactggaggcacggcagaggaggcagggccgacggcggtgggcggtgcgttgcgcaggctcgggcctcccgctcgccgctgcgttgggaccgcgcagcccggtaactgcgcacggctggcctcccgggagtcctgcgccgtcgctcctcctggacccgggttcccaggacaacgcctcccggaacgcagggagcaggccgaggccgccgcgtgggcctgcagcgcctcgccgctctctcttccccaggcccgcactcccacttgggctccagggccccagggctgacgttccccccagcttagaccctgagtcgttttcccccgtttcccggctgaattaggttcttcttctccacaggtgtgtgcagtggcctcagggatccggaaagtctaggactgaacttctcctaacatccagtaatggggacctggaacctgggcgtactagagtgccgcgcgtagggctccaggtcgctggcttctgcgctttcttcctctccaaagttgagtatctcctatctgtgtcctcatacatactgccgcctgaggtgccatggcccccaagccgggggccgagtggagcacagccctgtcccatctggtgctgggagtggtgtctctgcacgcagccgtgagcacagccgaggcaagtcgaggggctgctgctggcttcctgctccaggtcttggctgccaccaccacgctggccccagggctgagcacacatgaagactgccttgctggagcctgggtggccaccgtcatcggccttccccttctggccttcgatttccactgggtgaatggggaccgctcctctgccaacctgctcctgggaggaggcatggtgctggcagtggctggcggccacctcggccctgagggccgctctgtggctggtcaggcaatgctgttggtggtcgcagtgaccatcctcattgtagctgtcttcacggccaacacttatgggatgtgggggggggcgatgctgggtgtggcaggcctcctgagccggctggaggaggacaggctgctgctgctaccgaaggaggatgtctgtcgctgggccttggctgtaggcagctgggcttactgccgggccctgcatacacagcgcctccagtgggagtgacagttggatacagccaggcagggtttctgccctgccgaacactttccctcccacctgcctgctcctggcgccttctccctaggggtagactcttctgcctactgaagtgggtttgctgcacattgactggtcaggggcagagtctgggtgctgtcctttggccacgtgtggggacttgtctagaccagaatgaaagggacagggtcccagacacgtttgggggtcctgattctgggctggacacggttgtggatccagagaagaggcctagtctccaataaatcttaggaattttgcaggaa

SEQ ID NO: 13705 - DNA, 502 bp, Homo sapiens
tcgagctgactcttgaggatcccccgtggccagtacagatatgtaggggggcgatgctgggtgtggcaggcctcctgagccggctggaggaggacaggctgctgctgctaccgaaggaggatgtctgtcgctgggccttggctgtaggcagctgggcttactgccgggccctgcatacacagcgcctccagtgggagtgacagttggatacagccaggcagggtttctgccctgccgaacactttccctcccacctgcctgctcctggcgccttctccctaggggtagactcttctgcctactgaagtgggtttgctgcacattgactggtcaggggcagagtctgggtgctgtcctttggccacgtgtggggacttgtctagaccagaatgaaagggacagggtcccagacacgtttgggggtcctgattctgggctggacacggttgtggatccagagaagaggcctagtctccaataaatcttaggaattttgcaggaa

SEQ ID NO: 13706 - DNA, 1626 bp, Homo sapiens
gccccggcccttctcccctcatcacgctccttccaaaccactatgcccacgcacgcacccacccaaacagagcgttttctggtccccgagctcctcccgaccccacccgctcctacggcctccaaccggccccccccaggtgtgtgcagtggcctcagggatccggaaagtctaggactgaacttctcctaacatccagtaatggggacctggaacctgggcgtactagagtgccgcgcgtagggctccaggtcgctggcttctgcgctttcttcctctccaaagttgagtatctcctatctgtgtcctcatacatactgccgcctgaggtgccatggcccccaagccgggggccgagtggagcacagccctgtcccatctggtgctgggagtggtgtctctgcacgcagccgtgagcacagccgaggcaagtcgaggggctgctgctggcttcctgctccaggtcttggctgccaccaccacgctggccccagggctgagcacacatgaagactgccttgctggagcctgggtggccaccgtcatcggccttccccttctggccttcgatttccactgggtgaatggggaccgctcctctgccaacctgctcctgggaggaggcatggtgctggcagtggctggcggccacctcggccctgagggccgctctgtggctggtcaggcaatgctgttggtggtcgcagtgaccatcctcattgtagctgtcttcacggccaacacttatgggatgtgggggggggcgatgctgggtgtggcaggcctcctgagccggctggaggaggacaggctgctgctgctaccgaaggaggatgtctgtcgctgggccttggctgtaggcagctgggcttactgccgggccctgcatacacagcgcctccagtgggagtgacagttggatacagccaggcagggtttctgccctgccgaacactttccctcccacctgcctgctcctggcgccttctccctaggggtagactcttctgcctactgaagtgggtttgctgcacattgactggtcaggggcagagtctgggtgctgtcctttggccacgtgtggggacttgtctagaccagaatgaaagggacagggtcccagacacgtttgggggtcctgattctgggctggacacggttgtggatccagagaagaggcctagtctccaataaatcttaggaattttgcaggaaaaaccaacaaaaaacaaaaaaaaaaacaaaaaaaaaggggggggggcgtccaaaaggttcccccgggggggcgccaggttaacggtttaccgaggtttctttgcaccaggggggcccctatgggggggcgggattttaaggctggcgcctgggccgggggtttacaaggtcgggaacggggaaaaccgggcacccggggaacctggggaagggacccttacctccgggggggggaccaatgtggggcccaatttccctaaggggaatttaagcgcctaaggggaaatttttaacaattttaagggggttaatagggggttttaaactatagggcgaaataggcgtgggcggcttgagaaaaatttggcgcaagcggagaatatgaatttgggaaaatttttattcggggtc

SEQ ID NO: 13707 - DNA, 714 bp, Homo sapiens
aaggctaggtgacgaggcctgggtgtcgttcccgaccgcgctcgctcccgcaactggaggcacggcagaggaggcagggccgacggcggtgggcggtgcgttgcgcaggctcgggcctcccgctcgccgctgcgttgggaccgcgcagcccggtaactgcgcacggctggcctcccgggagtcctgcgccgtcgctcctcctggacccgggttcccaggacaacgcctcccggaacgcagggagcaggccgaggccgccgcgtgggcctgcagcgcctcgccgctctctcttccccaggtgtgtgcagtggcctcagggatccggaaagtctaggactgaacttctcctaacatccagtaatggggacctggaacctgggcgtactagagtgccgcgcgtagggctccaggtcgctggcttctgcgctttcttcctctccaaagttgagtatctcctatctgtgtcctcatacatactgccgccttctccctaggggtagactcttctgcctactgaagtgggtttgctgcacattgactggtcaggggcagagtctgggtgctgtcctttggccacgtgtggggacttgtctagaccagaatgaaagggacagggtcccagacacgtttgggggtcctgattctgggctggacacggttgtggatccagagaagaggcctagtctccaataaatcttaggaattttgcaggaa

SEQ ID NO: 13708 - DNA, 454 bp, Homo sapiens
gccccggcccttctcccctcatcacgctccttccaaaccactatgcccacgcacgcacccacccaaacagagcgttttctggtccccgagctcctcccgaccccacccgctcctacggcctccaaccggccccccccaggtgtgtgcagtggcctcagggatccggaaagtctaggactgaacttctcctaacatccagtaatggggacctggaacctgggcgtactagagtgccgcgcgtagggctccaggtcgctggcttctgcgctttcttcctctccaaagttgagtatctcctatctgtgtcctttggccacgtgtggggacttgtctagaccagaatgaaagggacagggtcccagacacgtttgggggtcctgattctgggctggacacggttgtggatccagagaagaggcctagtctccaataaatcttaggaattttgcaggaa

SEQ ID NO: 13709 - DNA, 1228 bp, Homo sapiens
aaggctaggtgacgaggcctgggtgtcgttcccgaccgcgctcgctcccgcaactggaggcacggcagaggaggcagggccgacggcggtgggcggtgcgttgcgcaggctcgggcctcccgctcgccgctgcgttgggaccgcgcagcccggtgtgtgcagtggcctcagggatccggaaagtctaggactgaacttctcctaacatccagtaatggggacctggaacctgggcgtactagagtgccgcgcgtagggctccaggtcgctggcttctgcgctttcttcctctccaaagttgagtatctcctatctgtgtcctcatacatactgccgcctgaggtgccatggcccccaagccgggggccgagtggagcacagccctgtcccatctggtgctgggagtggtgtctctgcacgcagccgtgagcacagccgaggcaagtcgaggggctgctgctggcttcctgctccaggtcttggctgccaccaccacgctggccccagggctgagcacacatgaagactgccttgctggagcctgggtggccaccgtcatcggccttccccttctggccttcgatttccactgggtgaatggggaccgctcctctgccaacctgctcctgggaggaggcatggtgctggcagtggctggcggccacctcggccctgagggccgctctgtggctggtcaggcaatgctgttggtggtcgcagtgaccatcctcattgtagctgtcttcacggccaacacttatgggatgtgggggggggcgatgctgggtgtggcaggcctcctgagccggctggaggaggacaggctgctgctgctaccgaaggaggatgtctgtcgctgggccttggctgtaggcagctgggcttactgccgggccctgcatacacagcgcctccagtgggagtgacagttggatacagccaggcagggtttctgccctgccgaacactttccctcccacctgcctgctcctggcgccttctccctaggggtagactcttctgcctactgaagtgggtttgctgcacattgactggtcaggggcagagtctgggtgctgtcctttggccacgtgtggggacttgtctagaccagaatgaaagggacagggtcccagacacgtttgggggtcctgattctgggctggacacggttgtggatccagagaagaggcctagtctccaataaatcttaggaattttgcaggaa

SEQ ID NO: 13710 - DNA, 1680 bp, Homo sapiens
aaggctaggtgacgaggcctgggtgtcgttcccgaccgcgctcgctcccgcaactggaggcacggcagaggaggcagggccgacggcggtgggcggtgcgttgcgcaggctcgggcctcccgctcgccgctgcgttgggaccgcgcagcccggtaactgcgcacggctggcctcccgggagtcctgcgccgtcgctcctcctggacccgggttcccaggacaacgcctcccggaacgcagggagcaggccgaggccgccgcgtgggcctgcagcgcctcgccgctctctcttccccaggcccgcactcccacttgggctccagggccccagggctgacgttccccccagcttagaccctgagtcgttttcccccgtttcccggctgaattaggttcttcttctccacaggtgtgtgcagtggcctcagggatccggaaagtctaggactgaacttctcctaacatccagtaatggggacctggaacctgggcgtactagagtgccgcgcgtagggctccaggtcgctggcttctgcgctttcttcctctccaaagttgagtatctcctatctgtgtcctcatacatactgccgcctgaggtgccatggcccccaagccgggggccgagtggagcacagccctgtcccatctggtgctgggagtggtgtctctgcacgcagccgtgagcacagccgaggtgagtacactggggctgagcaggggcgcatccccatacctcccaaaccccaaggacctagtttcctgaattagagagaggttggtgggaagtgcgtctaagaccaggtctccatggaagccccaaaccctttcctgtttaaaagggtgaccccgcgctctttttcccacgtgttctcccttcctgtgttgacaggcaagtcgaggggctgctgctggcttcctgctccaggtcttggctgccaccaccacgctggccccagggctgagcacacatgaagactgccttgctggagcctgggtggccaccgtcatcggccttccccttctggccttcgatttccactgggtgaatggggaccgctcctctgccaacctgctcctgggaggaggcatggtgctggcagtggctggcggccacctcggccctgagggccgctctgtggctggtcaggcaatgctgttggtggtcgcagtgaccatcctcattgtagctgtcttcacggccaacacttatgggatgtgggggggggcgatgctgggtgtggcaggcctcctgagccggctggaggaggacaggctgctgctgctaccgaaggaggatgtctgtcgctgggccttggctgtaggcagctgggcttactgccgggccctgcatacacagcgcctccagtgggagtgacagttggatacagccaggcagggtttctgccctgccgaacactttccctcccacctgcctgctcctggcgccttctccctaggggtagactcttctgcctactgaagtgggtttgctgcacattgactggtcaggggcagagtctgggtgctgtcctttggccacgtgtggggacttgtctagaccagaatgaaagggacagggtcccagacacgtttgggggtcctgattctgggctggacacggttgtggatccagagaagaggcctagtctccaataaatcttaggaattttgcaggaa

SEQ ID NO: 13711 - DNA, 1374 bp, Homo sapiens
aaggctaggtgacgaggcctgggtgtcgttcccgaccgcgctcgctcccgcaactggaggcacggcagaggaggcagggccgacggcggtgggcggtgcgttgcgcaggctcgggcctcccgctcgccgctgcgttgggaccgcgcagcccggtaactgcgcacggctggcctcccgggagtcctgcgccgtcgctcctcctggacccgggttcccaggacaacgcctcccggaacgcagggagcaggccgaggccgccgcgtgggcctgcagcgcctcgccgctctctcttccccaggtgtgtgcagtggcctcagggatccggaaagtctaggactgaacttctcctaacatccagtaatggggacctggaacctgggcgtactagagtgccgcgcgtagggctccaggtcgctggcttctgcgctttcttcctctccaaagttgagtatctcctatctgtgtcctcatacatactgccgcctgaggtgccatggcccccaagccgggggccgagtggagcacagccctgtcccatctggtgctgggagtggtgtctctgcacgcagccgtgagcacagccgaggcaagtcgaggggctgctgctggcttcctgctccaggtcttggctgccaccaccacgctggccccagggctgagcacacatgaagactgccttgctggagcctgggtggccaccgtcatcggccttccccttctggccttcgatttccactgggtgaatggggaccgctcctctgccaacctgctcctgggaggaggcatggtgctggcagtggctggcggccacctcggccctgagggccgctctgtggctggtcaggcaatgctgttggtggtcgcagtgaccatcctcattgtagctgtcttcacggccaacacttatgggatgtgggggggggcgatgctgggtgtggcaggcctcctgagccggctggaggaggacaggctgctgctgctaccgaaggaggatgtctgtcgctgggccttggctgtaggcagctgggcttactgccgggccctgcatacacagcgcctccagtgggagtgacagttggatacagccaggcagggtttctgccctgccgaacactttccctcccacctgcctgctcctggcgccttctccctaggggtagactcttctgcctactgaagtgggtttgctgcacattgactggtcaggggcagagtctgggtgctgtcctttggccacgtgtggggacttgtctagaccagaatgaaagggacagggtcccagacacgtttgggggtcctgattctgggctggacacggttgtggatccagagaagaggcctagtctccaataaatcttaggaattttgcaggaa

SEQ ID NO: 13712 - DNA, 748 bp, Homo sapiens
aaggctaggtgacgaggcctgggtgtcgttcccgaccgcgctcgctcccgcaactggaggcacggcagaggaggcagggccgacggcggtgggcggtgcgttgcgcaggctcgggcctcccgctcgccgctgcgttgggaccgcgcagcccggtgtgtgcagtggcctcagggatccggaaagtctaggactgaacttctcctaacatccagtaatggggacctggaacctgggcgtactagagtgccgcgcgtagggctccaggtcgctggcttctgcgctttcttcctctccaaagttgagtatctcctatctgtgtcctcatacatactgccgcctgaggtgccatggcccccaagccgggggccgagtggagcacagccctgtcccatctggtgctgggagtggtgtctctgcacgcagccgtgagcacagccgaggcaagtcgaggggctgctgctggcttcctgctccaggtcttggctgccaccaccacgtggcagtggctggcggccacctcggccctgagggccgctctgtggctggtcaggcaatgctgttggtggtcgcagtgaccatcctcattgtagctgtcttcacggccaacacttatgggatgtgggggggggcgatgctgggtgtggcaggcctcctgagccggctggaggaggacaggctgctgctgtacgcccagaggttgtctggctctgcccactagttgcttgcccctcctttcagccgacgtctt

SEQ ID NO: 13713 - DNA, 1014 bp, Homo sapiens
tatttttttttagttttaagtcctataggactatgagtctctaagttatttgtttcagaaaattattctttttttatgtgataaatcatatgatttaagtgcatgaataagcattttcccacacaatgaacatttgaactgtgtttatgaaaattttctggtttgcaccatgaatttgtcaaatggatatttataggaatatattcactactttgtatactttgcaaatttgtctctctggctttacccaagttctgaatgcattgtaattaaaatttaagtttttcttttcccccattagtaaacatttagtgctacatatgataactgcccaatatttattctatttacttagctaaatatttgcattcttgtaaccttctatggtgttttgtggctcttatcttgtggaccataaataacacggcccaataactctttgtgtttatggagtgttgttttcttagaataatggagatgcagatatagataccatagtcaaggtaccgccttgctgaagtatttatttataaagaatattctgtagaacctctactaccagctatatttttaaatcctgtttatttgtaaagctaatatgctcctcaatgtaattattaaaaattctcaagtcacagctaaacttactaattctgattttagtgtagcccctaaattaaaaatggcttccatatgccactctgtaccccaaagagagttctcatgaaatattctccagaatgtattcattatcaagaaaatgtcaatcgtcacttcctcgttttaactcagctgaaacaccaggacccaatagagagggcaagctgagcatctgtatttccagataaaagttgttattgatgtataaactcgttgcgtgattagtgatgttggaagcattttagcacaaaacagccttgtgtcttagatgatatctgtaaccagtttctgaatcccgttggataaaactgtattgtgatatctatttgatgttaataaagttattgcatacag

SEQ ID NO: 13714 - DNA, 960 bp, Homo sapiens
tatttttttttagttttaagtcctataggactatgagtctctaagttatttgtttcagaaaattattctttttttatgtgataaatcatatgatttaagtgcatgaataagcattttcccacacaatgaacatttgaactgtgtttatgaaaattttctggtttgcaccatgaatttgtcaaatggatatttataggaatatattcactactttgtatactttgcaaatttgtctctctggctttacccaagttctgaatgcattgtaattaaatgcccaatatttattctatttacttagctaaatatttgcattcttgtaaccttctatggtgttttgtggctcttatcttgtggaccataaataacacggcccaataactctttgtgtttatggagtgttgttttcttagaataatggagatgcagatatagataccatagtcaaggtaccgccttgctgaagtatttatttataaagaatattctgtagaacctctactaccagctatatttttaaatcctgtttatttgtaaagctaatatgctcctcaatgtaattattaaaaattctcaagtcacagctaaacttactaattctgattttagtgtagcccctaaattaaaaatggcttccatatgccactctgtaccccaaagagagttctcatgaaatattctccagaatgtattcattatcaagaaaatgtcaatcgtcacttcctcgttttaactcagctgaaacaccaggacccaatagagagggcaagctgagcatctgtatttccagataaaagttgttattgatgtataaactcgttgcgtgattagtgatgttggaagcattttagcacaaaacagccttgtgtcttagatgatatctgtaaccagtttctgaatcccgttggataaaactgtattgtgatatctatttgatgttaataaagttattgcatacag

SEQ ID NO: 13715 - DNA, 1902 bp, Homo sapiens
atgcggaaggggcggtagccggccgggcctgggaacgtggctggttggaggaggtagatcaccctttctgcgggggacgatttcgtcggtggtaggctgctaccatgaggttgaatcagaacaccttgctgctggggaagaaggtggtccttgtaccctacacctcggagcatgtgcccaggtaccacgagtggatgaaatcagaggagctgcagcgtttgacagcctcggagccgctgaccctggagcaggagtatgccatgcagtgcagctggcaggaagatgcagacaagtgtaccttcattgtgctggatgccgagaagtggcaggcccagccaggcgccaccgaagagagctgcatggtgggagatgtgaacctcttcctcacagatctagaagacctcaccttgggggagatcgaggtcatgattgcagagcccagctgcaggggtaagggccttggcactgaggccgttctcgcgatgctgtcttacggagtgaccacgctaggtctgaccaagtttgaggctaaaattgggcaaggaaatgaaccaagcatccggatgttccagaaacttcactttgagcaggtggctacgagcagtgtttttcaggaggtgaccctcagactgacagtgagtgagtccgagcatcagtggcttctggagcagaccagccacgtggaagagaagccttacagagatgggtcggcagagccctgctgatggctgggccttgtgggcagccactctgtgtgagcagggtgttgggcccatacacttcaaagaccagagccctgcactgggagagtgctcctggcccaggctgggaatcacctttcgaggcccttcagactctggcggggcttgctgtggcctccctccagctagtggtgtggctgagcagactccagggccagggccagttcccttctcccctcccggccaaacccagacccagactctaggaagctggaatggagggcagggatccatgggagatgtcgggatgaaggtgggagctggaggtgcagggggacctggaacatggatgggagtggacaggcctttctccttagaggccagaggtgctgccctggctgggagtgaagctccaggcactaccagctttcctgattttcccgtttggtccatgtgaagagctaccacgagccccagcctcacagtgtccactcaagggcagcttggtcctcttgtcctgcagaggcaggctggtgtgaccctgggaacttgacccgggaacaacaggtggtccagagtgagtgtggcctggcccctcaacctagtgtccgtcctcctctctcctggagccagtcttgagtttaaaggcattagtgttagatacagctccttgtggctggaaaacacccctctgctgataaagctcagggggcactgaggaagcagaggccccttgggggtgccctcctgaagagagcgtcaggccatcagctctgtccctctggtgctcccacgtctgttcctcaccctccatctctgggagcagctgcacctgactggccacgcgggggcagtggaggcacaggctcagggtggccgggctacctggcaccctatggcttacaaagtagagttggcccagtttccttccacctgaggggagcactctgactcctaacagtcttccttgccctgccatcatctggggtggctggctgtcaagaaaggccgggcatgctttctaaacacagccacaggaggcttgtagggcatcttccaggtggggaaacagtcttagataagtaaggtgacttgcctaaggcctcccagcacccttgatcttggagtctcacagcagactgcatgtgaacaactggaaccgaaaacatgcctcagtataaaacaaacattataaaacgaa

SEQ ID NO: 13716 - DNA, 800 bp, Homo sapiens
atgcggaaggggcggtagccggccgggcctgggaacgtggctggttggaggaggtagatcaccctttctgcgggggacgatttcgtcggtggtaggctgctaccatgaggttgaatcagaacaccttgctgctggggaagaaggtggtccttgtaccctacacctcggagcatgtgcccaggtaccacgagtggatgaaatcagaggagctgcagcgtttgacagcctcggagccgctgaccctggagcaggagtatgccatgcagtgcagctggcaggaagatgcagacaagtgtaccttcattgtgctggatgccgagaagtggcaggcccagccaggcgccaccgaagagagctgcatggtgggagatgtgaacctcttcctcacagatctagaagacctcaccttgggggagatcgaggtcatgattgcagagcccagctgcaggggtaagggccttggcactgaggccgttctcgcgatgctgtcttacggtaagaaagtgtgagcagacaatgcgggaagtgggcaggccccaggtgaactttgttcaggtgtgagggttgggggcaggtgaaggttcctcctctgcagcttgggacaggagggtgggggcaggcgcctccttacttgcccctgtctcatctcctctgcgaggaggagtgaccacgctaggtctgaccaagtttgaggctaaaattgggcaaggaaatgaaccaagcatccggatgttccagaaacttcactttgagcaggtaaggatgtcctggggcagagtggggcttagacctgggtggtg

SEQ ID NO: 13717 - DNA, 1395 bp, Homo sapiens
atgcggaaggggcggtagccggccgggcctgggaacgtggctggttggaggaggtagatcaccctttctgcgggggacgatttcgtcggtggtaggctgctaccatgaggttgaatcagaacaccttgctgctggggaagaaggtggtccttgtaccctacacctcggagcatgtgcccaggtaccacgagtggatgaaatcagaggagctgcagcgtttgacagcctcggagccgctgaccctggagcaggagtatgccatgcagtgcagctggcaggaagatgcagacagtgaggagtgcccccccacttcccctagccctggtactgggagggctgactccacagtcagtctccaggttccttccctttcccagccccggccatagaagctttgtgaaaagcctggaaggtgctggaactcctgtattctcatggccctgaagccagtccctgtggctgacccttctgtcctcttccccacccactgcatcgggcttggaaggatttggagaaagtagagcatttggggctctggctgtaaattgaggccctgcccctcatgtccctcaccacagcctagtgtggtgactgccctcctctgtgttccctgctctctgagaatttggttgctggttggagaggctttttctgtatgaggcagatttggaattttgtaatgagctgaaggaagctctgggaccccctcttctcctggcagactcagagatgctggtgttctgcagtgctctggcttgggtaggagtaccatcctctcttctctcctctggggagtgtgtgtgatagccctgtcacctcctcctcagagtgtaccttcattgtgctggatgccgagaagtggcaggcccagccaggcgccaccgaagagagctgcatggtgggagatgtgaacctcttcctcacagatctagaagacctcaccttgggggagatcgaggtcatgattgcaggtttgtttcacctagccctgccttccgctgactcccggctctcagatctgctgactgagcctgccgaggctgcaaagggtgggcactcacagggttcactgggaggctccatgtggtgagtccagggcctggctgggcagctgcccacctagccccctcagcctggtggtacaccctcagcctcatcactttagtccttatgcttaggcgtgaacttaacccttggtttggggtagattcaagtatggttagtcccatagttggggtgggctggggaccctcagaaaaaggtctctggagcatgttgtcatattacaggaggaggccctcctgtttctgctccttcatggtcctcagtttcccccaagtggctactgactatccccatgaggctagtatactgactccatgaggtaaagaggtc

SEQ ID NO: 13718 - DNA, 859 bp, Homo sapiens
atgcggaaggggcggtagccggccgggcctgggaacgtggctggttggaggaggtagatcaccctttctgcgggggacgatttcgtcggtggtaggctgctaccatgaggttgaatcagaacaccttgctgctggggaagaaggtggtccttgtaccctacacctcggagcatgtgcccaggtaccacgagtggatgaaatcagaggagctgcagcgtttgacagcctcggagccgctgaccctggagcaggagtatgccatgcagtgcagctggcaggaagatgcagacaagtgtaccttcattgtgctggatgccgagaagtggcaggcccagccaggcgccaccgaagagagctgcatggtgggagatgtgaacctcttcctcacagatctagaagacctcaccttgggggagatcgaggtcatgattgcaggtttgtttcacctagccctgccttccgctgactcccggctctcagatctgctgactgagcctgccgaggctgcaaagggtgggcactcacagggttcactgggaggctccatgtggtgagtccagggcctggctgggcagctgcccacctagccccctcagcctggtggtacaccctcagcctcatcactttagtccttatgcttaggcgtgaacttaacccttggtttggggtagattcaagtatggttagtcccatagttggggtgggctggggaccctcagaaaaaggtctctggagcatgttgtcatattacaggaggaggccctcctgtttctgctccttcatggtcctcagtttcccccaagtggctactgactatccccatgaggctagtatactgactccatgaggtaaagaggtc

SEQ ID NO: 13719 - DNA, 933 bp, Homo sapiens
atgcggaaggggcggtagccggccgggcctgggaacgtggctggttggaggaggtagatcaccctttctgcgggggacgatttcgtcggtggtaggctgctaccatgaggttgaatcagaacaccttgctgctggggaagaaggtggtccttgtaccctacacctcggagcatgtgcccagactgctcctccgcactgacccgagacaggataggaaattggacagatagaactgactcgtcctgctgttcttgtgtaccacgagtggatgaaatcagaggagctgcagcgtttgacagcctcggagccgctgaccctggagcaggagtatgccatgcagtgcagctggcaggaagatgcagacaagtgtaccttcattgtgctggatgccgagaagtggcaggcccagccaggcgccaccgaagagagctgcatggtgggagatgtgaacctcttcctcacagatctagaagacctcaccttgggggagatcgaggtcatgattgcaggtttgtttcacctagccctgccttccgctgactcccggctctcagatctgctgactgagcctgccgaggctgcaaagggtgggcactcacagggttcactgggaggctccatgtggtgagtccagggcctggctgggcagctgcccacctagccccctcagcctggtggtacaccctcagcctcatcactttagtccttatgcttaggcgtgaacttaacccttggtttggggtagattcaagtatggttagtcccatagttggggtgggctggggaccctcagaaaaaggtctctggagcatgttgtcatattacaggaggaggccctcctgtttctgctccttcatggtcctcagtttcccccaagtggctactgactatccccatgaggctagtatactgactccatgaggtaaagaggtc

SEQ ID NO: 13720 - DNA, 1922 bp, Homo sapiens
atgcggaaggggcggtagccggccgggcctgggaacgtggctggttggaggaggtagatcaccctttctgcgggggacgatttcgtcggtggtaggctgctaccatgaggttgaatcagaacaccttgctgctggggaagaaggtggtccttgtaccctacacctcggagcatgtgcccaggtaccacgagtggatgaaatcagaggagctgcagcgtttgacagcctcggagccgctgaccctggagcaggagtatgccatgcagtgcagctggcaggaagatgcagacaagtgtaccttcattgtgctggatgccgagaagtggcaggcccagccaggcgccaccgaagagagctgcatggtgggagatgtgaacctcttcctcacagatctagaagacctcaccttgggggagatcgaggtcatgattgcagagcccagctgcaggggtaagggccttggcactgaggccgttctcgcgatgctgtcttacggagtgaccacgctaggtctgaccaagtttgaggctaaaattgggcaaggaaatgaaccaagcatccggatgttccagaaacttcactttgagcaggtggctacgagcagtgtttttcaggaggtgaccctcagactgacagtgagtgagtccgagcatcagtggcttctggagcagaccagccacgtggaagagaagccttacagagatgggtcggcagagccctgctgatggctgggccttgtgggcagccactctgtgtgagcagggtgttgggcccatacacttcaaagaccagagccctgcactgggagagtgctcctggcccaggctgggaatcacctttcgaggcccttcagactctggcggggcttgctgtggcctccctccagctagtggtgtggctgagcagactccagggccagggccagttcccttctcccctcccggccaaacccagacccagactctaggaagctggaatggagggcagggatccatgggagatgtcgggatgaaggtgggagctggaggtgcagggggacctggaacatggatgggagtggacaggcctttctccttagaggccagaggtgctgccctggctgggagtgaagctccaggcactaccagctttcctgattttcccgtttggtccatgtgaagagctaccacgagccccagcctcacagtgtccactcaagggcagcttggtcctcttgtcctgcagaggcaggctggtgtgaccctgggaacttgacccgggaacaacaggtggtccagagtgagtgtggcctggcccctcaacctagtgtccgtcctcctctctcctggagccagtcttgagtttaaaggcattagtgttagatacagctccttgtggctggaaaacacccctctgctgataaagctcagggggcactgaggaagcagaggccccttgggggtgccctcctgaagagagcgtcaggccatcagctctgtccctctggtgctcccacgtctgttcctcaccctccatctctgggagcagctgcacctgactggccacgcgggggcagtggaggcacaggctcagggtggccgggctacctggcaccctatggcttacaaagtagagttggcccagtttccttccacctgaggggagcactctgactcctaacagtcttccttgccctgccatcatctggggtggctggctgtcaagaaaggccgggcatgctttctaaacacagccacaggaggcttgtagggcatcttccaggtggggaaacagtcttagataagtaaggtgacttgcctaaggcctcccagcacccttgatcttggagtctcacagcagactgcatgtgaacaactggaaccgaaaacatgcctcagtataaaacaaacattataaaacgaaaaaaaaatgtcgcgcggccg

SEQ ID NO: 13721 - DNA, 2047 bp, Homo sapiens
atgcggaaggggcggtagccggccgggcctgggaacgtggctggttggaggaggtagatcaccctttctgcgggggacgatttcgtcggtggtagaattttggagtctgtattctttgaagtgtctagacggaactaatgacggaagtcaacttagccccagcaggaaagctggagcgcctacccaaagttggaggaaattcagggtcctgaagtctttgctctccccatctgcatgcaggctgctaccatgaggttgaatcagaacaccttgctgctggggaagaaggtggtccttgtaccctacacctcggagcatgtgcccaggtaccacgagtggatgaaatcagaggagctgcagcgtttgacagcctcggagccgctgaccctggagcaggagtatgccatgcagtgcagctggcaggaagatgcagacaagtgtaccttcattgtgctggatgccgagaagtggcaggcccagccaggcgccaccgaagagagctgcatggtgggagatgtgaacctcttcctcacagatctagaagacctcaccttgggggagatcgaggtcatgattgcagagcccagctgcaggggtaagggccttggcactgaggccgttctcgcgatgctgtcttacggagtgaccacgctaggtctgaccaagtttgaggctaaaattgggcaaggaaatgaaccaagcatccggatgttccagaaacttcactttgagcaggtggctacgagcagtgtttttcaggaggtgaccctcagactgacagtgagtgagtccgagcatcagtggcttctggagcagaccagccacgtggaagagaagccttacagagatgggtcggcagagccctgctgatggctgggccttgtgggcagccactctgtgtgagcagggtgttgggcccatacacttcaaagaccagagccctgcactgggagagtgctcctggcccaggctgggaatcacctttcgaggcccttcagactctggcggggcttgctgtggcctccctccagctagtggtgtggctgagcagactccagggccagggccagttcccttctcccctcccggccaaacccagacccagactctaggaagctggaatggagggcagggatccatgggagatgtcgggatgaaggtgggagctggaggtgcagggggacctggaacatggatgggagtggacaggcctttctccttagaggccagaggtgctgccctggctgggagtgaagctccaggcactaccagctttcctgattttcccgtttggtccatgtgaagagctaccacgagccccagcctcacagtgtccactcaagggcagcttggtcctcttgtcctgcagaggcaggctggtgtgaccctgggaacttgacccgggaacaacaggtggtccagagtgagtgtggcctggcccctcaacctagtgtccgtcctcctctctcctggagccagtcttgagtttaaaggcattagtgttagatacagctccttgtggctggaaaacacccctctgctgataaagctcagggggcactgaggaagcagaggccccttgggggtgccctcctgaagagagcgtcaggccatcagctctgtccctctggtgctcccacgtctgttcctcaccctccatctctgggagcagctgcacctgactggccacgcgggggcagtggaggcacaggctcagggtggccgggctacctggcaccctatggcttacaaagtagagttggcccagtttccttccacctgaggggagcactctgactcctaacagtcttccttgccctgccatcatctggggtggctggctgtcaagaaaggccgggcatgctttctaaacacagccacaggaggcttgtagggcatcttccaggtggggaaacagtcttagataagtaaggtgacttgcctaaggcctcccagcacccttgatcttggagtctcacagcagactgcatgtgaacaactggaaccgaaaacatgcctcagtataaaacaaacattataaaacgaa

SEQ ID NO: 13722 - DNA, 2068 bp, Homo sapiens
atgcggaaggggcggtagccggccgggcctgggaacgtggctggttggaggaggtagatcaccctttctgcgggggacgatttcgtcggtggtaggctgctaccatgaggttgaatcagaacaccttgctgctggggaagaaggtggtccttgtaccctacacctcggagcatgtgcccaggtaccacgagtggatgaaatcagaggagctgcagcgtttgacagcctcggagccgctgaccctggagcaggagtatgccatgcagtgcagctggcaggaagatgcagacaagtgtaccttcattgtgctggatgccgagaagtggcaggcccagccaggcgccaccgaagagagctgcatggtgggagatgtgaacctcttcctcacagatctagaagacctcaccttgggggagatcgaggtcatgattgcagagcccagctgcaggggtaagggccttggcactgaggccgttctcgcgatgctgtcttacggtaagaaagtgtgagcagacaatgcgggaagtgggcaggccccaggtgaactttgttcaggtgtgagggttgggggcaggtgaaggttcctcctctgcagcttgggacaggagggtgggggcaggcgcctccttacttgcccctgtctcatctcctctgcgaggaggagtgaccacgctaggtctgaccaagtttgaggctaaaattgggcaaggaaatgaaccaagcatccggatgttccagaaacttcactttgagcaggtggctacgagcagtgtttttcaggaggtgaccctcagactgacagtgagtgagtccgagcatcagtggcttctggagcagaccagccacgtggaagagaagccttacagagatgggtcggcagagccctgctgatggctgggccttgtgggcagccactctgtgtgagcagggtgttgggcccatacacttcaaagaccagagccctgcactgggagagtgctcctggcccaggctgggaatcacctttcgaggcccttcagactctggcggggcttgctgtggcctccctccagctagtggtgtggctgagcagactccagggccagggccagttcccttctcccctcccggccaaacccagacccagactctaggaagctggaatggagggcagggatccatgggagatgtcgggatgaaggtgggagctggaggtgcagggggacctggaacatggatgggagtggacaggcctttctccttagaggccagaggtgctgccctggctgggagtgaagctccaggcactaccagctttcctgattttcccgtttggtccatgtgaagagctaccacgagccccagcctcacagtgtccactcaagggcagcttggtcctcttgtcctgcagaggcaggctggtgtgaccctgggaacttgacccgggaacaacaggtggtccagagtgagtgtggcctggcccctcaacctagtgtccgtcctcctctctcctggagccagtcttgagtttaaaggcattagtgttagatacagctccttgtggctggaaaacacccctctgctgataaagctcagggggcactgaggaagcagaggccccttgggggtgccctcctgaagagagcgtcaggccatcagctctgtccctctggtgctcccacgtctgttcctcaccctccatctctgggagcagctgcacctgactggccacgcgggggcagtggaggcacaggctcagggtggccgggctacctggcaccctatggcttacaaagtagagttggcccagtttccttccacctgaggggagcactctgactcctaacagtcttccttgccctgccatcatctggggtggctggctgtcaagaaaggccgggcatgctttctaaacacagccacaggaggcttgtagggcatcttccaggtggggaaacagtcttagataagtaaggtgacttgcctaaggcctcccagcacccttgatcttggagtctcacagcagactgcatgtgaacaactggaaccgaaaacatgcctcagtataaaacaaacattataaaacgaa

SEQ ID NO: 13723 - DNA, 1783 bp, Homo sapiens
atgcggaaggggcggtagccggccgggcctgggaacgtggctggttggaggaggtagatcaccctttctgcgggggacgatttcgtcggtggtaggctgctaccatgaggttgaatcagaacaccttgctgctggggaagaaggtggtccttgtaccctacacctcggagcatgtgcccaggtaccacgagtggatgaaatcagaggagctgcagcgtttgacagcctcggagccgctgaccctggagcaggagtatgccatgcagtgcagctggcaggaagatgcagacaagtgtaccttcattgtgctggatgccgagaagtggcaggcccagccaggcgccaccgaagagagctgcatggtgggagatgtgaacctcttcctcacagatctagaagacctcaccttgggggagatcgaggtcatgattgcagagcccagctgcaggggtaagggccttggcactgaggccgttctcgcgatgctgtcttacggaggtgaccctcagactgacagtgagtgagtccgagcatcagtggcttctggagcagaccagccacgtggaagagaagccttacagagatgggtcggcagagccctgctgatggctgggccttgtgggcagccactctgtgtgagcagggtgttgggcccatacacttcaaagaccagagccctgcactgggagagtgctcctggcccaggctgggaatcacctttcgaggcccttcagactctggcggggcttgctgtggcctccctccagctagtggtgtggctgagcagactccagggccagggccagttcccttctcccctcccggccaaacccagacccagactctaggaagctggaatggagggcagggatccatgggagatgtcgggatgaaggtgggagctggaggtgcagggggacctggaacatggatgggagtggacaggcctttctccttagaggccagaggtgctgccctggctgggagtgaagctccaggcactaccagctttcctgattttcccgtttggtccatgtgaagagctaccacgagccccagcctcacagtgtccactcaagggcagcttggtcctcttgtcctgcagaggcaggctggtgtgaccctgggaacttgacccgggaacaacaggtggtccagagtgagtgtggcctggcccctcaacctagtgtccgtcctcctctctcctggagccagtcttgagtttaaaggcattagtgttagatacagctccttgtggctggaaaacacccctctgctgataaagctcagggggcactgaggaagcagaggccccttgggggtgccctcctgaagagagcgtcaggccatcagctctgtccctctggtgctcccacgtctgttcctcaccctccatctctgggagcagctgcacctgactggccacgcgggggcagtggaggcacaggctcagggtggccgggctacctggcaccctatggcttacaaagtagagttggcccagtttccttccacctgaggggagcactctgactcctaacagtcttccttgccctgccatcatctggggtggctggctgtcaagaaaggccgggcatgctttctaaacacagccacaggaggcttgtagggcatcttccaggtggggaaacagtcttagataagtaaggtgacttgcctaaggcctcccagcacccttgatcttggagtctcacagcagactgcatgtgaacaactggaaccgaaaacatgcctcagtataaaacaaacattataaaacgaa

SEQ ID NO: 13724 - DNA, 1844 bp, Homo sapiens
atgcggaaggggcggtagccggccgggcctgggaacgtggctggttggaggaggtagatcaccctttctgcgggggacgatttcgtcggtggtaggctgctaccatgaggttgaatcagaacaccttgctgctggggaagaaggtggtccttgtaccctacacctcggagcatgtgcccaggtaccacgagtggatgaaatcagaggagctgcagcgtttgacagcctcggagccgctgaccctggagcaggagtatgccatgcagtgcagctggcaggaagatgcagacaagtgtaccttcattgtgctggatgccgagaagtggcaggcccagccaggcgccaccgaagagagctgcatggtgggagatgtgaacctcttcctcacagatctagaagacctcaccttgggggagatcgaggtcatgattgcagagcccagctgcaggggtaagggccttggcactgaggccgttctcgcgatgctgtcttacggagtgaccacgctaggtctgaccaagtttgaggctaagtggctacgagcagtgtttttcaggaggtgaccctcagactgacagtgagtgagtccgagcatcagtggcttctggagcagaccagccacgtggaagagaagccttacagagatgggtcggcagagccctgctgatggctgggccttgtgggcagccactctgtgtgagcagggtgttgggcccatacacttcaaagaccagagccctgcactgggagagtgctcctggcccaggctgggaatcacctttcgaggcccttcagactctggcggggcttgctgtggcctccctccagctagtggtgtggctgagcagactccagggccagggccagttcccttctcccctcccggccaaacccagacccagactctaggaagctggaatggagggcagggatccatgggagatgtcgggatgaaggtgggagctggaggtgcagggggacctggaacatggatgggagtggacaggcctttctccttagaggccagaggtgctgccctggctgggagtgaagctccaggcactaccagctttcctgattttcccgtttggtccatgtgaagagctaccacgagccccagcctcacagtgtccactcaagggcagcttggtcctcttgtcctgcagaggcaggctggtgtgaccctgggaacttgacccgggaacaacaggtggtccagagtgagtgtggcctggcccctcaacctagtgtccgtcctcctctctcctggagccagtcttgagtttaaaggcattagtgttagatacagctccttgtggctggaaaacacccctctgctgataaagctcagggggcactgaggaagcagaggccccttgggggtgccctcctgaagagagcgtcaggccatcagctctgtccctctggtgctcccacgtctgttcctcaccctccatctctgggagcagctgcacctgactggccacgcgggggcagtggaggcacaggctcagggtggccgggctacctggcaccctatggcttacaaagtagagttggcccagtttccttccacctgaggggagcactctgactcctaacagtcttccttgccctgccatcatctggggtggctggctgtcaagaaaggccgggcatgctttctaaacacagccacaggaggcttgtagggcatcttccaggtggggaaacagtcttagataagtaaggtgacttgcctaaggcctcccagcacccttgatcttggagtctcacagcagactgcatgtgaacaactggaaccgaaaacatgcctcagtataaaacaaacattataaaacgaa

SEQ ID NO: 13725 - DNA, 2438 bp, Homo sapiens
atgcggaaggggcggtagccggccgggcctgggaacgtggctggttggaggaggtagatcaccctttctgcgggggacgatttcgtcggtggtaggctgctaccatgaggttgaatcagaacaccttgctgctggggaagaaggtggtccttgtaccctacacctcggagcatgtgcccaggtaccacgagtggatgaaatcagaggagctgcagcgtttgacagcctcggagccgctgaccctggagcaggagtatgccatgcagtgcagctggcaggaagatgcagacagtgaggagtgcccccccacttcccctagccctggtactgggagggctgactccacagtcagtctccaggttccttccctttcccagccccggccatagaagctttgtgaaaagcctggaaggtgctggaactcctgtattctcatggccctgaagccagtccctgtggctgacccttctgtcctcttccccacccactgcatcgggcttggaaggatttggagaaagtagagcatttggggctctggctgtaaattgaggccctgcccctcatgtccctcaccacagcctagtgtggtgactgccctcctctgtgttccctgctctctgagaatttggttgctggttggagaggctttttctgtatgaggcagatttggaattttgtaatgagctgaaggaagctctgggaccccctcttctcctggcagactcagagatgctggtgttctgcagtgctctggcttgggtaggagtaccatcctctcttctctcctctggggagtgtgtgtgatagccctgtcacctcctcctcagagtgtaccttcattgtgctggatgccgagaagtggcaggcccagccaggcgccaccgaagagagctgcatggtgggagatgtgaacctcttcctcacagatctagaagacctcaccttgggggagatcgaggtcatgattgcagagcccagctgcaggggtaagggccttggcactgaggccgttctcgcgatgctgtcttacggagtgaccacgctaggtctgaccaagtttgaggctaaaattgggcaaggaaatgaaccaagcatccggatgttccagaaacttcactttgagcaggtggctacgagcagtgtttttcaggaggtgaccctcagactgacagtgagtgagtccgagcatcagtggcttctggagcagaccagccacgtggaagagaagccttacagagatgggtcggcagagccctgctgatggctgggccttgtgggcagccactctgtgtgagcagggtgttgggcccatacacttcaaagaccagagccctgcactgggagagtgctcctggcccaggctgggaatcacctttcgaggcccttcagactctggcggggcttgctgtggcctccctccagctagtggtgtggctgagcagactccagggccagggccagttcccttctcccctcccggccaaacccagacccagactctaggaagctggaatggagggcagggatccatgggagatgtcgggatgaaggtgggagctggaggtgcagggggacctggaacatggatgggagtggacaggcctttctccttagaggccagaggtgctgccctggctgggagtgaagctccaggcactaccagctttcctgattttcccgtttggtccatgtgaagagctaccacgagccccagcctcacagtgtccactcaagggcagcttggtcctcttgtcctgcagaggcaggctggtgtgaccctgggaacttgacccgggaacaacaggtggtccagagtgagtgtggcctggcccctcaacctagtgtccgtcctcctctctcctggagccagtcttgagtttaaaggcattagtgttagatacagctccttgtggctggaaaacacccctctgctgataaagctcagggggcactgaggaagcagaggccccttgggggtgccctcctgaagagagcgtcaggccatcagctctgtccctctggtgctcccacgtctgttcctcaccctccatctctgggagcagctgcacctgactggccacgcgggggcagtggaggcacaggctcagggtggccgggctacctggcaccctatggcttacaaagtagagttggcccagtttccttccacctgaggggagcactctgactcctaacagtcttccttgccctgccatcatctggggtggctggctgtcaagaaaggccgggcatgctttctaaacacagccacaggaggcttgtagggcatcttccaggtggggaaacagtcttagataagtaaggtgacttgcctaaggcctcccagcacccttgatcttggagtctcacagcagactgcatgtgaacaactggaaccgaaaacatgcctcagtataaaacaaacattataaaacgaa

SEQ ID NO: 13726 - DNA, 2092 bp, Homo sapiens
atgcggaaggggcggtagccggccgggcctgggaacgtggctggttggaggaggtagatcaccctttctgcgggggacgatttcgtcggtggtaggctgctaccatgaggttgaatcagaacaccttgctgctggggaagaaggtggtccttgtaccctacacctcggagcatgtgcccagttttccgtttgagggttcctggtgccctaacttcgtgggatctgtccagccgcctttgttgaggttggcttgccatatacatccccttctggaatttgaagaatgtttggtttcagactgctcctccgcactgacccgagacaggataggaaattggacagatagaactgactcgtcctgctgttcttgtgtaccacgagtggatgaaatcagaggagctgcagcgtttgacagcctcggagccgctgaccctggagcaggagtatgccatgcagtgcagctggcaggaagatgcagacaagtgtaccttcattgtgctggatgccgagaagtggcaggcccagccaggcgccaccgaagagagctgcatggtgggagatgtgaacctcttcctcacagatctagaagacctcaccttgggggagatcgaggtcatgattgcagagcccagctgcaggggtaagggccttggcactgaggccgttctcgcgatgctgtcttacggagtgaccacgctaggtctgaccaagtttgaggctaaaattgggcaaggaaatgaaccaagcatccggatgttccagaaacttcactttgagcaggtggctacgagcagtgtttttcaggaggtgaccctcagactgacagtgagtgagtccgagcatcagtggcttctggagcagaccagccacgtggaagagaagccttacagagatgggtcggcagagccctgctgatggctgggccttgtgggcagccactctgtgtgagcagggtgttgggcccatacacttcaaagaccagagccctgcactgggagagtgctcctggcccaggctgggaatcacctttcgaggcccttcagactctggcggggcttgctgtggcctccctccagctagtggtgtggctgagcagactccagggccagggccagttcccttctcccctcccggccaaacccagacccagactctaggaagctggaatggagggcagggatccatgggagatgtcgggatgaaggtgggagctggaggtgcagggggacctggaacatggatgggagtggacaggcctttctccttagaggccagaggtgctgccctggctgggagtgaagctccaggcactaccagctttcctgattttcccgtttggtccatgtgaagagctaccacgagccccagcctcacagtgtccactcaagggcagcttggtcctcttgtcctgcagaggcaggctggtgtgaccctgggaacttgacccgggaacaacaggtggtccagagtgagtgtggcctggcccctcaacctagtgtccgtcctcctctctcctggagccagtcttgagtttaaaggcattagtgttagatacagctccttgtggctggaaaacacccctctgctgataaagctcagggggcactgaggaagcagaggccccttgggggtgccctcctgaagagagcgtcaggccatcagctctgtccctctggtgctcccacgtctgttcctcaccctccatctctgggagcagctgcacctgactggccacgcgggggcagtggaggcacaggctcagggtggccgggctacctggcaccctatggcttacaaagtagagttggcccagtttccttccacctgaggggagcactctgactcctaacagtcttccttgccctgccatcatctggggtggctggctgtcaagaaaggccgggcatgctttctaaacacagccacaggaggcttgtagggcatcttccaggtggggaaacagtcttagataagtaaggtgacttgcctaaggcctcccagcacccttgatcttggagtctcacagcagactgcatgtgaacaactggaaccgaaaacatgcctcagtataaaacaaacattataaaacgaa

SEQ ID NO: 13727 - DNA, 2186 bp, Homo sapiens
atgcggaaggggcggtagccggccgggcctgggaacgtggctggttggaggaggtagatcaccctttctgcgggggacgatttcgtcggtggtaggctgctaccatgaggttgaatcagaacaccttgctgctggggaagaaggtggtccttgtaccctacacctcggagcatgtgcccaggtaccacgagtggatgaaatcagaggagctgcagcgtttgacagcctcggagccgctgaccctggagcaggagtatgccatgcagtgcagctggcaggaagatgcagacaagtgtaccttcattgtgctggatgccgagaagtggcaggcccagccaggcgccaccgaagagagctgcatggtgggagatgtgaacctcttcctcacagatctagaagacctcaccttgggggagatcgaggtcatgattgcagaatggtaatgatagtagcaacttcagagttgttgagaattaaatgagatggtgtctgccaagtgcccgcactggagcctggcacacggcgtcagcgccgctcctgttgtctctcctagagcccagctgcaggggtaagggccttggcactgaggccgttctcgcgatgctgtcttacggtaagaaagtgtgagcagacaatgcgggaagtgggcaggccccaggtgaactttgttcaggtgtgagggttgggggcaggtgaaggttcctcctctgcagcttgggacaggagggtgggggcaggcgcctccttacttgcccctgtctcatctcctctgcgaggaggagtgaccacgctaggtctgaccaagtttgaggctaaaattgggcaaggaaatgaaccaagcatccggatgttccagaaacttcactttgagcaggtggctacgagcagtgtttttcaggaggtgaccctcagactgacagtgagtgagtccgagcatcagtggcttctggagcagaccagccacgtggaagagaagccttacagagatgggtcggcagagccctgctgatggctgggccttgtgggcagccactctgtgtgagcagggtgttgggcccatacacttcaaagaccagagccctgcactgggagagtgctcctggcccaggctgggaatcacctttcgaggcccttcagactctggcggggcttgctgtggcctccctccagctagtggtgtggctgagcagactccagggccagggccagttcccttctcccctcccggccaaacccagacccagactctaggaagctggaatggagggcagggatccatgggagatgtcgggatgaaggtgggagctggaggtgcagggggacctggaacatggatgggagtggacaggcctttctccttagaggccagaggtgctgccctggctgggagtgaagctccaggcactaccagctttcctgattttcccgtttggtccatgtgaagagctaccacgagccccagcctcacagtgtccactcaagggcagcttggtcctcttgtcctgcagaggcaggctggtgtgaccctgggaacttgacccgggaacaacaggtggtccagagtgagtgtggcctggcccctcaacctagtgtccgtcctcctctctcctggagccagtcttgagtttaaaggcattagtgttagatacagctccttgtggctggaaaacacccctctgctgataaagctcagggggcactgaggaagcagaggccccttgggggtgccctcctgaagagagcgtcaggccatcagctctgtccctctggtgctcccacgtctgttcctcaccctccatctctgggagcagctgcacctgactggccacgcgggggcagtggaggcacaggctcagggtggccgggctacctggcaccctatggcttacaaagtagagttggcccagtttccttccacctgaggggagcactctgactcctaacagtcttccttgccctgccatcatctggggtggctggctgtcaagaaaggccgggcatgctttctaaacacagccacaggaggcttgtagggcatcttccaggtggggaaacagtcttagataagtaaggtgacttgcctaaggcctcccagcacccttgatcttggagtctcacagcagactgcatgtgaacaactggaaccgaaaacatgcctcagtataaaacaaacattataaaacgaa

SEQ ID NO: 13728 - DNA, 1806 bp, Homo sapiens
atgcggaaggggcggtagccggccgggcctgggaacgtggctggttggaggaggtagatcaccctttctgcgggggacgatttcgtcggtggtaggctgctaccatgaggttgaatcagaacaccttgctgctggggaagaaggtggtccttgtaccctacacctcggagcatgtgcccaggtatctttcccgcttgacatggggtaccacgagtggatgaaatcagaggagctgcagcgtttgacagcctcggagccgctgaccctggagcaggagtatgccatgcagtgcagctggcaggaagatgcagacaagtgtaccttcattgtgctggatgccgagaagtggcaggcccagccaggcgccaccgaagagagctgcatggtgggagatgtgaacctcttcctcacagatctagaagacctcaccttgggggagatcgaggtcatgattgcagagcccagctgcaggggtaagggccttggcactgaggccgttctcgcgatgctgtcttacggaggtgaccctcagactgacagtgagtgagtccgagcatcagtggcttctggagcagaccagccacgtggaagagaagccttacagagatgggtcggcagagccctgctgatggctgggccttgtgggcagccactctgtgtgagcagggtgttgggcccatacacttcaaagaccagagccctgcactgggagagtgctcctggcccaggctgggaatcacctttcgaggcccttcagactctggcggggcttgctgtggcctccctccagctagtggtgtggctgagcagactccagggccagggccagttcccttctcccctcccggccaaacccagacccagactctaggaagctggaatggagggcagggatccatgggagatgtcgggatgaaggtgggagctggaggtgcagggggacctggaacatggatgggagtggacaggcctttctccttagaggccagaggtgctgccctggctgggagtgaagctccaggcactaccagctttcctgattttcccgtttggtccatgtgaagagctaccacgagccccagcctcacagtgtccactcaagggcagcttggtcctcttgtcctgcagaggcaggctggtgtgaccctgggaacttgacccgggaacaacaggtggtccagagtgagtgtggcctggcccctcaacctagtgtccgtcctcctctctcctggagccagtcttgagtttaaaggcattagtgttagatacagctccttgtggctggaaaacacccctctgctgataaagctcagggggcactgaggaagcagaggccccttgggggtgccctcctgaagagagcgtcaggccatcagctctgtccctctggtgctcccacgtctgttcctcaccctccatctctgggagcagctgcacctgactggccacgcgggggcagtggaggcacaggctcagggtggccgggctacctggcaccctatggcttacaaagtagagttggcccagtttccttccacctgaggggagcactctgactcctaacagtcttccttgccctgccatcatctggggtggctggctgtcaagaaaggccgggcatgctttctaaacacagccacaggaggcttgtagggcatcttccaggtggggaaacagtcttagataagtaaggtgacttgcctaaggcctcccagcacccttgatcttggagtctcacagcagactgcatgtgaacaactggaaccgaaaacatgcctcagtataaaacaaacattataaaacgaa

SEQ ID NO: 13729 - DNA, 2091 bp, Homo sapiens
atgcggaaggggcggtagccggccgggcctgggaacgtggctggttggaggaggtagatcaccctttctgcgggggacgatttcgtcggtggtaggctgctaccatgaggttgaatcagaacaccttgctgctggggaagaaggtggtccttgtaccctacacctcggagcatgtgcccaggtatctttcccgcttgacatggggtaccacgagtggatgaaatcagaggagctgcagcgtttgacagcctcggagccgctgaccctggagcaggagtatgccatgcagtgcagctggcaggaagatgcagacaagtgtaccttcattgtgctggatgccgagaagtggcaggcccagccaggcgccaccgaagagagctgcatggtgggagatgtgaacctcttcctcacagatctagaagacctcaccttgggggagatcgaggtcatgattgcagagcccagctgcaggggtaagggccttggcactgaggccgttctcgcgatgctgtcttacggtaagaaagtgtgagcagacaatgcgggaagtgggcaggccccaggtgaactttgttcaggtgtgagggttgggggcaggtgaaggttcctcctctgcagcttgggacaggagggtgggggcaggcgcctccttacttgcccctgtctcatctcctctgcgaggaggagtgaccacgctaggtctgaccaagtttgaggctaaaattgggcaaggaaatgaaccaagcatccggatgttccagaaacttcactttgagcaggtggctacgagcagtgtttttcaggaggtgaccctcagactgacagtgagtgagtccgagcatcagtggcttctggagcagaccagccacgtggaagagaagccttacagagatgggtcggcagagccctgctgatggctgggccttgtgggcagccactctgtgtgagcagggtgttgggcccatacacttcaaagaccagagccctgcactgggagagtgctcctggcccaggctgggaatcacctttcgaggcccttcagactctggcggggcttgctgtggcctccctccagctagtggtgtggctgagcagactccagggccagggccagttcccttctcccctcccggccaaacccagacccagactctaggaagctggaatggagggcagggatccatgggagatgtcgggatgaaggtgggagctggaggtgcagggggacctggaacatggatgggagtggacaggcctttctccttagaggccagaggtgctgccctggctgggagtgaagctccaggcactaccagctttcctgattttcccgtttggtccatgtgaagagctaccacgagccccagcctcacagtgtccactcaagggcagcttggtcctcttgtcctgcagaggcaggctggtgtgaccctgggaacttgacccgggaacaacaggtggtccagagtgagtgtggcctggcccctcaacctagtgtccgtcctcctctctcctggagccagtcttgagtttaaaggcattagtgttagatacagctccttgtggctggaaaacacccctctgctgataaagctcagggggcactgaggaagcagaggccccttgggggtgccctcctgaagagagcgtcaggccatcagctctgtccctctggtgctcccacgtctgttcctcaccctccatctctgggagcagctgcacctgactggccacgcgggggcagtggaggcacaggctcagggtggccgggctacctggcaccctatggcttacaaagtagagttggcccagtttccttccacctgaggggagcactctgactcctaacagtcttccttgccctgccatcatctggggtggctggctgtcaagaaaggccgggcatgctttctaaacacagccacaggaggcttgtagggcatcttccaggtggggaaacagtcttagataagtaaggtgacttgcctaaggcctcccagcacccttgatcttggagtctcacagcagactgcatgtgaacaactggaaccgaaaacatgcctcagtataaaacaaacattataaaacgaa

SEQ ID NO: 13730 - DNA, 1584 bp, Homo sapiens
atgcggaaggggcggtagccggccgggcctgggaacgtggctggttggaggaggtagatcaccctttctgcgggggacgatttcgtcggtggtaggctgctaccatgaggttgaatcagaacaccttgctgctggggaagaaggtggtccttgtaccctacacctcggagcatgtgcccaggtaccacgagtggatgaaatcagaggagctgcagcgtttgacagcctcggagccgctgaccctggagcaggagtatgccatgcagtgcagctggcaggaagatgcagacaagtgtaccttcattgtgctggatgccgagaagtggcaggcccagccaggcgccaccgaagagagctgcatggtgggagatgtgaacctcttcctcacagatctagaagacctcaccttgggggagatcgaggtcatgattgcagagcccagctgcaggggtaagggccttggcactgaggccgttctcgcgatgctgtcttacggagtgaccacgctaggtctgaccaagtttgaggctaaaattgggcaaggaaatgaaccaagcatccggatgttccagaaacttcactttgagcaggtggctacgagcagtgtttttcaggaggtgaccctcagactgacagtgagtgagtccgagcatcagtggcttctggagcagaccagccacgtggaagagaagccttacagagatgggtcggcagagccctgctgatggctgggccttgtgggcagccactctgtgtgagcagggtgttgggcccatacacttcaaagaccagagccctgcactgggagagtgctcctggcccaggctgggaatcacctttcgaggcccttcagactctggcggggcttgctgtggcctccctccagctagtggtgtggctgagcagactccagggccagggccagttcccttctcccctcccggccaaacccagacccagactctaggaagctggaatggagggcagggatccatgggagatgtcgggatgaaggtgggagctggaggtgcagggggacctggaacatggatgggagtggacaggcctttctccttagaggccagaggtgctgccctggctgggagtgaagctccaggcactaccagctttcctgattttcccgtttggtccatgtgaagagctaccacgagccccagcctcacagtgtccactcaagggcagcttggtcctcttgtcctgcagaggcaggctggtgtgaccctgggaacttgacccgggaacaacaggtggtccagagtgagtgtggcctggcccctcaacctagtgtccgtcctcctctctcctggagccagtcttgagtttaaaggcattagtgttagatacagctccttgtggctggaaaacacccctctgctgataaagctcagggggcactgaggaagcagaggccccttgggggtgccctcctgaagagagcgtcaggccatcagctctgtccctctggtgctcccacgtctgttcctcaccctccatctctggcccagcctcacagtgtccactcaaggcagcttgtcctcttgtcctgtcggggtcctctagagc

SEQ ID NO: 13731 - DNA, 1825 bp, Homo sapiens
ctttgaagtcaggttgctgggttgcaagctgtgaggcctttcacacttctttgtgcctgtttcctcgtctgcagaatggtaatgatagtagcaacttcagagttgttgagaattaaatgagatggtgtctgccaagtgcccgcactggagcctggcacacggcgtcagcgccgctcctgttgtctctcctagagcccagctgcaggggtaagggccttggcactgaggccgttctcgcgatgctgtcttacggtaagaaagtgtgagcagacaatgcgggaagtgggcaggccccaggtgaactttgttcaggtgtgagggttgggggcaggtgaaggttcctcctctgcagcttgggacaggagggtgggggcaggcgcctccttacttgcccctgtctcatctcctctgcgaggaggagtgaccacgctaggtctgaccaagtttgaggctaaaattgggcaaggaaatgaaccaagcatccggatgttccagaaacttcactttgagcaggtggctacgagcagtgtttttcaggaggtgaccctcagactgacagtgagtgagtccgagcatcagtggcttctggagcagaccagccacgtggaagagaagccttacagagatgggtcggcagagccctgctgatggctgggccttgtgggcagccactctgtgtgagcagggtgttgggcccatacacttcaaagaccagagccctgcactgggagagtgctcctggcccaggctgggaatcacctttcgaggcccttcagactctggcggggcttgctgtggcctccctccagctagtggtgtggctgagcagactccagggccagggccagttcccttctcccctcccggccaaacccagacccagactctaggaagctggaatggagggcagggatccatgggagatgtcgggatgaaggtgggagctggaggtgcagggggacctggaacatggatgggagtggacaggcctttctccttagaggccagaggtgctgccctggctgggagtgaagctccaggcactaccagctttcctgattttcccgtttggtccatgtgaagagctaccacgagccccagcctcacagtgtccactcaagggcagcttggtcctcttgtcctgcagaggcaggctggtgtgaccctgggaacttgacccgggaacaacaggtggtccagagtgagtgtggcctggcccctcaacctagtgtccgtcctcctctctcctggagccagtcttgagtttaaaggcattagtgttagatacagctccttgtggctggaaaacacccctctgctgataaagctcagggggcactgaggaagcagaggccccttgggggtgccctcctgaagagagcgtcaggccatcagctctgtccctctggtgctcccacgtctgttcctcaccctccatctctgggagcagctgcacctgactggccacgcgggggcagtggaggcacaggctcagggtggccgggctacctggcaccctatggcttacaaagtagagttggcccagtttccttccacctgaggggagcactctgactcctaacagtcttccttgccctgccatcatctggggtggctggctgtcaagaaaggccgggcatgctttctaaacacagccacaggaggcttgtagggcatcttccaggtggggaaacagtcttagataagtaaggtgacttgcctaaggcctcccagcacccttgatcttggagtctcacagcagactgcatgtgaacaactggaaccgaaaacatgcctcagtataaaacaaacattataaaacgaa

SEQ ID NO: 13732 - DNA, 1573 bp, Homo sapiens
atgcggaaggggcggtagccggccgggcctgggaacgtggctggttggaggaggtagatcaccctttctgcgggggacgatttcgtcggtggtaggctgctaccatgaggttgaatcagaacaccttgctgctggggaagaaggtggtccttgtaccctacacctcggagcatgtgcccaggtaccacgagtggatgaaatcagaggagctgcagcgtttgacagcctcggagccgctgaccctggagcaggagtatgccatgcagtgcagctggcaggaagatgcagacaagtgtaccttcattgtgctggatgccgagaagtggcaggcccagccaggcgccaccgaagagagctgcatggtgggagatgtgaacctcttcctcacagatctagaagacctcaccttgggggagatcgaggtcatgattgcagagcccagctgcaggggtaagggccttggcactgaggccgttctcgcgatgctgtcttacggagtgaccacgctaggtctgaccaagtttgaggctaaaattgggcaaggaaatgaaccaagcatccggatgttccagaaacttcactttgagcaggtggctacgagcagtgtttttcaggaggtgaccctcagactgacagtgagtgagtccgagcatcagtggcttctggagcagaccagccacgtggaagagaagccttacagagatgggtcggcagagccctgctgatggctgggccttgtgggcagccactctgtgtgagcagggtgttgggcccatacacttcaaagaccagagccctgcactgggagagtgctcctggcccaggctgggaatcacctttcgaggcccttcagactctggcggggcttgctgtggcctccctccagctagtggtgtggctgagcagactccagggccagggccagttcccttctcccctcccggccaaacccagacccagactctaggaagctggaatggagggcagggatccatgggagatgtcgggatgaaggtgggagctggaggtgcagggggacctggaacatggatgggagtggacaggcctttctccttagaggccagaggtgctgccctggctgggagtgaagctccaggcactaccagctttcctgattttcccgtttggtccatgtgaagagctaccacgagccccagcctcacagtgtccagagcagctgcacctgactggccacgcgggggcagtggaggcacaggctcagggtggccgggctacctggcaccctatggcttacaaagtagagttggcccagtttccttccacctgaggggagcactctgactcctaacagtcttccttgccctgccatcatctggggtggctggctgtcaagaaaggccgggcatgctttctaaacacagccacaggaggcttgtagggcatcttccaggtggggaaacagtcttagataagtaaggtgacttgcctaaggcctcccagcacccttgatcttggagtctcacagcagactgcatgtgaacaactggaaccgaaaacatgcctcagtataaaacaaacattataaaacgaa

SEQ ID NO: 13733 - DNA, 1260 bp, Homo sapiens
atgcggaaggggcggtagccggccgggcctgggaacgtggctggttggaggaggtagatcaccctttctgcgggggacgatttcgtcggtggtaggctgctaccatgaggttgaatcagaacaccttgctgctggggaagaaggtggtccttgtaccctacacctcggagcatgtgcccaggtaccacgagtggatgaaatcagaggagctgcagcgtttgacagcctcggagccgctgaccctggagcaggagtatgccatgcagtgcagctggcaggaagatgcagacaagtgtaccttcattgtgctggatgccgagaagtggcaggcccagccaggcgccaccgaagagagctgcatggtgggagatgtgaacctcttcctcacagatctagaagacctcaccttgggggagatcgaggtcatgattgcagagcccagctgcaggggtaagggccttggcactgaggccgttctcgcgatgctgtcttacggagtgaccacgctaggtctgaccaagtttgaggctaaaattgggcaaggaaatgaaccaagcatccggatgttccagaaacttcactttgagcaggtggctacgagcagtgtttttcaggaggtgaccctcagactgacaagtgagtgtggcctggcccctcaacctagtgtccgtcctcctctctcctggagccagtcttgagtttaaaggcattagtgttagatacagctccttgtggctggaaaacacccctctgctgataaagctcagggggcactgaggaagcagaggccccttgggggtgccctcctgaagagagcgtcaggccatcagctctgtccctctggtgctcccacgtctgttcctcaccctccatctctgggagcagctgcacctgactggccacgcgggggcagtggaggcacaggctcagggtggccgggctacctggcaccctatggcttacaaagtagagttggcccagtttccttccacctgaggggagcactctgactcctaacagtcttccttgccctgccatcatctggggtggctggctgtcaagaaaggccgggcatgctttctaaacacagccacaggaggcttgtagggcatcttccaggtggggaaacagtcttagataagtaaggtgacttgcctaaggcctcccagcacccttgatcttggagtctcacagcagactgcatgtgaacaactggaaccgaaaacatgcctcagtataaaacaaacattataaaacgaa

SEQ ID NO: 13734 - DNA, 736 bp, Homo sapiens
atgcggaaggggcggtagccggccgggcctgggaacgtggctggttggaggaggtagatcaccctttctgcgggggacgatttcgtcggtggtaggctgctaccatgaggttgaatcagaacaccttgctgctggggaagaaggtggtccttgtaccctacacctcggagcatgtgcccaggtaccacgagtggatgaaatcagaggagctgcagcgtttgacagcctcggagccgctgaccctggagcaggagtatgccatgcagtgcagctggcaggaagatgcagacagtgaggagtgcccccccacttcccctagccctggtactgggagggctgactccacagtcagtctccaggttccttccctttcccagccccggccatagaagctttgtgaaaagcctggaaggtgctggaactcctgtattctcatggccctgaagccagtccctgtggctgacccttctgtcctcttccccacccactgcatcggtcttccttgccctgccatcatctggggtggctggctgtcaagaaaggccgggcatgctttctaaacacagccacaggaggcttgtagggcatcttccaggtggggaaacagtcttagataagtaaggtgacttgcctaaggcctcccagcacccttgatcttggagtctcacagcagactgcatgtgaacaactggaaccgaaaacatgcctcagtataaaacaaacattataaaacgaa

SEQ ID NO: 13735 - DNA, 378 bp, Homo sapiens
ggccaaatcattgacttaatagtacctcctaaaatcaaacttcaataaaatctcagtacaactataaaaaatatgtataccatagtattttatagactgtaattggtcataaaacacaaaaagacatagctgctgtgtactggtaatttcatgaaaggggccaaggcgcggtggctcacgcctgtaatcccagcactttgggaggctgaggcgggcggatcatgaggtcaagagatcaagaccatcctggccaacgtggtgaaaccccatctctactaaatacaaaaattagcagggtgtggtagcgcgtgcctgtagtcccagctacttcagaggctgaggcaggagaatcgcctgaacccaagaggtggagtttgc

SEQ ID NO: 13736 - DNA, 707 bp, Homo sapiens
cctcagctaagatgtttcttctttgttctagattcagtcatataagcagaggcagcaggtactaggcctcagagtaatagtccctgaagaaaataaagagaaagtctgtctgagaaaagccagttgtgccagttaaagaatgacctatggccacaatgccttactggagggtgcttgggagcccatgtcctcatgtctgttgtatcgggttagggagatcctggtgcatttcagtggggagggggttgctgctggtcgtgttttcactccttctctctccttccccagtgaccccaagacaaaatgctgttaggtaagtggggtctgcttagccccactaagttcccccatccaccattaggaatcagtggtattgttatagtctaccaggaccgacctggtgctgctcagaaccaggggctcaaggcagggcctcccttcatcttcttaaattattctctagcagctctgagtctcccaaagattggtcctagagaaaagactatgtcatttactgctttttctgatggtaaaaacatgcatatttactgcagaaaatttgaaaaatagagaaatgtgtaaagaagaaaacgtacaaaataactttagactcaaaaccaatctgattaaatcaggaaatcattatttattgagcacctactatgtgccagccactgttgttcttggtgctggggacatagcagtga

SEQ ID NO: 13737 - DNA, 918 bp, Homo sapiens
accaagtctggatatttctccagtatggcacccggatcttcttcctttcgggaacccacctacaggcctgccttgggttctgtcagatactgggcttcctgaagctgtctttgtcctatttacattcataaaagtgagtctgattgtgtcttcctttaagcgcttatccagttacttttgatctgtgaaggcttccttgaccacccaagccccaagctaaacttgtttgcttggctattaggtccactcagttggaacttaaactactcattttcatcactttgtttcaaaatcatgattatctgacattactggggcaaacagggaactgtagataaggtaagggattaacattttttttcctttttaaaaatgttaatcatcttagatggaactttttaaggcagatgacaaaacttacttagcttattaaattgagtgcattactatttaataatgtctggatgaatcaacgtaaatattatgaagataaaatattttatatacaaggcgtaattcagtgaatctacaggttcagcctaatatggtaagtaccctgctactgaaacaacaaaataagacccctgtttgagaaagggaaatatgaaatcagatatatgagttcccctttaagaatggaaactgggttgggtgtggtggtttatacctgtaatcccagtgctttgggaggccaagacaggaggattatttgaggccaggtgttcaacacagcaagaccccatctctacaaaaaataaacgaattagccatgcattgtggcaagcacctgtagtcctacctactcaggaggctgaggcaggacgatcccttgaacccaggagctcaaggttacagtaagctatgagagtaccactgcactccagcctgggcaaaagagtaagaccacatctttaaaaa

SEQ ID NO: 13738 - DNA, 713 bp, Homo sapiens
ctgggggcttttcaatgatctaagagcagcctatgattgtcattctggtctttcctcactgagactttcttcttatttgctgacttttctttccatcaggaaattattctaagagatgttgaaaaatgccattaccatatcctgttattatttttgggtggggggagagatgtggtactaatgtgtgtatgtgtgtgtgtgtgtgtgtgtgtgtgtgtgtgtgttttcagtgcagttgaatctgaaataatgaaaacctagaaccaagtatctaacagaagatgtcctattatggcagggaaggaggagagtcgaggatgttctggccagaggtctttatagggaaagtaccttaaagattttgggggagctatatgaggataaaataactttttctgactaccagttatgtctaaagggatttaaaaaaaaaaagagtgatacttcatattgagattactatgtgccaggcactgggctaagtgctttacagaaattaactcatataattattaccacaatctgatgaggtaaatactgtcattcccctcacttttcagatgaagaaaaagaggcagagagctatttaagtaacttgctgaaggtcacactcttggctggtaccagagctgcgatgtacactcgggttatccaagacaccagccagtgtgcttattccttatgcgaaattttctagaatagacgttctcatg

SEQ ID NO: 13739 - DNA, 574 bp, Homo sapiens
gggaagctcggttatgctgccgcccactcccctctgcccagactggttcaagccgccaccctggactgatgagaatatgccagggataaaccacaactgtgggaaatgctgggtgggggcataaatatcatctgtaaacaattaggcagccactgctcattcagtgccgttttgagaagctaaggaagtccgcaatcagttatatctccaattaccataaaaatatattagccattcattcatttattaatgattcatcagttaaccacacataatgagcaaataattagcagtgctgtacggttgccaaaattgaagaagtgttggcattttaaagatgaaaggttgaatttatgcagaagtctggtgatgataaagttaatatggaagataattataaaagtggctgtcctctattacaggctgaggtaccacaaaacttgcctaattgaactgaaattaatattcttccaaagtctgtgtgttgccacacacaaactgctgaatttctcttgaagatctcccttcagtaaggtgcaccgcacaatacaagttaataaaatgccagacagct

SEQ ID NO: 13740 - DNA, 364 bp, Homo sapiens
ataacaaaaataaatgtttttatttagtaataaatcatttaatattaaatagcttaatcttattaattggatgagaatcttcttttacatttcctttacatttcaactttggaaatatagttgagttttcagattacaccttcatggtgaatacaggagaagatagctaaataaaaattcctgccaagagaagagtagaccttaattttaatcaatttgcatgttgcagaagataaaaagtagagccacaccaagctgaaccagatttaacattatgctttgaagaaacccagtaataatgaattacgcacttatttcataggtccgtcctgcttgttttggctctttagaaacctatatttca

SEQ ID NO: 13741 - DNA, 339 bp, Homo sapiens
tatctgtagtagaaggattctctggatttaaaagcaattgctggtaatagttgtagtcgtacagttttcggtagaagccaaggagtgtacctgtctctcctgtggaaagagatctttttgaagacttcctacagtattagagcttgttttcatgtccatatactccagaactatcaaaattgatggtcttccttaaaagccttttgcatttttatatagttgatttattacacgtagaatcagtaagtgtcaaagagcaaattataggggaaattagaagaatgaaaacacaagaaacgtctaaccagtttaatcaggaaaaaaagagaagatatacat

SEQ ID NO: 13742 - DNA, 453 bp, Homo sapiens
tttcctttaatgataaaatgaatgactttatgatgcttgactgctctgtaaggtgctatataaatgctaagtatttatttgtaaagtatataaacacaaacacacacagccaacatctgctggttttatgtagatgtagtgtgaaaaactgtaaaatttatattcaaattttgaaacatttcccaaattgttacaattacatacttggtcagagtaattcaagttcaataaatctttcagatttctagtattaaaaaaacttttcccccttttgctatagtgttaatttaaaataaatgaccaattacttctaataatgaaactttttttcaaaagcagaagaaaatagcttttgggtatttttaaaaaataatccacattgtatacatacataaatacacacatatacatctattatctttcattttgttatggtacaaacacaatgtaaga

SEQ ID NO: 13743 - DNA, 464 bp, Homo sapiens
agtccatcaaaagccaggttttatgtctttatgaagtattcaggactgtgctgaatactttgtgcaatttctgtcaatgtgtttcatgtctagttgggggaacaaaatacatgtgtttgaaaagatattagatgtttccagatgagtgtgaagttgagctttcgttttagggtccaaaatcaaggatgatcacataggatgttcccagccttcctggggccactggatttatactggttagtgaagtcaggctaagatttttctatccttcaagcccatagaaaaggggcttttctagtagcaacagaatgtgcaagatctggtaaaaatctcaaatattaaaagacaactatgaaattaaaattattaaatgtttaaattcatgcattcaatataatgtatgcctaggatatgccaggcactggtctaggtctgagagatgtcagtgaataaaataaaggaaa

SEQ ID NO: 13744 - DNA, 1188 bp, Homo sapiens
catttgattccatgacctttgttcacaatctccacactatatccagctcctaaaattctgtgaccttgagagtctaagtttctttatttaaccttctcagatatcattgtcctaagaatgtgatattaggctgttgttgaccatggccaataaaagtggggccttgaagccctccctgtggggtggaggctgggcctagtcagggagagacacaggctctctctgacaagcatacacagcctactttttcctccctgctggccgctagccaagggggactcaaggccaaactatctagtagggagattcttccttggacagccttttatctctgcagccaggagcctgggcctttctaggagatcttagaactttattctatcatagcccctgagggttggcagggccaaccctccctcatctgtcctttctcagctggccacacccagaatatctagactggagcacaaaagagaagtagcacttttcccttgatgataacaacagcagcaaccggaactatcatttagtgctttctgtttgtctggaacttttcatttgccctaatcctcaacatataaaaccctatgaattttgttttgcaggcaaggcaattttaccttttggagcctctgttttctcatctgtaagactggataatagctcctaccacacagagtggttgtaaggattaaaagatataacccatgtggaatttttaatgtaccattggcacctggccagttgtcaatcactgtcagcttttcttgttactgtttctagacccccacacagtcatggaacaaccaccaaccaccatcacttgccattcacctcaaccctgtaattgtgttattttggtcttagctgctgttctgggcaccacctcatgtttgacttggatttcaaacttgcagtcaactcaaacctcagttcttgtaacttgttcccaggcattgaaatttctgacctatgtctctggttccttagcactgatatgccctggtgaggacacaggtgtccagcaagccctgccttgtaagggtcacttcagaagtccctggacattaaggattaaatagcatcattatgtattgttattagtttattttctcaagtgacatcaaagtatttttcttcagtatgcagaaataaacagttctgtttgtcctttcccagaaaaaaaaa

SEQ ID NO: 13745 - DNA, 2264 bp, Homo sapiens
caacgccattctcaagcaagcgcatcaatatatttagttccggcctctttgcacgtcatttccggcaccggcatggccgggtgagctgcaggctaccttatttaagaccgggaatttagtcagcctggtgagccgactctgaggagatggagtatcgctgaggtgatgagagagaatgtggttgttagcaacatggagagagaaagtgggaagcccgtggctgttgtcgcagttgtgactgagccttggtttacccagcgatacagagaatatctccagaggcagaaactctttgatacacagcaccgtgtggaaaagatgccggatggctcggtggcgctaccggtgctgggagagacgcttccagagcagcacctgcaggagctgaggaatcgtgttgccccaggcagtccctgtatgctcacgcagctcccggatcctgttccttcgaagagggcccagggttgttcacctgcccaaaaattgtgtcttgaggtgagtcgctgggtggagggtcggggagtcaagtggtcagccgagttggaggctgatttgccccgatcatggcaacggcatggtaatctcttgttgctgagtgaagactgtttccaagccaagcagtggaaaaatctgggaccggaactctgggagaccgttgccttggcacttggcgtccagcgtttggcaaaacgagggcgggtatcaccggatggtactcgaactccagcagtgacactgctgctgggtgaccatggctgggtagagcatgtggataatggtatccgttataagtttgacgtgacccagtgtatgttctcctttggaaacatcactgagaagcttcgagtggcatcgttgtcctgtgctggagaagtgctggtggatctctatgcagggattggttattttacattgcctttcctagttcatgctggtgctgccttcgtccatgcttgtgagtggaatccccatgctgtagttgctctgagaaataaccttgagatcaatggagtagcagatcggtgccaaatacactttggagataacagaaaactgaagctctcaaatattgcagatagggtgatcctggggctgattcccagctctgaagaaggctggcccattgcctgccaagtgttaaggcaggatgctggaggcattttgcatatccaccaaaatgtggaatctttcccagggaagaatcttcaggctcttggagtcagcaaagtagagaaagagcattggctgtatcctcagcaaattaccaccaaccaatggaaaaatggagctaccagggattctaggggaaaaatgctgtcaccagccaccaagccagagtggcaaaggtgggcagaatctgcagaaactcgaatcgccactcttcttcagcaggtgcatgggaaaccatggaagacacaaattctgcacatccaaccagtgaaatcctatgctccccatgtggatcacatagtcctggatctggaatgctgcccctgtccttcagttggctagaggaggtagatcctgggacacatgggatccacgtgcgagtggcccttaaatgtatcagttcagtccaggttgtcatcccttttgtcccctggtgatcagtttttttcatattttatagccctgaaagcaggctctagatcaattcaaattatttcatttgtctttcattgataacagaaaatgaaatacctgtttgggagaagcagcatggcccattgaaatgaggctcatctgtgcaattatgaattccaaattctgacctcagttctggaattgaagtttcagtatgttttggcctcgggtttcgttatttgcaaaatgagagtttctttgaactgtctcacgtgactattaagcaactatacacaggacatcggttattttagagtgaaagacacagtgctttttccaaattgctctggctaccatatagaaaattgactgaaggagggccaagatggaaacagagagaccagtgaggaggcttctgtggttgtccaggtctgaggtgatggtaacttggactcggatggtggtaatgggaggtagattgatatgataaataaaattgacagaccaagcaatggaatcagaattaagtccttaacatgaagctgctttgttattatgactgactaaattagagagagaagggaacaaaaattattttagtgtatttccattcccttactgtggcattcctaaatgattgtgaggggttgtcttataaatttggtttgttgtggtagaaa

SEQ ID NO: 13746 - DNA, 2093 bp, Homo sapiens
caacgccattctcaagcaagcgcatcaatatatttagttccggcctctttgcacgtcatttccggcaccggcatggccgggtgagctgcaggctaccttatttaagaccgggaatttagtcagcctggtgagccgactctgaggagatggagtatcgctgaggtgatgagagagaatgtggttgttagcaacatggagagagaaagtgggaagcccgtggctgttgtcgcagttgtgactgagccttggtttacccagcgatacagagaatatctccagaggcagaaactctttgatacacagcaccgtgtggaaaagatgccggatggctcggtggcgctaccggtgctgggagagacgcttccagagcagcacctgcaggagctgaggaatcgtgttgccccaggcagtccctgtatgctcacgcagctcccggatcctgttccttcgaagagggcccagggttgttcacctgcccaaaaattgtgtcttgaggtgagtcgctgggtggagggtcggggagtcaagtggtcagccgagttggaggctgatttgccccgatcatggcaacggcatggtaatctcttgttgctgagtgaagactgtttccaagccaagcagtggaaaaatctgggaccggaactctgggagaccgttgccttggcacttggcgtccagcgtttggcaaaacgagggcgggtatcaccggatggtactcgaactccagcagtgacactgctgctgggtgaccatggctgggtagagcatgtggataatggtatccgttataagtttgacgtgacccagtgtatgttctcctttggaaacatcactgagaagcttcgagtggcatcgttgtcctgtgctggagaagtgctggtggatctctatgcagggattggttattttacattgcctttcctagttcatgctggtgctgccttcgtccatgcttgtgagtggaatccccatgctgtagttgctctgagaaataaccttgagatcaatggagtagcagatcggtgccaaatacactttggagataacagaaaactgaagctctcaaatattgcagatagggtgatcctggggctgattcccagctctgaagaaggctggcccattgcctgccaagtgttaaggcaggatgctggaggcattttgcatatccaccaaaatgtggaatctttcccagggaagaatcttcaggctcttggagtcagcaaagtagagaaagagcattggctgtatcctcagcaaattaccaccaaccaatggaaaaatggagctaccagggattctaggggaaaaatgctgtcaccagccaccaagccagagtggcaaaggtgggcagaatctgcagaaactcgaatcgccactcttcttcagcaggtgcatgggaaaccatggaagacacaaattctgcacatccaaccagtgaaatcctatgctccccatgtggatcacatagtcctggatctggaatgctgcccctgtccttcagttggctagaggaggtagatcctgggacacatgggatccacgtgcgagtggcccttaaatgtatcagttcagtccaggttgtcatcccttttgtcccctggtgatcagtttttttcatattttatagccctgaaagcaggctctagatcaattcaaattatttcatttgtctttcattgataacagaaaatgaaatacctgtttgggagaagcagcatggcccattgaaatgaggctcatctgtgcaattatgaattccaaattctgacctcagttctggaattgaagtttcagtatgttttggcctcgggtttcgttatttgcaaaatgagagtttctttgaactgtctcacgtgactattaagcaactatacacaggacatcggttattttagagtgaaagacacagtgctttttccaaattgctctggctaccatatagaaaattgactgaaggagggccaagatggaaacagagagaccagtgaggaggcttctgtggttgtccaggtctgaggtgatggtaacttggactcggatggtggtaatgggaggtagattgatatgataaataaaattgacagaccaag

SEQ ID NO: 13747 - DNA, 274 bp, Homo sapiens
gctggccgggccaggtgcgtccttccccagttctaggtggcaaatggggtggggccagagccttctggctagggaagacactggcctggttggtgtggcaggggcagcgaaggagggtcaaaggccactctggcctggaagagtccccagccacctggacgggggtagccaggcctggtccctgcccccactctccaaggggtcggggcagccgggcagagccagtaagtgtttgttttcagatgacatttgtaaagaaaaacagcctcccaca

SEQ ID NO: 13748 - DNA, 781 bp, Homo sapiens
cctattttggctcggctcctgcccagcacctggcggcctttgtaggcctaaagcttcctcaagtcaagcgttccaggcccagatcatgctgcccaggggccttcacaggcccagctactgcctgacgatggcttccccaggcccaggtcttgccttcccccagcctcccgaggcccagcccttgcctcacagttgctttcccagtccacgttacagcctgttacccgacggccttgacagaccaaactcttccttcacactggacagtttaggacaagctcatacgtcttccagcctctccaggtcaagctcctgcctcacactggcctctataggcccaggtgctgaatcgcaatggtctgtttaggtccatctcatgcctttctcagactctccaagcgacgatctggcctgacacttgcttctgtgggccatgtgatcactcacactggcctctttaggatcaggggatgcctctccacaggccgagatcctgcctgttgtaggccccttcaggatgcgccgctgcctgacagtggaccctccaggcctagatgttacgtgatcatggcctctgcaggtcaagaatttaaattttcgcagcctctataggccaggctactgcctcctgataatggcttctgcaggcccaaatcgtcctgaaataagcctcgccaggaacagcgcatgtgtgttggatgcccgaacaaccatagcttctcccgcacagtggcccatgggggccgggctcttgcctcagcctggccacctcaggcccagt

SEQ ID NO: 13749 - DNA, 380 bp, Homo sapiens
taaaattcatacatttcccttacttatatagatcttcctactttccagacatgtgtattattgtatattacatttgtcaatagctcatggcaacagatacacatagtttgggataacccttttatacctcatatgagcagtgttcaaaggtttaaaagcacaactccaaagggcacagcttgaaatggagcgggaggatgctagcaaagccaccccaataaacacaaaatcttagtaaaagcactatgtttaccaggcaatgcaacttcaaaacaaattccttagcaaccccaacctcttcaagcccgcttctaatcacattattactcctaagcctccttatatacaaaatcttaggctggccaagcccaaacacacag

SEQ ID NO: 13750 - DNA, 498 bp, Homo sapiens
cttgggcctaagaactctatcctcttgggattgagattttctggttcaccattgccctgcactgggggtgtgggatgctgttggctgggttccacagctccagctctcaaaggcatgtggggtatcttgagggggtagtggctccggtagggggtggaagccaggagagcagtggcctcacagtgaggagtcaggcaaggacactctctactcattaagggaacatgggtctgatcaaggagttagaacattcctttccaagccagccgggcaaatttctctgctgctcggggtttgggggcagctctcgccctggcatggctggccaacagtacaggcaaagtgataggggagaagtcggtgagcagagccacaggatgtatcttttcctgtgggtttctgggggaggaaggggcacagaaattcttgtttttcagaatggtgttgggaaaagaagtgtggatgtagaagggactggacctactagaacaacttcct

SEQ ID NO: 13751 - DNA, 6054 bp, Homo sapiens
cgccgggcgggcgggcactgcagcttcttcctccgtggagcggagagcgagacagagctacagcgaacgagagagcggcgaaggcgggtagaggggcgcgggcgaggcggcgcagccatccccggaccaggggccgcgccgccaccatgctaaacaacctgacggactgcgaggacggcgatgggggagccaacccgggtgatggcaaccccaaggaaagcagtcccttcatcaacagcaccgacacagagaagggaaaggagtatgatggcaagaacatggccttgtttgaggaggagatggacaccagccctatggtgtcctccttgctcagtggcctggccaactacaccaacctgccccagggaagtagggagcatgaagaggcagaaaacaatgagggtggaaaaaagaagccggtgcaggccccacgcatgggcaccttcatgggcgtgtacctgccgtgcctgcagaacatctttggcgtcatcctcttcctgcggctcacctgggtggtgggcattgcaggcatcatggagtccttctgcatggtgttcatctgctgctcctgtacgatgctcacggccatctccatgagtgcaattgcaacgaatggtgttgtgcctgctggtggctcctactacatgatttccaggtctctgggcccagagtttgggggtgccgtgggcctctgcttctacctgggcactacctttgcaggagccatgtacatcctgggcaccatcgaaatcctgctggcttacctcttcccagccatggccatcttcaaggcagaagatgccagtggggaggcagcagccatgctgaacaacatgcgtgtttacggcacctgtgtgctcacctgcatggccactgtggtgtttgtgggtgtcaagtatgtcaacaagtttgcccttgtcttcctgggttgtgtcatcctctccatcctggccatctatgctggggtcatcaagtctgccttcgacccacccaacttcccgatctgcctcctgggtaaccgcacgctgtctcgccatggctttgatgtctgtgccaagctggcttgggaaggaaatgagacggtgaccacacggctatggggccttttctgctcctctcgcttcctcaacgccacctgtgatgaatacttcacccgaaacaatgtcacagagatccagggcatccctggtgctgccagtggcctcatcaaagagaacctctggagctcctacctgaccaagggcgtgattgtggagaggagtgggatgacctcggtgggcctggccgatggcactcctatcgacatggaccacccttatgtcttcagtgatatgacctcctacttcaccctgctggttggcatctacttcccctcagtcacagggatcatggctggttctaaccgctctggggacctgagggatgcccagaagtcaatccccactggcaccatcctggccatcgccaccacctctgctgtctacatcagctccgttgttctgtttggggcctgcattgagggggtcgtcctgcgggacaagtttggcgaagctgtgaatggcaacctcgtggtgggcactctggcctggccatctccatgggtaattgtcatcggatccttcttctccacctgtggggctgggctgcagagcctcacgggggccccacgcctgctgcaggccatctcgagggatggcattgtgcccttcctgcaggtctttggccatggcaaggccaatggagagccgacctgggccctgctcctgactgcctgcatctgcgagattggcatcctcattgcatccctcgacgaggtggcccccatcctctctatgttcttcctgatgtgctacatgtttgtgaatctggcctgtgcagtgcagacgctgctgaggacacccaactggaggccacgctttcgatattaccactggaccctctccttcctgggcatgagcctctgcctggccctcatgttcatctgctcctggtattatgcactggtagccatgctcattgctggactcatctacaagtacattgagtaccgtggggcagagaaggagtggggcgatgggatacgaggtctgtctctcagtgcggctcgctatgccctcttacgcctggaggaagggcccccacacaccaagaactggaggccacagctgctggtgctggtgcgtgtggaccaagaccagaatgtggtgcacccccagctgctctcactgacctcccagctgaaggcagggaagggcctgaccatcgtgggctctgtccttgagggcacctttctggaaaatcatccacaggcccagcgggcagaagagtctatcaggcgcctgatggaggcagagaaggtgaagggcttctgccaggtggtgatctcctccaacttgcgtgatggcgtgtcccatctgatccagtccgggggcctcggggggctgcagcacaacactgtgcttgttggctggccccgcaactggcgccagaaggaagatcatcagacgtggaggaacttcattgagctggtccgggaaaccacagctggccacttagccctgctggtcaccaagaacgtttccatgtttcctgggaaccctgagcgcttctctgagggcagcatcgacgtttggtggattgtgcacgatggaggcatgctcatgctgctgcccttcctgctgcggcaccacaaggtctggcggaagtgcaagatgcgtatcttcactgtggcccagatggatgacaatagcatccagatgaagaaggatctgaccacatttctgtatcatttacgcatcactgcggaggtcgaggtggtggagatgcatgagagcgacatctcagcttacacctatgagaagacgttggtgatggagcagcgttcccagatcctcaaacagatgcatttaaccaagaatgagcgggagcgggagatccagagtatcacagatgagtcacgaggctcaatccggagaaagaatccagccaacacgcggctccgcctgaacgtcccagaagagacggctggtgacagtgaagagaagccagaggaggaggtgcagctgatccacgatcagagtgctccccaactgccccagcagctccccgtccccaggggaggagcctgagggggaaggggagacagatccggagaaggtgcatctcacctggaccaaggacaagtcggtggcagagaagaataagggccccagtcctgtctcctctgagggcatcaaggacttcttcagcatgaagccggagtgggagaacttgaaccagtccaacgtgcggcgcatgcacacggccgtgcggctgaacgaggtcatcgtgaagaaatcccgggacgccaagcttgttttgctcaacatgcctgggcctccccgcaaccgcaatggtgatgaaaactacatggagtttctcgaggtcctcacagagcacctggaccgggtgatgctggtccgcggcggcggccgcgaggtcatcaccatctactcctgagaaccaggacctgccacccgggcccgagcgcgcccggcccgcggctccggagccctcgccgcgccccccgccgctgtcaccgtttacatacagaccctgtgcccgtgtcctggccccttaccccgctgcctgaagcccggaggccacgcctgttggggctgattcggagagggcgccccgccgcgcagagaccagagctcctcagtgccagtttggcccctgggtcttcgctgccctttttctaagcccggcctcgtctcgccggaggagacgctgcaataaaggttgggagaaggcgcggaaaggagaggagctggggccttggggacccccaggtagtccatgcggcccattcctccccttcccactcccgccgcggtcctcgctctgcgctcctccggcgctgctccctggctcccggcggcccggaggcccgcggggtgggaaggccgcgcttgccgtctccgccgccccttctcgccgagccgtggggcgcgggcggccgagcctatacatagtgtacaggagacatcgcgtgtatttttaacgtccccatatttatgtgactagaagcgcaacagacttctcgccatagtcgagctctcccgctgggggcactgcggggaggcgaggcctcgggaagctgaattttccttgacgtccaagagtttgagagcgaaagtgctttaggcccaggcgggggtcgtggcctcgttccctcgacacctccgtcctgctctcgcctcttcgccctttccgcgcgcccttggcttcccaccctcctctccagtccttttccgagatgaggtgagacaagggtccaacttttcctggattcgcctcccagcggacgtgagcttccactgcggctgcagagacgcgagcaacctcttctcatcggctcttatgcaagttggggccaggataggggaggggtgctcctcaagaggaagaaaccgagaggcccgcgccccaccgaggaagccccgccccggtgccttcgctggggagcaggcgtctctcctcagtcggcttgtcgcctgctccccgtatcccatggctcctcgccaaagactgaaattgtggagctggagggcgccccctccccggagtttcctccctgggacaagtgagggaggagggggccgattctggtttaggggccggacccactgagaggccccagagccgcccgtgatgttcctcccccgtccccatctggcagctcctgtctcgcctgagggacccagccgccttctccgtgctctggggccgggcctcgctgcttagcagcggcctctagctccgtctcccggggacctgggcctgagggagggctggagtcgcacgcgctttgtccttagcgcctgtctgctctcctctaactaggacccagggcctttggcttccccagctcatccttggcccttccgctccaccagcctggtctgaggcgtgctctgtccttagagaaggcgcggtggccgggttcccttcccctagggcacattactaagggggtcaggcactgcatgctcgttccagcaccatctgggactgggtacagtacctccagccccagggccctgacctgcgcacctagcttgacatctcacgcacctcccagagctggcgccactgagtaatccggacctcaccacctcttttcctttgagcccaaaggcagagctggagctggcgccacccagacagcgtcaggtgtggctggggtaggtttggaggtctgccagttacaccaagtcccctctgagattcgatcaggggactggatagattctttcaggtactcaatcaggaagctggaggtgttagacaccagccccctgcatccttcagtagacctccctctgaacaccacagccaggtcctgccttctgggggcctgaatattccagagctgatgtgatgggctgtgcagaagggggctgtatcaacatcaattagggaaccaaagttgcactatctgggcccagattgtctggttggcaagagcaaagtttccgttgatgaaacagacatcccacaacaaaaacccaagttttctgtgctacatgtgcaatatttgttatgaatgttatcacaagtcattcatcaagttatctttataatcactgtagttagatgtttcatgtccattcaagtgacttttattctgagtgcaatatttcaatagccttgtagtgataactagtgttgcttttgttttagatgatctatgtgcagggcaatgcaatgaagttgaaaacccttgtaaataggagaggttgcaaaccaaatcaagagtatttattactattactgctattattattaggcctgcctttaattttcagtgtaagtgttcagtatgccgcatcctgcctcagtattgatcttgtgttctttgtgccaatatgaaaaggagagggttggttctttcctttattgttgaatgctcccatttaatgctttatggcttttactgtattacttttttagactcccgtctgcacaaaatgcaataaaaataattttattatacccttaaaaaaaaaa

SEQ ID NO: 13752 - DNA, 6000 bp, Homo sapiens
cgccgggcgggcgggcactgcagcttcttcctccgtggagcggagagcgagacagagctacagcgaacgagagagcggcgaaggcgggtagaggggcgcgggcgaggcggcgcagccatccccggaccaggggccgcgccgccaccatgctaaacaacctgacggactgcgaggacggcgatgggggagccaacccgggtgatggcaaccccaaggaaagcagtcccttcatcaacagcaccgacacagagaagggaaaggagtatgatggcaagaacatggccttgtttgaggaggagatggacaccagccctatggtgtcctccttgctcagtggcctggccaactacaccaacctgccccagggaagtagggagcatgaagaggcagaaaacaatgagggtggaaaaaagaagccggtgcaggccccacgcatgggcaccttcatgggcgtgtacctgccgtgcctgcagaacatctttggcgtcatcctcttcctgcggctcacctgggtggtgggcattgcaggcatcatggagtccttctgcatggtgttcatctgctgctcctgtacgatgctcacggccatctccatgagtgcaattgcaacgaatggtgttgtgcctgctggtggctcctactacatgatttccaggtctctgggcccagagtttgggggtgccgtgggcctctgcttctacctgggcactacctttgcaggagccatgtacatcctgggcaccatcgaaatcctgctggcttacctcttcccagccatggccatcttcaaggcagaagatgccagtggggaggcagcagccatgctgaacaacatgcgtgtttacggcacctgtgtgctcacctgcatggccactgtggtgtttgtgggtgtcaagtatgtcaacaagtttgcccttgtcttcctgggttgtgtcatcctctccatcctggccatctatgctggggtcatcaagtctgccttcgacccacccaacttcccgatctgcctcctgggtaaccgcacgctgtctcgccatggctttgatgtctgtgccaagctggcttgggaaggaaatgagacggtgaccacacggctatggggccttttctgctcctctcgcttcctcaacgccacctgtgatgaatacttcacccgaaacaatgtcacagagatccagggcatccctggtgctgccagtggcctcatcaaagagaacctctggagctcctacctgaccaagggcgtgattgtggagaggagtgggatgacctcggtgggcctggccgatggcactcctatcgacatggaccacccttatgtcttcagtgatatgacctcctacttcaccctgctggttggcatctacttcccctcagtcacagggatcatggctggttctaaccgctctggggacctgagggatgcccagaagtcaatccccactggcaccatcctggccatcgccaccacctctgctgtctacatcagctccgttgttctgtttggggcctgcattgagggggtcgtcctgcgggacaagtttggcgaagctgtgaatggcaacctcgtggtgggcactctggcctggccatctccatgggtaattgtcatcggatccttcttctccacctgtggggctgggctgcagagcctcacgggggccccacgcctgctgcaggccatctcgagggatggcattgtgcccttcctgcaggtctttggccatggcaaggccaatggagagccgacctgggccctgctcctgactgcctgcatctgcgagattggcatcctcattgcatccctcgacgaggtggcccccatcctctctatgttcttcctgatgtgctacatgtttgtgaatctggcctgtgcagtgcagacgctgctgaggacacccaactggaggccacgctttcgatattaccactggaccctctccttcctgggcatgagcctctgcctggccctcatgttcatctgctcctggtattatgcactggtagccatgctcattgctggactcatctacaagtacattgagtaccgtggggcagagaaggagtggggcgatgggatacgaggtctgtctctcagtgcggctcgctatgccctcttacgcctggaggaagggcccccacacaccaagaactggaggccacagctgctggtgctggtgcgtgtggaccaagaccagaatgtggtgcacccccagctgctctcactgacctcccagctgaaggcagggaagggcctgaccatcgtgggctctgtccttgagggcacctttctggaaaatcatccacaggcccagcgggcagaagagtctatcaggcgcctgatggaggcagagaaggtgaagggcttctgccaggtggtgatctcctccaacttgcgtgatggcgtgtcccatctgatccagtccgggggcctcggggggctgcagcacaacactgtgcttgttggctggccccgcaactggcgccagaaggaagatcatcagacgtggaggaacttcattgagctggtccgggaaaccacagctggccacttagccctgctggtcaccaagaacgtttccatgtttcctgggaaccctgagcgcttctctgagggcagcatcgacgtttggtggattgtgcacgatggaggcatgctcatgctgctgcccttcctgctgcggcaccacaaggtctggcggaagtgcaagatgcgtatcttcactgtggcccagatggatgacaatagcatccagatgaagaaggatctgaccacatttctgtatcatttacgcatcactgcggaggtcgaggtggtggagatgcatgagagcgacatctcagcttacacctatgagaagacgttggtgatggagcagcgttcccagatcctcaaacagatgcatttaaccaagaatgagcgggagcgggagatccagagtatcacagatgagtcacgaggctcaatccggagaaagaatccagccaacacgcggctccgcctgaacgtcccagaagagacggctggtgacagtgaagagaagccagaggaggaggtgcagctgatccacgatcagagtgctccccaactgccccagcagctccccgtccccaggggaggagcctgagggggaaggggagacagatccggagaaggtgcatctcacctggaccaaggacaagtcggtggcagagaagaataagggccccagtcctgtctcctctgagggcatcaaggacttcttcagcatgaagccggagtgggagaacttgaaccagtccaacgtgcggcgcatgcacacggccgtgcggctgaacgaggtcatcgtgaagaaatcccgggacgccaagcttgttttgctcaacatgcctgggcctccccgcaaccgcaatggtgatgaaaactacatggagtttctcgaggtcctcacagagcacctggaccgggtgatgctggtccgcggcggcggccgcgaggtcatcaccatctactcctgagaaccaggacctgccacccgggcccgagcgcgcccggcccgcggctccggagccctcgccgcgccccccgccgctgtcaccgtttacatacagaccctgtgcccgtgtcctggccccttaccccgctgcctgaagcccggaggccacgcctgttggggctgattcggagagggcgccccgccgcgcagagaccagagctcctcagtgccagtttggcccctgggtcttcgctgccctttttctaagcccggcctcgtctcgccggaggagacgctgcaataaaggttgggagaaggcgcggaaaggagaggagctggggccttggggacccccaggtagtccatgcggcccattcctccccttcccactcccgccgcggtcctcgctctgcgctcctccggcgctgctccctggctcccggcggcccggaggcccgcggggtgggaaggccgcgcttgccgtctccgccgccccttctcgccgagccgtggggcgcgggcggccgagcctatacatagtgtacaggagacatcgcgtgtatttttaacgtccccatatttatgtgactagaagcgcaacagacttctcgccatagtcgagctctcccgctgggggcactgcggggaggcgaggcctcgggaagctgaattttccttgacgtccaagagtttgagagcgaaagtgctttaggcccaggcgggggtcgtggcctcgttccctcgacacctccgtcctgctctcgcctcttcgccctttccgcgcgcccttggcttcccaccctcctctccagtccttttccgagatgaggtgagacaagggtccaacttttcctggattcgcctcccagcggacgtgagcttccactgcggctgcagagacgcgagcaacctcttctcatcggctcttatgcaagttggggccaggataggggaggggtgctcctcaagaggaagaaaccgagaggcccgcgccccaccgaggaagccccgccccggtgccttcgctggggagcaggcgtctctcctcagtcggcttgtcgcctgctccccgtatcccatggctcctcgccaaagactgaaattgtggagctggagggcgccccctccccggagtttcctccctgggacaagtgagggaggagggggccgattctggtttaggggccggacccactgagaggccccagagccgcccgtgatgttcctcccccgtccccatctggcagctcctgtctcgcctgagggacccagccgccttctccgtgctctggggccgggcctcgctgcttagcagcggcctctagctccgtctcccggggacctgggcctgagggagggctggagtcgcacgcgctttgtccttagcgcctgtctgctctcctctaactaggacccagggcctttggcttccccagctcatccttggcccttccgctccaccagcctggtctgaggcgtgctctgtccttagagaaggcgcggtggccgggttcccttcccctagggcacattactaagggggtcaggcactgcatgctcgttccagcaccatctgggactgggtacagtacctccagccccagggccctgacctgcgcacctagcttgacatctcacgcacctcccagagctggcgccactgagtaatccggacctcaccacctcttttcctttgagcccaaaggcagagctggagctggcgccacccagacagcgtcaggtgtggctggggtaggtttggaggtctgccagttacaccaagtcccctctgagattcgatcaggggactggatagattctttcaggtactcaatcaggaagctggaggtgttagacaccagccccctgcatccttcagtagacctccctctgaacaccacagccaggtcctgccttctgggggcctgaatattccagagctgatgtgatgggctgtgcagaagggggctgtatcaacatcaattagggaaccaaagttgcactatctgggcccagattgtctggttggcaagagcaaagtttccgttgatgaaacagacatcccacaacaaaaacccaagttttctgtgctacatgtgcaatatttgttatgaatgttatcacaagtcattcatcaagttatctttataatcactgtagttagatgtttcatgtccattcaagtgacttttattctgagtgcaatatttcaatagccttgtagtgataactagtgttgcttttgttttagatgatctatgtgcagggcaatgcaatgaagttgaaaacccttgtaaataggagaggttgcaaaccaaatcaagagtatttattactattactgctattattattaggcctgcctttaattttcagtgtaagtgttcagtatgccgcatcctgcctcagtattgatcttgtgttctttgtgccaatatgtatggcttttactgtattacttttttagactcccgtctgcacaaaatgcaataaaaataattttattatacccttaaaaaaaaaa

SEQ ID NO: 13753 - DNA, 4718 bp, Homo sapiens
ggcctggttttcagtatcaggaaattagagaattattttatcaaggaaaaaacaatggaacatttggggctctgctcccctgtcacccttacagaacttagtcctgtggcaggcacacagttggttctgtagttggtatggagacctgccctggaaatccaggcagcactgctcacctggcatctcctgtccacatcattccaggtttggcgaagctgtgaatggcaacctcgtggtgggcactctggcctggccatctccatgggtaattgtcatcggatccttcttctccacctgtggggctgggctgcagagcctcacgggggccccacgcctgctgcaggccatctcgagggatggcattgtgcccttcctgcaggtctttggccatggcaaggccaatggagagccgacctgggccctgctcctgactgcctgcatctgcgagattggcatcctcattgcatccctcgacgaggtggcccccatcctctctatgttcttcctgatgtgctacatgtttgtgaatctggcctgtgcagtgcagacgctgctgaggacacccaactggaggccacgctttcgatattaccactggaccctctccttcctgggcatgagcctctgcctggccctcatgttcatctgctcctggtattatgcactggtagccatgctcattgctggactcatctacaagtacattgagtaccgtggggcagagaaggagtggggcgatgggatacgaggtctgtctctcagtgcggctcgctatgccctcttacgcctggaggaagggcccccacacaccaagaactggaggccacagctgctggtgctggtgcgtgtggaccaagaccagaatgtggtgcacccccagctgctctcactgacctcccagctgaaggcagggaagggcctgaccatcgtgggctctgtccttgagggcacctttctggaaaatcatccacaggcccagcgggcagaagagtctatcaggcgcctgatggaggcagagaaggtgaagggcttctgccaggtggtgatctcctccaacttgcgtgatggcgtgtcccatctgatccagtccgggggcctcggggggctgcagcacaacactgtgcttgttggctggccccgcaactggcgccagaaggaagatcatcagacgtggaggaacttcattgagctggtccgggaaaccacagctggccacttagccctgctggtcaccaagaacgtttccatgtttcctgggaaccctgagcgcttctctgagggcagcatcgacgtttggtggattgtgcacgatggaggcatgctcatgctgctgcccttcctgctgcggcaccacaaggtctggcggaagtgcaagatgcgtatcttcactgtggcccagatggatgacaatagcatccagatgaagaaggatctgaccacatttctgtatcatttacgcatcactgcggaggtcgaggtggtggagatgcatgagagcgacatctcagcttacacctatgagaagacgttggtgatggagcagcgttcccagatcctcaaacagatgcatttaaccaagaatgagcgggagcgggagatccagagtatcacagatgagtcacgaggctcaatccggagaaagaatccagccaacacgcggctccgcctgaacgtcccagaagagacggctggtgacagtgaagagaagccagaggaggaggtgcagctgatccacgatcagagtgctccccaactgccccagcagctccccgtccccaggggaggagcctgagggggaaggggagacagatccggagaaggtgcatctcacctggaccaaggacaagtcggtggcagagaagaataagggccccagtcctgtctcctctgagggcatcaaggacttcttcagcatgaagccggagtgggagaacttgaaccagtccaacgtgcggcgcatgcacacggccgtgcggctgaacgaggtcatcgtgaagaaatcccgggacgccaagcttgttttgctcaacatgcctgggcctccccgcaaccgcaatggtgatgaaaactacatggagtttctcgaggtcctcacagagcacctggaccgggtgatgctggtccgcggcggcggccgcgaggtcatcaccatctactcctgagaaccaggacctgccacccgggcccgagcgcgcccggcccgcggctccggagccctcgccgcgccccccgccgctgtcaccgtttacatacagaccctgtgcccgtgtcctggccccttaccccgctgcctgaagcccggaggccacgcctgttggggctgattcggagagggcgccccgccgcgcagagaccagagctcctcagtgccagtttggcccctgggtcttcgctgccctttttctaagcccggcctcgtctcgccggaggagacgctgcaataaaggttgggagaaggcgcggaaaggagaggagctggggccttggggacccccaggtagtccatgcggcccattcctccccttcccactcccgccgcggtcctcgctctgcgctcctccggcgctgctccctggctcccggcggcccggaggcccgcggggtgggaaggccgcgcttgccgtctccgccgccccttctcgccgagccgtggggcgcgggcggccgagcctatacatagtgtacaggagacatcgcgtgtatttttaacgtccccatatttatgtgactagaagcgcaacagacttctcgccatagtcgagctctcccgctgggggcactgcggggaggcgaggcctcgggaagctgaattttccttgacgtccaagagtttgagagcgaaagtgctttaggcccaggcgggggtcgtggcctcgttccctcgacacctccgtcctgctctcgcctcttcgccctttccgcgcgcccttggcttcccaccctcctctccagtccttttccgagatgaggtgagacaagggtccaacttttcctggattcgcctcccagcggacgtgagcttccactgcggctgcagagacgcgagcaacctcttctcatcggctcttatgcaagttggggccaggataggggaggggtgctcctcaagaggaagaaaccgagaggcccgcgccccaccgaggaagccccgccccggtgccttcgctggggagcaggcgtctctcctcagtcggcttgtcgcctgctccccgtatcccatggctcctcgccaaagactgaaattgtggagctggagggcgccccctccccggagtttcctccctgggacaagtgagggaggagggggccgattctggtttaggggccggacccactgagaggccccagagccgcccgtgatgttcctcccccgtccccatctggcagctcctgtctcgcctgagggacccagccgccttctccgtgctctggggccgggcctcgctgcttagcagcggcctctagctccgtctcccggggacctgggcctgagggagggctggagtcgcacgcgctttgtccttagcgcctgtctgctctcctctaactaggacccagggcctttggcttccccagctcatccttggcccttccgctccaccagcctggtctgaggcgtgctctgtccttagagaaggcgcggtggccgggttcccttcccctagggcacattactaagggggtcaggcactgcatgctcgttccagcaccatctgggactgggtacagtacctccagccccagggccctgacctgcgcacctagcttgacatctcacgcacctcccagagctggcgccactgagtaatccggacctcaccacctcttttcctttgagcccaaaggcagagctggagctggcgccacccagacagcgtcaggtgtggctggggtaggtttggaggtctgccagttacaccaagtcccctctgagattcgatcaggggactggatagattctttcaggtactcaatcaggaagctggaggtgttagacaccagccccctgcatccttcagtagacctccctctgaacaccacagccaggtcctgccttctgggggcctgaatattccagagctgatgtgatgggctgtgcagaagggggctgtatcaacatcaattagggaaccaaagttgcactatctgggcccagattgtctggttggcaagagcaaagtttccgttgatgaaacagacatcccacaacaaaaacccaagttttctgtgctacatgtgcaatatttgttatgaatgttatcacaagtcattcatcaagttatctttataatcactgtagttagatgtttcatgtccattcaagtgacttttattctgagtgcaatatttcaatagccttgtagtgataactagtgttgcttttgttttagatgatctatgtgcagggcaatgcaatgaagttgaaaacccttgtaaataggagaggttgcaaaccaaatcaagagtatttattactattactgctattattattaggcctgcctttaattttcagtgtaagtgttcagtatgccgcatcctgcctcagtattgatcttgtgttctttgtgccaatatgaaaaggagagggttggttctttcctttattgttgaatgctcccatttaatgctttatggcttttactgtattacttttttagactcccgtctgcacaaaatgcaataaaaataattttattatacccttaaaaaaaaaa

SEQ ID NO: 13754 - DNA, 4459 bp, Homo sapiens
cgccgggcgggcgggcactgcagcttcttctccacctgtggggctgggctgcagagcctcacgggggccccacgcctgctgcaggccatctcgagggatggcattgtgcccttcctgcaggtctttggccatggcaaggccaatggagagccgacctgggccctgctcctgactgcctgcatctgcgagattggcatcctcattgcatccctcgacgaggtggcccccatcctctctatgttcttcctgatgtgctacatgtttgtgaatctggcctgtgcagtgcagacgctgctgaggacacccaactggaggccacgctttcgatattaccactggaccctctccttcctgggcatgagcctctgcctggccctcatgttcatctgctcctggtattatgcactggtagccatgctcattgctggactcatctacaagtacattgagtaccgtggggcagagaaggagtggggcgatgggatacgaggtctgtctctcagtgcggctcgctatgccctcttacgcctggaggaagggcccccacacaccaagaactggaggccacagctgctggtgctggtgcgtgtggaccaagaccagaatgtggtgcacccccagctgctctcactgacctcccagctgaaggcagggaagggcctgaccatcgtgggctctgtccttgagggcacctttctggaaaatcatccacaggcccagcgggcagaagagtctatcaggcgcctgatggaggcagagaaggtgaagggcttctgccaggtggtgatctcctccaacttgcgtgatggcgtgtcccatctgatccagtccgggggcctcggggggctgcagcacaacactgtgcttgttggctggccccgcaactggcgccagaaggaagatcatcagacgtggaggaacttcattgagctggtccgggaaaccacagctggccacttagccctgctggtcaccaagaacgtttccatgtttcctgggaaccctgagcgcttctctgagggcagcatcgacgtttggtggattgtgcacgatggaggcatgctcatgctgctgcccttcctgctgcggcaccacaaggtctggcggaagtgcaagatgcgtatcttcactgtggcccagatggatgacaatagcatccagatgaagaaggatctgaccacatttctgtatcatttacgcatcactgcggaggtcgaggtggtggagatgcatgagagcgacatctcagcttacacctatgagaagacgttggtgatggagcagcgttcccagatcctcaaacagatgcatttaaccaagaatgagcgggagcgggagatccagagtatcacagatgagtcacgaggctcaatccggagaaagaatccagccaacacgcggctccgcctgaacgtcccagaagagacggctggtgacagtgaagagaagccagaggaggaggtgcagctgatccacgatcagagtgctccccaactgccccagcagctccccgtccccaggggaggagcctgagggggaaggggagacagatccggagaaggtgcatctcacctggaccaaggacaagtcggtggcagagaagaataagggccccagtcctgtctcctctgagggcatcaaggacttcttcagcatgaagccggagtgggagaacttgaaccagtccaacgtgcggcgcatgcacacggccgtgcggctgaacgaggtcatcgtgaagaaatcccgggacgccaagcttgttttgctcaacatgcctgggcctccccgcaaccgcaatggtgatgaaaactacatggagtttctcgaggtcctcacagagcacctggaccgggtgatgctggtccgcggcggcggccgcgaggtcatcaccatctactcctgagaaccaggacctgccacccgggcccgagcgcgcccggcccgcggctccggagccctcgccgcgccccccgccgctgtcaccgtttacatacagaccctgtgcccgtgtcctggccccttaccccgctgcctgaagcccggaggccacgcctgttggggctgattcggagagggcgccccgccgcgcagagaccagagctcctcagtgccagtttggcccctgggtcttcgctgccctttttctaagcccggcctcgtctcgccggaggagacgctgcaataaaggttgggagaaggcgcggaaaggagaggagctggggccttggggacccccaggtagtccatgcggcccattcctccccttcccactcccgccgcggtcctcgctctgcgctcctccggcgctgctccctggctcccggcggcccggaggcccgcggggtgggaaggccgcgcttgccgtctccgccgccccttctcgccgagccgtggggcgcgggcggccgagcctatacatagtgtacaggagacatcgcgtgtatttttaacgtccccatatttatgtgactagaagcgcaacagacttctcgccatagtcgagctctcccgctgggggcactgcggggaggcgaggcctcgggaagctgaattttccttgacgtccaagagtttgagagcgaaagtgctttaggcccaggcgggggtcgtggcctcgttccctcgacacctccgtcctgctctcgcctcttcgccctttccgcgcgcccttggcttcccaccctcctctccagtccttttccgagatgaggtgagacaagggtccaacttttcctggattcgcctcccagcggacgtgagcttccactgcggctgcagagacgcgagcaacctcttctcatcggctcttatgcaagttggggccaggataggggaggggtgctcctcaagaggaagaaaccgagaggcccgcgccccaccgaggaagccccgccccggtgccttcgctggggagcaggcgtctctcctcagtcggcttgtcgcctgctccccgtatcccatggctcctcgccaaagactgaaattgtggagctggagggcgccccctccccggagtttcctccctgggacaagtgagggaggagggggccgattctggtttaggggccggacccactgagaggccccagagccgcccgtgatgttcctcccccgtccccatctggcagctcctgtctcgcctgagggacccagccgccttctccgtgctctggggccgggcctcgctgcttagcagcggcctctagctccgtctcccggggacctgggcctgagggagggctggagtcgcacgcgctttgtccttagcgcctgtctgctctcctctaactaggacccagggcctttggcttccccagctcatccttggcccttccgctccaccagcctggtctgaggcgtgctctgtccttagagaaggcgcggtggccgggttcccttcccctagggcacattactaagggggtcaggcactgcatgctcgttccagcaccatctgggactgggtacagtacctccagccccagggccctgacctgcgcacctagcttgacatctcacgcacctcccagagctggcgccactgagtaatccggacctcaccacctcttttcctttgagcccaaaggcagagctggagctggcgccacccagacagcgtcaggtgtggctggggtaggtttggaggtctgccagttacaccaagtcccctctgagattcgatcaggggactggatagattctttcaggtactcaatcaggaagctggaggtgttagacaccagccccctgcatccttcagtagacctccctctgaacaccacagccaggtcctgccttctgggggcctgaatattccagagctgatgtgatgggctgtgcagaagggggctgtatcaacatcaattagggaaccaaagttgcactatctgggcccagattgtctggttggcaagagcaaagtttccgttgatgaaacagacatcccacaacaaaaacccaagttttctgtgctacatgtgcaatatttgttatgaatgttatcacaagtcattcatcaagttatctttataatcactgtagttagatgtttcatgtccattcaagtgacttttattctgagtgcaatatttcaatagccttgtagtgataactagtgttgcttttgttttagatgatctatgtgcagggcaatgcaatgaagttgaaaacccttgtaaataggagaggttgcaaaccaaatcaagagtatttattactattactgctattattattaggcctgcctttaattttcagtgtaagtgttcagtatgccgcatcctgcctcagtattgatcttgtgttctttgtgccaatatgaaaaggagagggttggttctttcctttattgttgaatgctcccatttaatgctttatggcttttactgtattacttttttagactcccgtctgcacaaaatgcaataaaaataattttattatacccttaaaaaaaaaa

SEQ ID NO: 13755 - DNA, 1615 bp, Homo sapiens
cgccgggcgggcgggcactgcagcttcttcctccgtggagcggagagcgagacagagctacagcgaacgagagagcggcgaaggcgggtagaggggcgcgggcgaggcggcgcagccatccccggaccaggggccgcgccgccaccatgctaaacaacctgacggactgcgaggacggcgatgggggagccaacccgggtgatggcaaccccaaggaaagcagtcccttcatcaacagcaccgacacagagaagggaaaggagtatgatggcaagaacatggccttgtttgaggaggagatggacaccagccctatggtgtcctccttgctcagtggcctggccaactacaccaacctgccccagggaagtagggagcatgaagaggcagaaaacaatgagggtggaaaaaagaagccggtgcaggccccacgcatgggcaccttcatgggcgtgtacctgccgtgcctgcagaacatctttggcgtcatcctcttcctgcggctcacctgggtggtgggcattgcaggcatcatggagtccttctgcatggtgttcatctgctgctcctgtacgatgctcacggccatctccatgagtgcaattgcaacgaatggtgttgtgcctgctggtggctcctactacatgatttccaggtctctgggcccagagtttgggggtgccgtgggcctctgcttctacctgggcactacctttgcaggagccatgtacatcctgggcaccatcgaaatcctgctggcttacctcttcccagccatggccatcttcaaggcagaagatgccagtggggaggcagcagccatgctgaacaacatgcgtgtttacggcacctgtgtgctcacctgcatggccactgtggtgtttgtgggtgtcaagtatgtcaacaagtttgcccttgtcttcctgggttgtgtcatcctctccatcctggccatctatgctggggtcatcaagtctgccttcgacccacccaacttcccgatctgcctcctgggtaaccgcacgctgtctcgccatggctttgatgtctgtgccaagctggcttgggaaggaaatgagacggtgaccacacggctatggggccttttctgctcctctcgcttcctcaacgccacctgtgatgaatacttcacccgaaacaatgtcacagagatccagggcatccctggtgctgccagtggcctcatcaaagagaacctctggagctcctacctgaccaagggcgtgattgtggagaggagtgggatgacctcggtgggcctggccgatggcactcctatcgacatggaccacccttatgtcttcagtgatatgacctcctacttcaccctgctggttggcatctacttcccctcagtcacagggatcatggctggttctaaccgctctggggacctgagggatgcccagaagtcaatccccactggcaccatcctggccatcgccaccacctctgctgtctgtatcctgcacagctgtgctgggaccaccctcgggggagggcaagagggagggcagctgaacttgctgccttacctgctggtgcaggaagggtggggagggggaggactgaaccgtggggattctcctttatc

SEQ ID NO: 13756 - DNA, 336 bp, Homo sapiens
aaccagtccaacgtgcggcgcatgcacacggccgtgcggctgaacgaggtcatcgtgaagaaatcccgggacgccaagcttgttttgctcaacatgcctgggcctccccgcaaccgcaatggtgatgaaaactgtatcctggaattaaaattgggggaaagagggaggtggacgtcagggaatctgggtcctgtccctgggatggaagagctgagctgttcctgcctccggatcagcacctcggacagggacacgggcgcgagaggtcccctggcagccgagcgcgaccccaatttcgtcgggagggaaggagaccgggtctttctccttgaccgg

SEQ ID NO: 13757 - DNA, 389 bp, Homo sapiens
attcgagggactcccttctgtcagcatgaagcttatcataattaacaaactctgctcttccagatttaaaatcaagatgaaattaatgtttcccttagaaatgcgtgctgtggtccaggcacggtggctcatgcctataatcccagcactatgggaggctgaggcggctggatcacaaggtcagcagttcaagaccatactggccaacatggtgaaaccccatctctactaaaagtacaaaaattagcttggtgtggtggtgcatgcctataatcccagctacttgggagggtgagggatgagagtcacttgaacccaagaggtggaggttgcagtgagctgagattgtgccactgcacttcagcctggtgacagaacaagactctgtc

SEQ ID NO: 13758 - DNA, 816 bp, Homo sapiens
  misc_feature (477)..(477): n is a, c, g, or t
  misc_feature (480)..(480): n is a, c, g, or t
  misc_feature (509)..(509): n is a, c, g, or t
  misc_feature (519)..(519): n is a, c, g, or t
gatcagtctggctggtggtttaacaggtgtcactctgcaaacctgaatggtgtatactacagcggcccctacacggctaaaacagacaatgggattgtctggtacacctggcatgggtggtggtattctctgaaatctgtggttatgaaaattaggccaaatgattttattccaaatgtaatttaattgctgctgttgggctttcgtttctgcaattcagctttgtttaaagtgatttgaaaaatactcattctgaacatatccatgcgcaatcatgataactgttgtgagtagtgcttttcattcttctcacttgcctttgttacttaatgtgctttcagtacagcagatatgcaatattcaccaaataaatgtagactgtgtttaaaaaaaaaaaaaaaaaaaaaaaaaaaaaaaaaaaaaaaaaaaaaaaaaaaaaaaaaaaaaaaaaaaaaaaaaaaaaaaaaaaaaaaaaanaanggggaaaaaaaaaaaaaaaaaaaaaaaanaaaaattggnggcccctttgccccaatttttttttaacctggaaaagttttttgtggggggcccaattaggggccctttggccaattccccctttaggggggggaataaaaaatcactgggcccgttttataaaagcgggggttgagaaaaccccgggggtcccaaaatttaacgctttggacaacaccccctttgcgaggtggggaaaaaaaaaaggcccccacctttcccttttccaaaaatgtccacctgtatggggaaggaaaattgacgcttatttttttgtaaaacccgctatatttgtgt

SEQ ID NO: 13759 - DNA, 486 bp, Homo sapiens
aaacattaatttcaaacacatgaataacattattgttttatttaacccaatattcagtgatccctgactgggttgggctcagtaacatgtctttcaaaaacaaaaaaaatactagactcatatatattttttgagtaaagctgctggctttgtctccatacttccactctgttctcttgactcagttctcaattcagggccaaagtcaagagcaaaactgaacctgtaggctagtccttggtaaaagtaaggcaaaatggcaactgacttggcaatctctcccaatttggggatgccctggacacagtaagcagagtcaaatgtaaactacgtcctaagaaaatggcaatttctgtagtctcaggtcatgaaaatacatttttaaaaactaattgtctgttaaaattattttagttgtgaaatgttaacaatatcaggataaggagttagacaaaaaatcttggacataatttccagttttttcct

SEQ ID NO: 13760 - DNA, 361 bp, Homo sapiens
tgtgtgtgtgtgtgtgtgttttaattgccagaagtctttcagatagcagggagattattggaatgagaaagcaaagcttgtatgaaaacttgtggcaaaaggtcatctgtgctgtgggggaaatttcaaagtaggcgcagtttgtttccagtggttcctgcctgtcctttcagtggctggtcactctctgttccctttccagacgaatctttcccctcttccaaatgcctcacatcagtctaggtaccttggttggcctgtggagaaaaacagtcttgttgagacactcacattaagctgatagagaccttggctaggataattgcatttttcaaaggctaagggttggaaggatttaatt

SEQ ID NO: 13761 - DNA, 381 bp, Homo sapiens
aaaaaccccacacacagttccttcatctttgccttacttgctgaagattagaagtcccagggaatccaaccttattttatctttgaaaatatcctgaagtgccaaataaaccaacagtctgaagcgggggaagactctagccccagcaatacctgcgactactaatgaaaaagacttgacggactgaaactgcccgagatttctcacataatgtcatcattacgtggatgtgcttcagtgctctgaaataatggcactttaatctcaagtccacctgccaccatctgaaaaggggggaaaaaagccaaagatataaaatactgaagaaaggtgagggtactgcttcattacccatacaatacagttttatttcagtgctac

SEQ ID NO: 13762 - DNA, 1210 bp, Homo sapiens
cacctcagcctcccaaagtgctgggattacaggcatgagccaccgcgcctggcctcattttgtttttgttttgagacattcttactctgtcacccaggctggagtgcagtggtatgatctcggctcactgcaacctccacctcccaggctcaagggatcctcccaactcagcctcccaagtagctgggactacaggtacatgccaccacacctggctgattttctgtatttttagtagaggtggggtttcaccatgttgcccaggctggtcttgaactcctgagctcaagtgatccacctgccttggcctcccgaagtgctgggattacaggcgtgagccaccatgcccagccgaatgattcattttcaactgctgtctctgtgtagctgacttcttccatatttttctataagattttacaattaaattcttcctgatttaaatcttgttaccttgtctctatggttctaaaattaaatgcatcatcttctgtcataagccatatcccaatacccatctcgtgtattaatcccatcaatcattcaggtgtctggaatacaattctttagagtcatttaaaattacatggtccttttataagatctaatttttcacttaaaagctctttctgtttgatttttgtttccatctccattaccctcattctggtctcgggtcttactcatttatatgtttatgtctctgtaatacatccaaccaggttttcctaccgtcatatcccctctaaagtgtagtctaaaccaagacatgacgtacaaaaccataatgtgcaggtcttcctttagcttctttttcattatattactccctaaccccagatccttcattgatttcctcattgcagattactttggcaactgtctttactgtgtgaatcagttttctcattcatgttttttaacatacagtaaaatgcacagttcttaagggtttagttcagtgagtttttgacaatagcatacgttcatgtaattacaaaatctaaacatttgtattcctaccccctcaagagtttcataggttagttttgcttgttttagaactttatataaatggaattattgaatgtacaatttttgtatctggcttctttcattctgcataatgtctactgtaatctgtggtttattccttcttattactgaatagtattccattggatgaattatatcataatttgtttatcca

SEQ ID NO: 13763 - DNA, 1156 bp, Homo sapiens
cacctcagcctcccaaagtgctgggattacaggcatgagccaccgcgcctggcctcattttgtttttgttttgagacattcttactctgtcacccaggctggagtgcagtggtatgatctcggctcactgcaacctccacctcccaggctcaagggatcctcccaactcagcctcccaagtagctgggactacaggtacatgccaccacacctggctgattttctgtatttttagtagaggtggggtttcaccatgttgcccaggctggtcttgaactcctgagctcaagtgatccacctgccttggcctcccgaagtgctgggattacaggcgtgagccaccatgcccagccgaatgattcattttcaactgctgtctctgtgtagctgacttcttccatatttttctataagattttacaattaaattcttcctgatttaaatcttgttaccttgtctctatggttctaaaattaaatgcatcatcttctgtcataagccatatcccaatacccatctcgtgtattaatcccatcaatcattcaggtgtctggaatacaattctttagagtcatttaaaattacatggtccttttataagatctaatttttcacttaaaagctctttctgtttgatttttgtttccatctccattaccctcattctggtctcgggtcttactcatttatatgtttatgtctctgtaatacatccaaccaggttttcctaccgtcatatcccctctaaagtgtagtctaaaccaagacatgacgtacaaacccagatccttcattgatttcctcattgcagattactttggcaactgtctttactgtgtgaatcagttttctcattcatgttttttaacatacagtaaaatgcacagttcttaagggtttagttcagtgagtttttgacaatagcatacgttcatgtaattacaaaatctaaacatttgtattcctaccccctcaagagtttcataggttagttttgcttgttttagaactttatataaatggaattattgaatgtacaatttttgtatctggcttctttcattctgcataatgtctactgtaatctgtggtttattccttcttattactgaatagtattccattggatgaattatatcataatttgtttatcca

SEQ ID NO: 13764 - DNA, 463 bp, Homo sapiens
aattccatcaacagaacgtgtccatccatacagtggaatatcatgactcagctttgaaaaggaaggaaattctgacacaggctccagcacggatgacacttgaagacactatgccaagtgaaattagccagccacaaaaggcaaatactgtaggattccacttagaagggatacctcgaggagtctaatccaaaaagacaggcagtggaagggtggttgctgggggatggggagaagcaggggacgtggagttgctatttaatgggtacagtttccattttgcaaaatgaataacgttctggggatggttgatggtgatggttgcacagtagtgtgaatgcacctaatgccactgaactgtgcacttaaaaatggttaagatggaggccaaggtgggaggatcactggaggccaggagtttaagacaagcttggacaacgtagcaagaccctgtctcaataac

SEQ ID NO: 13765 - DNA, 829 bp, Homo sapiens
taagaatggccactctagggcctttgttttctgctactgcctgtggggtttcctgagcattgcaggttggtcctcggggcatgttccgaggggacctgggcggactggccaggaggggacgggcactggggtgccttgaggatctgggagcctctgtggattttccgatgcctttggaaaatgggactcaggttgggtgcgtctgatggagtaactgagcctgggggcttggggagccacatttggacgagatgcctgaacaaaccaggggtcttagtgatggctgaggaatgtgtctcaggagcggtgtctgtaggactgcaagatcgctgcacagcagcgaatcgtgaaatattttctttagaattatgaggtgcgctgtgtgtcaacctgcatcttaaattctttattggctggaaagagaactgtcggagtgggtgaatccagccaggagggacgcgtagccccggtcttgatgagagcagggttgggggcaggggtagcccagaaacggtggctgccgtcctgacaggggcttagggaggctccaggacctcagtgccttgaagctggtttccatgagaaaaggattgtttatcttaggaggcatgcttactgttaaaagacaggatatgtttgaagtggcttctgagaaaaatggttaagaaaattatgacttaaaaatgtgagagattttcaagtatattaatttttttaactgtccaagtatttgaaattcttatcatttgattaacacccatgagtgatatgtgtctggaattgaggccaaagcaagctcagctaagaaatactagcacagtgctgtcgg

SEQ ID NO: 13766 - DNA, 709 bp, Homo sapiens
taagaatggccactctagggcctttgttttctgctactgcctgtggggtttcctgagcattgcaggttggtcctcggggcatgttccgaggggacctgggcggactggccaggaggggacgggcactggggtgccttgaggatctgggagcctctgtggattttccgatgcctttggaaaatgggactcaggttgggtgcgtctgatggatgcacagcagcgaatcgtgaaatattttctttagaattatgaggtgcgctgtgtgtcaacctgcatcttaaattctttattggctggaaagagaactgtcggagtgggtgaatccagccaggagggacgcgtagccccggtcttgatgagagcagggttgggggcaggggtagcccagaaacggtggctgccgtcctgacaggggcttagggaggctccaggacctcagtgccttgaagctggtttccatgagaaaaggattgtttatcttaggaggcatgcttactgttaaaagacaggatatgtttgaagtggcttctgagaaaaatggttaagaaaattatgacttaaaaatgtgagagattttcaagtatattaatttttttaactgtccaagtatttgaaattcttatcatttgattaacacccatgagtgatatgtgtctggaattgaggccaaagcaagctcagctaagaaatactagcacagtgctgtcgg

SEQ ID NO: 13767 - DNA, 429 bp, Homo sapiens
ggttaagttatatgctctatatcagccagtgttcctttagtatctattctgtgccaagtattgtccagagctcaacccataatagaaattctccctatatacccacgtgtctcttaaatgacagagaaatcccgaaaatgcattatattaaaaacagtgtggtggtagtttcccagaaagaggacataggccaatttaagagcacgaaagctttgataatctgccctgccagttgtaaacccttaggtgtgtggaaaaaacagtagagactaatcacagaaggagtaaagcttagaaacaatggctgtaggccaggtgtggtagctcacacctgtaatcaagcactttgggaggccaaggcatgggggttgcttgagcccaggagtttaagaccagtctgggcaacataatgacaccctgttcctacag

SEQ ID NO: 13768 - DNA, 540 bp, Homo sapiens
cagcttctttttgtctctcccccctcccctcccccaacagctgcgtccatttccttaaggaagggtttttttctctctccctcccccacaccgtagcggcgcgcgagcgggccgggcgggcggccgagttttccaagagataacttcaccaagatgtccagtgataggcaaaggtccgatgatgagagccccagcaccagcagtggcagttcagatgcggaccagcgagacccagccgctccagagcctgaagaacaagaggaaagaaaaccttctgccacccagcagaagaaaaacaccaaactctctagcaaaaccactgctaagttatccactagtgctaaaagaattcagaaggagctagctgaaataacccttgatcctcctcctaattgcagtgctgggcctaaaggagataacatttatgaatggagatcaactatacttggtccaccgggttctgtatatgaaggtggtgtgttttttctggatatcacattttcatcagattatccatttaagccaccaaaggttactttc

SEQ ID NO: 13769 - DNA, 766 bp, Homo sapiens
agcgggggggcgggggcgggcagctttgttcgcgccgggcgcccgcgtcgccggtgtccgcgagccgcggcggggccggctgggctgctcgcatcacttggcgcccggcgcggcgagcgctacccgcggcccccgcgcggccctccccacaaagggccgcggagctgcgtggccgccgccgccggccgtggctcgcctccgcgggcgcggaaatttgttgcacttcttggggctttgtttatttgtttgttttttctctgggtttcttatttttttcgttattttggacaaaatgtcggtccgtgatataaaaattgagcgaggaaccttggtggcatgggagctttgcagaagttttccaagagataacttcaccaagatgtccagtgataggcaaaggtccgatgatgagagccccagcaccagcagtggcagttcagatgcggaccagcgagacccagccgctccagagcctgaagaacaagaggaaagaaaaccttctgccacccagcagaagaaaaacaccaaactctctagcaaaaccactgctaagttatccactagtgctaaaagaattcagaaggagctagctgaaataacccttgatcctcctcctaattgcagtgctgggcctaaaggagataacatttatgaatggagatcaactatacttggtccaccgggttctgtatatgaaggtggtgtgttttttctggatatcacattttcatcagattatccatttaagccaccaaaggttactttc

SEQ ID NO: 13770 - DNA, 546 bp, Homo sapiens
  misc_feature (346)..(346): n is a, c, g, or t
  misc_feature (418)..(418): n is a, c, g, or t
  misc_feature (454)..(454): n is a, c, g, or t
  misc_feature (510)..(510): n is a, c, g, or t
  misc_feature (521)..(521): n is a, c, g, or t
aattcgcggccgcgtcgacggcccccacaccgtagcggcgcgcgagcgggccgggcgggcggccgagttttccaagagataacttcaccaagatgtccagtgataggcaaaggtccgatgatgagagccccagcaccagcagtggcagttcagatgcggaccagcgagacccagccgctccagagcctgaagaacaagaggaaagaaaaccttctgccacccagcagaagaaaaacaccaaactctctagcaaaaccactgctaagttatccactagtgctaaaagaattcagaaggagctagctgaaataacccttgatcctcctcctaattgcagaagaatgantttgttgttttggtttcaaattgtggaaaataccaagagattgatgtatgtctggatatgtgtgcagcagangagacaactttgcttctttacagctttgcaagtgcntaaacaaaaatgtagaagtgaactagatatgggagtactttttagcatagtatacntgtggatttangatatactggatttgtgctcggatt

SEQ ID NO: 13771 - DNA, 583 bp, Homo sapiens
  misc_feature (409)..(409): n is a, c, g, or t
cagcttctttttgtctctcccccctcccctcccccaacagctgcgtccatttccttaaggaagggtttttttctctctccctcccccacaccgtagcggcgcgcgagcgggccgggcgggcggccgagttttccaagagataacttcaccaagatgtccagtgataggcaaaggtccgatgatgagagccccagcaccagcagtggcagttcagatgcggaccagcgagacccagccgctccagagcctgaagaacaagaggaaagaaaaccttctgccacccagcagaagaaaaacaccaaactctctagcaaaaccactgctaagttatccactagtgctaaaagaattcagaaggagctagctgaaataacccttgatcctcctcctaattgcagagggtgtcctngtcctctcctagtcaccacttgtgcaaacagcgaaagtttagaaaggaaaatcagcaagtcttgcatagagtgtaaggacattcagattgagaatgaagaacttgtcctttcagtctcttcttccctatcaatatgagataaaaacataataaaatcacttgtaaatctaaaaa

SEQ ID NO: 13772 - DNA, 1857 bp, Homo sapiens
ggctggtctcgagctcctgacctcaggggatccacccgccttggtctcccaaagtgctgggattataggcgtgagccaccgtgcctggcccagaatgtttttttaaatcagatgtagcatcttcataaggtaaagcctgtcacatcagagtaacaaagctcctggagtacagtgatgctagagtagaatgttccagaagtctggccatagccccagcttctgaattacctgggagagacaagatgctcaggttactattttttctttattctgatagtacagcctctactcagagaccacggtgtgtgtcacacaaccgaggcagctagggcatattctgagggcttttttttttttttggtttccttaatgattctttaacagagtaactggattggccaaggtctgattcaagaggctgtgaggagagtagagaacaaatagactttgcctctcagagttcagagctttaagttgtataagcatggtccatgtccacctcttgtagacacttattccttaaaagtttccatcatgaaaaataatatcatgtcaaaattttataagcacccagaatgtcccagtagtcaaatgtagtgtctttctccagtctctgttttcgataataaataccttgctctcaatttaggatgatcgtaaagcctatgttcatgctgtgagtcattgtctcccacagcttttgaaacatcgttctttgtcttttctatacaacacctgattctttgtgcctcagactcattgctatcaggaagagactttgccaagatccaccaccacatttggccagtagtgtatacacattaaagtgagagctgatgaaatcacaatgctctattttgttccgacaatcagtatgaaggggtaggtcccagtttgccaatgagcaacagcctctgtatgctggtgtccaagacttacacaaaacaagtgtcagtgcagtcacagcattttcttgaatgctgttgtgacagactccagttataaacatctgcgagccatatggcacaactcatagctaaagaggccggtacagggcacatgcacagagctttgaagaacatacacaaacctgttgaatcaagttactttcctcatcctcagagactttgacaattcagagctcacagatggcagggggaattctcaggcttcccttcctcctgattgacactttttaaaggaagtgatgtggaagttgttctagaagttagatggacagtgggagcacattcgtgagtggggcttgggagagctcaaaagtggcactttgattttaggctgggcaggcagaagtctcacagtaaaatatatttcactagacgtccaaaccaacactgcattgtagtaacctcttctgaagtaactggttaaattaataactggtcccataagtcagggtcaagccacatttataacccattcgggccggccatgaagggttctgactcgacattggtatttaaatgctgttactttcccaatgcttagtagcacttgagactttatttccatcgacaaaaaccaagaaggccacagaagtagcctaacagtcctccctggtcatactcgtttcaaacaggtctgcctgtctagacatattcaggcaggaggttgcttgctgctatcttgaaaaccactggaagattcagcttcttggggacctcagagcccatattcatatggaagcccacccatataagcctcacagagcaaatcacagcaatgttgaagttgttattttcaagtgcttatttcacgacattaaaaaaaatattttttcctggtgtattaaaattaaaaataaaatcataacttttgatttaaaatcaaaaaatg

SEQ ID NO: 13773 - DNA, 306 bp, Homo sapiens
gacagagcaagactgtgtctcaaaaagaaagaaagaaaggccaacaacacacaagaaatgaccagaaagggtactgacctacaaaatttagaatgtatgcctgcccatgaataatcgtagtccaaacagaacctctttaagttcagaaacagcaacccagagcaggcctctaacaacactgtctactaactcagaaagcctaccctcctctacttttaaagttaaagagggattgcgaaggatatttgttatcaaggccaagagctagccttaatttttttagggcagcttgaaataagctaacaa

SEQ ID NO: 13774 - DNA, 500 bp, Homo sapiens
aaatactaccacaccacataacatttcaccccaaattcttaaattttttaacctttatgatccatttaggagtgtatctgtttttatgaatttattcataatcttgtctccattaaaagacaccattgctcatttgcttaatcctcttgaatatcaaagcctctagtcaaagctcttgtgtcattcagctcactttcacttgaatattctataatagaaaacttttttaaagcaaggtgacctgaactaccatttgttccaaataaagttcattattggtttttaagtaacatcttttgacttataccaaggcactaaacatttcagaatggtttagtttttaaagcactttgccaaaggtttagagtattatcttctattaaacattgattcttctgttcagtgtcttgtagcatatgagtacctagggtgtactcattttctatagaaattggtgttccctaactcactattttctatttctctacaatgagttcttt

SEQ ID NO: 13775 - DNA, 426 bp, Homo sapiens
gttcttaggcaaatcatttaagctttctaggcctcagtttccttttcaataaggcaaaaattttggatgagatcagcctcctcaaagtttattcttagaaacatcatctttcaagatttttaattaaagtaattatgtatggccgagcacagtggctcacacctgtaatcccagcactttgggaggctgaggtgggcagatcacttgaggtcaggagttcgagaccagcctggtcaagatggcaaaaccccatctctagtaaaaatataaaaattagccaaacaaggtggtggtgcgtgcctgtaatcccggttactggggtggctgaggcatgagaatcacttgaaccccagaggtagaggctgcagtgagccaagattatgccactgccctccagcctgggtgacagagcgagactttgtctca

SEQ ID NO: 13776 - DNA, 308 bp, Homo sapiens
gcctgggcgatggagtgaaagtctgtctctaataaataaataaataaataaattttgagtcagtagtagtgcaagatttttctagagccagatttcatgcagtaagagcttattttagcagtatgggtttcccctgtcacaccaagccagagccctctgaaccagttgttcttggtacacaggtagcaatgaactagaaaattcccctaatctacctgtggtctgatagaatttgaagagggtaattctgtttgttgccaaactcccatataccaggatgtgccaccacaccattttccataggccat

SEQ ID NO: 13777 - DNA, 416 bp, Homo sapiens
tgattcctaaataaagggtggacaagagcaggtgctccaggccggagtggggccctcagagacgcaggtgcaggcagaaggctcccagcctgcgtaccactgtctcatgcacctggagccctgtgagctcatgctcgttgattgagcaagtgaataacagccatctgctggtcaccattccgtcttttcagtggcttggcaaggccaggtgagagacacaggcataatatacctccctcatggcattgttagccattttgagtgagaccagttcataaagcaaatatgcgcatgtacgtcctcaaccatggtagccgctgtgttttaggacaaggatgaaatggctgctagggggccgtggaggtggcgacgagacctccagtcctcttcctggcacctagaacctctgcgtccca

SEQ ID NO: 13778 - DNA, 849 bp, Homo sapiens
cacaggtacaactacatctagaatgtgtgcaaaaatgtttgcctgctgaagggaatataaattggcacaaccattttggaaaaccatttggccatagccactaaagccgaatatacctatttccttatgacccagcaatcctccttctaggaaaatacctgacagaagtacgttcgtatgtccaccaaaagacttgtgcaagaatgttcagagtagcactgtctgtaatagccccaaaccagaagccacctcaagtgcccatcaacaacataaaggatacataaatcatggtacacccacacaactgaatcttcccacagcaaggaaaatgaacaacctacaactaaatgcaacaatacggatgcatctcagaaatgtaatgttgagcaaaaggtcagagataaaagaacaaggttccgtgtctataaagttcagaaacaggcaaaactcatctatgctgttgagaaagttcaggatgatggttgcccttggggtgagggcaccgaaaggggcaaaaggggccttctaggggctggtgaggttctgcttcgtgatccagtgttacgtgagtgtgttcgctctgtgtaatccatcaagctgtacactcaggattcacacactcctctgtgtgcccatgacgctttaataaaaagcttacactaaatcagtgtgtgctcatgtttgcacggacattatatcacaggtgtataagcatatgagctttggggtagaagggccgtgtccatttgcaggtctgcgctccagggatttgtgagacaagtgtgtacaaagcgtcacacatctataaggtgggcctgggtaagggcatcccacacacattgccataga

SEQ ID NO: 13779 - DNA, 577 bp, Homo sapiens
tgcctgccctaggatgtccagggcccccatattctttcctccctctccaatgacagtctgttccaaaaaaaagctctcataaatttcatttatactgaggttcacatgactgataagatggtatggcccttctctaggacatctgtattttaactactcataacaaggtttaacttacaggaaagactttctaagggtggaatttctaggactgtggctgacagtgaaaatggagttctgtggagtaggaggtcattctgaaagcctaatttgaatcacatggcagtctgtagcagtaaaaagctccaggaattggccaggtacactggttcatgtctgtaaacctagcactttgggaggataccttgagcccaggagttcaagaccagcctgggtaacacggtgagaccttgtctctacaaaaaattctagccaggtgtggtggcacacacccatggtcccagctacttgggaggctgaggtaggagcatcacttgagcctaggaggtcaagtctgcagggagcaatgtttgcaccactgcacttcttcctgggcaacagagtgagaccctgcctc

SEQ ID NO: 13780 - DNA, 478 bp, Homo sapiens
cttactgtaacctttaacttgcaggagaatcactagaacctgggaggcagaggttgcagtgagctgagaccgcaccaccgcactccagcctgagtgacagggtgagactccatctcaaaaaaaaaaggaaaaatttacttgataattttgtaatactgatcactctgtataggcagggcattggttccaggactcccctcctcctacaccaaaatccatgtatactaaaggcctgcagtcatcctacacaacccacatctagtcagccctccccgtgtgcaggttctgcatcccataattttgatctgcgtttggttgaaacaatcctcgtgtacatggtcccagctggttcaagcctgtgttgttcaagggtcaaccgtagttgaaacaaatagaaaaatgaaaattttaatttttttaagctctctactgaaagtaatagtcttgtgagcctaaattatttatcattttgcaactt

SEQ ID NO: 13781 - DNA, 443 bp, Homo sapiens
ctgatggttgccgctgactctactcctccagcctttccacttcatacctcctactaaatccctctgatcttggcagatctagagagttttctgtttcctgtattgaaccgtgactgacacaggaaacaagcctgcttggttgcctcatgcctgaggtctggattagtgtgggcatggagtagtgtagactctgcaggtgtttagatggctgtcctcagctgtgggtagttttggggtgggggaatgagtccaatccaggagaggtcgtcaacaatccccaaccaggaggctgaagggacaaacattctggatggctctcatgctgcctctttcaccatgaggcctcactgcttctttttctgactttcaaaccaaaggaggaaaaacagcaactttttagagtgtttaggcaaaaatttttgctaaggctcaatgactgacta

SEQ ID NO: 13782 - DNA, 808 bp, Homo sapiens
acatatagcccctttccactgctcagtgtcggtgatgtgactcagaagggccacattttcgctgggtcccatctaaaggcctgacactgcagtgaagggcatgctaagtctaggcacaggtcctggcagcaggaaggagacagagcctctcccaggcacacttcccagggtggagacagtggaaaagaaccgaggacaggaaaggattgggtaggtgaaggggtcaggggactggtagtcacccaatcttggagaggtgcaaaaagcactgggggctacccgttagctgcatctgccctggctgtttgcccgttcatgtcacaaactgccactactatgtacctgcagtggggttgcagagatgggggagactcaagtcttactccccaggagctcccagggcccaaggaggagaatgctgcctcctttcagtctggtctacacccactttctggtagcctctctgcttcctgtaattctggctgtttttccagactcagctcaaatagtgcccctccttaagcccatccctcgcccccagcctgaggtgatctttccctcctctgaactattagagcagttactgtctgttcagttcgtttggcaggcacacacagtggcataaattctattgttttgaactctgatttaaaattaaattgcagctgggcgtggtggctcatgcttgtaatcccaacacttagggagtcaggagaatcacttgagctcaggagttctagaccaatctgggcaacagagagaccccatctcttttaaataaaaagttaaattgcttaatttcccccgt

SEQ ID NO: 13783 - DNA, 2200 bp, Homo sapiens
  misc_feature (11)..(11): n is a, c, g, or t
actttttcccnagctgagaagtttccttgcggccagccatcatccttcgtgctgcaccctaagtctacatgggaatgggtggttgagcaagtggcagaaggggttctaagatgccctgccctgccaatccacaccagggggtctgagctccatagcctgagagaagcctggggatatgtggctgggccctggattctttgcttactccagccctttagttccccccaggttggcttccttcgattccttttcttggtatcaacgtttgattggaagaacaaccccctctttgtcaacctcaataatgagctcactgtggaggagcaggtggagatccgcagtggcttcctggcagctcgggcacagctccccgtcatggtcattgttaccccccaagaccgcaaaaactctgtgtggacacaggatggaccctcagcccagatcctgcagcagcttgtggtcctggcagctgaagccctgcccatgttagagaagcagctcatggatccccggggacctggggacatcaggacagtgttccggccgcccttggacatttacgacgtgctgattcgcctgtctcctcgccatatcccgcggcaccgccaggctgtggactcgccagctgcctccttctgccggggcctgctcagccagccggggccctcatccctgatgcccgtgctgggctatgatcctcctcagctctatctgacgcagctcagggaggcctttggggatctggcccttttcttctatgaccagcatggtggagaggtgattggtgtcctctggaagcccaccagcttccagccgcagcccttcaaggcctccagcacaaaggggcgcatggtgatgtctcgaggtggggagctagtaatggtgcccaatgttgaagcaatcctggaggactttgctgtgctgggtgaaggcctggtgcagactgtggaggcccgaagtgagaggtggactgtgtgatcccagctctggagcaagctgtagacggacagcaggacattggacctctagagcaagatgtcagtaggatgacctccaccctccttggacatgaatcctccatggagggcctgctggctgaacatgctgaatcatctccaacaaaacccagccccaactttctctctgatgctccagcattggggcaggggcatggtggcccatgtagtctcctgggcctcaccatcccagaagaggagtgggagccagctcagagaaggaactgaacccaggagatccatccacctattagccctgggcctggacctccctgcgatttcccactcctttcttagtcttcttccagaaacagagaaggggatgtgtgcctgggagaggctctgtctccttcctgctgccaggacctgtgcctagacttagcatgcccttcactgcagtgtcaggcctttagatgggacccagcgaaaatgtggcccttctgagtcacatcaccgacactgagcagtggaaaggggctatatgtgtatgaatagaccacattgaaggagcacaatgccctcctgtgttgatgccacttcccagggtggagacagtggaaaagaaccgaggacaggaaaggattgggtaggtgaaggggtcaggggactggtagtcacccaatcttggagaggtgcaaaaagcactgggggctacccgttagctgcatctgccctggctgtttgcccgttcatgtcacaaactgccactactatgtacctgcagtggggttgcagagatgggggagactcaagtcttactccccaggagctcccagggcccaaggaggagaatgctgcctcctttcagtctggtctacacccactttctggtagcctctctgcttcctgtaattctggctgtttttccagactcagctcaaatagtgcccctccttaagcccatccctcgcccccagcctgaggtgatctttccctcctctgaactattagagcagttactgtctgttcagttcgtttggcaggcacacacagtggcataaattctattgttttgaactctgatttaaaattaaattgcagctgggcgtggtggctcatgcttgtaatcccaacacttagggagtcaggagaatcacttgagctcaggagttctagaccaatctgggcaacagagagaccccatctcttttaaataaaaagttaaattgcttaatttcccccgt

SEQ ID NO: 13784 - DNA, 1871 bp, Homo sapiens
gcatttccgcccacgtgggaagctatgcggtatagacccggctagaatctgaagtgcgggagagtgctggaccctgagtgatggggccggcgccagctggagagcagcttcgcggagcgactggagagccagaggtgatggaaccagccctggaaggcacaggcaaagaggggaagaaagcatcctccaggaagcgtacattggctgaacctccagcgaagggcctcctgcagccagtgaagctcagcagggcagaactgtacaaggagcctaccaatgaggagcttaatcgccttcgggagactgagatcttgttccactccagcttgcttcgtttacaggtagaggagctactaaaggaagtaaggctgtcagagaagaagaaggatcggattgatgccttcctacgggaggtcaaccagcgggttgtgagggtgccctcagtccctgagacagagctcactgaccaggcatggctcccagctggggttcgagtgcccctccaccaagtgccctatgccgtgaagggctgtttccgcttcctgcccccagcccaggttactgttgtgggcagctaccttctgggcacctgcatccgaccagacatcaatgtggatgtggcactgaccatgcccagggtaaggtccagggtttaggggatagaggcccaccacctgactacctacaaatcctggatccctctttcttatctgccgcttgccaggggattgaagtcagaattctaaatcagaagagcagaccattgcaggcatcctgaaggcagcttagatccctcgggccagttgctgtccttttggagctttgctctccagatatgagaactgggcctagtgttgctaaccgtggctcaggcacttctgtcagcagaggagccctggctctctcaccttggtttcaccttggcccacagctccacaagcacttatgtgcctggccttctcttctcccctggcccctccaggaaatcctacaggacaaggacgggctgaaccagcgctacttccgcaagcgtgccctctacctggcccacttggctcaccacctggcccaggaccccctctttggcagtgtttgcttctcctacacaaatggctgccacctgaaaccctcactgttgctgcggccgcgtggtgagaggcacacattgggctgagggcatagcatgggatggtaaatctggaggagaaggcacagaggcacggaggcctcaagtatggggggacaggatggggagccctctggctccaagggctcctgcagagtctcagcactcactgtctctggcaggaaaggatgagcgcctggtcactgtacgtctgcatccgtgccctccacctgacttcttccgcccgtgccgcttgctgccaaccaagaacaatgtgcgctctgcctggtaccgagggcagagtcctgcaggggatggtagcccagagcctcctaccccccgctataacacatgggtcctgcaagatacagttctcgagtcccatttgcagctgctgtcaaccattctgagttcagcccagggcctgaaggatggcgtggcacttctgaaggtctggctgcggcagcgggagctggacaagggccagggtgggtttactgggttccttgtctccatgctggttgtcttccttgtgtctacacgcaagatccataccaccatgagtggctaccaggacctgtgcctagacttagcatgcccttcactgcagtgtcaggcctttagatgggacccagcgaaaatgtggcccttctgagtcacatcaccgacactgagcagtggaaaggggctatatgtgtatgaatagaccacattgaaggagcacaatgccctcctgtgttgatgc

SEQ ID NO: 13785 - DNA, 846 bp, Homo sapiens
gcatttccgcccacgtgggaagctatgcggtatagacccggctagaatctgaagtgcgggagagtgctggaccctgagtgatggggccggcgccagctggagagcagcttcgcggagcgactggagagccagagccaccctggtgaccgcgcctggccagcacctcaagttccagcctctgaccctggagcagcacaagggcttcatgatggagcccgattggcccctgtacccgccgccgtcccacgcctgtgaggacagcctaccaccctacaagctgaagctggacctgaccaagctgtaggcctccactggccccatcactggccaactgcagggggcccctcgggcctcacttgccctgagcccaggagtccaagggcagggtgggtccagccttgagcccctccagccacaaatccttcctctcctcccagttccacaacccttggcacacggagtcctggggacgccagtgccatcagctgcggaagacgggcgcggatcagaggcactggttcccatccattgtcaccccgcagatatcctatgagcgagcattgcgtgacatttgagcacggtcatagcctaattgatcgtcggccatcagcgttgaagcataccttacgagaccaacgaagagtccatcgattgatacaaccctctagcactgttagttacacccgtgttcatacataggtatcccgcaccgtgcatccttgaccgaagacagcgagacgacacgccatcgaaagcggctttagacaatagacggcaaaagctaaggaacactccttacggacacaacaagggccatacacccgcccaccgtcagccgatacgaga

SEQ ID NO: 13786 - DNA, 4743 bp, Homo sapiens
gcatttccgcccacgtgggaagctatgcggtatagacccggctagaatctgaagtgcgggagagtgctggaccctgagtgatggggccggcgccagctggagagcagcttcgcggagcgactggagagccagaggtgatggaaccagccctggaaggcacaggcaaagaggggaagaaagcatcctccaggaagcgtacattggctgaacctccagcgaagggcctcctgcagccagtgaagctcagcagggcagaactgtacaaggagcctaccaatgaggagcttaatcgccttcgggagactgagatcttgttccactccagcttgcttcgtttacaggtagaggagctactaaaggaagtaaggctgtcagagaagaagaaggatcggattgatgccttcctacgggaggtcaaccagcgggttgtgagggtgccctcagtccctgagacagagctcactgaccaggcatggctcccagctggggttcgagtgcccctccaccaagtgccctatgccgtgaagggctgtttccgcttcctgcccccagcccaggttactgttgtgggcagctaccttctgggcacctgcatccgaccagacatcaatgtggatgtggcactgaccatgcccagggaaatcctacaggacaaggacgggctgaaccagcgctacttccgcaagcgtgccctctacctggcccacttggctcaccacctggcccaggaccccctctttggcagtgtttgcttctcctacacaaatggctgccacctgaaaccctcactgttgctgcggccgcgtggaaaggatgagcgcctggtcactgtacgtctgcatccgtgccctccacctgacttcttccgcccgtgccgcttgctgccaaccaagaacaatgtgcgctctgcctggtaccgagggcagagtcctgcaggggatggtagcccagagcctcctaccccccgctataacacatgggtcctgcaagatacagttctcgagtcccatttgcagctgctgtcaaccattctgagttcagcccagggcctgaaggatggcgtggcacttctgaaggtctggctgcggcagcgggagctggacaagggccagggtgggtttactgggttccttgtctccatgctggttgtcttccttgtgtctacacgcaagatccataccaccatgagtggctaccaggtcctgagaagtgtcttgcagtttctggccactacagacctgacagtcaacgggatcagtttatgtctcagctcagatccctctttgccggccctggctgacttccaccaggccttctccgttgtcttcctggattcctcaggccatctcaacctctgtgctgatgtcactgcctctacttaccaccaggtacagcatgaggcacggctgtctatgatgttgctggacagcagagctgacgacgggttccacctgctgttgatgactcccaaacccatgatccgggcttttgaccatgtcctgcatctccgtccactgagtcgcctgcaggcagcgtgccaccggctgaagctctggccagagctgcaggacaatggtggggactatgtctcagctgctttgggccccctgaccaccctcctggagcagggcctgggggctcggctgaacctgctggctcactctcgacccccagtcccagagtgggacatcagccaagatccaccaaagcacaaagactctgggaccctgaccctgggactccttctccggcctgagggactgaccagcgtccttgagctgggtccagaggcagaccagcctgaggctgctaaattccgccagttctggggatcccgctcggagcttcggcgtttccaggacggagccattcgggaagctgtggtctgggaggcagcctctatgtcccagaagcgccttattccccaccaggtggtcacccacctcttggcactccatgctgacatcccagaaacctgtgtccactatgtggggggccccctggatgcacttatccaaggcctgaaagagacctccagcacaggtgaggaggccctggtagcggcggtacgttgctacgacgacctcagtcgcctactgtgggggctagagggtctcccactgaccgtgtctgctgttcagggagctcacccagtgctgcgctacacagaggtgttcccaccaactccagtccgtccagccttctccttctatgagactctgcgggagcggtcctcactgctgccccggctcgataagccctgtccggcctacgtggagcccatgaccgtggtttgtcacctggagggcagtggccagtggccacaggacgctgaggccgtgcagcgggtccgagctgccttccagctgcgcctggcagagctgttgacacaacagcatggtctgcagtgccgtgccactgccacgcacacggatgtccttaaggatggatttgtgtttcggattcgcgtggcctatcagcgggagccccagatcctgaaggaggtgcagagcccagaggggatgatctcgctgagggacacagctgcctccctccgccttgagagagacacaaggcagttgccactgctcaccagtgccctgcacggactgcagcagcagcacccagccttctctggtgtggcacggctggccaagcggtgggtgcgtgcccagcttcttggtgagggtttcgctgatgagagcctggatctggtggccgctgcccttttcctgcaccctgagcccttcacccctccgagttccccccaggttggcttccttcgattccttttcttggtatcaacgtttgattggaagaacaaccccctctttgtcaacctcaataatgagctcactgtggaggagcaggtggagatccgcagtggcttcctggcagctcgggcacagctccccgtcatggtcattgttaccccccaagaccgcaaaaactctgtgtggacacaggatggaccctcagcccagatcctgcagcagcttgtggtcctggcagctgaagccctgcccatgttagagaagcagctcatggatccccggggacctggggacatcaggacagtgttccggccgcccttggacatttacgacgtgctgattcgcctgtctcctcgccatatcccgcggcaccgccaggctgtggactcgccagctgcctccttctgccggggcctgctcagccagccggggccctcatccctgatgcccgtgctgggctatgatcctcctcagctctatctgacgcagctcagggaggcctttggggatctggcccttttcttctatgaccagcatggtggagaggtgattggtgtcctctggaagcccaccagcttccagccgcagcccttcaaggcctccagcacaaaggggcgcatggtgatgtctcgaggtggggagctagtaatggtgcccaatgttgaagcaatcctggaggactttgctgtgctgggtgaaggcctggtgcagactgtggaggcccgaagtgagaggtggactgtgtgatcccagctctggagcaagctgtagacggacagcaggacattggacctctagagcaagatgtcagtaggatgacctccaccctccttggacatgaatcctccatggagggcctgctggctgaacatgctgaatcatctccaacaaaacccagccccaactttctctctgatgctccagcattggggcaggggcatggtggcccatgtagtctcctgggcctcaccatcccagaagaggagtgggagccagctcagagaaggaactgaacccaggagatccatccacctattagccctgggcctggacctccctgcgatttcccactcctttcttagtcttcttccagaaacagagaaggggatgtgtgcctgggagaggctctgtctccttcctgctgccaggacctgtgcctagacttagcatgcccttcactgcagtgtcaggcctttagatgggacccagcgaaaatgtggcccttctgagtcacatcaccgacactgagcagtggaaaggggctatatgtgtatgaatagaccacattgaaggagcacaatgccctcctgtgttgatgccacttcccagggtggagacagtggaaaagaaccgaggacaggaaaggattgggtaggtgaaggggtcaggggactggtagtcacccaatcttggagaggtgcaaaaagcactgggggctacccgttagctgcatctgccctggctgtttgcccgttcatgtcacaaactgccactactatgtacctgcagtggggttgcagagatgggggagactcaagtcttactccccaggagctcccagggcccaaggaggagaatgctgcctcctttcagtctggtctacacccactttctggtagcctctctgcttcctgtaattctggctgtttttccagactcagctcaaatagtgcccctccttaagcccatccctcgcccccagcctgaggtgatctttccctcctctgaactattagagcagttactgtctgttcagttcgtttggcaggcacacacagtggcataaattctattgttttgaactctgatttaaaattaaattgcagctgggcgtggtggctcatgcttgtaatcccaacacttagggagtcaggagaatcacttgagctcaggagttctagaccaatctgggcaacagagagaccccatctcttttaaataaaaagttaaattgcttaatttcccccgt

SEQ ID NO: 13787 - DNA, 4900 bp, Homo sapiens
gcatttccgcccacgtgggaagctatgcggtatagacccggctagaatctgaagtgcgggagagtgctggaccctgagtgatggggccggcgccagctggagagcagcttcgcggagcgactggagagccagaggtgatggaaccagccctggaaggcacaggcaaagaggggaagaaagcatcctccaggaagcgtacattggctgaacctccagcgaagggcctcctgcagccagtgaagctcagcagggcagaactgtacaaggagcctaccaatgaggagcttaatcgccttcgggagactgagatcttgttccactccagcttgcttcgtttacaggtagaggagctactaaaggaagtaaggctgtcagagaagaagaaggatcggattgatgccttcctacgggaggtcaaccagcgggttgtgagggtgccctcagtccctgagacagagctcactgaccaggcatggctcccagctggggttcgagtgcccctccaccaagtgccctatgccgtgaagggctgtttccgcttcctgcccccagcccaggttactgttgtgggcagctaccttctgggcacctgcatccgaccagacatcaatgtggatgtggcactgaccatgcccagggaaatcctacaggacaaggacgggctgaaccagcgctacttccgcaagcgtgccctctacctggcccacttggctcaccacctggcccaggaccccctctttggcagtgtttgcttctcctacacaaatggctgccacctgaaaccctcactgttgctgcggccgcgtggtgagaggcacacattgggctgagggcatagcatgggatggtaaatctggaggagaaggcacagaggcacggaggcctcaagtatggggggacaggatggggagccctctggctccaagggctcctgcagagtctcagcactcactgtctctggcaggaaaggatgagcgcctggtcactgtacgtctgcatccgtgccctccacctgacttcttccgcccgtgccgcttgctgccaaccaagaacaatgtgcgctctgcctggtaccgagggcagagtcctgcaggggatggtagcccagagcctcctaccccccgctataacacatgggtcctgcaagatacagttctcgagtcccatttgcagctgctgtcaaccattctgagttcagcccagggcctgaaggatggcgtggcacttctgaaggtctggctgcggcagcgggagctggacaagggccagggtgggtttactgggttccttgtctccatgctggttgtcttccttgtgtctacacgcaagatccataccaccatgagtggctaccaggtcctgagaagtgtcttgcagtttctggccactacagacctgacagtcaacgggatcagtttatgtctcagctcagatccctctttgccggccctggctgacttccaccaggccttctccgttgtcttcctggattcctcaggccatctcaacctctgtgctgatgtcactgcctctacttaccaccaggtacagcatgaggcacggctgtctatgatgttgctggacagcagagctgacgacgggttccacctgctgttgatgactcccaaacccatgatccgggcttttgaccatgtcctgcatctccgtccactgagtcgcctgcaggcagcgtgccaccggctgaagctctggccagagctgcaggacaatggtggggactatgtctcagctgctttgggccccctgaccaccctcctggagcagggcctgggggctcggctgaacctgctggctcactctcgacccccagtcccagagtgggacatcagccaagatccaccaaagcacaaagactctgggaccctgaccctgggactccttctccggcctgagggactgaccagcgtccttgagctgggtccagaggcagaccagcctgaggctgctaaattccgccagttctggggatcccgctcggagcttcggcgtttccaggacggagccattcgggaagctgtggtctgggaggcagcctctatgtcccagaagcgccttattccccaccaggtggtcacccacctcttggcactccatgctgacatcccagaaacctgtgtccactatgtggggggccccctggatgcacttatccaaggcctgaaagagacctccagcacaggtgaggaggccctggtagcggcggtacgttgctacgacgacctcagtcgcctactgtgggggctagagggtctcccactgaccgtgtctgctgttcagggagctcacccagtgctgcgctacacagaggtgttcccaccaactccagtccgtccagccttctccttctatgagactctgcgggagcggtcctcactgctgccccggctcgataagccctgtccggcctacgtggagcccatgaccgtggtttgtcacctggagggcagtggccagtggccacaggacgctgaggccgtgcagcgggtccgagctgccttccagctgcgcctggcagagctgttgacacaacagcatggtctgcagtgccgtgccactgccacgcacacggatgtccttaaggatggatttgtgtttcggattcgcgtggcctatcagcgggagccccagatcctgaaggaggtgcagagcccagaggggatgatctcgctgagggacacagctgcctccctccgccttgagagagacacaaggcagttgccactgctcaccagtgccctgcacggactgcagcagcagcacccagccttctctggtgtggcacggctggccaagcggtgggtgcgtgcccagcttcttggtgagggtttcgctgatgagagcctggatctggtggccgctgcccttttcctgcaccctgagcccttcacccctccgagttccccccaggttggcttccttcgattccttttcttggtatcaacgtttgattggaagaacaaccccctctttgtcaacctcaataatgagctcactgtggaggagcaggtggagatccgcagtggcttcctggcagctcgggcacagctccccgtcatggtcattgttaccccccaagaccgcaaaaactctgtgtggacacaggatggaccctcagcccagatcctgcagcagcttgtggtcctggcagctgaagccctgcccatgttagagaagcagctcatggatccccggggacctggggacatcaggacagtgttccggccgcccttggacatttacgacgtgctgattcgcctgtctcctcgccatatcccgcggcaccgccaggctgtggactcgccagctgcctccttctgccggggcctgctcagccagccggggccctcatccctgatgcccgtgctgggctatgatcctcctcagctctatctgacgcagctcagggaggcctttggggatctggcccttttcttctatgaccagcatggtggagaggtgattggtgtcctctggaagcccaccagcttccagccgcagcccttcaaggcctccagcacaaaggggcgcatggtgatgtctcgaggtggggagctagtaatggtgcccaatgttgaagcaatcctggaggactttgctgtgctgggtgaaggcctggtgcagactgtggaggcccgaagtgagaggtggactgtgtgatcccagctctggagcaagctgtagacggacagcaggacattggacctctagagcaagatgtcagtaggatgacctccaccctccttggacatgaatcctccatggagggcctgctggctgaacatgctgaatcatctccaacaaaacccagccccaactttctctctgatgctccagcattggggcaggggcatggtggcccatgtagtctcctgggcctcaccatcccagaagaggagtgggagccagctcagagaaggaactgaacccaggagatccatccacctattagccctgggcctggacctccctgcgatttcccactcctttcttagtcttcttccagaaacagagaaggggatgtgtgcctgggagaggctctgtctccttcctgctgccaggacctgtgcctagacttagcatgcccttcactgcagtgtcaggcctttagatgggacccagcgaaaatgtggcccttctgagtcacatcaccgacactgagcagtggaaaggggctatatgtgtatgaatagaccacattgaaggagcacaatgccctcctgtgttgatgccacttcccagggtggagacagtggaaaagaaccgaggacaggaaaggattgggtaggtgaaggggtcaggggactggtagtcacccaatcttggagaggtgcaaaaagcactgggggctacccgttagctgcatctgccctggctgtttgcccgttcatgtcacaaactgccactactatgtacctgcagtggggttgcagagatgggggagactcaagtcttactccccaggagctcccagggcccaaggaggagaatgctgcctcctttcagtctggtctacacccactttctggtagcctctctgcttcctgtaattctggctgtttttccagactcagctcaaatagtgcccctccttaagcccatccctcgcccccagcctgaggtgatctttccctcctctgaactattagagcagttactgtctgttcagttcgtttggcaggcacacacagtggcataaattctattgttttgaactctgatttaaaattaaattgcagctgggcgtggtggctcatgcttgtaatcccaacacttagggagtcaggagaatcacttgagctcaggagttctagaccaatctgggcaacagagagaccccatctcttttaaataaaaagttaaattgcttaatttcccccgt

SEQ ID NO: 13788 - DNA, 4696 bp, Homo sapiens
gcatttccgcccacgtgggaagctatgcggtatagacccggctagaatctgaagtgcgggagagtgctggaccctgagtgatggggccggcgccagctggagagcagcttcgcggagcgactggagagccagaggtgatggaaccagccctggaaggcacaggcaaagaggggaagaaagcatcctccaggaagcgtacattggctgaacctccagcgaagggcctcctgcagccagtgaagctcagcagggcagaactgtacaaggagcctaccaatgaggagcttaatcgccttcgggagactgagatcttgttccactccagcttgcttcgtttacaggtagaggagctactaaaggaagtaaggctgtcagagaagaagaaggatcggattgatgccttcctacgggaggtcaaccagcgggttgtgagggtgccctcagtccctgagacagagctcactgaccaggcatggctcccagctggggttcgagtgcccctccaccaagtgccctatgccgtgaagggctgtttccgcttcctgcccccagcccaggttactgttgtgggcagctaccttctgggcacctgcatccgaccagacatcaatgtggatgtggcactgaccatgcccagggaaatcctacaggacaaggacgggctgaaccagcgctacttccgcaagcgtgccctctacctggcccacttggctcaccacctggcccaggaccccctctttggcagtgtttgcttctcctacacaaatggctgccacctgaaaccctcactgttgctgcggccgcgtggaaaggatgagcgcctggtcactgtacgtctgcatccgtgccctccacctgacttcttccgcccgtgccgcttgctgccaaccaagaacaatgtgcgctctgcctggtaccgagggcagagtcctgcaggggatggtagcccagagcctcctaccccccgctataacacatgggtcctgcaagatacagttctcgagtcccatttgcagctgctgtcaaccattctgagttcagcccagggcctgaaggatgggccagggtgggtttactgggttccttgtctccatgctggttgtcttccttgtgtctacacgcaagatccataccaccatgagtggctaccaggtcctgagaagtgtcttgcagtttctggccactacagacctgacagtcaacgggatcagtttatgtctcagctcagatccctctttgccggccctggctgacttccaccaggccttctccgttgtcttcctggattcctcaggccatctcaacctctgtgctgatgtcactgcctctacttaccaccaggtacagcatgaggcacggctgtctatgatgttgctggacagcagagctgacgacgggttccacctgctgttgatgactcccaaacccatgatccgggcttttgaccatgtcctgcatctccgtccactgagtcgcctgcaggcagcgtgccaccggctgaagctctggccagagctgcaggacaatggtggggactatgtctcagctgctttgggccccctgaccaccctcctggagcagggcctgggggctcggctgaacctgctggctcactctcgacccccagtcccagagtgggacatcagccaagatccaccaaagcacaaagactctgggaccctgaccctgggactccttctccggcctgagggactgaccagcgtccttgagctgggtccagaggcagaccagcctgaggctgctaaattccgccagttctggggatcccgctcggagcttcggcgtttccaggacggagccattcgggaagctgtggtctgggaggcagcctctatgtcccagaagcgccttattccccaccaggtggtcacccacctcttggcactccatgctgacatcccagaaacctgtgtccactatgtggggggccccctggatgcacttatccaaggcctgaaagagacctccagcacaggtgaggaggccctggtagcggcggtacgttgctacgacgacctcagtcgcctactgtgggggctagagggtctcccactgaccgtgtctgctgttcagggagctcacccagtgctgcgctacacagaggtgttcccaccaactccagtccgtccagccttctccttctatgagactctgcgggagcggtcctcactgctgccccggctcgataagccctgtccggcctacgtggagcccatgaccgtggtttgtcacctggagggcagtggccagtggccacaggacgctgaggccgtgcagcgggtccgagctgccttccagctgcgcctggcagagctgttgacacaacagcatggtctgcagtgccgtgccactgccacgcacacggatgtccttaaggatggatttgtgtttcggattcgcgtggcctatcagcgggagccccagatcctgaaggaggtgcagagcccagaggggatgatctcgctgagggacacagctgcctccctccgccttgagagagacacaaggcagttgccactgctcaccagtgccctgcacggactgcagcagcagcacccagccttctctggtgtggcacggctggccaagcggtgggtgcgtgcccagcttcttggtgagggtttcgctgatgagagcctggatctggtggccgctgcccttttcctgcaccctgagcccttcacccctccgagttccccccaggttggcttccttcgattccttttcttggtatcaacgtttgattggaagaacaaccccctctttgtcaacctcaataatgagctcactgtggaggagcaggtggagatccgcagtggcttcctggcagctcgggcacagctccccgtcatggtcattgttaccccccaagaccgcaaaaactctgtgtggacacaggatggaccctcagcccagatcctgcagcagcttgtggtcctggcagctgaagccctgcccatgttagagaagcagctcatggatccccggggacctggggacatcaggacagtgttccggccgcccttggacatttacgacgtgctgattcgcctgtctcctcgccatatcccgcggcaccgccaggctgtggactcgccagctgcctccttctgccggggcctgctcagccagccggggccctcatccctgatgcccgtgctgggctatgatcctcctcagctctatctgacgcagctcagggaggcctttggggatctggcccttttcttctatgaccagcatggtggagaggtgattggtgtcctctggaagcccaccagcttccagccgcagcccttcaaggcctccagcacaaaggggcgcatggtgatgtctcgaggtggggagctagtaatggtgcccaatgttgaagcaatcctggaggactttgctgtgctgggtgaaggcctggtgcagactgtggaggcccgaagtgagaggtggactgtgtgatcccagctctggagcaagctgtagacggacagcaggacattggacctctagagcaagatgtcagtaggatgacctccaccctccttggacatgaatcctccatggagggcctgctggctgaacatgctgaatcatctccaacaaaacccagccccaactttctctctgatgctccagcattggggcaggggcatggtggcccatgtagtctcctgggcctcaccatcccagaagaggagtgggagccagctcagagaaggaactgaacccaggagatccatccacctattagccctgggcctggacctccctgcgatttcccactcctttcttagtcttcttccagaaacagagaaggggatgtgtgcctgggagaggctctgtctccttcctgctgccaggacctgtgcctagacttagcatgcccttcactgcagtgtcaggcctttagatgggacccagcgaaaatgtggcccttctgagtcacatcaccgacactgagcagtggaaaggggctatatgtgtatgaatagaccacattgaaggagcacaatgccctcctgtgttgatgccacttcccagggtggagacagtggaaaagaaccgaggacaggaaaggattgggtaggtgaaggggtcaggggactggtagtcacccaatcttggagaggtgcaaaaagcactgggggctacccgttagctgcatctgccctggctgtttgcccgttcatgtcacaaactgccactactatgtacctgcagtggggttgcagagatgggggagactcaagtcttactccccaggagctcccagggcccaaggaggagaatgctgcctcctttcagtctggtctacacccactttctggtagcctctctgcttcctgtaattctggctgtttttccagactcagctcaaatagtgcccctccttaagcccatccctcgcccccagcctgaggtgatctttccctcctctgaactattagagcagttactgtctgttcagttcgtttggcaggcacacacagtggcataaattctattgttttgaactctgatttaaaattaaattgcagctgggcgtggtggctcatgcttgtaatcccaacacttagggagtcaggagaatcacttgagctcaggagttctagaccaatctgggcaacagagagaccccatctcttttaaataaaaagttaaattgcttaatttcccccgt

SEQ ID NO: 13789 - DNA, 4707 bp, Homo sapiens
gcatttccgcccacgtgggaagctatgcggtatagacccggctagaatctgaagtgcgggagagtgctggaccctgagtgatggggccggcgccagctggagagcagcttcgcggagcgactggagagccagaggtgatggaaccagccctggaaggcacaggcaaagaggggaagaaagcatcctccaggaagcgtacattggctgaacctccagcgaagggcctcctgcagccagtgaagctcagcagggcagaactgtacaaggagcctaccaatgaggagcttaatcgccttcgggagactgagatcttgttccactccagcttgcttcgtttacaggtagaggagctactaaaggaagtaaggctgtcagagaagaagaaggatcggattgatgccttcctacgggaggtcaaccagcgggttgtgagggtgccctcagtccctgagacagagctcactgaccaggcatggctcccagctggggttcgagtgcccctccaccaagtgccctatgccgtgaagggctgtttccgcttcctgcccccagcccaggttactgttgtgggcagctaccttctgggcacctgcatccgaccagacatcaatgtggatgtggcactgaccatgcccagggaaatcctacaggacaaggacgggctgaaccagcgctacttccgcaagcgtgccctctacctggcccacttggctcaccacctggcccaggaccccctctttggcagtgtttgcttctcctacacaaatggctgccacctgaaaccctcactgttgctgcggccgcgtggaaaggatgagcgcctggtcactgtacgtctgcatccgtgccctccacctgacttcttccgcccgtgccgcttgctgccaaccaagaacaatgtgcgctctgcctggtaccgagggcagagtcctgcaggggatggtagcccagagcctcctaccccccgctataacacatgggtcctgcaagatacagttctcgagtcccatttgcagctgctgtcaaccattctgagttcagcccagggcctgaaggatggcgtggcacttctgaaggtctggctgcggcagcgggagctggacaagggccagggtgggtttactgggttccttgtctccatgctggttgtcttccttgtgtctacacgcaagatccataccaccatgagtggctaccaggtcctgagaagtgtcttgcagtttctggccactacagacctgacagtcaacgggatcagtttatgtctcagctcagatccctctttgccggccctggctgacttccaccaggccttctccgttgtcttcctggattcctcaggccatctcaacctctgtgctgatgtcactgcctctacttaccaccaggtacagcatgaggcacggctgtctatgatgttgctggacagcagagctgacgacgggttccacctgctgttgatgactcccaaacccatgatccgggcttttgaccatgtcctgcatctccgtccactgagtcgcctgcaggcagcgtgccaccggctgaagctctggccagagctgcaggacaatggtggggactatgtctcagctgctttgggccccctgaccaccctcctggagcagggcctgggggctcggctgaacctgctggctcactctcgacccccagtcccagagtgggacatcagccaagatccaccaaagcacaaagactctgggaccctgaccctgggactccttctccggcctgagggactgaccagcgtccttgagctgggtccagaggcagaccagcctgaggctgctaaattccgccagttctggggatcccgctcggagcttcggcgtttccaggacggagccattcgggaagctgtggtctgggaggcagcctctatgtcccagaagcgccttattccccaccaggtggtcacccacctcttggcactccatgctgacatcccagaaacctgtgtccactatgtggggggccccctggatgcacttatccaaggcctgaaagagacctccagcacaggtgaggaggccctggtagcggcggtacgttgctacgacgacctcagtcgcctactgtgggggctagagggtctcccactgaccgtgtctgctgttcagggagctcacccagtgctgcgctacacagaggtgttcccaccaactccagtccgtccagccttctccttctatgagactctgcgggagcggtcctcactgctgccccggctcgataagccctgtccggcctacgtggagcccatgaccgtggtttgtcacctggagggcagtggccagtggccacaggacgctgaggccgtgcagcgggtccgagctgccttccagctgcgcctggcagagctgttgacacaacagcatggtctgcagtgccgtgccactgccacgcacacggatgtccttaaggatggatttgtgtttcggattcgcgtggcctatcagcgggagccccagatcctgaaggaggtgcagagcccagaggggatgatctcgctgagggacacagctgcctccctccgccttgagagagacacaaggcagttgccactgctcaccagtgccctgcacggactgcagcagcagcacccagccttctctggtgtggcacggctggccaagcggtgggtgcgtgcccagcttcttggtgagggtttcgctgatgagagcctggatctggtggccgctgcccttttcctgcaccctgagcccttcacccctccgagttccccccaggttggcttccttcgattccttttcttggtatcaacgtttgattggaagaacaaccccctctttgtcaacctcaataatgagctcactgcagctcgggcacagctccccgtcatggtcattgttaccccccaagaccgcaaaaactctgtgtggacacaggatggaccctcagcccagatcctgcagcagcttgtggtcctggcagctgaagccctgcccatgttagagaagcagctcatggatccccggggacctggggacatcaggacagtgttccggccgcccttggacatttacgacgtgctgattcgcctgtctcctcgccatatcccgcggcaccgccaggctgtggactcgccagctgcctccttctgccggggcctgctcagccagccggggccctcatccctgatgcccgtgctgggctatgatcctcctcagctctatctgacgcagctcagggaggcctttggggatctggcccttttcttctatgaccagcatggtggagaggtgattggtgtcctctggaagcccaccagcttccagccgcagcccttcaaggcctccagcacaaaggggcgcatggtgatgtctcgaggtggggagctagtaatggtgcccaatgttgaagcaatcctggaggactttgctgtgctgggtgaaggcctggtgcagactgtggaggcccgaagtgagaggtggactgtgtgatcccagctctggagcaagctgtagacggacagcaggacattggacctctagagcaagatgtcagtaggatgacctccaccctccttggacatgaatcctccatggagggcctgctggctgaacatgctgaatcatctccaacaaaacccagccccaactttctctctgatgctccagcattggggcaggggcatggtggcccatgtagtctcctgggcctcaccatcccagaagaggagtgggagccagctcagagaaggaactgaacccaggagatccatccacctattagccctgggcctggacctccctgcgatttcccactcctttcttagtcttcttccagaaacagagaaggggatgtgtgcctgggagaggctctgtctccttcctgctgccaggacctgtgcctagacttagcatgcccttcactgcagtgtcaggcctttagatgggacccagcgaaaatgtggcccttctgagtcacatcaccgacactgagcagtggaaaggggctatatgtgtatgaatagaccacattgaaggagcacaatgccctcctgtgttgatgccacttcccagggtggagacagtggaaaagaaccgaggacaggaaaggattgggtaggtgaaggggtcaggggactggtagtcacccaatcttggagaggtgcaaaaagcactgggggctacccgttagctgcatctgccctggctgtttgcccgttcatgtcacaaactgccactactatgtacctgcagtggggttgcagagatgggggagactcaagtcttactccccaggagctcccagggcccaaggaggagaatgctgcctcctttcagtctggtctacacccactttctggtagcctctctgcttcctgtaattctggctgtttttccagactcagctcaaatagtgcccctccttaagcccatccctcgcccccagcctgaggtgatctttccctcctctgaactattagagcagttactgtctgttcagttcgtttggcaggcacacacagtggcataaattctattgttttgaactctgatttaaaattaaattgcagctgggcgtggtggctcatgcttgtaatcccaacacttagggagtcaggagaatcacttgagctcaggagttctagaccaatctgggcaacagagagaccccatctcttttaaataaaaagttaaattgcttaatttcccccgt

SEQ ID NO: 13790 - DNA, 4093 bp, Homo sapiens
gcatttccgcccacgtgggaagctatgcggtatagacccggctagaatctgaagtgcgggagagtgctggaccctgagtgatggggccggcgccagctggagagcagcttcgcggagcgactggagagccagaggtgatggaaccagccctggaaggcacaggcaaagaggggaagaaagcatcctccaggaagcgtacattggctgaacctccagcgaagggcctcctgcagccagtgaagctcagcagggcagaactgtacaaggagcctaccaatgaggagcttaatcgccttcgggagactgagatcttgttccactccagcttgcttcgtttacaggtagaggagctactaaaggaagtaaggctgtcagagaagaagaaggatcggattgatgccttcctacgggaggtcaaccagcgggttgtgagggtgccctcagtccctgagacagagctcactgaccaggcatggctcccagctggggttcgagtgcccctccaccaagtgccctatgccgtgaagggctgtttccgcttcctgcccccagcccaggttactgttgtgggcagctaccttctgggcacctgcatccgaccagacatcaatgtggatgtggcactgaccatgcccagggaaatcctacaggacaaggacgggctgaaccagcgctacttccgcaagcgtgccctctacctggcccacttggctcaccacctggcccaggaccccctctttggcagtgtttgcttctcctacacaaatggctgccacctgaaaccctcactgttgctgcggccgcgtggaaaggatgagcgcctggtcactgtacgtctgcatccgtgccctccacctgacttcttccgcccgtgccgcttgctgccaaccaagaacaatgtgcgctctgcctggtaccgagggcagagtcctgcaggggatggtagcccagagcctcctaccccccgctataacacatgggtcctgcaagatacagttctcgagtcccatttgcagctgctgtcaaccattctgagttcagcccagggcctgaaggatggcgtggcacttctgaaggtctggctgcggcagcgggagctggacaagggccagggtgggtttactgggttccttgtctccatgctggttgtcttccttgtgtctacacgcaagatccataccaccatgagtggctaccaggtcctgagaagtgtcttgcagtttctggccactacagacctgacagtcaacgggatcagtttatgtctcagctcagatccctctttgccggccctggctgacttccaccaggccttctccgttgtcttcctggattcctcaggccatctcaacctctgtgctgatgtcactgcctctacttaccaccaggtacagcatgaggcacggctgtctatgatgttgctggacagcagagctgacgacgggttccacctgctgttgatgactcccaaacccatgatccgggcttttgaccatgtcctgcatctccgtccactgagtcgcctgcaggcagcgtgccaccggctgaagctctggccagagctgcaggacaatggtggggactatgtctcagctgctttgggccccctgaccaccctcctggagcagggcctgggggctcggctgaacctgctggctcactctcgacccccagtcccagagtgggacatcagccaagatccaccaaagcacaaagactctgggaccctgaccctgggactccttctccggcctgagggactgaccagcgtccttgagctgggtccagaggcagaccagcctgaggctgctaaattccgccagttctggggatcccgctcggagcttcggcgtttccaggacggagccattcgggaagctgtggtctgggaggcagcctctatgtcccagaagcgccttattccccaccaggtggtcacccacctcttggcactccatgctgacatcccagaaacctgtgtccactatgtggggggccccctggatgcacttatccaaggcctgaaagagacctccagcacaggtgaggaggccctggtagcggcggtacgttgctacgacgacctcagtcgcctactgtgggggctagagggtctcccactgaccgtgtctgctgttcagggagctcacccagtgctgcgctacacagaggtgttcccaccaactccagtccgtccagccttctccttctatgagactctgcgggagcggtcctcactgctgccccggctcgataagccctgtccggcctacgtggagcccatgaccgtggtttgtcacctggagggcagtggccagtggccacaggacgctgaggccgtgcagcgggtccgagctgccttccagctgcgcctggcagagctgttgacacaacagcatggtctgcagtgccgtgccactgccacgcacacggatgtccttaaggatggatttgtgtttcggattcgcgtggcctatcagcgggagccccagatcctgaaggaggtgcagagcccagaggggatgatctcgctgagggacacagctgcctccctccgccttgagagagacacaaggcagttgccactgctcaccagtgccctgcacggactgcagcagcagcacccagccttctctggtgtggcacggctggccaagcggtgggtgcgtgcccagcttcttggtgagggtttcgctgatgagagcctggatctggtggccgctgcccttttcctgcaccctgagcccttcacccctccgagttccccccaggttggcttccttcgattccttttcttggtatcaacgtttgattggaagaacaaccccctctttgtcaacctcaataatgagctcactgtggaggagcaggtggagatccgcagtggcttcctggcagctcgggcacagctccccgtcatggtcattgttaccccccaagaccgcaaaaactctgtgtggacacaggatggaccctcagcccagatcctgcagcagcttgtggtcctggcagctgaagccctgcccatgttagagaagcagctcatggatccccggggacctggggacatcaggacagtgttccggccgcccttggacatttacgacgtgctgattcgcctgtctcctcgccatatcccgcggcaccgccaggctgtggactcgccagctgcctccttctgccggggcctgctcagccagccggggccctcatccctgatgcccgtgctgggctatgatcctcctcagctctatctgacgcagctcagggaggcctttggggatctggcccttttcttctatgaccagcatggtggagaggtgattggtgtcctctggaagcccaccagcttccagccgcagcccttcaaggcctccagcacaaaggggcgcatggtgatgtctcgaggtggggagctagtaatggtgcccaatgttgaagcaatcctggaggactttgctgtgctgggtgaaggcctggtgcagactgtggaggcccgaagtgagaggtggactgtgtgatcccagctctggagcaagctgtagacggacagcaggacattggacctctagagcaagatgtcagtaggatgacctccaccctccttggacatgaatcctccatggagggcctgctggctgaacatgctgaatcatctccaacaaaacccagccccaactttctctctgatgctccagcattggggcaggggcatggtggcccatgtagtctcctgggcctcaccatcccagaagaggagtgggagccagctcagagaaggaactgaacccaggagatccatccacctattagccctgggcctggacctccctgcgatttcccactcctttcttagtcttcttccagaaacagagaaggggatgtgtgcctgggagaggctctgtctccttcctgctgccaggacctgtgcctagacttagcatgcccttcactgcagtgtcaggcctttagatgggacccagcgaaaatgtggcccttctgagtcacatcaccgacactgagcagtggaaaggggctatatgtgtatgaatagaccacattgaaggagcacaatgccctcctgtgttgatgc

SEQ ID NO: 13791 - DNA, 4423 bp, Homo sapiens
gcatttccgcccacgtgggaagctatgcggtatagacccggctagaatctgaagtgcgggagagtgctggaccctgagtgatggggccggcgccagctggagagcagcttcgcggagcgactggagagccagaggtgatggaaccagccctggaaggcacaggcaaagaggggaagaaagcatcctccaggaagcgtacattggctgaacctccagcgaagggcctcctgcagccagtgaagctcagcagggcagaactgtacaaggagcctaccaatgaggagcttaatcgccttcgggagactgagatcttgttccactccagcttgcttcgtttacaggtagaggagctactaaaggaagtaaggctgtcagagaagaagaaggatcggattgatgccttcctacgggaggtcaaccagcgggttgtgagggtgccctcagtccctgagacagagctcactgaccaggcatggctcccagctggggttcgagtgcccctccaccaagtgccctatgccgtgaagggctgtttccgcttcctgcccccagcccaggttactgttgtgggcagctaccttctgggcacctgcatccgaccagacatcaatgtggatgtggcactgaccatgcccagggaaatcctacaggacaaggacgggctgaaccagcgctacttccgcaagcgtgccctctacctggcccacttggctcaccacctggcccaggaccccctctttggcagtgtttgcttctcctacacaaatggctgccacctgaaaccctcactgttgctgcggccgcgtggaaaggatgagcgcctggtcactgtacgtctgcatccgtgccctccacctgacttcttccgcccgtgccgcttgctgccaaccaagaacaatgtgcgctctgcctggtaccgagggcagagtcctgcaggggatggtagcccagagcctcctaccccccgctataacacatgggtcctgcaagatacagttctcgagtcccatttgcagctgctgtcaaccattctgagttcagcccagggcctgaaggatggcgtggcacttctgaaggtctggctgcggcagcgggagctggacaagggccagggtgggtttactgggttccttgtctccatgctggttgtcttccttgtgtctacacgcaagatccataccaccatgagtggctaccaggtcctgagaagtgtcttgcagtttctggccactacagacctgacagtcaacgggatcagtttatgtctcagctcagatccctctttgccggccctggctgacttccaccaggccttctccgttgtcttcctggattcctcaggccatctcaacctctgtgctgatgtcactgcctctacttaccaccaggtacagcatgaggcacggctgtctatgatgttgctggacagcagagctgacgacgggttccacctgctgttgatgactcccaaacccatgatccgggcttttgaccatgtcctgcatctccgtccactgagtcgcctgcaggcagcgtgccaccggctgaagctctggccagagctgcaggacaatggtggggactatgtctcagctgctttgggccccctgaccaccctcctggagcagggcctgggggctcggctgaacctgctggctcactctcgacccccagtcccagagtgggacatcagccaagatccaccaaagcacaaagactctgggaccctgaccctgggactccttctccggcctgagggactgaccagcgtccttgagctgggtccagaggcagaccagcctgaggctgctaaattccgccagttctggggatcccgctcggagcttcggcgtttccaggacggagccattcgggaagctgtggtctgggaggcagcctctatgtcccagaagcgccttattccccaccaggtggtcacccacctcttggcactccatgctgacatcccagaaacctgtgtccactatgtggggggccccctggatgcacttatccaaggcctgaaagagacctccagcacaggtgaggaggccctggtagcggcggtacgttgctacgacgacctcagtcgcctactgtgggggctagagggtctcccactgaccgtgtctgctgttcagggagctcacccagtgctgcgctacacagaggtgttcccaccaactccagtccgtccagccttctccttctatgagactctgcgggagcggtcctcactgctgccccggctcgataagccctgtccggcctacgtggagcccatgaccgtggtttgtcacctggagggcagtggccagtggccacaggacgctgaggccgtgcagcgggtccgagctgccttccagctgcgcctggcagagctgttgacacaacagcatggtctgcagtgccgtgccactgccacgcacacggatgtccttaaggatggatttgtgtttcggattcgcgtggcctatcagcgggagccccagatcctgaaggaggtgcagagcccagaggggatgatctcgctgagggacacagctgcctccctccgccttgagagagacacaaggcagttgccactgctcaccagtgccctgcacggactgcagcagcagcacccagccttctctggtgtggcacggctggccaagcggtgggtgcgtgcccagcttcttggtgagggtttcgctgatgagagcctggatctggtggccgctgcccttttcctgcaccctgagcccttcacccctccgagttccccccaggttggcttccttcgattccttttcttggtatcaacgtttgattggaagaacaaccccctctttgtcaacctcaataatgagctcactgtggaggagcaggtggagatccgcagtggcttcctggcagctcgggcacagctccccgtcatggtcattgttaccccccaagaccgcaaaaactctgtgtggacacaggatggaccctcagcccagatcctgcagcagcttgtggtcctggcagctgaagccctgcccatgttagagaagcagctcatggatccccggggacctggggacatcaggacagtgttccggccgcccttggacatttacgacgtgctgattcgcctgtctcctcgccatatcccgcggcaccgccaggctgtggactcgccagctgcctccttctgccggggcctgctcagccagccggggccctcatccctgatgcccgtgctgggctatgatcctcctcagctctatctgacgcagctcagggaggcctttggggatctggcccttttcttctatgaccagcatggtggagaggtgattggtgtcctctggaagcccaccagcttccagccgcagcccttcaaggcctccagcacaaaggggcgcatggtgatgtctcgaggtggggagctagtaatggtgcccaatgttgaagcaatcctggaggactttgctgtgctgggtgaaggcctggtgcagactgtggaggcccgaagtgagaggtggactgtgtgatcccagctctggagcaagctgtagacggacagcaggacattggacctctagagcaagatgtcagtaggatgacctccaccctccttggacatgaatcctccatggagggcctgctggctgaacatgctgaatcatctccaacaaaacccagccccaactttctctctgatgctccagcattggggcaggggcatggtggcccatgtagtctcctgggcctcaccatcccagaagaggagtgggagccagctcagagaaggaactgaacccaggagatccatccacctattagccctgggcctggacctccctgcgatttcccactcctttcttagtcttcttccagaaacagagaaggggatgtgtgcctgggagaggctctgtctccttcctgctgccaggacctgtgcctagacttagcatgcccttcactgcagtgtcaggcctttagatgggacccagcgaaaatgtggcccttctgagtcacatcaccgacactgagcagtggaaaggggctatatgtgtatgaatagaccacattgaaggagcacaatgccctcctgtgttgatgccacttcccagggtggagacagtggaaaagaaccgaggacaggaaaggattgggtaggtgaaggggtcaggggactggtagtcacccaatcttggagaggtgcaaaaagcactgggggctacccgttagctgcatctgcctggcataaattctattgttttgaactctgatttaaaattaaattgcagctgggcgtggtggctcatgcttgtaatcccaacacttagggagtcaggagaatcacttgagctcaggagttctagaccaatctgggcaacagagagaccccatctcttttaaataaaaagttaaattgcttaatttcccccgt

SEQ ID NO: 13792 - DNA, 3195 bp, Homo sapiens
gcatttccgcccacgtgggaagctatgcggtatagacccggctagaatctgaagtgcgggagagtgctggaccctgagtgatggggccggcgccagctggagagcagcttcgcggagcgactggagagccagaggtgatggaaccagccctggaaggcacaggcaaagaggggaagaaagcatcctccaggaagcgtacattggctgaacctccagcgaagggcctcctgcagccagtgaagctcagcagggcagaactgtacaaggagcctaccaatgaggagcttaatcgccttcgggagactgagatcttgttccactccagcttgcttcgtttacaggtagaggagctactaaaggaagtaaggctgtcagagaagaagaaggatcggattgatgccttcctacgggaggtcaaccagcgggttgtgagggtgccctcagtccctgagacagagctcactgaccaggcatggctcccagctggggttcgagtgcccctccaccaagtgccctatgccgtgaagggctgtttccgcttcctgcccccagcccaggttactgttgtgggcagctaccttctgggcacctgcatccgaccagacatcaatgtggatgtggcactgaccatgcccagggaaatcctacaggacaaggacgggctgaaccagcgctacttccgcaagcgtgccctctacctggcccacttggctcaccacctggcccaggaccccctctttggcagtgtttgcttctcctacacaaatggctgccacctgaaaccctcactgttgctgcggccgcgtggaaaggatgagcgcctggtcactgtacgtctgcatccgtgccctccacctgacttcttccgcccgtgccgcttgctgccaaccaagaacaatgtgcgctctgcctggtaccgagggcagagtcctgcaggggatggtagcccagagcctcctaccccccgctataacacatgggtcctgcaagatacagttctcgagtcccatttgcagctgctgtcaaccattctgagttcagcccagggcctgaaggatggcgtggcacttctgaaggtctggctgcggcagcgggagctggacaagggccagggtgggtttactgggttccttgtctccatgctggttgtcttccttgtgtctacacgcaagatccataccaccatgagtggctaccaggtcctgagaagtgtcttgcagtttctggccactacagacctgacagtcaacgggatcagtttatgtctcagctcagatccctctttgccggccctggctgacttccaccaggccttctccgttgtcttcctggattcctcaggccatctcaacctctgtgctgatgtcactgcctctacttaccaccaggtacagcatgaggcacggctgtctatgatgttgctggacagcagagctgacgacgggttccacctgctgttgatgactcccaaacccatgatccgggcttttgaccatgtcctgcatctccgtccactgagtcgcctgcaggcagcgtgccaccggctgaagctctggccagagctgcaggacaatggtggggactatgtctcagctgctttgggccccctgaccaccctcctggagcagggcctgggggctcggctgaacctgctggctcactctcgacccccagtcccagagtgggacatcagccaagatccaccaaagcacaaagactctgggaccctgaccctgggactccttctccggcctgagggactgaccagcgtccttgagctgggtccagaggcagaccagcctgaggctgctaaattccgccagttctggggatcccgctcggagcttcggcgtttccaggacggagccattcgggaagctgtggtctgggaggcagcctctatgtcccagaagcgccttattccccaccaggtggtcacccacctcttggcactccatgctgacatcccagaaacctgtgtccactatgtggggggccccctggatgcacttatccaaggcctgaaagagacctccagcacaggtgaggaggccctggtagcggcggtacgttgctacgacgacctcagtcgcctactgtgggggctagagggtctcccactgaccgtgtctgctgttcagggagctcacccagtgctgcgctacacagaggtgttcccaccaactccagtccgtccagccttctccttctatgagactctgcgggagcggtcctcactgctgccccggctcgataagccctgtccggcctacgtggagcccatgaccgtggtttgtcacctggagggcagtggccagtggccacaggacgctgaggccgtgcagcgggtccgagctgccttccagctgcgcctggcagagctgttgacacaacagcatggtctgcagtgccgtgccactgccacgcacacggatgtccttaaggatggatttgtgtttcggattcgcgtggcctatcagcgggagccccagatcctgaaggaggtgcagagcccagaggggatgatctcgctgagggacacagctgcctccctccgccttgagagagacacaaggcagttgccactgctcaccagtgccctgcacggactgcagcagcagcacccagccttctctggtgtggcacggctggccaagcggtgggtgcgtgcccagcttcttggtgagggtttcgctgatgagagcctggatctggtggccgctgcccttttcctgcaccctgagcccttcacccctccgagttccccccaggttggcttccttcgattccttttcttggtatcaacgtttgattggaagaacaaccccctctttgtcaacctcaataatgagctcactgtggaggagcaggtggagatccgcagtggcttcctggcagctcgggcacagctccccgtcatggtcattgttaccccccaagaccgcaaaaactctgtgtggacacaggatggaccctcagcccagatcctgcagcagcttgtggtcctggcagctgaagccctgcccatgttagagaagcagctcatggatccccggggacctggggacatcaggatgggacccagcgaaaatgtggcccttctgagtcacatcaccgacactgagcagtggaaaggggctatatgtgtatgaatagaccacattgaaggagcacaatgccctcctgtgttgatgc

SEQ ID NO: 13793 - DNA, 479 bp, Homo sapiens
gggggccccctggatgcacttatccaaggcctgaaagaggtaagggtcttggggtcaaggctagtgattgtagagtaatcaatctgcggggagagagtcctctcagccttggccagcttgcacttcctggcatgtccagcaggcggcggtgctggctctgctgcagcctgagctggggcagaatccaggtgaagctggccttctgtagggtccagcctcctgaccgtcttctccctctcagacctccagcacaggtgaggaggccctggtagcggcggtacgttgctacgacgacctcagtcgcctactgtgggggctagagggtctcccactgaccgtgtctgctgttcagggagctcacccagtgctgcgctacacagaggtgaggtgcaacggtgcaggtgacctttctgcttagtggccccacctctgctccagtcacccagtattccccacttccaactcctgactctgggcac

SEQ ID NO: 13794 - DNA, 393 bp, Homo sapiens
ccggccctggctgacttccaccaggccttctccgttgtcttcctggattcctcaggccatctcaacctctgtgctgatgtcactgcctctacttaccaccaggtaccaatgggcccccaatctgtgttcccctgatgtctcagcccagactctgtcccttttgcaagtaccagaaccccagaaactcctcttcaaagagttaagtttagggcatgtctcctggtctaagcccttggatcaatgaagggcacagggatggtcccttctgtggctccaggtacagcatgaggcacggctgtctatgatgttgctggacagcagagctgacgacgggttccacctgctgttgatgactcccaaacccatgatccgggcttttgaccatgtcctgca

SEQ ID NO: 13795 - DNA, 4940 bp, Homo sapiens
gcatttccgcccacgtgggaagctatgcggtatagacccggctagaatctgaagtgcgggagagtgctggaccctgagtgatggggccggcgccagctggagagcagcttcgcggagcgactggagagccagaggtgatggaaccagccctggaaggcacaggcaaagaggggaagaaagcatcctccaggaagcgtacattggctgaacctccagcgaagggcctcctgcagccagtgaagctcagcagggcagaactgtacaaggagcctaccaatgaggagcttaatcgccttcgggagactgagatcttgttccactccagcttgcttcgtttacaggtagaggagctactaaaggaagtaaggctgtcagagaagaagaaggatcggattgatgccttcctacgggaggtcaaccagcgggttgtgagggtgccctcagtccctgagacagagctcactgaccaggcatggctcccagctggggttcgagtgcccctccaccaagtgccctatgccgtgaagggctgtttccgcttcctgcccccagcccaggttactgttgtgggcagctaccttctgggcacctgcatccgaccagacatcaatgtggatgtggcactgaccatgcccagggaaatcctacaggacaaggacgggctgaaccagcgctacttccgcaagcgtgccctctacctggcccacttggctcaccacctggcccaggaccccctctttggcagtgtttgcttctcctacacaaatggctgccacctgaaaccctcactgttgctgcggccgcgtggaaaggatgagcgcctggtcactgtacgtctgcatccgtgccctccacctgacttcttccgcccgtgccgcttgctgccaaccaagaacaatgtgcgctctgcctggtaccgagggcagagtcctgcaggggatggtagcccagagcctcctaccccccgctataacacatgggtcctgcaagatacagttctcgagtcccatttgcagctgctgtcaaccattctgagttcagcccagggcctgaaggatggcgtggcacttctgaaggtctggctgcggcagcgggagctggacaagggccagggtgggtttactgggttccttgtctccatgctggttgtcttccttgtgtctacacgcaagatccataccaccatgagtggctaccaggtcctgagaagtgtcttgcagtttctggccactacagacctgacagtcaacgggatcagtttatgtctcagctcagatccctctttgccggccctggctgacttccaccaggccttctccgttgtcttcctggattcctcaggccatctcaacctctgtgctgatgtcactgcctctacttaccaccaggtacagcatgaggcacggctgtctatgatgttgctggacagcagagctgacgacgggttccacctgctgttgatgactcccaaacccatgatccgggcttttgaccatgtcctgcatctccgtccactgagtcgcctgcaggcagcgtgccaccggctgaagctctggccagagctgcaggacaatggtggggactatgtctcagctgctttgggccccctgaccaccctcctggagcagggcctgggggctcggctgaacctgctggctcactctcgacccccagtcccagagtgggacatcagccaagatccaccaaagcacaaagactctgggaccctgaccctgggactccttctccggcctgagggactgaccagcgtccttgagctgggtccagaggcagaccagcctgaggctgctaaattccgccagttctggggatcccgctcggagcttcggcgtttccaggacggagccattcgggaagctgtggtctgggaggcagcctctatgtcccagaagcgccttattccccaccaggtggtcacccacctcttggcactccatgctgacatcccagaaacctgtgtccactatgtggggggccccctggatgcacttatccaaggcctgaaagagacctccagcacaggtgaggaggccctggtagcggcggtacgttgctacgacgacctcagtcgcctactgtgggggctagagggtctcccactgaccgtgtctgctgttcagggagctcacccagtgctgcgctacacagaggtgttcccaccaactccagtccgtccagccttctccttctatgagactctgcgggagcggtcctcactgctgccccggctcgataagccctgtccggcctacgtggagcccatgaccgtggtttgtcacctggagggcagtggccagtggccacaggacgctgaggccgtgcagcgggtccgagctgccttccagctgcgcctggcagagctgttgacacaacagcatggtctgcagtgccgtgccactgccacgcacacggatgtccttaaggatggatttgtgtttcggattcgcgtggcctatcagcgggagccccagatcctgaaggaggtgcagagcccagaggggatgatctcgctgagggacacagctgcctccctccgccttgagagagacacaaggcagttgccactgctcaccagtgccctgcacggactgcagcagcagcacccagccttctctggtgtggcacggctggccaagcggtgggtgcgtgcccagcttcttggtgagggtttcgctgatgagagcctggatctggtggccgctgcccttttcctgcaccctgagcccttcacccctccgagttccccccaggttggcttccttcgattccttttcttggtatcaacgtttgattggaagaacaaccccctctttgtcaacctcaataatgagctcactgtggaggagcaggtggagatccgcagtggcttcctggcagctcgggcacagctccccgtcatggtcattgttaccccccaagaccgcaaaaactctgtgtggacacaggatggaccctcagcccagatcctgcagcagcttgtggtcctggcagctgaagccctgcccatgttagagaagcagctcatggatccccggggacctggggacatcaggacagtgttccggccgcccttggacatttacgacgtgctgattcgcctgtctcctcgccatatcccgcggcaccgccaggctgtggactcgccagctgcctccttctgccggggcctgctcagccagccggggccctcatccctgatgcccgtgctgggctatgatcctcctcagctctatctgacgcagctcagggaggcctttggggatctggcccttttcttctatgaccagcatggtggagaggtgattggtgtcctctggaagcccaccagcttccagccgcagcccttcaaggcctccagcacaaaggggcgcatggtgatgtctcgaggtggggagctagtaatggtgcccaatgttgaagcaatcctggaggactttgctgtgctgggtgaaggcctggtgcagactgtggaggcccgaagtgagaggtggactgtgtgatcccagctctggagcaagctgtagacggacagcaggacattggacctctagagcaagatgtcagtaggatgacctccaccctccttggacatgaatcctccatggagggcctgctggctgaacatgctgaatcatctccaacaaaacccagccccaactttctctctgatgctccagcattggggcaggggcatggtggcccatgtagtctcctgggcctcaccatcccagaagaggagtgggagccagctcagagaaggaactgaacccaggagatccatccacctattagccctgggcctggacctccctgcgatttcccactcctttcttagtcttcttccagaaacagagaaggggatgtgtgcctgggagaggctctgtctccttcctgctgccaggacctgtgcctagacttagcatgcccttcactgcagtgtcaggcctttagatgggacccagcgaaaatgtggcccttctgagtcacatcaccgacactgagcagtggaaaggggctatatgtgtatgaatagaccacattgaaggagcacaatgccctcctgtgttgatgccacttcccagggtggagacagtggaaaagaaccgaggacaggaaaggattgggtaggtgaaggggtcaggggactggtagtcacccaatcttggagaggtgcaaaaagcactgggggctacccgttagctgcatctgccctggctgtttgcccgttcatgtcacaaactgccactactatgtacctgcagtggggttgcagagatgggggagactcaagtcttactccccaggagctcccagggcccaaggaggagaatgctgcctcctttcagtctggtctacacccactttctggtagcctctctgcttcctgtaattctggctgtttttccagactcagctcaaatagtgcccctccttaagcccatccctcgcccccagcctgaggtgatctttccctcctctgaactattagagcagttactgtctgttcagttcgtttggcaggcacacacagtggcataaattctattgttttgaactctgatttaaaattaaattgcagctgggcgtggtggctcatgcttgtaatcccaacacttagggagtcaggagaatcacttgagctcaggagttctagaccaatctgggcaacagagagaccccatctcttttaaataaaaagttaaattgcttaatttcccccgtattcctggcctgtctgcccctttcacataattttaacctggtttcttgtatgtaaactccttgagggcaagaacatgtttgaacatagacttcttcgtgtccttcctagcacctattacagtgctttgctcaggggccatccagcacaggcagatggggggcagagaagcccactggaagattgcagagtaaaggga

SEQ ID NO: 13796 - DNA, 4489 bp, Homo sapiens
gcatttccgcccacgtgggaagctatgcggtatagacccggctagaatctgaagtgcgggagagtgctggaccctgagtgatggggccggcgccagctggagagcagcttcgcggagcgactggagagccagaggtgatggaaccagccctggaaggcacaggcaaagaggggaagaaagcatcctccaggaagcgtacattggctgaacctccagcgaagggcctcctgcagccagtgaagctcagcagggcagaactgtacaaggagcctaccaatgaggagcttaatcgccttcgggagactgagatcttgttccactccagcttgcttcgtttacaggtagaggagctactaaaggaagtaaggctgtcagagaagaagaaggatcggattgatgccttcctacgggaggtcaaccagcgggttgtgagggtgccctcagtccctgagacagagctcactgaccaggcatggctcccagctggggttcgagtgcccctccaccaagtgccctatgccgtgaagggctgtttccgcttcctgcccccagcccaggttactgttgtgggcagctaccttctgggcacctgcatccgaccagacatcaatgtggatgtggcactgaccatgcccagggaaatcctacaggacaaggacgggctgaaccagcgctacttccgcaagcgtgccctctacctggcccacttggctcaccacctggcccaggaccccctctttggcagtgtttgcttctcctacacaaatggctgccacctgaaaccctcactgttgctgcggccgcgtggaaaggatgagcgcctggtcactgtacgtctgcatccgtgccctccacctgacttcttccgcccgtgccgcttgctgccaaccaagaacaatgtgcgctctgcctggtaccgagggcagagtcctgcaggggatggtagcccagagcctcctaccccccgctataacacatgggtcctgcaagatacagttctcgagtcccatttgcagctgctgtcaaccattctgagttcagcccagggcctgaaggatggcgtggcacttctgaaggtctggctgcggcagcgggagctggacaagggccagggtgggtttactgggttccttgtctccatgctggttgtcttccttgtgtctacacgcaagatccataccaccatgagtggctaccaggtcctgagaagtgtcttgcagtttctggccactacagacctgacagtcaacgggatcagtttatgtctcagctcagatccctctttgccggccctggctgacttccaccaggccttctccgttgtcttcctggattcctcaggccatctcaacctctgtgctgatgtcactgcctctacttaccaccaggtacagcatgaggcacggctgtctatgatgttgctggacagcagagctgacgacgggttccacctgctgttgatgactcccaaacccatgatccgggcttttgaccatgtcctgcatctccgtccactgagtcgcctgcaggcagcgtgccaccggctgaagctctggccagagctgcaggacaatggtggggactatgtctcagctgctttgggccccctgaccaccctcctggagcagggcctgggggctcggctgaacctgctggctcactctcgacccccagtcccagagtgggacatcagccaagatccaccaaagcacaaagactctgggaccctgaccctgggactccttctccggcctgagggactgaccagcgtccttgagctgggtccagaggcagaccagcctgaggctgctaaattccgccagttctggggatcccgctcggagcttcggcgtttccaggacggagccattcgggaagctgtggtctgggaggcagcctctatgtcccagaagcgccttattccccaccaggtggtcacccacctcttggcactccatgctgacatcccagaaacctgtgtccactatgtggggggccccctggatgcacttatccaaggcctgaaagagacctccagcacaggtgaggaggccctggtagcggcggtacgttgctacgacgacctcagtcgcctactgtgggggctagagggtctcccactgaccgtgtctgctgttcagggagctcacccagtgctgcgctacacagaggtgttcccaccaactccagtccgtccagccttctccttctatgagactctgcgggagcggtcctcactgctgccccggctcgataagccctgtccggcctacgtggagcccatgaccgtggtttgtcacctggagggcagtggccagtggccacaggacgctgaggccgtgcagcgggtccgagctgccttccagctgcgcctggcagagctgttgacacaacagcatggtctgcagtgccgtgccactgccacgcacacggatgtccttaaggatggatttgtgtttcggattcgcgtggcctatcagcgggagccccagatcctgaaggaggtgcagagcccagaggggatgatctcgctgagggacacagctgcctccctccgccttgagagagacacaaggcagttgccactgctcaccagtgccctgcacggactgcagcagcagcacccagccttctctggtgtggcacggctggccaagcggtgggtgcgtgcccagcttcttggtgagggtttcgctgatgagagcctggatctggtggccgctgcccttttcctgcaccctgagcccttcacccctccgagttccccccaggttggcttccttcgattccttttcttggtatcaacgtttgattggaagaacaaccccctctttgtcaacctcaataatgagctcactgtggaggagcaggtggagatccgcagtggcttcctggcagctcgggcacagctccccgtcatggtcattgttaccccccaagaccgcaaaaactctgtgtggacacaggatggaccctcagcccagatcctgcagcagcttgtggtcctggcagctgaagccctgcccatgttagagaagcagctcatggatccccggggacctggggacatcaggacagtgttccggccgcccttggacatttacgacgtgctgattcgcctgtctcctcgccatatcccgcggcaccgccaggctgtggactcgccagctgcctccttctgccggggcctgctcagccagccggggccctcatccctgatgcccgtgctgggctatgatcctcctcagctctatctgacgcagctcagggaggcctttggggatctggcccttttcttctatgaccagcatggtggagaggtgattggtgtcctctggaagcccaccagcttccagccgcagcccttcaaggcctccagcacaaaggggcgcatggtgatgtctcgaggtggggagctagtaatggtgcccaatgttgaagcaatcctggaggactttgctgtgctgggtgaaggcctggtgcagactgtggaggcccgaagtgagaggtggactgtgtgatcccagctctggagcaagctgtagacggacagcaggacattggacctctagagcaagatgtcagtaggatgacctccaccctccttggacatgaatcctccatggagggcctgctggctgaacatgctgaatcatctccaacaaaacccagccccaactttctctctgatgctccagcattggggcaggggcatggtggcccatgtagtctcctgggcctcaccatcccagaagaggagtgggagccagctcagagaaggaactgaacccaggagatccatccacctattagccctgggcctggacctccctgcgatttcccactcctttcttagtcttcttccagaaacagagaaggggatgtgtgcctgggagaggctctgtctccttcctgctgccaggacctgtgcctagacttagcatgcccttcactgcagtgtcaggcctttagatgggacccagcgaaaatgtggcccttctgagtcacatcaccgacactgagcagtggaaaggggctatatgtgtatgaatagaccacattgaaggagcacaatgccctcctgtgttgatgccacttcccagggtggagacagtggaaaagaaccgaggacaggaaaggattgggtaggtgaaggggtcaggggactggtagtcacccaatcttggagaggtgcaaaaagcactgggggctacccgttagctgcatctgccctggctgtttgcccgttcatgtcacaaactgccactactatgtacctgcagtggggttgcagagatgggggagactcaagtcttactccccaggagctcccagggcccaaggaggagaatgctgcctcctttcagtctggtctacacccactttctggtagcctctctgcttcctgtaattctggctgtttttccagactcagctcaaatagtgcccctcctcctccgtggtcttcgggtcgtttgggatcctctag

SEQ ID NO: 13797 - DNA, 1806 bp, Homo sapiens
  misc_feature (16)..(16): n is a, c, g, or t
  misc_feature (20)..(20): n is a, c, g, or t
ccaggctggtccgccncgangtttggatatgtcgaccacgcgcctcgatcctgcagcagcttgtggtcctggcagctgaagccctgcccatgttagagaagcagctcatggatccccggggacctggggacatcaggacagtgttccggccgcccttggacatttacgacgtgctgattcgcctgtctcctcgccatatcccgcggcaccgccaggctgtggactcgccagctgcctccttctgccggggcctgctcagccagccggggccctcatccctgatgcccgtgctgggctatgatcctcctcagctctatctgacgcagctcagggaggcctttggggatctggcccttttcttctatgaccagcatggtggagaggtgattggtgtcctctggaagcccaccagcttccagccgcagcccttcaaggcctccagcacaaaggggcgcatggtgatgtctcgaggtggggagctagtaatggtgcccaatgttgaagcaatcctggaggactttgctgtgctgggtgaaggcctggtgcagactgtggaggcccgaagtgagaggtggactgtgtgatcccagctctggagcaagctgtagacggacagcaggacattggacctctagagcaagatgtcagtaggatgacctccaccctccttggacatgaatcctccatggagggcctgctggctgaacatgctgaatcatctccaacaaaacccagccccaactttctctctgatgctccagcattggggcaggggcatggtggcccatgtagtctcctgggcctcaccatcccagaagaggagtgggagccagctcagagaaggaactgaacccaggagatccatccacctattagccctgggcctggacctccctgcgatttcccactcctttcttagtcttcttccagaaacagagaaggggatgtgtgcctgggagaggctctgtctccttcctgctgccaggacctgtgcctagacttagcatgcccttcactgcagtgtcaggcctttagatgggacccagcgaaaatgtggcccttctgagtcacatcaccgacactgagcagtggaaaggggctatatgtgtatgaatagaccacattgaaggagcacaatgccctcctgtgttgatgccacttcccagggtggagacagtggaaaagaaccgaggacaggaaaggattgggtaggtgaaggggtcaggggactggtagtcacccaatcttggagaggtgcaaaaagcactgggggctacccgttagctgcatctgccctggctgtttgcccgttcatgtcacaaactgccactactatgtacctgcagtggggttgcagagatgggggagactcaagtcttactccccaggagctcccagggcccaaggaggagaatgctgcctcctttcagtctggtctacacccactttctggtagcctctctgcttcctgtaattctggctgtttttccagactcagctcaaatagtgcccctccttaagcccatccctcgcccccagcctgaggtgatctttccctcctctgaactattagagcagttactgtctgttcagttcgtttggcaggcacacacagtggcataaattctattgttttgaactctgatttaaaattaaattgcagctgggcgtggtggctcatgcttgtaatcccaacacttagggagtcaggagaatcacttgagctcaggagttctagaccaatctgggcaacagagagaccccatctcttttaaataaaaagttaaattgcttaatttcccccgt

SEQ ID NO: 13798 - DNA, 1426 bp, Homo sapiens
gcatttccgcccacgtgggaagctatgcggtatagacccggctagaatctgaagtgcgggagagtgctggaccctgagtgatggggccggcgccagctggagagcagcttcgcggagcgactggagagccagaggtgatggaaccagccctggaaggcacaggcaaagaggggaagaaagcatcctccaggaagcgtacattggctgaacctccagcgaagggcctcctgcagccagtgaagctcagcagggcagaactgtacaaggagcctaccaatgaggagcttaatcgccttcgggagactgagatcttgttccactccagcttgcttcgtttacaggtagaggagctactaaaggaagtaaggctgtcagagaagaagaaggatcggattgatgccttcctacgggaggtcaaccagcgggttgtgagggtgccctcagtccctgagacagagctcactgaccaggcatggctcccagctggggttcgagtgcccctccaccaagtgccctatgccgtgaagggctgtttccgcttcctgcccccagcccaggttactgttgtgggcagctaccttctgggcacctgcatccgaccagacatcaatgtggatgtggcactgaccatgcccagggaaatcctacaggacaaggacgggctgaaccagcgctacttccgcaagcgtgccctctacctggcccacttggctcaccacctggcccaggaccccctctttggcagtgtttgcttctcctacacaaatggctgccacctgaaaccctcactgttgctgcggccgcgtggaaaggatgagcgcctggtcactgtacgtctgcatccgtgccctccacctgacttcttccgcccgtgccgcttgctgccaaccaagaacaatgtgcgctctgcctggtaccgagggcagagtcctgcaggggatggtagcccagagcctcctaccccccgctataacacatgggtcctgcaagatacagttctcgagtcccatttgcagctgctgtcaaccattctgagttcagcccagggcctgaaggatggcgtggcacttctgaaggtctggctgcggcagcgggagctggacaagggccagggtgggtttactgggttccttgtctccatgctggttgtcttccttgtgtctacacgcaagatccataccaccatgagtggctaccaggtcctgagaagtgtcttgcagtttctggccactacagacctgacagtcaacgggatcagtttatgtctcagctcagatccctctttgccggccctggctgactttcaccaggccttccctcgtgccaaattcttggcctcaaggccaaaatcccttataatgaggtcgtttaaaatccgtaatcatgtaataaactggtcctgggtaaaattgtaacccccttaaaa

SEQ ID NO: 13799 - DNA, 579 bp, Homo sapiens
gaatcactcagatggattctttttcaggctttgatactcatcttacaggtctagattgttttcttccctgtcaaggtcatcaagaaggcaaattagccagagttgattctgatagacccgtcagccctaaacacctccagtcgttttgctagagaagctctgacgtctccaccttgtctccatgtgctggtgcttaaccaagggtcctgtttgcagttaaaaccagaccatggatttaaaaaaagaaaaagaagatatcaatagaaaatattctgttttcaaaacaactaaacaaaaaatctgacaatatataaaaaccctatttcagtggaattgaccttgtgatatttagtggtgccttgggcttgttgacattgagcagcttgttcacaaagaggcccagcaggttatttttccacttgttaaattttcagaatgtttcttattacatgcagtccagttcttgggtccacaggtcagttttggctgttataatctgcccttgctaaattttcaagggtaggagaattctctggttcttattctccttctccttcttccctttctttttccagtggt

SEQ ID NO: 13800 - DNA, 417 bp, Homo sapiens
tgtctttttaacatgctgtaactatcataacttcatatatcaggtgtgttgaatttaaaaaattttattgtaaactaaaagtaaccaaatctatgaggatatttcatttttaagaaacattgatttggctgggcccggtggctcatgctagtgtaatcccagcactttgggaggctgaggcaggtggatcacaaggtcaggagatcgagaccatcttggctaacacggtgaaaccccatctctactaaaaatacaaaaaattagccgggcgtggtggcaggcgcctgtagtcccagctactcaggaggctgaggcaggagaatggcgtgaacccgggaggcggagcttgcagtgagccgagatcgtgttactgcactccagcctgggtgacagagtgagactcagtctcaaaaaaaa

SEQ ID NO: 13801 - DNA, 492 bp, Homo sapiens
ctgaatagaaaataaaagctggtgggacccacggtctcctagggagacagtaggagccgggtgctgctccaaagtctgggggcccattctatgctctgtgggtctcctgaagggactcagtgaattctcggaggagacaccttgcaacacgttcctgtgcaaatcctgcaggaaatctaggggtttctccctggacttggttggctttaaccccttctcctggcctcgtgtatgccccacttcaggagggaggacagcttcagtaaatgcactaggatccagagaggctggagtgcagtgacatgattttgactcactgcaacctctgcctctcaggttcaagcgattcttgtgcctcagattcccaagtagctaggattacaggtcctgaaaaggttgcatcagccctttagccattacctgcctcttgatgaagcgtcagagcaggtgtgcatacacctgccagcacagaaaaaccttaacgtaaagttg

SEQ ID NO: 13802 - DNA, 394 bp, Homo sapiens
ctgaatagaaaataaaagctggtgggacccacggtctcctagggagacagtaggagccgggtgctgctccaaagtctgggggcccattctatgctctgtgggtctcctgaagggactcagtgaattctcggaggagacaccttgcaacacgttcctgtgcaaatcctgcaggaaatctaggggtttctccctggacttggttggctttaaccccttctcctggcctcgtgtatgccccacttcaggagggaggacagcttcagtaaatgcactaggatccagagaggtcctgaaaaggttgcatcagccctttagccattacctgcctcttgatgaagcgtcagagcaggtgtgcatacacctgccagcacagaaaaaccttaacgtaaagttg

SEQ ID NO: 13803 - DNA, 437 bp, Homo sapiens
agttttgcatagtagtagatcagaaatggaaaataaataggaacatcaaggtaattcttaccagctgaaaattccttgagagaagccgaagtatggcatctttaggatctactactgtctcaaataacagaaggggccactccacataccttttgtttcattagacgatggtgataatgaagataaaagatttgaagcatcaaatggcatagagatcctgggacattaaacacagtattcctctctgtagcattaataaattgtgatgaggtttgaaatactatatttgcctccttagttcttgtttcaaacagctgaaacatgtaacttggaaggtttcacctaagaaaatttgttgaaatcaattctgtaggaacaagaaaaataacaatactcatcacacattgtttctgcattaaagtattttcggtgaatgt

SEQ ID NO: 13804 - DNA, 690 bp, Homo sapiens
gagctcttcccctgcctcaggcactttggactgaggttctatgcctacaaccctctggctgggggcctgctgaccggcaagtacaagtatgaggacaaggacgggaaacagcccgtgggccgcttctttgggaatacctgggcagagatgtacaggaatcgctactggaaggagcaccactttgagggcattgccctggtggagaaggccctgcaggccgcgtatggcgccagcgcccccagcatgacctcggccaccctccggtggatgtaccaccactcacagctgcagggtgcccacggggacgcggtcatcctgggcatgtccagcctggagcagctggagcagaacttggcagcggcagaggaagggcccctggagccggctgtcgtggacgcctttaatcaagcctggcatttggttgctcacgaatgtcccaactacttccgctaggcccatcgtttctcaggctgcccaaggctcttctgtaacatcttttgttactcacattttctttaatttagaactgcctcagtaaattcttagggatggaagtatttggacaaaaacctaatagaagagtcaccaccaaatgaagaataaaactcccagggtgctgtgtgttagtctgtttgcgttgctataaaagaatacctgagactgggtcatttataaagaaaagaggtttat

SEQ ID NO: 13805 - DNA, 363 bp, Homo sapiens
aagtgacttgctttaagatcataaaactataaacatcagtcagaatctaaatggaggtttgattcccagtctggtgttctatcacaactatatctaaaaaccccaacgatgctctaaaagggaactattttgaatcctgtaacttaaagaatgttctgtgtattggattaaagtgtttcctagctattccaagtgtccccatctatttcaatcttaacataatgctcacatgtcacacaatgacatggatttaatgtcaatttataatactaagtatattatgtttctaaagttactatattatttgaaatagtaagggtatctgaaagattcaatttgtgatgtcaaatttacaaactgtcc

SEQ ID NO: 13806 - DNA, 398 bp, Homo sapiens
ttgcttcttagattggatgatgggtttgtaagtgttccttctgttgtgtctcatgatacagacccatgccctcaagcatgcattgtaattgaaatgccattaaaatgtattttacacccaggcgcagtggctcatgcctataatcccagcactttgggaagctcagacaggtggatcacgtgaggccaggagtttgagaccaacctggccaacatggcaaaactgcagctgtactaaaaatacaaagattagctgggtgtattggtgggcacctgtaatcccagctactcaggaggcctaggcgagagaagcccttgaacctgagaggcggaggttatagtgaaccgagatcacaccactgtatttcagcctgggcaacagagcaaaactctgtctca

SEQ ID NO: 13807 - DNA, 443 bp, Homo sapiens
attagatattaaaaaaagtcagtgggggtttcctcatagaaacaagggaagacctttactgagattgcttctcagtttattggtcttcatttgttttttggctcatgggacttgaacataggtagggtacaactttatttacataggagccaagagaaaacttcctcttgctatctctaggtttgctaaaaatcagctgacaaaaagcagattaatagaaaaggcatacaaatctgccgggcacggtggctcgcacctgtaatcccagcactttaggaggccaaggcgggaggatcacgaggtcaggagttcgagaccaggctggccaagatggtgaaaccctgtctctactaaaaatacaaaaaattaaccaggcatggtggcgggtgcctgtaatcccagctattcaggaggctgaggcagagaattgcttgaacccgaga

SEQ ID NO: 13808 - DNA, 309 bp, Homo sapiens
caaaaaagactcctgttattgccttagatgtatatactactacctcattggacatctgcattttcagaattctaagtttagtcataagcggtcacattaatctaaaaaataaaaataaaaggaagccatctctactcaccattttgtataatataatgaaatagttacaatgtatgttttatagccagaaagacgtaggtttgaaatctagctctatggctactagctagtgactttgggcaggttatttaacccctttgaatcatgcacacttggataagtagccggcagtaaatgtgaaaattgtca

SEQ ID NO: 13809 - DNA, 221 bp, Homo sapiens
tatgttctagcaattgtatgttccaaatgtgctgctttcagttttttcgagaaacaaatgatgtttgactttaaaattctagagttggccgggcgcggtggctcacgcctgtaatcccagcactttgggaggccgaggcgggtggatcatgaggtcaggagatcgagaccatcctggctaacaaggtgaaaccccgtctctactaaaaatacaaaaaatta

SEQ ID NO: 13810 - DNA, 306 bp, Homo sapiens
atgtttcatgacagaattccccgtttctccccactgcccactttattttaatggaatttcttttgaattgcacctgtattgtcagcacaggcctccctaaacggtacagccatccagggagggcgatggttccagtaaaggagcagacacattcctgaccctgatggaggagacgggagaccacctgctctccacaccccctgtccccagccactttgctttctcctgcagccaggcctgggctgctgcggttcttttctatcaaacctctttatacccccaacctggaacttgaaagcagaggaa

SEQ ID NO: 13811 - DNA, 923 bp, Homo sapiens
  misc_feature (841)..(841): n is a, c, g, or t
agcggggtgtgcggcggcagcggcgggcgcgagcggcagctgtcaggccaccgaggtccaagccgcacttgctgccccattgaggacgaggaggcagcaggagcagtgacggtgactctaaggagccggattcccggcacgcagagctgacctgcctggcacccgcggccctctcctgtttccttcccattgtgttggcaccctaaaaagaaagaataaaacaacaacaggaaaaaaaggaaaatatttaaattgtgacaaaaacccactggataagccagctgcagaatatatcctgaggtacctgctttatggaattattcacactattcaccaacaggaagaataaagtcaatcaattcaaggagtctcagaacaggagcacatagacaccaaactttgtgggacaacaaatataatgaagagtatgtttgcgtctttcaaacaaagccacgtgaagtcaaggcccttaacacccacccctcccacatactgaggggagaattcagatgcccactggagtcagccgatcagactgccttttgcacactccttgcctccactccagtttaccgtggaagacctgtctgctatggctgaatctgagagagatccttgagtaacgaattaaggaatgaacaaatgttgctctggacaaagctgcagcttccacgtcctgcataactgcactcagtactgaccctgaagataggaaaagcaatacaactggtgctagaaatgtcctgcgaatgacttgggattgagtggaacactggcactgatctcctttgaacaagctccttggaaaccacagggttgtcatggtagctgttatcaaggnagaacgggagtgagaagatgctgacgaaacaccctgtttctccttccctgaacgaggtgtaaggccagatgcccccttcgtc

SEQ ID NO: 13812 - DNA, 593 bp, Homo sapiens
agcggggtgtgcggcggcagcggcgggcgcgagcggcagctgtcaggccaccgaggtccaagccgcacttgctgccccattgaggacgaggaggcagcaggagcagtgacggtgactctaaggagccggattcccggcacgcagagctgacctgcctggcacccgcggccctctcctgtttccttcccattgtgttggcaccctaaaaagaaagaataaaacaacaacaggaaaaaaaggaaaatatttaaattgtgacaaaaacccactggataagccagctgcagaatatatcctgaggtacctgctttatggaattattcacactattcaccaacaggaagaataaagtcaatcaattcaaggagtctcagaacaggagcacatagacaccaaactttgtgggacaacaaatataatgaagagtatgtttgcgtctttcaaacaaagaaatgttatgagaatgacttggatgagctgaaaaatgaatgatctccttgaacaagacgcatctgaaatttggtgccatgactcgaatcgggggacctcccttggaagatcaatcccctgtcctcctgctctttactccatga

SEQ ID NO: 13813 - DNA, 1123 bp, Homo sapiens
agcggggtgtgcggcggcagcggcgggcgcgagcggcagctgtcaggccaccgaggtccaagccgcacttgctgccccattgaggacgaggaggcagcaggagcagtgacggtgactctaaggagccggattcccggcacgcagagctgacctgcctggcacccgcggccctctcctgtttccttcccattgtgttggcaccctaaaaagaaagaataaaacaacaacaggaaaaaaaggaaaatatttaaattgtgacaaaaacccactgggttctcttggttacaaactccttcccttctggtgctgcaaaaatgagtgggaaatccctgctcttaaaggtcattctcttgggtgatggtggagttgggaaaagttcgcttatgaaccgttacgtaaccaacaaatttgactcccaggcttttcacaccataggggtagagttcttaaatcgagatctggaggtagatggacgctttgtaaccctccagatctgggacactgcagggcaggaacgtttcaagagccttaggacacccttctacaggggagcagactgctgcctcttgaccttcagcgtggatgatcggcagagcttcgagaatcttggtaactggcagaaagaatttatttactatgcggatgtgaaggaccctgagcatttcccctttgtagttctgggtaacaaggtagacaaagaggataggcaagtgactactgaggaggcacaaacctggtgcatggagaatggggattacccttatttagaaactagtgccaaagatgatactaatgtgacagtggcctttgaagaagctgtcaggcaggtgctggctgtagaggaacagctggagcattgcatgttgggtcacaccattgacttgaacagtggctccaaagcagggtcttcgtgctgttaaagatagggagccttttaaaaatgtgccccaaattgatcagtcagtagtgtaagaataactgtgcccctctaagagtgcacacacacgcacacaagagggtaagagacaaggttctgattgtgaaacagagcctttcaaattgaagtgtagattgatttaaaaaaattaaaaattaaaaaaaatgaagctctatcaagccaagt

SEQ ID NO: 13814 - DNA, 300 bp, Homo sapiens
ggcggccgcctactactactaaataaacggccgctcgactacttgcatgtgtaaaaataactaaaagaatataattggattgtttataacacaaagaaaggataaatgcttgaggagatggatactccatttactctgatgtgattattacacattgcgtgcctgtatcaaaatatctcacatagcccataaatatatacacttattatgtacccacaaaaattacaaagtaaaaaagcatttaaagtaccttcaagcttcctgtaagcgtcaccaccatattcattgaaatggtcgacg

SEQ ID NO: 13815 - DNA, 3537 bp, Homo sapiens
ctcaagctgatcgtcttgccctctatgatttcgtagttgaggagacaaagaaaaagcgctctgattctcaaattattgaaaatgacagcgatctctttgtagacttggctgccaaaatcaatcaagacaatagtcgaaaaagtccaaaatcctaccttgaaatcctggcagaagtacgagattataaaagaagacgccagtcctatagagccaagaatgttcacataaccaagaaatcatatactgaggtgattcgagatgtgataaatgtgcacatggaagaactcagcaatcattggcaagaagagcaagagaaggcagaggatgatgccgaaaagaatgaagaaaggcgatcagcttcagtagattcacggcagtctggtggaagctatttggatgctgagtgttcacgacatagaagggataggagtagaagcccacataaaagaaaaagaaacaaagataaggataaaaactgtgagtcgagaagaaggaaagagagggatggggaaagacaccatagtcataaaagaagaaagcaaaaaatataaatgaagtacttgtacctatattaattatgcttacgccatgataaccaatatacagatatattaattggaattcctttgcataggagaatgtttttatgatctgtttagtgcttattattttttttatgatctgtttagtgcttattattttccagtaaatatgcttcaaaccatgagtacactattaggccctacaactttgttttccttatattttattagatgatttgcttcctataactgatgttgttttgttcgttttgctaatatatgtatctcaaaattctttaagtcaatatttatcatatgtaaattaaacatgaatacattctcatcttataactacatcttataaataaggctaataacccttagaacaccacctgcggttctgtcctcaccccagtggtgactactgtttaccactacactggtgaattgtagtagggaaaaacaatctaaatattgaagaggaatggcctaattaaaatatgatgtagtcataggatagattattgtattggagttaaaagaaataatctagatccatattaacctggattggtctcaaaaacataatgctcagtgaaaatagcaagttgtagaaagttatatacaaattatatatatgtacaaaacaatactatgcattctctatggctatataatgtacgtaaatctatttttaaaggttcagaggaatccataccaaagttctaacagcgagtaggaggtatagatgagagattaggggtgcaaatcaggattgggagggtggtcagagggaactttagctttatccataacattaatttttttaaaaaataaggtcttaatgtttcatttaatttaaaatatactgtcatgttgtgttttgtaaatcaactgaattgaggtactatttacttagatttattgcaccctttttacgtgtgtattttattgggttttgacagattcatacctctgtgcagccactatcacgatcaagatacaaatattttcattgcccccaaaattctcataccccctttcccaatcaattcctctacccctagccctaggcagccacagatttgcttttggttaccgattagatctatccattgtagaattcatgtaaatagaatactgtagtatgtactttgccttcttcctctctgcagatttttgagattgatccctgtgtgtcagttgtgcattttttttgttgctgagtagtatgttctatcttatgtcagatcattcacgtgagactttggcatgaaatgttaagcatccgacatctaaatagcaatattttgaatactggaaactcaggttaaagattttgtttccaagtagaaatgaaatcttattattttaataagtagctgacagtgacagaaagattggatttggatcagattggctgttaggcttcaggtatgggaaacagctctcagatttataaattggaaatcaccaggttacttgccaatatatagtcatattgctgccattgtacttaatttctaaatatataaaatccacatttaaaaattataaaagcaaggacttgggagtgactgatgaatcatgaaattgctgcttttatagatcaaaactacttgaatcatcaggaatttcatatttttcatattgtgtgacaacttataattttgtttcaaattgtgatttcattgattttactaactggaaggaagaagagtaaaattggcatatttaggttttttgtagaagaaagatacaagtgaaaattaggagtggattggagaaattggggggaaatagaagagtacggagaaaggaagagattgaaaatgttaccagagttctttaaagctcacattttatagtatcactgctacaaactatttaatgaaatgtggcatcgggtgaaaagaggcatttgtttgatccttgaacgaattaatctcacgtacttccctgtttgtggtttgagcctttcactggatgtgagctacttgagagcagggtttatgccttcatcagcgtgacccctgtgcctgcagcctcataggtgttaatctgtaattttaaattttgacaaaagcattttcacagccctgccacataagatctagtttttatttctagagtgctgctatgaataattactatagctgctgtccatcttgcccatccattaaggtaccttctcacaaacatttctaatctactggctggagtgcagtggtgcagtctgtagctcactgcagcctcaaactcctaggctcaggcgatcctcttgccctggcctcccatgtagctgcaactataggtgtgtgccactacacctggctaatgtttttagttttttagagatggagtcttgctctgttgcctaggctggtcttgaactcctgggctcagatgatcctcctgtcctcagcctcccaaaatgctgggagccaccaggcaccaggtgtgatctaccacacctgtctaaaaagtatgtatttttaaatttttttgtagagacaggatctcactatgttctccagctggtctcaagctcctggcctcggcctcctaaagtgctgggattacaagtgtgagccactgtgcctagtcactttaattgagatattggcaagtcaactgccatgcagagcccagggcactggttatattcagtaggaaactgaactcagcactcagaattttaaattaaatcaatgatcttcaagtatttgccactttcgagtacagctaattggataatctcaaaccctttagtgaaaatatcttaaatgcattgagaatattttctaattacctgtgtatgctacagtacagacattaattctataaacatgttcataggtcttccccctcgccccgcccgtcttctaagggcattttctgtttctttttagtgagttcatgaatgtttaacggttctggcgcaaagctttcttgcattctgagcataaaaataataaaacccacttatatttgc

SEQ ID NO: 13816 - DNA, 2839 bp, Homo sapiens
ctcaagctgatcgtcttgccctctatgatttcgtagttgaggagacaaagaaaaagcgctctgattctcaaattattgaaaatgacagcgatctctttgtagacttggctgccaaaatcaatcaagacaatagtcgaaaaagtccaaaatcctaccttgaaatcctggcagaagtacgagattataaaagaagacgccagtcctatagagccaagaatgttcacataaccaagaaatcatatactgaggtgattcgagatgtgataaatgtgcacatggaagaactcagcaatcattggcaagaagagcaagagaaggcagaggatgatgccgaaaagaatgaagaaaggcgatcagcttcagtagattcacggcagtctggtggaagctatttggatgctgagtgttcacgacatagaagggataggagtagaagcccacataaaagaaaaagaaacaaagataaggataaaaactgtgagtcgagaagaaggaaagagagggatggggaaagacaccatagtcataaaagaagaaagcaaaaaatataaatgaagtacttgtacctatattaattatgcttacgccatgataaccaatatacagatatattaattggaattcctttgcataggagaatgtttttatgatctgtttagtgcttattattttttttatgatctgtttagtgcttattattttccagtaaatatgcttcaaaccatgagtacactattaggccctacaactttgttttccttatattttattagatgatttgcttcctataactgatgttgttttgttcgttttgctaatatatgtatctcaaaattctttaagtcaatatttatcatatgtaaattaaacatgaatacattctcatcttataactacatcttataaataaggctaataacccttagaacaccacctgcggttctgtcctcaccccagtggtgactactgtttaccactacactggtgaattgtagtagggaaaaacaatctaaatattgaagaggaatggcctaattaaaatatgatgtagtcataggatagattattgtattggagttaaaagaaataatctagatccatattaacctggattggtctcaaaaacataatgctcagtgaaaatagcaagttgtagaaagttatatacaaattatatatatgtacaaaacaatactatgcattctctatggctatataatgtacgtaaatctatttttaaaggttcagaggaatccataccaaagttctaacagcgagtaggaggtatagatgagagattaggggtgcaaatcaggattgggagggtggtcagagggaactttagctttatccataacattaatttttttaaaaaataaggtcttaatgtttcatttaatttaaaatatactgtcatgttgtgttttgtaaatcaactgaattgaggtactatttacttagatttattgcaccctttttacgtgtgtattttattgggttttgacagattcatacctctgtgcagccactatcacgatcaagatacaaatattttcattgcccccaaaattctcataccccctttcccaatcaattcctctacccctagccctaggcagccacagatttgcttttggttaccgattagatctatccattgtagaattcatgtaaatagaatactgtagtatgtactttgccttcttcctctctgcagatttttgagattgatccctgtgtgtcagttgtgcattttttttgttgctgagtagtatgttctatcttatgtcagatcattcacgtgagactttggcatgaaatgttaagcatccgacatctaaatagcaatattttgaatactggaaactcaggttaaagattttgtttccaagtagaaatgaaatcttattattttaataagtagctgacagtgacagaaagattggatttggatcagattggctgttaggcttcaggtatgggaaacagctctcagatttataaattggaaatcaccaggttacttgccaatatatagtcatattgctgccattgtacttaatttctaaatatataaaatccacatttaaaaattataaaagcaaggacttgggagtgactgatgaatcatgaaattgctgcttttatagatcaaaactacttgaatcatcaggaatttcatatttttcatattgtgtgacaacttataattttgtttcaaattgtgatttcattgattttactaactggaaggaagaagagtaaaattggcatatttaggttttttgtagaagaaagatacaagtgaaaattaggagtggattggagaaattggggggaaatagaagagtacggagaaaggaagagattgaaaatgttaccagagttctttaaagctcacattttatagtatcactgctacaaactatttaatgaaatgtggcatcgggtgaaaagaggcatttgtttgatccttgaacgaattaatctcacgtacttccctgtttgtggtttgagcctttcactggatgtgagctacttgagagcagggtttatgccttcatcagcgtgacccctgtgcctgcagcctcataggtgttaatctgtaattttaaattttgacaaaagcattttcacagccctgccacataagatctagtttttatttctagagtgctgctatgaataattactatagctgctgtccatcttgcccatccattaaggtaccttctcacaaacatttctaatctactggctggagtttgaggctgcagtgagtcatgatcgtgccactgcactccatcctgggtggtaaagcaagaacctatctcttaga

SEQ ID NO: 13817 - DNA, 3654 bp, Homo sapiens
ctcaagctgatcgtcttgccctctatgatttcgtagttgaggagacaaagaaaaagcgctctgattctcaaattattgaaaatgacagcgatctctttgtagacttggctgccaaaatcaatcaagacaatagtcgaaaaagtccaaaatcctaccttgaaatcctggcagaagtacgagattataaaagaagacgccagtcctatagagccaagaatgttcacataaccaagaaatcatatactgaggtgattcgagatgtgataaatgtgcacatggaagaactcagcaatcattggcaagaagagcaagagaaggcagaggatgatgccgaaaagaatgaagaaaggcgatcagcttcagtagattcacggcagtctggtggaagctatttggatgctgagtgttcacgacatagaagggataggagtagaagcccacataaaagaaaaagaaacaaagataaggataaaaactgtgagtcgagaagaaggaaagagagggatggggaaagacaccatagtcataaaagaagaaagcaaaaaatataaatgaagtacttgtacctatattaattatgcttacgccatgataaccaatatacagatatattaattggaattcctttgcataggagaatgtttttatgatctgtttagtgcttattattttttttatgatctgtttagtgcttattattttccagtaaatatgcttcaaaccatgagtacactattaggccctacaactttgttttccttatattttattagatgatttgcttcctataactgatgttgttttgttcgttttgctaatatatgtatctcaaaattctttaagtcaatatttatcatatgtaaattaaacatgaatacattctcatcttataactacatcttataaataaggctaataacccttagaacaccacctgcggttctgtcctcaccccagtggtgactactgtttaccactacactggtgaattgtagtagggaaaaacaatctaaatattgaagaggaatggcctaattaaaatatgatgtagtcataggatagattattgtattggagttaaaagaaataatctagatccatattaacctggattggtctcaaaaacataatgctcagtgaaaatagcaagttgtagaaagttatatacaaattatatatatgtacaaaacaatactatgcattctctatggctatataatgtacgtaaatctatttttaaaggttcagaggaatccataccaaagttctaacagcgagtaggaggtatagatgagagattaggggtgcaaatcaggattgggagggtggtcagagggaactttagctttatccataacattaatttttttaaaaaataaggtcttaatgtttcatttaatttaaaatatactgtcatgttgtgttttgtaaatcaactgaattgaggtactatttacttagatttattgcaccctttttacgtgtgtattttattgggttttgacagattcatacctctgtgcagccactatcacgatcaagatacaaatattttcattgcccccaaaattctcataccccctttcccaatcaattcctctacccctagccctaggcagccacagatttgcttttggttaccgattagatctatccattgtagaattcatgtaaatagaatactgtagtatgtactttgccttcttcctctctgcagatttttgagattgatccctgtgtgtcagttgtgcattttttttgttgctgagtagtatgttctatcttatgtcagatcattcacgtgagactttggcatgaaatgttaagcatccgacatctaaatagcaatattttgaatactggaaactcaggttaaagattttgtttccaagtagaaatgaaatcttattattttaataagtagctgacagtgacagaaagattggatttggatcagattggctgttaggcttcaggtatgggaaacagctctcagatttataaattggaaatcaccaggttacttgccaatatatagtcatattgctgccattgtacttaatttctaaatatataaaatccacatttaaaaattataaaagcaaggacttgggagtgactgatgaatcatgaaattgctgcttttatagatcaaaactacttgaatcatcaggaatttcatatttttcatattgtgtgacaacttataattttgtttcaaattgtgatttcattgattttactaactggaaggaagaagagtaaaattggcatatttaggttttttgtagaagaaagatacaagtgaaaattaggagtggattggagaaattggggggaaatagaagagtacggagaaaggaagagattgaaaatgttaccagagttctttaaagctcacattttatagtatcactgctacaaactatttaatgaaatgtggcatcgggtgaaaagaggcatttgtttgatccttgaacgaattaatctcacgtacttccctgtttgtggtttgagcctttcactggatgtgagctacttgagagcagggtttatgccttcatcagcgtgacccctgtgcctgcagcctcataggtgttaatctgtaattttaaattttgacaaaagcattttcacagccctgccacataagatctagtttttatttctagagtgctgctatgaataattactatagctgctgtccatcttgcccatccattaaggtaccttctcacaaacatttctaatctactggctggagtgcagtggtgcagtctgtagctcactgcagcctcaaactcctaggctcaggcgatcctcttgccctggcctcccatgtagctgcaactataggtgtgtgccactacacctggctaatgtttttagttttttagagatggagtcttgctctgttgcctaggctggtcttgaactcctgggctcagatgatcctcctgtcctcagcctcccaaaatgctgggagccaccaggcaccaggtgtgatctaccacacctgtctaaaaagtatgtatttttaaatttttttgtagagacaggatctcactatgttctccagctggtctcaagctcctggcctcggcctcctaaagtgctgggattacaagtgtgagccactgtgcctagtcactttaattgagatattggcaagtcaactgccatgcagagcccagggcactggttatattcagtaggaaactgaactcagcactcagaattttaaattaaatcaatgatcttcaagtatttgccactttcgagtacagctaattggataatctcaaaccctttagtgaaaatatcttaaatgcattgagaatattttctaattacctgtgtatgctacagtacagacattaattctataaacatgttcataggtcttccccctcgccccgcccgtcttctaagggcattttctgtttctttttagtgagttcatgaatgtttaacggttctggcgcaaagctttcttgcattctgagcataaaaataataaaacccacttatatttgcttgagtgtgtttacaagtcaatttccttttatgtagcttgctttttcatttgctataattgatcctgcaggtgtgtgaattattaaactaacgctcttttaaaccacaaaaaaaaaa

SEQ ID NO: 13818 - DNA, 851 bp, Homo sapiens
ctcaagctgatcgtcttgccctctatgatttcgtagttgaggagacaaagaaaaagcgctctgattctcaaattattgaaaatgacagcgatctctttgtagacttggctgccaaaatcaatcaagacaatagtcgaaaaagtccaaaatcctaccttgaaatcctggcagaagtacgagattataaaagaagacgccagtcctatagagccaagaatgttcacataaccaagaaatcatatactgaggtgattcgagatgtgataaatgtgcacatggaagaactcagcaatcattggcaagaagagcaagagaaggcagaggatgatgccgaaaagaatgaagaaaggcgatcagcttcagtagattcacggcagtctggtggaagctatttggatgctgagtgttcacgacatagaagggataggagtagaagcccacataaaagaaaaagaaacaaagataaggataaaaactgtgagtcgagaagaaggaaagagagccaggtgtggtggttcgcgcctgaaatccagctgcttgggaggctgaggcaggaatcgcttgaatccgggaggcgaaggttgcagtgagccaagatcgtgccatttgcgctccagcctgggcaacaagagtgaaactccatctcaaaaaaacagaaacaaacaaataaaaaaactaagagacgaaactgaaataggaataatcaaagtgatttttttttaattacgctttgaaattctgctttaaaattaactttgagtatatgtaaatgataaccagaaaattcttttcaaatagaatgttaaagtagcatattactgttgaaagtggtgtattactgttgaattatt

SEQ ID NO: 13819 - DNA, 4796 bp, Homo sapiens
cggaatgcaaacaaagctcgcgggcgcctgtgcggggctcgcggggaagcccagaaagtttgttttatgatggcttgagtgcgcgagcgtgtgcaggggagcgaggctgccaagtttctctctcctgttttgtgatttggggagaggtgtttctcccatgaacaagcggaggcttgggggctcgtgctgtggggggcacctgtctctcgttttatttttttggaggaggggtgtaactcatcatgtccaaagtgatccagaagaagaaccactggactagcagggttcacgaatgcaccgtgaagcggggaccccagggcgagctgggggtgacggtgctgggaggcgcggagcacggggagtttccgtacgtcggagcggtggcggcggtcgaggcagcggggcttcccggcggcggcgagggcccgaggctgggcgaaggggagctgcttctggaggtgcagggggtccgggtgtccggcttgccccgctatgacgtgctgggggtcatcgacagctgcaaggaggccgtcaccttcaaggccgtcagacaaggaggaaggctgaacaaggacctgcgacattttctcaatcagcgattccagaaggggtttcctgatcatgagctccagcagaccataagggataacctttaccgccatgctgtgccttgcacaacccgatctcccagagaaggagaagtgcctggcgtggactataactttctgactgtgaaggagttcttggacctcgagcagagtgggactcttctggaagtcggcacctatgaaggaaactattatgggacacccaagcctcctagccagccagtcagtgggaaagtgatcacgacggatgccttgcacagccttcagtctggctctaagcagtcgaccccgaagcgaaccaagtcctacaatgatatgcaaaatgctggcatagtccacgcggagaatgaggaggaggatgacgttcctgaaatgaacagcagctttacagccgattctggtgaacaagaggagcacactctccaagaaacagcattaccacctgtgaatagtagcatcatcgctgctcccatcacggacccttctcagaagttccctcaatacctacctctttctgcagaggataatttaggtcctctacctgaaaactgggagatggcctatactgaaaatggagaagtctattttatagaccataacacgaaaacaacatcttggttagaccctcggtgcctaaacaagcagcagaagccactggaagagtgtgaagatgatgaaggggtacacaccgaggagctggacagtgaactagaactgcctgctggttgggaaaagattgaagaccctgtctatggtatctactatgtagaccacatcaacaggaagacacaatatgagaacccggttctagaagccaaacggaagaagcagcttgagcagcagcagcagcagcaacagcagcagcaacagcagcagcagcagcagcagcagcagcagacagaagaatggacagaagatcactcagcccttgtgcctcctgttattccaaaccaccctccaagcaatccagagccagccagagaagttccacttcagggcaaacccttttttacacgaaacccttctgagttgaaaggcaagttcattcacacaaagctgcggaaaagcagtcgtggctttggcttcacggtggttggaggggatgaacctgatgagtttctccagatcaagagcttggtcctagatggtcctgctgcattggatggcaagatggaaacaggggatgtgattgtaagtgtgaatgacacctgtgttttgggacacacacatgctcaagttgtgaagatcttccagtccatccccattggtgccagcgtggaccttgaactctgccgaggttatccattgccttttgatccagatgaccccaatacaagtttagtgacctcggtagccattttggataaagaaccaattattgtgaatgggcaagagacctatgattcaccagctagccacagtagtaaaacaggcaaagtcaatggcatgaaggatgccaggccaagcagcccagcggacgtggcttcaaatagttctcatggttatcctaatgacactgtttctttggcttcctccatagccactcagccagaactcataactgttcatattgtcaaagggccaatgggctttggttttactatcgcagacagtcctggtgggggtggccaaagagtgaaacagattgttgacagcccaaggtgccgaggcctgaaagaaggggatctcatagtggaagttaataagaagaacgtgcaggccctaactcacaaccaagtggtggatatgctggttgagtgtcctaagggaagtgaggtcacattgttggtgcaacgaggagggctgccagttcccaagaagagcccaaagtcgcaaccactggaaaggaaagacagccagaatagttctcagcacagtgtttccagccaccgaagcctgcacacagcatccccaagccacagcacacaggtgctccccgagttcccacctgcagaggcccaagctccagatcaaactgacagctctggccagaaaaaaccagatccttttaaaatctgggcccagtccaggagcatgtatgaaaaccgacctatgtcaccttcacctgcgtcgggattgagcaagggtgagagagagagagaaatcaattccacgaattttggagaatgtccgattccagattaccaggaacaggacatcttcctctggagaaaagagactggatttggatttaggattctgggtggaaatgaaccaggggaacctatttatattggtcacatcgtaccactgggtgctgctgatactgacggccgcctgaggtctggagatgaattaatctgtgtggatgggacgccagtaattggaaaatcacaccagcttgtggtccagcttatgcaacaagctgccaagcaaggccacgtcaatctcacggtgcggcgtaaagtggtttttgcggtgcccaaaaccgagaacgaggtgccctcgccagcctcctctcatcacagtagcaaccagccggcctcgctgacagaagagaagcgcactccgcagggcagccagaactcgctgaacacggtgagctcgggcagcggcagcaccagcggcatcggcagtggcggcggcgggggcagcggcgtggtcagcaccgtggtgcagccctacgacgtggagatccggcgcggggagaacgagggcttcggcttcgtcatcgtgtcctcggtgagcaggcccgaagcaggcacgacctttgcaggcaatgcatgtgtggctatgcctcacaaaataggtcggattattgaggggagccctgctgaccgctgtggcaagctgaaagtaggagaccggatcttggcagtaaatggatgttccatcaccaacaaatcccattcagacattgtgaacctaatcaaggaagcgggaaacacagttaccctccgcatcattcctggggatgagtcctcgaatgccaccttgctgaccaatgcagagaagattgccaccatcaccaccacacacaccccttctcagcaagggacccaggagacaaggaataccaccaaaccaaagcaggaatctcaatttgagttcaaagcaccccaagcaacacaggagcaagatttttacactgtggaactggaaagaggagccaagggatttggctttagccttcgaggaggccgagagtataacatggacctctatgttctgcgcttagcagaggacggtcctgcggagaggtgtggaaagatgaggattggtgatgaaattttagagatcaatggtgagaccaccaaaaacatgaagcattctcgagctatagaactgattaagaatggtggccgcagagttcgtctgtttctgaagcggggagacggctcagtaccagaatatggtgggtcaaactatgaaaacattccttccttccctggcatgactccatgaatttgtctccagaacggcagcaggaaagtcttttttgtttcccctattcaccagtgtcttaccagcctctcgcaccatgtgattatttgcctcgcttgttctgaaatctctacacatttcatccttttgcttgcttacgtggactggggcatggcctaagacaagatctttatagccccctttctgataatcagagagaacgttttgtctagtccgaccaagagcgaaggaatgtttgtttgtactgtgccaaactgttcctcagatccaattgttagcacaaaatgactatatactccttttaagaagcaggaaagcaggtttcctgagtgatatgttgaggcacaattattttttcctttttggttacttggtgtctttatttaagaggcatgaaattttgagagatttgggggctttgctaacctcccttatgctctgtatacaacacttctccatcccccaactggtgtcttaccccaaatcagaccatctgagcccactactatcaaacaaacaaacaaaaactgttaatatattagccataatgtttttaaatgataaaggatgaaataaattcccagtgctcatcatgagggaaacatgtgactatacctttcctatgaggaaagccaggttatacatagagttcctttgtcatatctttagacttgatttgagtagacagcaatgatctttacatagcttagtgttctgatggcaaaatattgtatatgataataattatgtcctatttatttgagatttgtgtttaaaattaaa

SEQ ID NO: 13820 - DNA, 7486 bp, Homo sapiens
cggaatgcaaacaaagctcgcgggcgcctgtgcggggctcgcggggaagcccagaaagtttgttttatgatggcttgagtgcgcgagcgtgtgcaggggagcgaggctgccaagtttctctctcctgttttgtgatttggggagaggtgtttctcccatgaacaagcggaggcttgggggctcgtgctgtggggggcacctgtctctcgttttatttttttggaggaggggtgtaactcatcatgtccaaagtgatccagaagaagaaccactggactagcagggttcacgaatgcaccgtgaagcggggaccccagggcgagctgggggtgacggtgctgggaggcgcggagcacggggagtttccgtacgtcggagcggtggcggcggtcgaggcagcggggcttcccggcggcggcgagggcccgaggctgggcgaaggggagctgcttctggaggtgcagggggtccgggtgtccggcttgccccgctatgacgtgctgggggtcatcgacagctgcaaggaggccgtcaccttcaaggccgtcagacaaggaggaaggctgaacaaggacctgcgacattttctcaatcagcgattccagaaggggtttcctgatcatgagctccagcagaccataagggataacctttaccgccatgctgtgccttgcacaacccgatctcccagagaaggagaagtgcctggcgtggactataactttctgactgtgaaggagttcttggacctcgagcagagtgggactcttctggaagtcggcacctatgaaggaaactattatgggacacccaagcctcctagccagccagtcagtgggaaagtgatcacgacggatgccttgcacagccttcagtctggctctaagcagtcgaccccgaagcgaaccaagtcctacaatgatatgcaaaatgctggcatagtccacgcggagaatgaggaggaggatgacgttcctgaaatgaacagcagctttacagccgattctggtgaacaagaggagcacactctccaagaaacagcattaccacctgtgaatagtagcatcatcgctgctcccatcacggacccttctcagaagttccctcaatacctacctctttctgcagaggataatttaggtcctctacctgaaaactgggagatggcctatactgaaaatggagaagtctattttatagaccataacacgaaaacaacatcttggttagaccctcggtgcctaaacaagcagcagaagccactggaagagtgtgaagatgatgaaggggtacacaccgaggagctggacagtgaactagaactgcctgctggttgggaaaagattgaagaccctgtctatggtatctactatgtagaccacatcaacaggaagacacaatatgagaacccggttctagaagccaaacggaagaagcagcttgagcagcagcagcagcagcaacagcagcagcaacagcagcagcagcagcagcagcagcagcagacagaagaatggacagaagatcactcagcccttgtgcctcctgttattccaaaccaccctccaagcaatccagagccagccagagaagttccacttcagggcaaacccttttttacacgaaacccttctgagttgaaaggcaagttcattcacacaaagctgcggaaaagcagtcgtggctttggcttcacggtggttggaggggatgaacctgatgagtttctccagatcaagagcttggtcctagatggtcctgctgcattggatggcaagatggaaacaggggatgtgattgtaagtgtgaatgacacctgtgttttgggacacacacatgctcaagttgtgaagatcttccagtccatccccattggtgccagcgtggaccttgaactctgccgaggttatccattgccttttgatccagatgaccccaatacaagtttagtgacctcggtagccattttggataaagaaccaattattgtgaatgggcaagagacctatgattcaccagctagccacagtagtaaaacaggcaaagtcaatggcatgaaggatgccaggccaagcagcccagcggacgtggcttcaaatagttctcatggttatcctaatgacactgtttctttggcttcctccatagccactcagccagaactcataactgttcatattgtcaaagggccaatgggctttggttttactatcgcagacagtcctggtgggggtggccaaagagtgaaacagattgttgacagcccaaggtgccgaggcctgaaagaaggggatctcatagtggaagttaataagaagaacgtgcaggccctaactcacaaccaagtggtggatatgctggttgagtgtcctaagggaagtgaggtcacattgttggtgcaacgaggagggctgccagttcccaagaagagcccaaagtcgcaaccactggaaaggaaagacagccagaatagttctcagcacagtgtttccagccaccgaagcctgcacacagcatccccaagccacagcacacaggtgctccccgagttcccacctgcagaggcccaagctccagatcaaactgacagctctggccagaaaaaaccagatccttttaaaatctgggcccagtccaggagcatgtatgaaaaccgacttccagattaccaggaacaggacatcttcctctggagaaaagagactggatttggatttaggattctgggtggaaatgaaccaggggaacctatttatattggtcacatcgtaccactgggtgctgctgatactgacggccgcctgaggtctggagatgaattaatctgtgtggatgggacgccagtaattggaaaatcacaccagcttgtggtccagcttatgcaacaagctgccaagcaaggccacgtcaatctcacggtgcggcgtaaagtggtttttgcggtgcccaaaaccgagaacgaggtgccctcgccagcctcctctcatcacagtagcaaccagccggcctcgctgacagaagagaagcgcactccgcagggcagccagaactcgctgaacacggtgagctcgggcagcggcagcaccagcggcatcggcagtggcggcggcgggggcagcggcgtggtcagcaccgtggtgcagccctacgacgtggagatccggcgcggggagaacgagggcttcggcttcgtcatcgtgtcctcggtgagcaggcccgaagcaggcacgacctttgcaggcaatgcatgtgtggctatgcctcacaaaataggtcggattattgaggggagccctgctgaccgctgtggcaagctgaaagtaggagaccggatcttggcagtaaatggatgttccatcaccaacaaatcccattcagacattgtgaacctaatcaaggaagcgggaaacacagttaccctccgcatcattcctggggatgagtcctcgaatgccaccttgctgaccaatgcagagaagattgccaccatcaccaccacacacaccccttctcagcaagggacccaggagacaaggaataccaccaaaccaaagcaggaatctcaatttgagttcaaagcaccccaagcaacacaggagcaagatttttacactgtggaactggaaagaggagccaagggatttggctttagccttcgaggaggccgagagtataacatggacctctatgttctgcgcttagcagaggacggtcctgcggagaggtgtggaaagatgaggattggtgatgaaattttagagatcaatggtgagaccaccaaaaacatgaagcattctcgagctatagaactgattaagaatggtggccgcagagttcgtctgtttctgaagcggggagacggctcagtaccagaatatgaccccagcagcgaccgccacggccccgccaccggtccacaaggtgttccggaagtgagggccgggcccgaccgccggcagcatccgtcattggagtccagttacccacccgatcttcacaaatcatcaccacatggggaaaagcgggcacacgcaagggatccgaaaggcagcagagagtatagcagacaacccaatgaacaccacacctggaatgggacttcgaggaaacccgacagcggggcatgccgacccaaggaccgggcgccggagggacggagggacgcgcaggccgagcgcgcggcagccgccaacggccccaagaggcggtccccagagaagcggagggagggcacccgcagcgccgacaacactttggagaggagggagaagcacgagaagagacgagacgtctctccggagcggaggcgagagcggtcacccacccgcaggagagacggctcccccagccggcggagacggtctctggagagactcctggagcagaggaggtcccccgagcgcaggagagggggctcgcccgagcgcagggccaagtccaccgaccggaggcgcgcacgctcccccgagcgcaggagagagcggtccctggacaaaaggaacagagaggacagagccagccaccgagaaagggaagaggcgaatctgaaacaggatgccggcagaagttccagacatcccccggagcagagaaggcgaccttacaaagaatgtagcaccgacctcagtatctgagacgctgagtcacattccaacctttaccgtgtcaaaggttctaagaggaaagtcacaaacctgaaattatttagtttcttacctaatgaagcatctgacacctgatgatcctatgaataacaacaaacattttatgcatttgaaatcttataagaaaaaatatatatgaaaagtattgtgcctgatgtatcatattaaagaaagtatttttaaatgcatacttttttggaaattatttgccaaatgctggcccaaagggatataaattttgtttctacgtaacctgtagaatcgtcaagaattgttcccgttttggggcaatctttttctctcctggttaaatggggctgttgatcattttctctacgtaagggaatttattgattaagtttaattaatttgatatagactgtcatgtagtgatgtagtgctatactgtagtcggaagtttttcttaaaagcaaagagcaaaaatgcaaagttttatttgtaaaagctgaggacccttggggatggattaggtttgccgatgatcctaaaagtaagcaaactgtatgacaagactactattgcaaatgaaggatatttatagctaaactgcgcagcacaaagaagttttatattgtgagttatagttggttcagaaaacagtttgtactctccctggcccaggaaggcacacagacaaaaatgtcggccacttttactcaaatacagcccaagcacagacagtcaggttcgtgatcatcaccaacatctgataaaatctcattgaaggcaatgccatcacagctttgctcaattactacgaggaagagacaacaagcatctttcgtgttgtctcgtctgattggaggctgaatagtagatggaatggggggacagtgtgcctggtgtgaggaagacgtaagatccccaatttggaaagcatgcccccctcccttttagtagaagcccatggttgccctttgccaaactggggaggaggcaatgagccttggtggaaggaacctctctgttgatatttaaagaagtgagggctgtgggtattcattgttagaaatgccaatttcactttgaaaccatagtccaagtctctaggttggtagaagggaaaggaaggaagtggtcccagtgattctagatctggttgggaaacttctgcctcatgactctgtcctttgagtcctttggacagcagcacaaaacataacaatttttatttttaaacagacccattctttttgatcccacaggagctgtggttgggtcggccgtagccccgggatgtggtttaagtggattactgcctagctgagccaaaatgtttgcttgtacctgttggaccactacagcaaaccgctgcttacagtgcattgtgtatttctgtagtactgttttgcattttccatagagacagaaaactttgcaagtcaatcactgttgttcccatggtactgtaagaaaaaaaaaaaggaaaaagaaaaaaaaaaagaaaaccagccaatcattgcgtgtacagagctaaaaattgtaattaatagagcctgttgggaaaaaaaagaaaacaactgttgcctttttttcttgtataaaagagaatttatgacaaaatttagctgtgaggaatgtgatacgtgtttatatttctgaatatggaacaaattgattcatggggatatattttaatgtaaactaaatcaggtatgtaaagttgttttaaaatgggagactatataagtaattctctaaagctttagttggtttgaatatcatcatttcctccatggtgagcctgcttgtgaattattaagcacttgtttgcattctctgttcttcactcatttatttcttgcagtgtgctatggacttaatgctctttctgtattgatgaaaagcagtatgtgggccaatctttttataaaacactatgcatatataaatattacattgttcatagctttatttgacttatgggtttatacataacattagaatgagtagctgtagttgtgtggacatttataaaacaagttcctttcctggaacagacacaatatacattctgtagctaaaaaggagggaaaagtctgtgaatgctatttttattattaaagttttccatacaaagcatacattgagctgtagtaaggctgaggaagagtacaactgaataatgatgttctttttcatcaagttcctaagagctgacttggagattttattcccagggctccactgctaggattcttctcactagttctaacaaaatctgtgatgttaaatgactgatgctctcaattgtgatccagagttttaaataaatgaaatcaaggtggattttgggaatatatcctgaagttaacatcttgatgtccttcttgttgtaagatgatatttggcaatttaaaatctatgtgctacccacctgggcttgtctcaatccgtggactttttggtgtggcagtttcacctgaattccacacatcagatttgtttggaaatattgtactgtacagggactatgcattatgcagaaagatatagttttctttgaactgctgtaaccttaaattggaaactgattcttgtgagcctactttccttaatcccgccgcccccctcccccacttaatgtaaatgtcttgatgagagataatggatgagtattttgtatgatgaaatcaaacgatttaggaatttgtctccctccgttacacagttgatgcctgaaagaatgttgggggggaggactcaacaccctaattgtattttttaagtttcttttgtgaaagattttttaatgcatttttactgtaaaaatacatggaaatgtatgcattccacaacca

SEQ ID NO: 13821 - DNA, 6852 bp, Homo sapiens
cggaatgcaaacaaagctcgcgggcgcctgtgcggggctcgcggggaagcccagaaagtttgttttatgatggcttgagtgcgcgagcgtgtgcaggggagcgaggctgccaagtttctctctcctgttttgtgatttggggagaggtgtttctcccatgaacaagcggaggcttgggggctcgtgctgtggggggcacctgtctctcgttttatttttttggaggaggggtgtaactcatcatgtccaaagtgatccagaagaagaaccactggactagcagggttcacgaatgcaccgtgaagcggggaccccagggcgagctgggggtgacggtgctgggaggcgcggagcacggggagtttccgtacgtcggagcggtggcggcggtcgaggcagcggggcttcccggcggcggcgagggcccgaggctgggcgaaggggagctgcttctggaggtgcagggggtccgggtgtccggcttgccccgctatgacgtgctgggggtcatcgacagctgcaaggaggccgtcaccttcaaggccgtcagacaaggaggaaggctgaacaaggacctgcgacattttctcaatcagcgattccagaaggggtttcctgatcatgagctccagcagaccataagggataacctttaccgccatgctgtgccttgcacaacccgatctcccagagaaggagaagtgcctggcgtggactataactttctgactgtgaaggagttcttggacctcgagcagagtgggactcttctggaagtcggcacctatgaaggaaactattatgggacacccaagcctcctagccagccagtcagtgggaaagtgatcacgacggatgccttgcacagccttcagtctggctctaagcagtcgaccccgaagcgaaccaagtcctacaatgatatgcaaaatgctggcatagtccacgcggagaatgaggaggaggatgacgttcctgaaatgaacagcagctttacagccgattctggtgaacaagaggagcacactctccaagaaacagcattaccacctgtgaatagtagcatcatcgctgctcccatcacggacccttctcagaagttccctcaatacctacctctttctgcagaggataatttaggtcctctacctgaaaactgggagatggcctatactgaaaatggagaagtctattttatagaccataacacgaaaacaacatcttggttagaccctcggtgcctaaacaagcagcagaagccactggaagagtgtgaagatgatgaaggggtacacaccgaggagctggacagtgaactagaactgcctgctggttgggaaaagattgaagaccctgtctatggtatctactatgtagaccacatcaacaggaagacacaatatgagaacccggttctagaagccaaacggaagaagcagcttgagcagcagcagcagcagcaacagcagcagcaacagcagcagcagcagcagcagcagcagcagacagaagaatggacagaagatcactcagcccttgtgcctcctgttattccaaaccaccctccaagcaatccagagccagccagagaagttccacttcagggcaaacccttttttacacgaaacccttctgagttgaaaggcaagttcattcacacaaagctgcggaaaagcagtcgtggctttggcttcacggtggttggaggggatgaacctgatgagtttctccagatcaagagcttggtcctagatggtcctgctgcattggatggcaagatggaaacaggggatgtgattgtaagtgtgaatgacacctgtgttttgggacacacacatgctcaagttgtgaagatcttccagtccatccccattggtgccagcgtggaccttgaactctgccgaggttatccattgccttttgatccagatgaccccaatacaagtttagtgacctcggtagccattttggataaagaaccaattattgtgaatgggcaagagacctatgattcaccagctagccacagtagtaaaacaggcaaagtcaatggcatgaaggatgccaggccaagcagcccagcggacgtggcttcaaatagttctcatggttatcctaatgacactgtttctttggcttcctccatagccactcagccagaactcataactgttcatattgtcaaagggccaatgggctttggttttactatcgcagacagtcctggtgggggtggccaaagagtgaaacagattgttgacagcccaaggtgccgaggcctgaaagaaggggatctcatagtggaagttaataagaagaacgtgcaggccctaactcacaaccaagtggtggatatgctggttgagtgtcctaagggaagtgaggtcacattgttggtgcaacgaggagggctgccagttcccaagaagagcccaaagtcgcaaccactggaaaggaaagacagccagaatagttctcagcacagtgtttccagccaccgaagcctgcacacagcatccccaagccacagcacacaggtgctccccgagttcccacctgcagaggcccaagctccagatcaaactgacagctctggccagaaaaaaccagatccttttaaaatctgggcccagtccaggagcatgtatgaaaaccgacctatgtcaccttcacctgcgtcgggattgagcaagggtgagagagagagagaaatcaattccacgaattttggagaatgtccgattccagattaccaggaacaggacatcttcctctggagaaaagagactggatttggatttaggattctgggtggaaatgaaccaggggaacctatttatattggtcacatcgtaccactgggtgctgctgatactgacggccgcctgaggtctggagatgaattaatctgtgtggatgggacgccagtaattggaaaatcacaccagcttgtggtccagcttatgcaacaagctgccaagcaaggccacgtcaatctcacggtgcggcgtaaagtggtttttgcggtgcccaaaaccgagaacgaggtgccctcgccagcctcctctcatcacagtagcaaccagccggcctcgctgacagaagagaagcgcactccgcagggcagccagaactcgctgaacacggtgagctcgggcagcggcagcaccagcggcatcggcagtggcggcggcgggggcagcggcgtggtcagcaccgtggtgcagccctacgacgtggagatccggcgcggggagaacgagggcttcggcttcgtcatcgtgtcctcggtgagcaggcccgaagcaggcacgacctttgcaggcaatgcatgtgtggctatgcctcacaaaataggtcggattattgaggggagccctgctgaccgctgtggcaagctgaaagtaggagaccggatcttggcagtaaatggatgttccatcaccaacaaatcccattcagacattgtgaacctaatcaaggaagcgggaaacacagttaccctccgcatcattcctggggatgagtcctcgaatgccaccttgctgaccaatgcagagaagattgccaccatcaccaccacacacaccccttctcagcaagggacccaggagacaaggaataccaccaaaccaaagcaggaatctcaatttgagttcaaagcaccccaagcaacacaggagcaagatttttacactgtggaactggaaagaggagccaagggatttggctttagccttcgaggaggccgagagtataacatggacctctatgttctgcgcttagcagaggacggtcctgcggagaggtgtggaaagatgaggattggtgatgaaattttagagatcaatggtgagaccaccaaaaacatgaagcattctcgagctatagaactgattaagaatggtggccgcagagttcgtctgtttctgaagcggggagacggctcagtaccagaatatgcgatgatacctcctaatatcgctgcatgtatgagaaatgaaaagctcggggaggcttgcttctaccttatgggccataatcaaactacgaccccagcagcgaccgccacggccccgccaccggtccacaaggtgttccggaagtgagggccgggcccgaccgccggcagcatccgtcattggagtccagttacccacccgatcttcacaaatcatcaccacatggggaaaagcgggcacacgcaagggatccgaaaggcagcagagagtatagcagacaacccaatgaacaccacacctggaatgggacttcgaggaaacccgacagcggggcatgccgacccaaggaccgggcgccggagggacggagggacgcgcaggccgagcgcgcggcagccgccaacggccccaagaggcggtccccagagaagcggagggagggcacccgcagcgccgacaacactttggagaggagggagaagcacgagaagagacgagacgtctctccggagcggaggcgagagcggtcacccacccgcaggagagacggctcccccagccggcggagacggtctctggagagactcctggagcagaggaggtcccccgagcgcaggagagggggctcgcccgagcgcagggccaagtccaccgaccggaggcgcgcacgctcccccgagcgcaggagagagcggtccctggacaaaaggaacagagaggacagagccagccaccgagaaagggaagaggcgaatctgaaacaggatgccggcagaagttccagacatcccccggagcagagaaggcgaccttacaaagaatgtagcaccgacctcagtatctgagacgctgagtcacattccaacctttaccgtgtcaaaggttctaagaggaaagtcacaaacctgaaattatttagtttcttacctaatgaagcatctgacacctgatgatcctatgaataacaacaaacattttatgcatttgaaatcttataagaaaaaatatatatgaaaagtattgtgcctgatgtatcatattaaagaaagtatttttaaatgcatacttttttggaaattatttgccaaatgctggcccaaagggatataaattttgtttctacgtaacctgtagaatcgtcaagaattgttcccgttttggggcaatctttttctctcctggttaaatggggctgttgatcattttctctacgtaagggaatttattgattaagtttaattaatttgatatagactgtcatgtagtgatgtagtgctatactgtagtcggaagtttttcttaaaagcaaagagcaaaaatgcaaagttttatttgtaaaagctgaggacccttggggatggattaggtttgccgatgatcctaaaagtaagcaaactgtatgacaagactactattgcaaatgaaggatatttatagctaaactgcgcagcacaaagaagttttatattgtgagttatagttggttcagaaaacagtttgtactctccctggcccaggaaggcacacagacaaaaatgtcggccacttttactcaaatacagcccaagcacagacagtcaggttcgtgatcatcaccaacatctgataaaatctcattgaaggcaatgccatcacagctttgctcaattactacgaggaagagacaacaagcatctttcgtgttgtctcgtctgattggaggctgaatagtagatggaatggggggacagtgtgcctggtgtgaggaagacgtaagatccccaatttggaaagcatgcccccctcccttttagtagaagcccatggttgccctttgccaaactggggaggaggcaatgagccttggtggaaggaacctctctgttgatatttaaagaagtgagggctgtgggtattcattgttagaaatgccaatttcactttgaaaccatagtccaagtctctaggttggtagaagggaaaggaaggaagtggtcccagtgattctagatctggttgggaaacttctgcctcatgactctgtcctttgagtcctttggacagcagcacaaaacataacaatttttatttttaaacagacccattctttttgatcccacaggagctgtggttgggtcggccgtagccccgggatgtggtttaagtggattactgcctagctgagccaaaatgtttgcttgtacctgttggaccactacagcaaaccgctgcttacagtgcattgtgtatttctgtagtactgttttgcattttccatagagacagaaaactttgcaagtcaatcactgttgttcccatggtactgtaagaaaaaaaaaaaggaaaaagaaaaaaaaaaagaaaaccagccaatcattgcgtgtacagagctaaaaattgtaattaatagagcctgttgggaaaaaaaagaaaacaactgttgcctttttttcttgtataaaagagaatttatgacaaaatttagctgtgaggaatgtgatacgtgtttatatttctgaatatggaacaaattgattcatggggatatattttaatgtaaactaaatcaggtatgtaaagttgttttaaaatgggagactatataagtaattctctaaagctttagttggtttgaatatcatcatttcctccatggtgagcctgcttgtgaattattaagcacttgtttgcattctctgttcttcactcatttatttcttgcagtgtgctatggacttaatgctctttctgtattgatgaaaagcagtatgtgggccaatctttttataaaacactatgcatatataaatattacattgttcatagctttatttgacttatgggtttatacataacattagaatgagtagctgtagttgtgtaaactgattgggatcctctagatcacccg

SEQ ID NO: 13822 - DNA, 6845 bp, Homo sapiens
cggaatgcaaacaaagctcgcgggcgcctgtgcggggctcgcggggaagcccagaaagtttgttttatgatggcttgagtgcgcgagcgtgtgcaggggagcgaggctgccaagtttctctctcctgttttgtgatttggggagaggtgtttctcccatgaacaagcggaggcttgggggctcgtgctgtggggggcacctgtctctcgttttatttttttggaggaggggtgtaactcatcatgtccaaagtgatccagaagaagaaccactggactagcagggttcacgaatgcaccgtgaagcggggaccccagggcgagctgggggtgacggtgctgggaggcgcggagcacggggagtttccgtacgtcggagcggtggcggcggtcgaggcagcggggcttcccggcggcggcgagggcccgaggctgggcgaaggggagctgcttctggaggtgcagggggtccgggtgtccggcttgccccgctatgacgtgctgggggtcatcgacagctgcaaggaggccgtcaccttcaaggccgtcagacaaggaggaaggctgaacaaggacctgcgacattttctcaatcagcgattccagaaggggtttcctgatcatgagctccagcagaccataagggataacctttaccgccatgctgtgccttgcacaacccgatctcccagagaaggagaagtgcctggcgtggactataactttctgactgtgaaggagttcttggacctcgagcagagtgggactcttctggaagtcggcacctatgaaggaaactattatgggacacccaagcctcctagccagccagtcagtgggaaagtgatcacgacggatgccttgcacagccttcagtctggctctaagcagtcgaccccgaagcgaaccaagtcctacaatgatatgcaaaatgctggcatagtccacgcggagaatgaggaggaggatgacgttcctgaaatgaacagcagctttacagccgattctggtgaacaagaggagcacactctccaagaaacagcattaccacctgtgaatagtagcatcatcgctgctcccatcacggacccttctcagaagttccctcaatacctacctctttctgcagaggataatttaggtcctctacctgaaaactgggagatggcctatactgaaaatggagaagtctattttatagaccataacacgaaaacaacatcttggttagaccctcggtgcctaaacaagcagcagaagccactggaagagtgtgaagatgatgaaggggtacacaccgaggagctggacagtgaactagaactgcctgctggttgggaaaagattgaagaccctgtctatggtatctactatgtagaccacatcaacaggaagacacaatatgagaacccggttctagaagccaaacggaagaagcagcttgagcagcagcagcagcagcaacagcagcagcaacagcagcagcagcagcagcagcagcagcagacagaagaatggacagaagatcactcagcccttgtgcctcctgttattccaaaccaccctccaagcaatccagagccagccagagaagttccacttcagggcaaacccttttttacacgaaacccttctgagttgaaaggcaagttcattcacacaaagctgcggaaaagcagtcgtggctttggcttcacggtggttggaggggatgaacctgatgagtttctccagatcaagagcttggtcctagatggtcctgctgcattggatggcaagatggaaacaggggatgtgattgtaagtgtgaatgacacctgtgttttgggacacacacatgctcaagttgtgaagatcttccagtccatccccattggtgccagcgtggaccttgaactctgccgaggttatccattgccttttgatccagatgaccccaatacaagtttagtgacctcggtagccattttggataaagaaccaattattgtgaatgggcaagagacctatgattcaccagctagccacagtagtaaaacaggcaaagtcaatggcatgaaggatgccaggccaagcagcccagcggacgtggcttcaaatagttctcatggttatcctaatgacactgtttctttggcttcctccatagccactcagccagaactcataactgttcatattgtcaaagggccaatgggctttggttttactatcgcagacagtcctggtgggggtggccaaagagtgaaacagattgttgacagcccaaggtgccgaggcctgaaagaaggggatctcatagtggaagttaataagaagaacgtgcaggccctaactcacaaccaagtggtggatatgctggttgagtgtcctaagggaagtgaggtcacattgttggtgcaacgaggagggctgccagttcccaagaagagcccaaagtcgcaaccactggaaaggaaagacagccagaatagttctcagcacagtgtttccagccaccgaagcctgcacacagcatccccaagccacagcacacaggtgctccccgagttcccacctgcagaggcccaagctccagatcaaactgacagctctggccagaaaaaaccagatccttttaaaatctgggcccagtccaggagcatgtatgaaaaccgacttccagattaccaggaacaggacatcttcctctggagaaaagagactggatttggatttaggattctgggtggaaatgaaccaggggaacctatttatattggtcacatcgtaccactgggtgctgctgatactgacggccgcctgaggtctggagatgaattaatctgtgtggatgggacgccagtaattggaaaatcacaccagcttgtggtccagcttatgcaacaagctgccaagcaaggccacgtcaatctcacggtgcggcgtaaagtggtttttgcggtgcccaaaaccgagaacgaggtgccctcgccagcctcctctcatcacagtagcaaccagccggcctcgctgacagaagagaagcgcactccgcagggcagccagaactcgctgaacacggtgagctcgggcagcggcagcaccagcggcatcggcagtggcggcggcgggggcagcggcgtggtcagcaccgtggtgcagccctacgacgtggagatccggcgcggggagaacgagggcttcggcttcgtcatcgtgtcctcggtgagcaggcccgaagcaggcacgacctttgagtcctcgaatgccaccttgctgaccaatgcagagaagattgccaccatcaccaccacacacaccccttctcagcaagggacccaggagacaaggaataccaccaaaccaaagcaggaatctcaatttgagttcaaagcaccccaagcaacacaggagcaagatttttacactgtggaactggaaagaggagccaagggatttggctttagccttcgaggaggccgagagtataacatggacctctatgttctgcgcttagcagaggacggtcctgcggagaggtgtggaaagatgaggattggtgatgaaattttagagatcaatggtgagaccaccaaaaacatgaagcattctcgagctatagaactgattaagaatggtggccgcagagttcgtctgtttctgaagcggggagacggctcagtaccagaatatggtgggtcaaactatgaaaacattccttccttccctggcatgactccatgaatttgtctccagaacggcagcaggaaagtcttttttgtttcccctattcaccagtgtcttaccagcctctcgcaccgaccggaggcgcgcacgctcccccgagcgcaggagagagcggtccctggacaaaaggaacagagaggacagagccagccaccgagaaagggaagaggcgaatctgaaacaggatgccggcagaagttccagacatcccccggagcagagaaggcgaccttacaaagaatgtagcaccgacctcagtatctgagacgctgagtcacattccaacctttaccgtgtcaaaggttctaagaggaaagtcacaaacctgaaattatttagtttcttacctaatgaagcatctgacacctgatgatcctatgaataacaacaaacattttatgcatttgaaatcttataagaaaaaatatatatgaaaagtattgtgcctgatgtatcatattaaagaaagtatttttaaatgcatacttttttggaaattatttgccaaatgctggcccaaagggatataaattttgtttctacgtaacctgtagaatcgtcaagaattgttcccgttttggggcaatctttttctctcctggttaaatggggctgttgatcattttctctacgtaagggaatttattgattaagtttaattaatttgatatagactgtcatgtagtgatgtagtgctatactgtagtcggaagtttttcttaaaagcaaagagcaaaaatgcaaagttttatttgtaaaagctgaggacccttggggatggattaggtttgccgatgatcctaaaagtaagcaaactgtatgacaagactactattgcaaatgaaggatatttatagctaaactgcgcagcacaaagaagttttatattgtgagttatagttggttcagaaaacagtttgtactctccctggcccaggaaggcacacagacaaaaatgtcggccacttttactcaaatacagcccaagcacagacagtcaggttcgtgatcatcaccaacatctgataaaatctcattgaaggcaatgccatcacagctttgctcaattactacgaggaagagacaacaagcatctttcgtgttgtctcgtctgattggaggctgaatagtagatggaatggggggacagtgtgcctggtgtgaggaagacgtaagatccccaatttggaaagcatgcccccctcccttttagtagaagcccatggttgccctttgccaaactggggaggaggcaatgagccttggtggaaggaacctctctgttgatatttaaagaagtgagggctgtgggtattcattgttagaaatgccaatttcactttgaaaccatagtccaagtctctaggttggtagaagggaaaggaaggaagtggtcccagtgattctagatctggttgggaaacttctgcctcatgactctgtcctttgagtcctttggacagcagcacaaaacataacaatttttatttttaaacagacccattctttttgatcccacaggagctgtggttgggtcggccgtagccccgggatgtggtttaagtggattactgcctagctgagccaaaatgtttgcttgtacctgttggaccactacagcaaaccgctgcttacagtgcattgtgtatttctgtagtactgttttgcattttccatagagacagaaaactttgcaagtcaatcactgttgttcccatggtactgtaagaaaaaaaaaaaggaaaaagaaaaaaaaaaagaaaaccagccaatcattgcgtgtacagagctaaaaattgtaattaatagagcctgttgggaaaaaaaagaaaacaactgttgcctttttttcttgtataaaagagaatttatgacaaaatttagctgtgaggaatgtgatacgtgtttatatttctgaatatggaacaaattgattcatggggatatattttaatgtaaactaaatcaggtatgtaaagttgttttaaaatgggagactatataagtaattctctaaagctttagttggtttgaatatcatcatttcctccatggtgagcctgcttgtgaattattaagcacttgtttgcattctctgttcttcactcatttatttcttgcagtgtgctatggacttaatgctctttctgtattgatgaaaagcagtatgtgggccaatctttttataaaacactatgcatatataaatattacattgttcatagctttatttgacttatgggtttatacataacattagaatgagtagctgtagttgtgtggacatttataaaacaagttcctttcctggaacagacacaatatacattctgtagctaaaaaggagggaaaagtctgtgaatgctatttttattattaaagttttccatacaaagcatacattgagctgtagtaaggctgaggaagagtacaactgaataatgatgttctttttcatcaagttcctaagagctgacttggagattttattcccagggctccactgctaggattcttctcactagttctaacaaaatctgtgatgttaaatgactgatgctctcaattgtgatccagagttttaaataaatgaaatcaaggtggattttgggaatatatcctgaagttaacatcttgatgtccttcttgttgtaagatgatatttggcaatttaaaatctatgtgctacccacctgggcttgtctcaatccgtggactttttggtgtggcagtttcacctgaattccacacatcagatttgtttggaaatattgtactgtacagggactatgcattatgcagaaagatatagttttctttgaactgctgtaaccttaaattggaaactgattcttgtgagcctactttccttaatcccgccgcccccctcccccacttaatgtaaatgtcttgatgagagataatggatgagtattttgtatgatgaaatcaaacgatttaggaatttgtctccctccgttacacagttgatgcctgaaagaatgttgggggggaggactcaacaccctaattgtattttttaagtttcttttgtgaaagattttttaatgcatttttactgtaaaaatacatggaaatgtatgcattccacaacca

SEQ ID NO: 13823 - DNA, 4697 bp, Homo sapiens
ctggaacgagtttttgagatgagatgaaaactaactatctcgcttccctggcccaaatagaaatatgcccaaaaccgagaacgaggtgccctcgccagcctcctctcatcacagtagcaaccagccggcctcgctgacagaagagaagcgcactccgcagggcagccagaactcgctgaacacggtgagctcgggcagcggcagcaccagcggcatcggcagtggcggcggcgggggcagcggcgtggtcagcaccgtggtgcagccctacgacgtggagatccggcgcggggagaacgagggcttcggcttcgtcatcgtgtcctcggtgagcaggcccgaagcaggcacgacctttgcaggcaatgcatgtgtggctatgcctcacaaaataggtcggattattgaggggagccctgctgaccgctgtggcaagctgaaagtaggagaccggatcttggcagtaaatggatgttccatcaccaacaaatcccattcagacattgtgaacctaatcaaggaagcgggaaacacagttaccctccgcatcattcctggggatgagtcctcgaatgccaccttgctgaccaatgcagagaagattgccaccatcaccaccacacacaccccttctcagcaagggacccaggagacaaggaataccaccaaaccaaagcaggaatctcaatttgagttcaaagcaccccaagcaacacaggagcaagatttttacactgtggaactggaaagaggagccaagggatttggctttagccttcgaggaggccgagagtataacatggacctctatgttctgcgcttagcagaggacggtcctgcggagaggtgtggaaagatgaggattggtgatgaaattttagagatcaatggtgagaccaccaaaaacatgaagcattctcgagctatagaactgattaagaatggtggccgcagagttcgtctgtttctgaagcggggagacggctcagtaccagaatatgcgatgatacctcctaatatcgctgcatgtatgagaaatgaaaagctcggggaggcttgcttctaccttatgggccataatcaaactacgaccccagcagcgaccgccacggccccgccaccggtccacaaggtgttccggaagtgagggccgggcccgaccgccggcagcatccgtcattggagtccagttacccacccgatcttcacaaatcatcaccacatggggaaaagcgggcacacgcaagggatccgaaaggcagcagagagtatagcagacaacccaatgaacaccacacctggaatgggacttcgaggaaacccgacagcggggcatgccgacccaaggaccgggcgccggagggacggagggacgcgcaggccgagcgcgcggcagccgccaacggccccaagaggcggtccccagagaagcggagggagggcacccgcagcgccgacaacactttggagaggagggagaagcacgagaagagacgagacgtctctccggagcggaggcgagagcggtcacccacccgcaggagagacggctcccccagccggcggagacggtctctggagagactcctggagcagaggaggtcccccgagcgcaggagagggggctcgcccgagcgcagggccaagtccaccgaccggaggcgcgcacgctcccccgagcgcaggagagagcggtccctggacaaaaggaacagagaggacagagccagccaccgagaaagggaagaggcgaatctgaaacaggatgccggcagaagttccagacatcccccggagcagagaaggcgaccttacaaagaatgtagcaccgacctcagtatctgagacgctgagtcacattccaacctttaccgtgtcaaaggttctaagaggaaagtcacaaacctgaaattatttagtttcttacctaatgaagcatctgacacctgatgatcctatgaataacaacaaacattttatgcatttgaaatcttataagaaaaaatatatatgaaaagtattgtgcctgatgtatcatattaaagaaagtatttttaaatgcatacttttttggaaattatttgccaaatgctggcccaaagggatataaattttgtttctacgtaacctgtagaatcgtcaagaattgttcccgttttggggcaatctttttctctcctggttaaatggggctgttgatcattttctctacgtaagggaatttattgattaagtttaattaatttgatatagactgtcatgtagtgatgtagtgctatactgtagtcggaagtttttcttaaaagcaaagagcaaaaatgcaaagttttatttgtaaaagctgaggacccttggggatggattaggtttgccgatgatcctaaaagtaagcaaactgtatgacaagactactattgcaaatgaaggatatttatagctaaactgcgcagcacaaagaagttttatattgtgagttatagttggttcagaaaacagtttgtactctccctggcccaggaaggcacacagacaaaaatgtcggccacttttactcaaatacagcccaagcacagacagtcaggttcgtgatcatcaccaacatctgataaaatctcattgaaggcaatgccatcacagctttgctcaattactacgaggaagagacaacaagcatctttcgtgttgtctcgtctgattggaggctgaatagtagatggaatggggggacagtgtgcctggtgtgaggaagacgtaagatccccaatttggaaagcatgcccccctcccttttagtagaagcccatggttgccctttgccaaactggggaggaggcaatgagccttggtggaaggaacctctctgttgatatttaaagaagtgagggctgtgggtattcattgttagaaatgccaatttcactttgaaaccatagtccaagtctctaggttggtagaagggaaaggaaggaagtggtcccagtgattctagatctggttgggaaacttctgcctcatgactctgtcctttgagtcctttggacagcagcacaaaacataacaatttttatttttaaacagacccattctttttgatcccacaggagctgtggttgggtcggccgtagccccgggatgtggtttaagtggattactgcctagctgagccaaaatgtttgcttgtacctgttggaccactacagcaaaccgctgcttacagtgcattgtgtatttctgtagtactgttttgcattttccatagagacagaaaactttgcaagtcaatcactgttgttcccatggtactgtaagaaaaaaaaaaaggaaaaagaaaaaaaaaaagaaaaccagccaatcattgcgtgtacagagctaaaaattgtaattaatagagcctgttgggaaaaaaaagaaaacaactgttgcctttttttcttgtataaaagagaatttatgacaaaatttagctgtgaggaatgtgatacgtgtttatatttctgaatatggaacaaattgattcatggggatatattttaatgtaaactaaatcaggtatgtaaagttgttttaaaatgggagactatataagtaattctctaaagctttagttggtttgaatatcatcatttcctccatggtgagcctgcttgtgaattattaagcacttgtttgcattctctgttcttcactcatttatttcttgcagtgtgctatggacttaatgctctttctgtattgatgaaaagcagtatgtgggccaatctttttataaaacactatgcatatataaatattacattgttcatagctttatttgacttatgggtttatacataacattagaatgagtagctgtagttgtgtggacatttataaaacaagttcctttcctggaacagacacaatatacattctgtagctaaaaaggagggaaaagtctgtgaatgctatttttattattaaagttttccatacaaagcatacattgagctgtagtaaggctgaggaagagtacaactgaataatgatgttctttttcatcaagttcctaagagctgacttggagattttattcccagggctccactgctaggattcttctcactagttctaacaaaatctgtgatgttaaatgactgatgctctcaattgtgatccagagttttaaataaatgaaatcaaggtggattttgggaatatatcctgaagttaacatcttgatgtccttcttgttgtaagatgatatttggcaatttaaaatctatgtgctacccacctgggcttgtctcaatccgtggactttttggtgtggcagtttcacctgaattccacacatcagatttgtttggaaatattgtactgtacagggactatgcattatgcagaaagatatagttttctttgaactgctgtaaccttaaattggaaactgattcttgtgagcctactttccttaatcccgccgcccccctcccccacttaatgtaaatgtcttgatgagagataatggatgagtattttgtatgatgaaatcaaacgatttaggaatttgtctccctccgttacacagttgatgcctgaaagaatgttgggggggaggactcaacaccctaattgtattttttaagtttcttttgtgaaagattttttaatgcatttttactgtaaaaatacatggaaatgtatgcattccacaacca

SEQ ID NO: 13824 - DNA, 4333 bp, Homo sapiens
gacatacatgacccacatcagagaagatcttaaaatggtttattaaactcctaattgtctagaaattcaagtcagactgcttgaaatggggacagagaagtcacacttgttattcagatacagggcttctgcacacctcctggctggaggatgtcttctctggggtcttcatttctttatgctctgtccctctttgcagagtcctcgaatgccaccttgctgaccaatgcagagaagattgccaccatcaccaccacacacaccccttctcagcaagggacccaggagacaaggaataccaccaaaccaaagcaggaatctcaatttgagttcaaagcaccccaagcaacacaggagcaagatttttacactgtggaactggaaagaggagccaagggatttggctttagccttcgaggaggccgagagtataacatggacctctatgttctgcgcttagcagaggacggtcctgcggagaggtgtggaaagatgaggattggtgatgaaattttagagatcaatggtgagaccaccaaaaacatgaagcattctcgagctatagaactgattaagaatggtggccgcagagttcgtctgtttctgaagcggggagacggctcagtaccagaatatgcgatgatacctcctaatatcgctgcatgtatgagaaatgaaaagctcggggaggcttgcttctaccttatgggccataatcaaactacgaccccagcagcgaccgccacggccccgccaccggtccacaaggtgttccggaagtgagggccgggcccgaccgccggcagcatccgtcattggagtccagttacccacccgatcttcacaaatcatcaccacatggggaaaagcgggcacacgcaagggatccgaaaggcagcagagagtatagcagacaacccaatgaacaccacacctggaatgggacttcgaggaaacccgacagcggggcatgccgacccaaggaccgggcgccggagggacggagggacgcgcaggccgagcgcgcggcagccgccaacggccccaagaggcggtccccagagaagcggagggagggcacccgcagcgccgacaacactttggagaggagggagaagcacgagaagagacgagacgtctctccggagcggaggcgagagcggtcacccacccgcaggagagacggctcccccagccggcggagacggtctctggagagactcctggagcagaggaggtcccccgagcgcaggagagggggctcgcccgagcgcagggccaagtccaccgaccggaggcgcgcacgctcccccgagcgcaggagagagcggtccctggacaaaaggaacagagaggacagagccagccaccgagaaagggaagaggcgaatctgaaacaggatgccggcagaagttccagacatcccccggagcagagaaggcgaccttacaaagaatgtagcaccgacctcagtatctgagacgctgagtcacattccaacctttaccgtgtcaaaggttctaagaggaaagtcacaaacctgaaattatttagtttcttacctaatgaagcatctgacacctgatgatcctatgaataacaacaaacattttatgcatttgaaatcttataagaaaaaatatatatgaaaagtattgtgcctgatgtatcatattaaagaaagtatttttaaatgcatacttttttggaaattatttgccaaatgctggcccaaagggatataaattttgtttctacgtaacctgtagaatcgtcaagaattgttcccgttttggggcaatctttttctctcctggttaaatggggctgttgatcattttctctacgtaagggaatttattgattaagtttaattaatttgatatagactgtcatgtagtgatgtagtgctatactgtagtcggaagtttttcttaaaagcaaagagcaaaaatgcaaagttttatttgtaaaagctgaggacccttggggatggattaggtttgccgatgatcctaaaagtaagcaaactgtatgacaagactactattgcaaatgaaggatatttatagctaaactgcgcagcacaaagaagttttatattgtgagttatagttggttcagaaaacagtttgtactctccctggcccaggaaggcacacagacaaaaatgtcggccacttttactcaaatacagcccaagcacagacagtcaggttcgtgatcatcaccaacatctgataaaatctcattgaaggcaatgccatcacagctttgctcaattactacgaggaagagacaacaagcatctttcgtgttgtctcgtctgattggaggctgaatagtagatggaatggggggacagtgtgcctggtgtgaggaagacgtaagatccccaatttggaaagcatgcccccctcccttttagtagaagcccatggttgccctttgccaaactggggaggaggcaatgagccttggtggaaggaacctctctgttgatatttaaagaagtgagggctgtgggtattcattgttagaaatgccaatttcactttgaaaccatagtccaagtctctaggttggtagaagggaaaggaaggaagtggtcccagtgattctagatctggttgggaaacttctgcctcatgactctgtcctttgagtcctttggacagcagcacaaaacataacaatttttatttttaaacagacccattctttttgatcccacaggagctgtggttgggtcggccgtagccccgggatgtggtttaagtggattactgcctagctgagccaaaatgtttgcttgtacctgttggaccactacagcaaaccgctgcttacagtgcattgtgtatttctgtagtactgttttgcattttccatagagacagaaaactttgcaagtcaatcactgttgttcccatggtactgtaagaaaaaaaaaaaggaaaaagaaaaaaaaaaagaaaaccagccaatcattgcgtgtacagagctaaaaattgtaattaatagagcctgttgggaaaaaaaagaaaacaactgttgcctttttttcttgtataaaagagaatttatgacaaaatttagctgtgaggaatgtgatacgtgtttatatttctgaatatggaacaaattgattcatggggatatattttaatgtaaactaaatcaggtatgtaaagttgttttaaaatgggagactatataagtaattctctaaagctttagttggtttgaatatcatcatttcctccatggtgagcctgcttgtgaattattaagcacttgtttgcattctctgttcttcactcatttatttcttgcagtgtgctatggacttaatgctctttctgtattgatgaaaagcagtatgtgggccaatctttttataaaacactatgcatatataaatattacattgttcatagctttatttgacttatgggtttatacataacattagaatgagtagctgtagttgtgtggacatttataaaacaagttcctttcctggaacagacacaatatacattctgtagctaaaaaggagggaaaagtctgtgaatgctatttttattattaaagttttccatacaaagcatacattgagctgtagtaaggctgaggaagagtacaactgaataatgatgttctttttcatcaagttcctaagagctgacttggagattttattcccagggctccactgctaggattcttctcactagttctaacaaaatctgtgatgttaaatgactgatgctctcaattgtgatccagagttttaaataaatgaaatcaaggtggattttgggaatatatcctgaagttaacatcttgatgtccttcttgttgtaagatgatatttggcaatttaaaatctatgtgctacccacctgggcttgtctcaatccgtggactttttggtgtggcagtttcacctgaattccacacatcagatttgtttggaaatattgtactgtacagggactatgcattatgcagaaagatatagttttctttgaactgctgtaaccttaaattggaaactgattcttgtgagcctactttccttaatcccgccgcccccctcccccacttaatgtaaatgtcttgatgagagataatggatgagtattttgtatgatgaaatcaaacgatttaggaatttgtctccctccgttacacagttgatgcctgaaagaatgttgggggggaggactcaacaccctaattgtattttttaagtttcttttgtgaaagattttttaatgcatttttactgtaaaaatacatggaaatgtatgcattccacaacca

SEQ ID NO: 13825 - DNA, 2601 bp, Homo sapiens
ggacgcgtgggtcgacccacgcgtcgcgtaacctgtagaatcgtcaagaattgttcccgttttggggcaatctttttctctcctggttaaatggggctgttgatcattttctctacgtaagggaatttattgattaagtttaattaatttgatatagactgtcatgtagtgatgtagtgctatactgtagtcggaagtttttcttaaaagcaaagagcaaaaatgcaaagttttatttgtaaaagctgaggacccttggggatggattaggtttgccgatgatcctaaaagtaagcaaactgtatgacaagactactattgcaaatgaaggatatttatagctaaactgcgcagcacaaagaagttttatattgtgagttatagttggttcagaaaacagtttgtactctccctggcccaggaaggcacacagacaaaaatgtcggccacttttactcaaatacagcccaagcacagacagtcaggttcgtgatcatcaccaacatctgataaaatctcattgaaggcaatgccatcacagctttgctcaattactacgaggaagagacaacaagcatctttcgtgttgtctcgtctgattggaggctgaatagtagatggaatggggggacagtgtgcctggtgtgaggaagacgtaagatccccaatttggaaagcatgcccccctcccttttagtagaagcccatggttgccctttgccaaactggggaggaggcaatgagccttggtggaaggaacctctctgttgatatttaaagaagtgagggctgtgggtattcattgttagaaatgccaatttcactttgaaaccatagtccaagtctctaggttggtagaagggaaaggaaggaagtggtcccagtgattctagatctggttgggaaacttctgcctcatgactctgtcctttgagtcctttggacagcagcacaaaacataacaatttttatttttaaacagacccattctttttgatcccacaggagctgtggttgggtcggccgtagccccgggatgtggtttaagtggattactgcctagctgagccaaaatgtttgcttgtacctgttggaccactacagcaaaccgctgcttacagtgcattgtgtatttctgtagtactgttttgcattttccatagagacagaaaactttgcaagtcaatcactgttgttcccatggtactgtaagaaaaaaaaaaaggaaaaagaaaaaaaaaaagaaaaccagccaatcattgcgtgtacagagctaaaaattgtaattaatagagcctgttgggaaaaaaaagaaaacaactgttgcctttttttcttgtataaaagagaatttatgacaaaatttagctgtgaggaatgtgatacgtgtttatatttctgaatatggaacaaattgattcatggggatatattttaatgtaaactaaatcaggtatgtaaagttgttttaaaatgggagactatataagtaattctctaaagctttagttggtttgaatatcatcatttcctccatggtgagcctgcttgtgaattattaagcacttgtttgcattctctgttcttcactcatttatttcttgcagtgtgctatggacttaatgctctttctgtattgatgaaaagcagtatgtgggccaatctttttataaaacactatgcatatataaatattacattgttcatagctttatttgacttatgggtttatacataacattagaatgagtagctgtagttgtgtggacatttataaaacaagttcctttcctggaacagacacaatatacattctgtagctaaaaaggagggaaaagtctgtgaatgctatttttattattaaagttttccatacaaagcatacattgagctgtagtaaggctgaggaagagtacaactgaataatgatgttctttttcatcaagttcctaagagctgacttggagattttattcccagggctccactgctaggattcttctcactagttctaacaaaatctgtgatgttaaatgactgatgctctcaattgtgatccagagttttaaataaatgaaatcaaggtggattttgggaatatatcctgaagttaacatcttgatgtccttcttgttgtaagatgatatttggcaatttaaaatctatgtgctacccacctgggcttgtctcaatccgtggactttttggtgtggcagtttcacctgaattccacacatcagatttgtttggaaatattgtactgtacagggactatgcattatgcagaaagatatagttttctttgaactgctgtaaccttaaattggaaactgattcttgtgagcctactttccttaatcccgccgcccccctcccccacttaatgtaaatgtcttgatgagagataatggatgagtattttgtatgatgaaatcaaacgatttaggaatttgtctccctccgttacacagttgatgcctgaaagaatgttgggggggaggactcaacaccctaattgtattttttaagtttcttttgtgaaagattttttaatgcatttttactgtaaaaatacatggaaatgtatgcattccacaacca

SEQ ID NO: 13826 - DNA, 5559 bp, Homo sapiens
cggaatgcaaacaaagctcgcgggcgcctgtgcggggctcgcggggaagcccagaaagtttgttttatgatggcttgagtgcgcgagcgtgtgcaggggagcgaggctgccaagtttctctctcctgttttgtgatttggggagaggtgtttctcccatgaacaagcggaggcttgggggctcgtgctgtggggggcacctgtctctcgttttatttttttggaggaggggtgtaactcatcatgtccaaagtgatccagaagaagaaccactggactagcagggttcacgaatgcaccgtgaagcggggaccccagggcgagctgggggtgacggtgctgggaggcgcggagcacggggagtttccgtacgtcggagcggtggcggcggtcgaggcagcggggcttcccggcggcggcgagggcccgaggctgggcgaaggggagctgcttctggaggtgcagggggtccgggtgtccggcttgccccgctatgacgtgctgggggtcatcgacagctgcaaggaggccgtcaccttcaaggccgtcagacaaggaggaaggctgaacaaggacctgcgacattttctcaatcagcgattccagaaggggtttcctgatcatgagctccagcagaccataagggataacctttaccgccatgctgtgccttgcacaacccgatctcccagagaaggagaagtgcctggcgtggactataactttctgactgtgaaggagttcttggacctcgagcagagtgggactcttctggaagtcggcacctatgaaggaaactattatgggacacccaagcctcctagccagccagtcagtgggaaagtgatcacgacggatgccttgcacagccttcagtctggctctaagcagtcgaccccgaagcgaaccaagtcctacaatgatatgcaaaatgctggcatagtccacgcggagaatgaggaggaggatgacgttcctgaaatgaacagcagctttacagccgattctggtgaacaagaggagcacactctccaagaaacagcattaccacctgtgaatagtagcatcatcgctgctcccatcacggacccttctcagaagttccctcaatacctacctctttctgcagaggataatttaggtcctctacctgaaaactgggagatggcctatactgaaaatggagaagtctattttatagaccataacacgaaaacaacatcttggttagaccctcggtgcctaaacaagcagcagaagccactggaagagtgtgaagatgatgaaggggtacacaccgaggagctggacagtgaactagaactgcctgctggttgggaaaagattgaagaccctgtctatggtatctactatgtagaccacatcaacaggaagacacaatatgagaacccggttctagaagccaaacggaagaagcagcttgagcagcagcagcagcagcaacagcagcagcaacagcagcagcagcagcagcagcagcagcagacagaagaatggacagaagatcactcagcccttgtgcctcctgttattccaaaccaccctccaagcaatccagagccagccagagaagttccacttcagggcaaacccttttttacacgaaacccttctgagttgaaaggcaagttcattcacacaaagctgcggaaaagcagtcgtggctttggcttcacggtggttggaggggatgaacctgatgagtttctccagatcaagagcttggtcctagatggtcctgctgcattggatggcaagatggaaacaggggatgtgattgtaagtgtgaatgacacctgtgttttgggacacacacatgctcaagttgtgaagatcttccagtccatccccattggtgccagcgtggaccttgaactctgccgaggttatccattgccttttgatccagatgaccccaatacaagtttagtgacctcggtagccattttggataaagaaccaattattgtgaatgggcaagagacctatgattcaccagctagccacagtagtaaaacaggcaaagtcaatggcatgaaggatgccaggccaagcagcccagcggacgtggcttcaaatagttctcatggttatcctaatgacactgtttctttggcttcctccatagccactcagccagaactcataactgttcatattgtcaaagggccaatgggctttggttttactatcgcagacagtcctggtgggggtggccaaagagtgaaacagattgttgacagcccaaggtgccgaggcctgaaagaaggggatctcatagtggaagttaataagaagaacgtgcaggccctaactcacaaccaagtggtggatatgctggttgagtgtcctaagggaagtgaggtcacattgttggtgcaacgaggagggctgccagttcccaagaagagcccaaagtcgcaaccactggaaaggaaagacagccagaatagttctcagcacagtgtttccagccaccgaagcctgcacacagcatccccaagccacagcacacaggtgctccccgagttcccacctgcagaggcccaagctccagatcaaactgacagctctggccagaaaaaaccagatccttttaaaatctgggcccagtccaggagcatgtatgaaaaccgacctatgtcaccttcacctgcgtcgggattgagcaagggtgagagagagagagaaatcaattccacgaattttggagaatgtccgattccagattaccaggaacaggacatcttcctctggagaaaagagactggatttggatttaggattctgggtggaaatgaaccaggggaacctatttatattggtcacatcgtaccactgggtgctgctgatactgacggccgcctgaggtctggagatgaattaatctgtgtggatgggacgccagtaattggaaaatcacaccagcttgtggtccagcttatgcaacaagctgccaagcaaggccacgtcaatctcacggtgcggcgtaaagtggtttttgcggtgcccaaaaccgagaacgaggtgccctcgccagcctcctctcatcacagtagcaaccagccggcctcgctgacagaagagaagcgcactccgcagggcagccagaactcgctgaacacggtgagctcgggcagcggcagcaccagcggcatcggcagtggcggcggcgggggcagcggcgtggtcagcaccgtggtgcagccctacgacgtggagatccggcgcggggagaacgagggcttcggcttcgtcatcgtgtcctcggtgagcaggcccgaagcaggcacgacctttgcaggcaatgcatgtgtggctatgcctcacaaaataggtcggattattgaggggagccctgctgaccgctgtggcaagctgaaagtaggagaccggatcttggcagtaaatggatgttccatcaccaacaaatcccattcagacattgtgaacctaatcaaggaagcgggaaacacagttaccctccgcatcattcctggggatgagtcctcgaatgccaccttgctgaccaatgcagagaagattgccaccatcaccaccacacacaccccttctcagcaagggacccaggagacaaggaataccaccaaaccaaagcaggaatctcaatttgagttcaaagcaccccaagcaacacaggagcaagatttttacactgtggaactggaaagaggagccaagggatttggctttagccttcgaggaggccgagagtataacatggacctctatgttctgcgcttagcagaggacggtcctgcggagaggtgtggaaagatgaggattggtgatgaaattttagagatcaatggtgagaccaccaaaaacatgaagcattctcgagctatagaactgattaagaatggtggccgcagagttcgtctgtttctgaagcggggagacggctcagtaccagaatatggagctgtggttgggtcggccgtagccccgggatgtggtttaagtggattactgcctagctgagccaaaatgtttgcttgtacctgttggaccactacagcaaaccgctgcttacagtgcattgtgtatttctgtagtactgttttgcattttccatagagacagaaaactttgcaagtcaatcactgttgttcccatggtactgtaagaaaaaaaaaaaggaaaaagaaaaaaaaaaagaaaaccagccaatcattgcgtgtacagagctaaaaattgtaattaatagagcctgttgggaaaaaaaagaaaacaactgttgcctttttttcttgtataaaagagaatttatgacaaaatttagctgtgaggaatgtgatacgtgtttatatttctgaatatggaacaaattgattcatggggatatattttaatgtaaactaaatcaggtatgtaaagttgttttaaaatgggagactatataagtaattctctaaagctttagttggtttgaatatcatcatttcctccatggtgagcctgcttgtgaattattaagcacttgtttgcattctctgttcttcactcatttatttcttgcagtgtgctatggacttaatgctctttctgtattgatgaaaagcagtatgtgggccaatctttttataaaacactatgcatatataaatattacattgttcatagctttatttgacttatgggtttatacataacattagaatgagtagctgtagttgtgtggacatttataaaacaagttcctttcctggaacagacacaatatacattctgtagctaaaaaggagggaaaagtctgtgaatgctatttttattattaaagttttccatacaaagcatacattgagctgtagtaaggctgaggaagagtacaactgaataatgatgttctttttcatcaagttcctaagagctgacttggagattttattcccagggctccactgctaggattcttctcactagttctaacaaaatctgtgatgttaaatgactgatgctctcaattgtgatccagagttttaaataaatgaaatcaaggtggattttgggaatatatcctgaagttaacatcttgatgtccttcttgttgtaagatgatatttggcaatttaaaatctatgtgctacccacctgggcttgtctcaatccgtggactttttggtgtggcagtttcacctgaattccacacatcagatttgtttggaaatattgtactgtacagggactatgcattatgcagaaagatatagttttctttgaactgctgtaaccttaaattggaaactgattcttgtgagcctactttccttaatcccgccgcccccctcccccacttaatgtaaatgtcttgatgagagataatggatgagtattttgtatgatgaaatcaaacgatttaggaatttgtctccctccgttacacagttgatgcctgaaagaatgttgggggggaggactcaacaccctaattgtattttttaagtttcttttgtgaaagattttttaatgcatttttactgtaaaaatacatggaaatgtatgcattccacaacca

SEQ ID NO: 13827 - DNA, 608 bp, Homo sapiens
gtaaggatccgctgaaaacttttgtctctccgttttcattcatcttgtttgatgttctcattggtctgggggcctggggagaagttcagaaaagagagggaagaaaaaaggggcatgaagggaagtgctttggagctcttgttgaccaaacgcaaaccaaagacaagatggaataaaaagggttttgcatgcccttgtcaagtctggaaatgtgttagtttgtctgtagtaatggagacaccaggcagtttctttgcaaatctggtgggtccattctttctaattatcaaaggaagtcttttgactgctttattgaattgtcactggcattacccaaaggagactaactgcagaaactgttcatatgcaggggcttacaaatgaaaattggacaaggttttcttagctctatttgatttagcctcactcaaaaaaagtgatattaatattgggaaaatggttctaccttactgccgcctaaaaacttaattctaataaaatctgcctgaagtaaggaagaaaaccattttgggggaagtagtttagaaacttcaatgcctctaagaagaggtggcctcagaggacacagaagagagaaattttataat

SEQ ID NO: 13828 - DNA, 458 bp, Homo sapiens
aataaaagtaatattaatattttaattagcagagttttatggaaagagagtttttaggtagctaccaaagaagaatagggtatataatgaagggagaaaagtaatttatatctgcaaaggggaaaaagagagtgagtcatcaataggccacagataaacatctggaaactaagcaagaaatactctttccaccatttaagaattgttgcagtgcttagcacaatgtcttgtacacagtgggtgctcaataaatgtttgcggcatgcctgcagacatgaatgaatgaattgttcccagagatgtgaaggctattgatgtaacagtaaacataggagagcaatgtttcatccatcgttcaattactcaacagatttatattggtcacatcgtaccactgggtgctgctgatactgacggccgcctgaggtctggagatgaattaatctgtgtggatggga

SEQ ID NO: 13829 - DNA, 369 bp, Homo sapiens
tcatgactgatttttgtcagttctttaatgatctatgtctcgggtatggagaacattcagtcagccagacgctgaaagccacaagtactagtttttaaccctaactacgtgcagttatccttaagttaacagattcagttggctttgagtctgactgctttaacagttgtttgcttgttgtgactaatgaggtctcgagtgtgggtgggaacggggacaggagccgagggaccttcgtacccaactgttgctctcgtttattttcctggcagaccccagcagcgaccgccacggccccgccaccggtccacaaggtgttccggaagtgagggccgggcccgaccgccggcagcatccgtcattggagtc

SEQ ID NO: 13830 - DNA, 281 bp, Homo sapiens
cagtagcaaccagccggcctcgctgacagaagagaagcgcactccgcagggcagccagaactcgctgaacacggtgagctcgggcagcggcagcaccagcggcatcggcagtggcggcggcgggggcagcggcgtggtcagcaccgtggtgcagccctacgacgtggagatccggcgcggggagaacgagggcttcggcttcgtcatcgtgtcctcggtgagcaggcccgaagcaggcacgacctttggtgagtgctgaacgtgaaattacccagggtttc

SEQ ID NO: 13831 - DNA, 7659 bp, Homo sapiens
cggaatgcaaacaaagctcgcgggcgcctgtgcggggctcgcggggaagcccagaaagtttgttttatgatggcttgagtgcgcgagcgtgtgcaggggagcgaggctgccaagtttctctctcctgttttgtgatttggggagaggtgtttctcccatgaacaagcggaggcttgggggctcgtgctgtggggggcacctgtctctcgttttatttttttggaggaggggtgtaactcatcatgtccaaagtgatccagaagaagaaccactggactagcagggttcacgaatgcaccgtgaagcggggaccccagggcgagctgggggtgacggtgctgggaggcgcggagcacggggagtttccgtacgtcggagcggtggcggcggtcgaggcagcggggcttcccggcggcggcgagggcccgaggctgggcgaaggggagctgcttctggaggtgcagggggtccgggtgtccggcttgccccgctatgacgtgctgggggtcatcgacagctgcaaggaggccgtcaccttcaaggccgtcagacaaggaggaaggctgaacaaggacctgcgacattttctcaatcagcgattccagaaggggtttcctgatcatgagctccagcagaccataagggataacctttaccgccatgctgtgccttgcacaacccgatctcccagagaaggagaagtgcctggcgtggactataactttctgactgtgaaggagttcttggacctcgagcagagtgggactcttctggaagtcggcacctatgaaggaaactattatgggacacccaagcctcctagccagccagtcagtgggaaagtgatcacgacggatgccttgcacagccttcagtctggctctaagcagtcgaccccgaagcgaaccaagtcctacaatgatatgcaaaatgctggcatagtccacgcggagaatgaggaggaggatgacgttcctgaaatgaacagcagctttacagccgattctggtgaacaagaggagcacactctccaagaaacagcattaccacctgtgaatagtagcatcatcgctgctcccatcacggacccttctcagaagttccctcaatacctacctctttctgcagaggataatttaggtcctctacctgaaaactgggagatggcctatactgaaaatggagaagtctattttatagaccataacacgaaaacaacatcttggttagaccctcggtgcctaaacaagcagcagaagccactggaagagtgtgaagatgatgaaggggtacacaccgaggagctggacagtgaactagaactgcctgctggttgggaaaagattgaagaccctgtctatggtatctactatgtagaccacatcaacaggaagacacaatatgagaacccggttctagaagccaaacggaagaagcagcttgagcagcagcagcagcagcaacagcagcagcaacagcagcagcagcagcagcagcagcagcagacagaagaatggacagaagatcactcagcccttgtgcctcctgttattccaaaccaccctccaagcaatccagagccagccagagaagttccacttcagggcaaacccttttttacacgaaacccttctgagttgaaaggcaagttcattcacacaaagctgcggaaaagcagtcgtggctttggcttcacggtggttggaggggatgaacctgatgagtttctccagatcaagagcttggtcctagatggtcctgctgcattggatggcaagatggaaacaggggatgtgattgtaagtgtgaatgacacctgtgttttgggacacacacatgctcaagttgtgaagatcttccagtccatccccattggtgccagcgtggaccttgaactctgccgaggttatccattgccttttgatccagatgaccccaatacaagtttagtgacctcggtagccattttggataaagaaccaattattgtgaatgggcaagagacctatgattcaccagctagccacagtagtaaaacaggcaaagtcaatggcatgaaggatgccaggccaagcagcccagcggacgtggcttcaaatagttctcatggttatcctaatgacactgtttctttggcttcctccatagccactcagccagaactcataactgttcatattgtcaaagggccaatgggctttggttttactatcgcagacagtcctggtgggggtggccaaagagtgaaacagattgttgacagcccaaggtgccgaggcctgaaagaaggggatctcatagtggaagttaataagaagaacgtgcaggccctaactcacaaccaagtggtggatatgctggttgagtgtcctaagggaagtgaggtcacattgttggtgcaacgaggagggctgccagttcccaagaagagcccaaagtcgcaaccactggaaaggaaagacagccagaatagttctcagcacagtgtttccagccaccgaagcctgcacacagcatccccaagccacagcacacaggtgctccccgagttcccacctgcagaggcccaagctccagatcaaactgacagctctggccagaaaaaaccagatccttttaaaatctgggcccagtccaggagcatgtatgaaaaccgacctatgtcaccttcacctgcgtcgggattgagcaagggtgagagagagagagaaatcaattccacgaattttggagaatgtccgattccagattaccaggaacaggacatcttcctctggagaaaagagactggatttggatttaggattctgggtggaaatgaaccaggggaacctatttatattggtcacatcgtaccactgggtgctgctgatactgacggccgcctgaggtctggagatgaattaatctgtgtggatgggacgccagtaattggaaaatcacaccagcttgtggtccagcttatgcaacaagctgccaagcaaggccacgtcaatctcacggtgcggcgtaaagtggtttttgcggtgcccaaaaccgagaacgaggtgccctcgccagcctcctctcatcacagtagcaaccagccggcctcgctgacagaagagaagcgcactccgcagggcagccagaactcgctgaacacggtgagctcgggcagcggcagcaccagcggcatcggcagtggcggcggcgggggcagcggcgtggtcagcaccgtggtgcagccctacgacgtggagatccggcgcggggagaacgagggcttcggcttcgtcatcgtgtcctcggtgagcaggcccgaagcaggcacgacctttgcaggcaatgcatgtgtggctatgcctcacaaaataggtcggattattgaggggagccctgctgaccgctgtggcaagctgaaagtaggagaccggatcttggcagtaaatggatgttccatcaccaacaaatcccattcagacattgtgaacctaatcaaggaagcgggaaacacagttaccctccgcatcattcctggggatgagtcctcgaatgccaccttgctgaccaatgcagagaagattgccaccatcaccaccacacacaccccttctcagcaagggacccaggagacaaggaataccaccaaaccaaagcaggaatctcaatttgagttcaaagcaccccaagcaacacaggagcaagatttttacactgtggaactggaaagaggagccaagggatttggctttagccttcgaggaggccgagagtataacatggacctctatgttctgcgcttagcagaggacggtcctgcggagaggtgtggaaagatgaggattggtgatgaaattttagagatcaatggtgagaccaccaaaaacatgaagcattctcgagctatagaactgattaagaatggtggccgcagagttcgtctgtttctgaagcggggagacggctcagtaccagaatatgcgatgatacctcctaatatcgctgcatgtatgagaaatgaaaagctcggggaggcttgcttctaccttatgggccataatcaaactacgaccccagcagcgaccgccacggccccgccaccggtccacaaggtgttccggaagtgagggccgggcccgaccgccggcagcatccgtcattggagtccagttacccacccgatcttcacaaatcatcaccacatggggaaaagcgggcacacgcaagggatccgaaaggcagcagagagtatagcagacaacccaatgaacaccacacctggaatgggacttcgaggaaacccgacagcggggcatgccgacccaaggaccgggcgccggagggacggagggacgcgcaggccgagcgcgcggcagccgccaacggccccaagaggcggtccccagagaagcggagggagggcacccgcagcgccgacaacactttggagaggagggagaagcacgagaagagacgagacgtctctccggagcggaggcgagagcggtcacccacccgcaggagagacggctcccccagccggcggagacggtctctggagagactcctggagcagaggaggtcccccgagcgcaggagagggggctcgcccgagcgcagggccaagtccaccgaccggaggcgcgcacgctcccccgagcgcaggagagagcggtccctggacaaaaggaacagagaggacagagccagccaccgagaaagggaagaggcgaatctgaaacaggatgccggcagaagttccagacatcccccggagcagagaaggcgaccttacaaagaatgtagcaccgacctcagtatctgagacgctgagtcacattccaacctttaccgtgtcaaaggttctaagaggaaagtcacaaacctgaaattatttagtttcttacctaatgaagcatctgacacctgatgatcctatgaataacaacaaacattttatgcatttgaaatcttataagaaaaaatatatatgaaaagtattgtgcctgatgtatcatattaaagaaagtatttttaaatgcatacttttttggaaattatttgccaaatgctggcccaaagggatataaattttgtttctacgtaacctgtagaatcgtcaagaattgttcccgttttggggcaatctttttctctcctggttaaatggggctgttgatcattttctctacgtaagggaatttattgattaagtttaattaatttgatatagactgtcatgtagtgatgtagtgctatactgtagtcggaagtttttcttaaaagcaaagagcaaaaatgcaaagttttatttgtaaaagctgaggacccttggggatggattaggtttgccgatgatcctaaaagtaagcaaactgtatgacaagactactattgcaaatgaaggatatttatagctaaactgcgcagcacaaagaagttttatattgtgagttatagttggttcagaaaacagtttgtactctccctggcccaggaaggcacacagacaaaaatgtcggccacttttactcaaatacagcccaagcacagacagtcaggttcgtgatcatcaccaacatctgataaaatctcattgaaggcaatgccatcacagctttgctcaattactacgaggaagagacaacaagcatctttcgtgttgtctcgtctgattggaggctgaatagtagatggaatggggggacagtgtgcctggtgtgaggaagacgtaagatccccaatttggaaagcatgcccccctcccttttagtagaagcccatggttgccctttgccaaactggggaggaggcaatgagccttggtggaaggaacctctctgttgatatttaaagaagtgagggctgtgggtattcattgttagaaatgccaatttcactttgaaaccatagtccaagtctctaggttggtagaagggaaaggaaggaagtggtcccagtgattctagatctggttgggaaacttctgcctcatgactctgtcctttgagtcctttggacagcagcacaaaacataacaatttttatttttaaacagacccattctttttgatcccacaggagctgtggttgggtcggccgtagccccgggatgtggtttaagtggattactgcctagctgagccaaaatgtttgcttgtacctgttggaccactacagcaaaccgctgcttacagtgcattgtgtatttctgtagtactgttttgcattttccatagagacagaaaactttgcaagtcaatcactgttgttcccatggtactgtaagaaaaaaaaaaaggaaaaagaaaaaaaaaaagaaaaccagccaatcattgcgtgtacagagctaaaaattgtaattaatagagcctgttgggaaaaaaaagaaaacaactgttgcctttttttcttgtataaaagagaatttatgacaaaatttagctgtgaggaatgtgatacgtgtttatatttctgaatatggaacaaattgattcatggggatatattttaatgtaaactaaatcaggtatgtaaagttgttttaaaatgggagactatataagtaattctctaaagctttagttggtttgaatatcatcatttcctccatggtgagcctgcttgtgaattattaagcacttgtttgcattctctgttcttcactcatttatttcttgcagtgtgctatggacttaatgctctttctgtattgatgaaaagcagtatgtgggccaatctttttataaaacactatgcatatataaatattacattgttcatagctttatttgacttatgggtttatacataacattagaatgagtagctgtagttgtgtggacatttataaaacaagttcctttcctggaacagacacaatatacattctgtagctaaaaaggagggaaaagtctgtgaatgctatttttattattaaagttttccatacaaagcatacattgagctgtagtaaggctgaggaagagtacaactgaataatgatgttctttttcatcaagttcctaagagctgacttggagattttattcccagggctccactgctaggattcttctcactagttctaacaaaatctgtgatgttaaatgactgatgctctcaattgtgatccagagttttaaataaatgaaatcaaggtggattttgggaatatatcctgaagttaacatcttgatgtccttcttgttgtaagatgatatttggcaatttaaaatctatgtgctacccacctgggcttgtctcaatccgtggactttttggtgtggcagtttcacctgaattccacacatcagatttgtttggaaatattgtactgtacagggactatgcattatgcagaaagatatagttttctttgaactgctgtaaccttaaattggaaactgattcttgtgagcctactttccttaatcccgccgcccccctcccccacttaatgtaaatgtcttgatgagagataatggatgagtattttgtatgatgaaatcaaacgatttaggaatttgtctccctccgttacacagttgatgcctgaaagaatgttgggggggaggactcaacaccctaattgtattttttaagtttcttttgtgaaagattttttaatgcatttttactgtaaaaatacatggaaatgtatgcattccacaacca

SEQ ID NO: 13832 - DNA, 2436 bp, Homo sapiens
ggcacgagggcacggtgcccgctctaccccgccgcagcggctgggacgtacggagcccgcaagtcccggcccgaggtccgaggaggcgtcctccgcccggtggcccagagggaagcggggcacggcgtcatcatgcacagttgtatcgcgcccgccgcgcgtccccggagccgcccctgagcccgaccgcgagttcgagctcagggcccgcccggccgcaccatgagccacgggcccagcccccggctggccgagtccccgcagctgtccaagggcagcctcctgaccatcctgggcagcccgtcgccggagcgcatggggcctgccgactccttgccgcccacgccgcccagcggcacgccctcgcccgggccgccgcccgcactgcccctgccccccgcgcccgcgctgctggccgacggcgactgggagagccgcgaggagctgcggctgcgggagctggaggaggcgcgggcgcgggcggcgcagatggagaagaccatgcgctggtggtcggactgcactgccaattggcgcgagaaatggagcaaggtgcgcgctgagcgcaaccgcgcgcgcgaggaggtgcgccagctgcgccagcgcctggacgcgctcaccaaggagctggcgggcgcacggcgcgagcgccaagaggcgcagggcgagtgcgaggcacggggccgcgagctggcgcggctgaggggcgcccggggggtcgccgaccagacgcgcgacggccccgagccggaagcggagcgcgagccagtgcgtgacgtcgggtccgagaggccgccaggcagccaggaactggagctggtggagagcctgctgaagagcatgccagaggagtctgaggactgctgggaggcgcgcagcctgggggctgggggcccgcggggcagctcaggccgccaggagcgcagccggctaccctgggaggacacagctgccacggaggaggaggcctccaagttgaccgccctgcggctacggctggatgagtcccagaaggtgctgctcaaggagcgagaggataaactggcgttgagcaggaacattgagaagctagagggggagctcagccagtggaagatcaagtatgaggagctgagcaagaccaagcaggagatgctcaagcagctcagcatcctgaaggaggcgcaccaggacgagctgggccgcatgtctgaggacctggaagatgagctcggtgcacgctccagcatggaccggaaaatggccgagctgaggggcgagatggagcggctgcaggccgaaaacgctgcggagtggggccgccgggagcggctggagacagagaaactgggccttgagcgggagaacaagaagctgcgggcacaggtcggagacctggaggaggcgctggcccggcggcggcggcaaacagccagcgcactggactgcgacctgagggccagccaggccgcgctcttcgagaagaacaaggagctggcagacctgaagcatgtgcatggcaagctgaagaagcagttccaggagaaggtggcagagctggcacatgccaaccggcgggtggagcagcacgaggctgaggtgaagaagctgcggctgcgggtggaggagctcaagaaggagctggcccaggctgaggacgagctggacgaggcccacaaccaggcacgtaagctgcagcggtcgctggacgagcagacggagcagagcgagaacctgcaagtgcaactggagcacctgcagtccaggctccgcaggcagcagcagaacgctcccctcttcgggaagatccgcagtgctcgctttggcaccgaggaggccgaggatggaaccagtgacctggacgaggacgaggacctgcaaatccaggtggcctagagcttcctgtggctgggcaggatgggccgccccatacctgcccagggtccaggctaaccagccactcaaactgatgcagtgcctaggctcactctgggaccagtccctgccacagccgactttcttctctcccagggatggcgtcaacagtcccacctaccaacgccctgtggaaaggaagcctatgttttatatatatatatacacacacgcgcgcgcgcgcgcgcacacccagaagtctttggacccatttggttttataaatacaggacagctccaaggcccagtccagatgacctcacccacccaggacttcatgcagggctgggcatgttgggggcagttgttggagccccaccctgggctgcctctctaggcttcgctgttcatcatacaatgcagtgaacccagttatttgtaataaatgaagttcaagttcttggggcatctgaaagtatggcagatgtgggcgggggttgtgggggacggcatcggcctgcacctgacgctgaaccagagctcaggaatgtcaagtaacttaataaatgagtgaatgtgaag

SEQ ID NO: 13833 - DNA, 2314 bp, Homo sapiens
ggcacgagggcacggtgcccgctctaccccgccgcagcggctgggacgtacggagcccgcaagtcccggcccgaggtccgaggaggcgtcctccgcccggtggcccagagggaagcggggcacggcgtcatcatgcacagttgtatcgcgcccgccgcgcgtccccggagccgcccctgagcccgaccgcgagttcgagctcagggcccgcccggccgcaccatgagccacgggcccagcccccggctggccgagtccccgcagctgtccaagggcagcctcctgaccatcctgggcagcccgtcgccggagcgcatggggcctgccgactccttgccgcccacgccgcccagcggcacgccctcgcccgggccgccgcccgcactgcccctgccccccgcgcccgcgctgctggccgacggcgactgggagagccgcgaggagctgcggctgcgggagctggaggaggcgcgggcgcgggcggcgcagatggagaagaccatgcgctggtggtcggactgcactgccaattggcgcgagaaatggagcaaggtgcgcgctgagcgcaaccgcgcgcgcgaggaggtgcgccagctgcgccagcgcctggacgcgctcaccaaggagctggcgggcgcacggcgcgagcgccaagaggcgcagggcgagtgcgaggcacggggccgcgagctggcgcggctgaggggcgcccggggggtcgccgaccagacgcgcgacggccccgagccggaagcggagcgcgagccagtgcgtgacgtcgggtccgagaggccgccaggcagccaggaactggagctggtggagagcctgctgaagagcatgccagaggagtctgaggactgctgggaggcgcgcagcctgggggctgggggcccgcggggcagctcaggccgccaggagcgcagccggctaccctgggaggacacagctgccacggaggaggaggcctccaagttgaccgccctgcggctacggctggatgagtcccagaaggtgctgctcaaggagcgagaggataaactggcgttgagcaggaacattgagaagctagagggggagctcagccagtggaagatcaagtatgaggagctgagcaagaccaagcaggagatgctcaagcagctcagcatcctgaaggaggcgcaccaggacgagctgggccgcatgtctgaggacctggaagatgagctcggtgcacgctccagcatggaccggaaaatggccgagctgaggggcgagatggagcggctgcaggccgaaaacgctgcggagtggggccgccgggagcggctggagacagagaaactgggccttgagcgggagaacaagaagctgcgggcacaggtcggagacctggaggaggcgctggcccggcggcggcggcaaacagccagcgcactggactgcgacctgagggccagccaggccgcgctcttcgagaagaacaaggagctggcagacctgaagcatgtgcatggcaagctgaagaagcagttccaggagaaggtggcagagctggcacatgccaaccggcgggtggagcagcacgaggctgaggtgaagaagctgcggctgcgggtggaggagctcaagaaggagctggcccaggctgaggacgagctggacgaggcccacaaccaggcacgtaagctgcagcggtcgctggacgagcagacggagcagagcgagaacctgcaagtgcaactggagcacctgcagtccaggctccgcaggcagcagcagaacgctcccctcttcgggaagatccgcagtgctcgctttggcaccgaggaggccgaggatggaaccagtgacctggacgaggacgaggacctgcaaatccaggtggcctagagcttcctgtggctgggcaggatgggccgccccatacctgcccagggtccaggctaaccagccactcaaactgatgcagtgcctaggctcactctgggaccagtccctgccacagccgactttcttctctcccagggatggcgtcaacagtcccacctaccaacgccctgtggaaaggaagcctatgttttatatatatatatacacacacgcgcgcgcgcgcgcgcacacccagaagtctttggacccatttggttttataaatacaggacagctccaaggcccagtccagatgacctcacccacccaggacttcatgcagggctgggcatgttgggggcagttgttggagccccaccctgggctgcctctctaggcttcgctgttcatcatacaatgcagtgaacccagttatttgtaataaatgaagttcaagttc

SEQ ID NO: 13834 - DNA, 2311 bp, Homo sapiens
gtcctgcctcgagtgatatgtatgcgagtgcggaaatccgcagggtccgagagatctggaggatgcgtaccttccgtgctctgtgtggaccacaaggtaacggcggtagcacaggtgttagtactcttgcccggtcttacttatactcagtcgtcttactcgcgatcggcccatgttaacgagcgttaatgcaatccgtcaggcccgcccggccgcaccatgagccacgggcccagcccccggctggccgagtccccgcagctgtccaagggcagcctcctgaccatcctgggcagcccgtcgccggagcgcatggggcctgccgactccttgccgcccacgccgcccagcggcacgccctcgcccgggccgccgcccgcactgcccctgccccccgcgcccgcgctgctggccgacggcgactgggagagccgcgaggagctgcggctgcgggagctggaggaggcgcgggcgcgggcggcgcagatggagaagaccatgcgctggtggtcggactgcactgccaattggcgcgagaaatggagcaaggtgcgcgctgagcgcaaccgcgcgcgcgaggaggtgcgccagctgcgccagcgcctggacgcgctcaccaaggagctggcgggcgcacggcgcgagcgccaagaggcgcagggcgagtgcgaggcacggggccgcgagctggcgcggctgaggggcgcccggggggtcgccgaccagacgcgcgacggccccgagccggaagcggagcgcgagccagtgcgtgacgtcgggtccgagaggccgccaggcagccaggaactggagctggtggagagcctgctgaagagcatgccagaggagtctgaggactgctgggaggcgcgcagcctgggggctgggggcccgcggggcagctcaggccgccaggagcgcagccggctaccctgggaggacacagctgccacggaggaggaggcctccaagttgaccgccctgcggctacggctggatgagtcccagaaggtgctgctcaaggagcgagaggataaactggcgttgagcaggaacattgagaagctagagggggagctcagccagtggaagatcaagtatgaggagctgagcaagaccaagcaggagatgctcaagcagctcagcatcctgaaggaggcgcaccaggacgagctgggccgcatgtctgaggacctggaagatgagctcggtgcacgctccagcatggaccggaaaatggccgagctgaggggcgagatggagcggctgcaggccgaaaacgctgcggagtggggccgccgggagcggctggagacagagaaactgggccttgagcgggagaacaagaagctgcgggcacaggtcggagacctggaggaggcgctggcccggcggcggcggcaaacagccagcgcactggactgcgacctgagggccagccaggccgcgctcttcgagaagaacaaggagctggcagacctgaagcatgtgcatggcaagctgaagaagcagttccaggagaaggtggcagagctggcacatgccaaccggcgggtggagcagcacgaggctgaggtgaagaagctgcggctgcgggtggaggagctcaagaaggagctggcccaggctgaggacgagctggacgaggcccacaaccaggcacgtaagctgcagcggtcgctggacgagcagacggagcagagcgagaacctgcaagtgcaactggagcacctgcagtccaggctccgcaggcagcagcagaacgctcccctcttcgggaagatccgcagtgctcgctttggcaccgaggaggccgaggatggaaccagtgacctggacgaggacgaggacctgcaaatccaggtggcctagagcttcctgtggctgggcaggatgggccgccccatacctgcccagggtccaggctaaccagccactcaaactgatgcagtgcctaggctcactctgggaccagtccctgccacagccgactttcttctctcccagggatggcgtcaacagtcccacctaccaacgccctgtggaaaggaagcctatgttttatatatatatatacacacacgcgcgcgcgcgcgcgcacacccagaagtctttggacccatttggttttataaatacaggacagctccaaggcccagtccagatgacctcacccacccaggacttcatgcagggctgggcatgttgggggcagttgttggagccccaccctgggctgcctctctaggcttcgctgttcatcatacaatgcagtgaacccagttatttgtaataaatgaagttcaagttc

SEQ ID NO: 13835 - DNA, 2400 bp, Homo sapiens
ggctgtaccgagcccgagtcttatggatccacctcttaacaagcgcaaggttgctttcgtcaacccttctgttgtacagaaagagaaactgaggcccgatgggcacagacttgttggcccacttccactcggtggcagagctggcccagggaaaaatgcaggtccgaggaggcgtcctccgcccggtggcccagagggaagcggggcacggcgtcatcatgcacagttgtatcgcgcccgccgcgcgtccccggagccgcccctgagcccgaccgcgagttcgagctcagggcccgcccggccgcaccatgagccacgggcccagcccccggctggccgagtccccgcagctgtccaagggcagcctcctgaccatcctgggcagcccgtcgccggagcgcatggggcctgccgactccttgccgcccacgccgcccagcggcacgccctcgcccgggccgccgcccgcactgcccctgccccccgcgcccgcgctgctggccgacggcgactgggagagccgcgaggagctgcggctgcgggagctggaggaggcgcgggcgcgggcggcgcagatggagaagaccatgcgctggtggtcggactgcactgccaattggcgcgagaaatggagcaaggtgcgcgctgagcgcaaccgcgcgcgcgaggaggtgcgccagctgcgccagcgcctggacgcgctcaccaaggagctggcgggcgcacggcgcgagcgccaagaggcgcagggcgagtgcgaggcacggggccgcgagctggcgcggctgaggggcgcccggggggtcgccgaccagacgcgcgacggccccgagccggaagcggagcgcgagccagtgcgtgacgtcgggtccgagaggccgccaggcagccaggaactggagctggtggagagcctgctgaagagcatgccagaggagtctgaggactgctgggaggcgcgcagcctgggggctgggggcccgcggggcagctcaggccgccaggagcgcagccggctaccctgggaggacacagctgccacggaggaggaggcctccaagttgaccgccctgcggctacggctggatgagtcccagaaggtgctgctcaaggagcgagaggataaactggcgttgagcaggaacattgagaagctagagggggagctcagccagtggaagatcaagtatgaggagctgagcaagaccaagcaggagatgctcaagcagctcagcatcctgaaggaggcgcaccaggacgagctgggccgcatgtctgaggacctggaagatgagctcggtgcacgctccagcatggaccggaaaatggccgagctgaggggcgagatggagcggctgcaggccgaaaacgctgcggagtggggccgccgggagcggctggagacagagaaactgggccttgagcgggagaacaagaagctgcgggcacaggtcggagacctggaggaggcgctggcccggcggcggcggcaaacagccagcgcactggactgcgacctgagggccagccaggccgcgctcttcgagaagaacaaggagctggcagacctgaagcatgtgcatggcaagctgaagaagcagttccaggagaaggtggcagagctggcacatgccaaccggcgggtggagcagcacgaggctgaggtgaagaagctgcggctgcgggtggaggagctcaagaaggagctggcccaggctgaggacgagctggacgaggcccacaaccaggcacgtaagctgcagcggtcgctggacgagcagacggagcagagcgagaacctgcaagtgcaactggagcacctgcagtccaggctccgcaggcagcagcagaacgctcccctcttcgggaagatccgcagtgctcgctttggcaccgaggaggccgaggatggaaccagtgacctggacgaggacgaggacctgcaaatccaggtggcctagagcttcctgtggctgggcaggatgggccgccccatacctgcccagggtccaggctaaccagccactcaaactgatgcagtgcctaggctcactctgggaccagtccctgccacagccgactttcttctctcccagggatggcgtcaacagtcccacctaccaacgccctgtggaaaggaagcctatgttttatatatatatatacacacacgcgcgcgcgcgcgcgcacacccagaagtctttggacccatttggttttataaatacaggacagctccaaggcccagtccagatgacctcacccacccaggacttcatgcagggctgggcatgttgggggcagttgttggagccccaccctgggctgcctctctaggcttcgctgttcatcatacaatgcagtgaacccagttatttgtaataaatgaagttcaagttc

SEQ ID NO: 13836 - DNA, 1270 bp, Homo sapiens
ggcaccgtgcagctgcgaccgccgccggagggggagctcagccagtggaagatcaagtatgaggagctgagcaagaccaagcaggagatgctcaagcagctcagcatcctgaaggaggcgcaccaggacgagctgggccgcatgtctgaggacctggaagatgagctcggtgcacgctccagcatggaccggaaaatggccgagctgaggggcgagatggagcggctgcaggccgaaaacgctgcggagtggggccgccgggagcggctggagacagagaaactgggccttgagcgggagaacaagaagctgcgggcacaggtcggagacctggaggaggcgctggcccggcggcggcggcaaacagccagcgcactggactgcgacctgagggccagccaggccgcgctcttcgagaagaacaaggagctggcagacctgaagcatgtgcatggcaagctgaagaagcagttccaggagaaggtggcagagctggcacatgccaaccggcgggtggagcagcacgaggctgaggtgaagaagctgcggctgcgggtggaggagctcaagaaggagctggcccaggctgaggacgagctggacgaggcccacaaccaggcacgtaagctgcagcggtcgctggacgagcagacggagcagagcgagaacctgcaagtgcaactggagcacctgcagtccaggctccgcaggcagcagcagaacgctcccctcttcgggaagatccgcagtgctcgctttggcaccgaggaggccgaggatggaaccagtgacctggacgaggacgaggacctgcaaatccaggtggcctagagcttcctgtggctgggcaggatgggccgccccatacctgcccagggtccaggctaaccagccactcaaactgatgcagtgcctaggctcactctgggaccagtccctgccacagccgactttcttctctcccagggatggcgtcaacagtcccacctaccaacgccctgtggaaaggaagcctatgttttatatatatatatacacacacgcgcgcgcgcgcgcgcacacccagaagtctttggacccatttggttttataaatacaggacagctccaaggcccagtccagatgacctcacccacccaggacttcatgcagggctgggcatgttgggggcagttgttggagccccaccctgggctgcctctctaggcttcgctgttcatcatacaatgcagtgaacccagttatttgtaataaatgaagttcaagttc

SEQ ID NO: 13837 - DNA, 964 bp, Homo sapiens
tctgggaaggagagacacccagcatccctagaactgcctgacctcgtgggactccctggcatggcgcccaagctgatactgattccctcctccctcccaccccatccctgtgccctgtaggagctggcagacctgaagcatgtgcatggcaagctgaagaagcagttccaggagaaggtggcagagctggcacatgccaaccggcgggtggagcagcacgaggctgaggtgaagaagctgcggctgcgggtggaggagctcaagaaggagctggcccaggctgaggacgagctggacgaggcccacaaccaggcacgtaagctgcagcggtcgctggacgagcagacggagcagagcgagaacctgcaagtgcaactggagcacctgcagtccaggctccgcaggcagcagcagaacgctcccctcttcgggaagatccgcagtgctcgctttggcaccgaggaggccgaggatggaaccagtgacctggacgaggacgaggacctgcaaatccaggtggcctagagcttcctgtggctgggcaggatgggccgccccatacctgcccagggtccaggctaaccagccactcaaactgatgcagtgcctaggctcactctgggaccagtccctgccacagccgactttcttctctcccagggatggcgtcaacagtcccacctaccaacgccctgtggaaaggaagcctatgttttatatatatatatacacacacgcgcgcgcgcgcgcgcacacccagaagtctttggacccatttggttttataaatacaggacagctccaaggcccagtccagatgacctcacccacccaggacttcatgcagggctgggcatgttgggggcagttgttggagccccaccctgggctgcctctctaggcttcgctgttcatcatacaatgcagtgaacccagttatttgtaataaatgaagttcaagttc

SEQ ID NO: 13838 - DNA, 399 bp, Homo sapiens
ctgggagagaagaaagtcggctgtggcagggactggtccagagtgagcctaggcactgcatcagtttgagtggctggttagctggaccctgggcaggatggcgtcaacagtcccacctaccaacgccctgtggaaaggaagcctatgttttatatatatatatacacacacgcgcgcgcgcgcgcgcacacccagaagtctttggacccatttggttttataaatacaggacagctccaaggcccagtccagatgacctcacccacccaggacttcatgcagggctgggcatgttgggggcagttgttggagccccaccctgggctgcctctctaggcttcgctgttcatcatacaatgcagtgaacccagttatttgtaataaatgaagttcaagttc

SEQ ID NO: 13839 - DNA, 503 bp, Homo sapiens
ctgcggctgcgggagctggaggaggcgcgggcgcgggcggcgcagatggagaagaccatgcgctggtggtcggactgcactgccaattggcgcgagaaatggagcaaggtgcgcgctgagcgcaaccgcgcgcgcgaggaggtgcgccagctgcgccagcgcctggacgcgctcaccaaggagctggcgggcgcacggcgcgagcgccaagaggcgcagggcgagtgcgaggcacggggccgcgagctggcgcggctgaggggcgcccggggggtcgccgaccagacgcgcgacggccccgagccggaagcggagcgcgagccagtgcgtgacgtcgggtccgagaggccgccaggcagccaggtgcgcggcgcgggcggggcgttcgcgctccagtctcgaagtgggcggggccgattgtcctgagctgctgggctcagaaacaagctagtaaaggcctggcctcctggaggtttcacttctccaggtcgggttctaccctt

SEQ ID NO: 13840 - DNA, 496 bp, Homo sapiens
aacacaatacctttctccaaagaaattatggaagtactagcgtaagaaatttgactttttttggggggaggggggagggatagcattaggatatatacctaatgctaaatgacgagttaatgggtgcagcacaccagcagggcacatgtatacatatgtaactaacctgcacattgtgcacatgtaccctaaaacttaaagtataataataataaaattttaaaaaaagaaatttgacttttttaaaaaaacctcttagaagaagatataggataacatccttatgaccttgaattcagggaggctataataatttacaggaagcatacattgagggaaaagattaatacattcaaatacattaaaaattaattttattcattggaagatagaatagccaggcgcagtggcacttgctttgtagtcccagctacttgggggctaagacgggaggactgcttgagcccaggagtttgaggctgtaatgtgctttgat

SEQ ID NO: 13841 - DNA, 440 bp, Homo sapiens
agtcccaacaatgggctgaggtagatctctggtgactcagatactccagtgatgagtgtggtctgcaggaggtgtccaggggagcaggaggcacacggcaccaacttggaaagttaatgaatgagtttagtgatggacacacaaggaactgttaacatgttttagaaaacttacttggcctcagcactttcttctccttttaggctgggtgcggggtgagacctcctcctcctttttccttcaccctcagttgtattttattggattacaagtttgtatttattttgtattacaagatcctgtcttctgttcctgttttggccactgtctatgccaggctgctattagagcctgacagcttcaccctaaataaaagaaaaccttttatgtgtagtttaaaaaaataaacaaaaacctctgtagacctttttaaaatctac

SEQ ID NO: 13842 - DNA, 413 bp, Homo sapiens
tgaccactttttcttgttttcctccatctactatccaaaagcatacagcaccagcccctgcagaaagagattagacatgatacaatatctaggagcttatttaacaggaaagtacatagtgacagaacaacaatgatttatttgtaatggtggtgcttaatgagtcgtgatttattcagatgacctcccctatgttcccatgtcctcattcctcccagctcatacccacagccttctcttttcagcatagttgtggggaatgaaggctgatgactgcatttggttttaactatgcattaatgttggaatctgatattctaggaaaatttggttattctgattggctatattcacttccaagattctacagttcaatcaatgtttcactgaagtaagtcttgagtattcttaaa

SEQ ID NO: 13843 - DNA, 559 bp, Homo sapiens
ggtttcaccatgttagccaggatggtctcgatctccttaccttgtgatccgcccgccttggcctcccaaagtgctgggattacaggtgtgagccaccacgcctggctgaaatacataatcttaaaagaaaacataagatactttattttaatatacgtgactaaatgtaaaacctaacttattttctgttatctatttatttttactttcagtaacactttttttattttaggtagcattcagcctagaggcaactgctgtttgttaaatatttcctgttcatatattttgcacattttcttatgggttagttttcttctcattgttttgggaagttcttaatatatttggggtatttatctttcattcgttgtctgtgtaacaaataacttctgccatatgggttgtctgcacattttttggtgtcttttagtaaacaaggtttttttgttttgtattgttttgtttattgtaaagatttttaaattttaatggagttgatttcttttctcattcaagcttttgagaataaattggagttgaatttttaatggttttt

SEQ ID NO: 13844 - DNA, 443 bp, Homo sapiens
agcaatcccattactgggtatatactcagaggaatataagtcactctactataaacacacacgcatgcaaattttcattgtagcactatttacaatagcaaagacatggaatcaacctaaatgctcatcaatgacagatcggataaagaaaatatgcatcttcaacctttctggactacagcacctgccaactgacccccacatcatggctccaacgctggcttcatcacatatcttctctctcagtccctttggctctcagggtgcaatagcttaacaaaattgctgatctaggtgcctcagcattgtttctttgtcatagtctctgtattatcttattttgagccattcttttcctgcaaagatcctaactgaatgagataactacttcataagctatttgtaaggtttaaataaattaatgcatatttaatacatgaaac

SEQ ID NO: 13845 - DNA, 386 bp, Homo sapiens
tagtcaatgggatgtaagcagaaatgatgtgcgtaacatcaagaatcagtttttcagagagataatttgcttttcttttctccttcttgtctttgatagcatcttcaacctttctggactacagcacctgccaactgacccccacatcatggctccaacgctggcttcatcacatatcttctctctcagtccctttggctctcagggtgcaatagcttaacaaaattgctgatctaggtgcctcagcattgtttctttgtcatagtctctgtattatcttattttgagccattcttttcctgcaaagatcctaactgaatgagataactacttcataagctatttgtaaggtttaaataaattaatgcatatttaatacatgaaac

SEQ ID NO: 13846 - DNA, 404 bp, Homo sapiens
tgtgtgtctctacttattagcttgagaaaccttgccagaggtccttggacgctttctacctatttgcccaaattagatatatccctggcaaggtgaatgagtgccttagatcagtcccaattcccttctgtaggcctgaagctagagagacttagcaggaagatggaacttacccaaaagtagagctctgccagcatgggaaaaaggaaaagtgcctgcaacaggaaaaacaacaaagagagagaggtggagaggaacacgccaaagaaagagagagagcccacactatcctaagctcctgaatgcactgtgacatccagatgtcctggggaagacataaacacatcatacagcacccacaggaacctcaagagactggagttaataaagagattaaagagatt

SEQ ID NO: 13847 - DNA, 173 bp, Homo sapiens
gcaaactacaactcagctaatagctctgtgtaaatatcaacctttgtctaaagaagaaaacttgtctcttcaggcagaactaagtaatagtgatgccttttattaaacttatttcataaaaggcatcaaaggggagaaactgaggcagaaatttaaataataataataataaa

SEQ ID NO: 13848 - DNA, 303 bp, Homo sapiens
cagatgggcagaggcagagaatgccaggtacagctgactcctagagaattcatcacatcaactccacttgcctttgcaggagatgaagataagcaggacccccattgctgctgtttcccccatttccagccccatcaccctgagctttttcaagtttaggtgggaagatggagagggatgaatgaggggaggtgtgtggctttaatacaccttggttttagcttctgcatctattccttttctcttctatagcagacataagtgggaatcacttccctcttgtgctaatttaaaggcaatttt

SEQ ID NO: 13849 - DNA, 488 bp, Homo sapiens
agtaatctccgattttaggcctgaaggataagcacagttagcacataggctccttatcctctaattgcccattgtccattcttccctgctttactttgtgtcttgaggggctatgttctgtgcacgaattaccagtgcatccttgccttatgacttctggttgggttcagccaattggagggcctcatgagagatcagagggcagaaagatagagagtctgcacacttattacctttgctcctttcctgctgggctgcaaattttagcagctgtcaggagaccctgttggatagtctccttcccgttggttgtaaccaggtctttcccatggctagagtcctcatccaggttccaatgacacttgtcttatgtcttgcggcctcgagatagtaatgttctcctatgttgctagtccattggcacctcatcaaatattattgggtttcctttttagcccctcctgtttctccagaaataggccatttaa

SEQ ID NO: 13850 - DNA, 834 bp, Homo sapiens
gtggactctcctaaaattgtgaatgaagaaaacttacagccaccacagttcagttctttaactatcattgtaataatggaagacaaaaatccagctccgggagaacagcatgtacaccagcctcagtgttacagagtgtgggtacatcaaggtgaatggtgagcagaaactataacctgttagtccttctacacctcatctgctacaagttctggcttagacatggatattctttgtgaagaaaatacttctttgagctcaactacgaactccctaatgcaattaaatgatgacaccaggctctacagtaatgactttaactccggagaagctaacacttctgatgcatttaactggacagtcgactctgaaaatcgaaccaacctttcctgtgaagggtgcctctcaccgtcgtgtctctccttacttcatctccaggaaaaaaactggtctgctttactgacagccgtagtgattattctaactattgctggaaacatactcgtcatcatggcagtgtccctagagaaaaagctgcagaatgccaccaactatttcctgatgtcacttgccatagctgatatgctgctgggtttccttgtcatgcccgtgtccatgttaaccatcctgtatggtgagtggcattagtttcccagctatattcgcactggtaataaagagcatgtgcatgccaccagcagatgagatggggctcagggggcaaacaaactataaatagaagtctttgtttatagactagagcctactatgttacttatattttactcttaaaatgggatttcacataaaaatcagacagtctaaaacctgtga

SEQ ID NO: 13851 - DNA, 4022 bp, Homo sapiens
gtggactctcctaaaattgtgaatgaagaaaacttacagccaccacagttcagttctttaactatcattgtaataatggaagacaaaaatccagctccgggagaacagcatgtacaccagcctcagtgttacagagtgtgggtacatcaaggtgaatggtgagcagaaactataacctgttagtccttctacacctcatctgctacaagttctggcttagacatggatattctttgtgaagaaaatacttctttgagctcaactacgaactccctaatgcaattaaatgatgacaccaggctctacagtaatgactttaactccggagaagctaacacttctgatgcatttaactggacagtcgactctgaaaatcgaaccaacctttcctgtgaagggtgcctctcaccgtcgtgtctctccttacttcatctccaggaaaaaaactggtctgctttactgacagccgtagtgattattctaactattgctggaaacatactcgtcatcatggcagtgtccctagagaaaaagctgcagaatgccaccaactatttcctgatgtcacttgccatagctgatatgctgctgggtttccttgtcatgcccgtgtccatgttaaccatcctgtatgggtaccggtggcctctgccgagcaagctttgtgcagtctggatttacctggacgtgctcttctccacggcctccatcatgcacctctgcgccatctcgctggaccgctacgtcgccatccagaatcccatccaccacagccgcttcaactccagaactaaggcatttctgaaaatcattgctgtttggaccatatcagtaggtatatccatgccaataccagtctttgggctacaggacgattcgaaggtctttaaggaggggagttgcttactcgccgatgataactttgtcctgatcggctcttttgtgtcatttttcattcccttaaccatcatggtgatcacctactttctaactatcaagtcactccagaaagaagctactttgtgtgtaagtgatcttggcacacgggccaaattagcttctttcagcttcctccctcagagttctttgtcttcagaaaagctcttccagcggtcgatccatagggagccagggtcctacacaggcaggaggactatgcagtccatcagcaatgagcaaaaggcatgcaaggtgctgggcatcgtcttcttcctgtttgtggtgatgtggtgccctttcttcatcacaaacatcatggccgtcatctgcaaagagtcctgcaatgaggatgtcattggggccctgctcaatgtgtttgtttggatcggttatctctcttcagcagtcaacccactagtctacacactgttcaacaagacctataggtcagccttttcacggtatattcagtgtcagtacaaggaaaacaaaaaaccattgcagttaattttagtgaacacaataccggctttggcctacaagtctagccaacttcaaatgggacaaaaaaagaattcaaagcaagatgccaagacaacagataatgactgctcaatggttgctctaggaaagcagcattctgaagaggcttctaaagacaatagcgacggagtgaatgaaaaggtgagctgtgtgtgataggctagttgccgtggcaactgtggaaggcacactgagcaagttttcacctatctggaaaaaaaaaatatgagattggaaaaaattagacaagtctagtggaaccaacgatcatatctgtatgcctcattttattctgtcaatgaaaagcggggttcaatgctacaaaatgtgtgcttggaaaatgttctgacagcatttcagctgtgagctttctgatacttatttataacattgtaaatgatatgtctttaaaatgattcacttttattgtataattatgaagccctaagtaaatctaaattaacttctattttcaagtggaaaccttgctgctatgctgttcattgatgacatgggattgagttggttacctattgccgtaaataaaaatagctataaatagtgaaaattttattgaatataatggcctcttaaaaattatctttaaaacttactatggtatatattttgaaaggagaaaaaaaaaaagccactaaggtcagtgttataaaatctgtattgctaagataattaaatgaaatacttgacaacatttttcatagataccattttgaaatattcacaaggttgctggcatttgctgcatttcaagttaattctcagaagtgaaaaagacttcaaatgttattcaataactattgctgctttctcttctacttcttgtgctttactctgaatttccagtgtggtcttgtttaatatttgttcctctaggtaaactagcaaaaggatgatttaacattaccaaatgcctttctagcaattgcttctctaaaacagcactatcgaggtatttggtaacttgctgtgaaatgactgcatcatgcatgcactcttttgagcagtaaatgtatattgatgtaactgtgtcaggattgaggatgaactcaggtttccggctactgacagtggtagagtcctaggacatctctgtaaaaagcaggtgactttcctatgacactcatcaggtaaactgatgctttcagatccatcggtttatactatttattaaaaccattctgcttggttccacaatcatctattgagtgtacatttatgtgtgaagcaaatttctagatatgagaaatataaaaataattaaaacaaaatccttgccttcaaacgaaatggctcggccaggcacggaggctcgtgcatgtaatcctagcactttgggaggctgagatgggaggatcacttgaggccaagagtttgagaccaacctgggtaacaaagtgagacctccctgtctctacaaaaaaaatcaaaaaattatctgatccttgtggcacacaactgtggtcccagctacaggggaggctgagacgcaaggatcacttgagcccagaagctcaaggctgcagtgagccaagttcacaccactgccatttcctcctgggcaacagagtgagaccctatcacaaaaaaaaagaaagaaaaaaagaaaatgactaaactgaaatggtcttagtcaaaaaatatatacagacttatttttagaatcatttcaacttatttccttcttacctggttcagaaacaagtttgtttcaactgtgagagtagttttaaaaataagttttcctgattggttaccaataaacaccaaacaaataaaggagggggaaaatatcacttgaggcttaacattgcaattaatttagaaatacgcacctcaatctcaagccagtttataactaccatagttttgagcaaaatttttcttctatttctccaaaaactcactcatttcagtattactcattgacactgggctccctaatagaaaagcagatattataatatttcattgaaatggttactaaagagaaaaagagattaacaacagttaatccaccttgatattataacactcaaggttaaattgcatgttgttattagaatcaatgttatatatatgattacaatgctgaagcatttctattgaatgagaaatagtgtttgccctaaacctttgggaaaaaaatacagatttgaaaactaaagaatgtgggaagtgtcattgtgtaatttggaaatgcataaaattctcattatgtcctcatagatatgttgaaagatggttcactgtttcaaagatagaatgtataatatgctgctagtaccaaggctgcatttgaactgaactactccttatgatataccatactaactgatgaaaatataaatgttaaaatgtctccactctaatgtattttgccttcacttgtaactctgcacatttcattatatattagggaaaagattacagattctacccccatatactcaatcttgatcagaatgtacattaatgttgcctgatagatgtcttttgactacctatatattacaaatgtg

SEQ ID NO: 13852 - DNA, 3452 bp, Homo sapiens
aaatttggcataaaaaataaagctagatttattatacttctttataagggttagctatatagggcaatataacatacaagtaactacataatatatacttacaaaacacatatgtaagtccaaaggaattttaaattctcaaagtatgttaagcttttaaacgatgatataaaatcttttcaatagccaatattatgtgatgatgctcttgccttcatatacttaattccttaataatcatgtttcattttctgttcaactccaggtatatccatgccaataccagtctttgggctacaggacgattcgaaggtctttaaggaggggagttgcttactcgccgatgataactttgtcctgatcggctcttttgtgtcatttttcattcccttaaccatcatggtgatcacctactttctaactatcaagtcactccagaaagaagctactttgtgtgtaagtgatcttggcacacgggccaaattagcttctttcagcttcctccctcagagttctttgtcttcagaaaagctcttccagcggtcgatccatagggagccagggtcctacacaggcaggaggactatgcagtccatcagcaatgagcaaaaggcatgcaaggtgctgggcatcgtcttcttcctgtttgtggtgatgtggtgccctttcttcatcacaaacatcatggccgtcatctgcaaagagtcctgcaatgaggatgtcattggggccctgctcaatgtgtttgtttggatcggttatctctcttcagcagtcaacccactagtctacacactgttcaacaagacctataggtcagccttttcacggtatattcagtgtcagtacaaggaaaacaaaaaaccattgcagttaattttagtgaacacaataccggctttggcctacaagtctagccaacttcaaatgggacaaaaaaagaattcaaagcaagatgccaagacaacagataatgactgctcaatggttgctctaggaaagcagcattctgaagaggcttctaaagacaatagcgacggagtgaatgaaaaggtgagctgtgtgtgataggctagttgccgtggcaactgtggaaggcacactgagcaagttttcacctatctggaaaaaaaaaatatgagattggaaaaaattagacaagtctagtggaaccaacgatcatatctgtatgcctcattttattctgtcaatgaaaagcggggttcaatgctacaaaatgtgtgcttggaaaatgttctgacagcatttcagctgtgagctttctgatacttatttataacattgtaaatgatatgtctttaaaatgattcacttttattgtataattatgaagccctaagtaaatctaaattaacttctattttcaagtggaaaccttgctgctatgctgttcattgatgacatgggattgagttggttacctattgccgtaaataaaaatagctataaatagtgaaaattttattgaatataatggcctcttaaaaattatctttaaaacttactatggtatatattttgaaaggagaaaaaaaaaaagccactaaggtcagtgttataaaatctgtattgctaagataattaaatgaaatacttgacaacatttttcatagataccattttgaaatattcacaaggttgctggcatttgctgcatttcaagttaattctcagaagtgaaaaagacttcaaatgttattcaataactattgctgctttctcttctacttcttgtgctttactctgaatttccagtgtggtcttgtttaatatttgttcctctaggtaaactagcaaaaggatgatttaacattaccaaatgcctttctagcaattgcttctctaaaacagcactatcgaggtatttggtaacttgctgtgaaatgactgcatcatgcatgcactcttttgagcagtaaatgtatattgatgtaactgtgtcaggattgaggatgaactcaggtttccggctactgacagtggtagagtcctaggacatctctgtaaaaagcaggtgactttcctatgacactcatcaggtaaactgatgctttcagatccatcggtttatactatttattaaaaccattctgcttggttccacaatcatctattgagtgtacatttatgtgtgaagcaaatttctagatatgagaaatataaaaataattaaaacaaaatccttgccttcaaacgaaatggctcggccaggcacggaggctcgtgcatgtaatcctagcactttgggaggctgagatgggaggatcacttgaggccaagagtttgagaccaacctgggtaacaaagtgagacctccctgtctctacaaaaaaaatcaaaaaattatctgatccttgtggcacacaactgtggtcccagctacaggggaggctgagacgcaaggatcacttgagcccagaagctcaaggctgcagtgagccaagttcacaccactgccatttcctcctgggcaacagagtgagaccctatcacaaaaaaaaagaaagaaaaaaagaaaatgactaaactgaaatggtcttagtcaaaaaatatatacagacttatttttagaatcatttcaacttatttccttcttacctggttcagaaacaagtttgtttcaactgtgagagtagttttaaaaataagttttcctgattggttaccaataaacaccaaacaaataaaggagggggaaaatatcacttgaggcttaacattgcaattaatttagaaatacgcacctcaatctcaagccagtttataactaccatagttttgagcaaaatttttcttctatttctccaaaaactcactcatttcagtattactcattgacactgggctccctaatagaaaagcagatattataatatttcattgaaatggttactaaagagaaaaagagattaacaacagttaatccaccttgatattataacactcaaggttaaattgcatgttgttattagaatcaatgttatatatatgattacaatgctgaagcatttctattgaatgagaaatagtgtttgccctaaacctttgggaaaaaaatacagatttgaaaactaaagaatgtgggaagtgtcattgtgtaatttggaaatgcataaaattctcattatgtcctcatagatatgttgaaagatggttcactgtttcaaagatagaatgtataatatgctgctagtaccaaggctgcatttgaactgaactactccttatgatataccatactaactgatgaaaatataaatgttaaaatgtctccactctaatgtattttgccttcacttgtaactctgcacatttcattatatattagggaaaagattacagattctacccccatatactcaatcttgatcagaatgtacattaatgttgcctgatagatgtcttttgactacctatatattacaaatgtg

SEQ ID NO: 13853 - DNA, 1071 bp, Homo sapiens
gaaatttttgttaatttaaaccataactgttagatccaacaatctaaaattaatcaaagacatttgaactgatgaaatgtatatagagccagtatgctaaagcttatcatctattcagttaggaagttatttattttacccatattgtgggcaaaaacaatatatacttattgatagcttttaatatatctgagtttgcatactttaggaaggtaaaggacagagaagtcttgacacacattgtagtagtgacaattatgatttcctacagacaagataatctccaacacatacaaacacacacaggttaagtaaatgggatttattggccaggcatgatggctcacgcctctaatcccagcactttgggaggccaaggagggtggatcactcgagcccaggagtttaagaccagcctgggcaacatggtgagacctcatctctactgggaaaaaaaaaaaaaattagccaggcatggtggagtatgcctgtagtcccagctacttgggaagctgatggggggaggttggaggatcacttgagcctgggaggtcgagactacatttatctgtgattatgccactgcacttcagcctgggtgacaaaataagaccctatctcaaaaaaaagagagaaagtaggaatcattatttcccacagttgccgagaagtgattaaaaatttggcccttaaaataaggtcatggtttgaagacacatgtttaaagcatttaagagttcttaacaatgtttaatggaacctgcagtatatgtgatgaggatgttcttgatatctgctggcattcttttcccttttacataatataaaatatttcccttatcttttaagtattatttttaaaaatgtgattagtttcccattataagcagattattctccctccattttatacaaaatcacgcattttgtataaaatgccaacagcttcagtatgagagagtaaaggttaatgaaatcaaaattcggcagttggcaaaggcatggtttctctcctaaactagaaatgaagtgtcttattaaggtgacatgcagttcctgaagtgtcaacgt

SEQ ID NO: 13854 - DNA, 260 bp, Homo sapiens
gagatcgtgccattgcactccagcctgggcaatacagtgagactcagtctcaaaaaaataaaaaagggatgtgccctatgtgatgtgatgtgatgtgatgtgatgttctcttcacaggctggaactttattatgtttacagatgcattacttaagatgaaatggaaggcttctccaagttagataaacaatcattttacctcctgcagaagtaaaattacagtatgtttagtatgtttaatgaggtctttaaaagtctgc

SEQ ID NO: 13855 - DNA, 308 bp, Homo sapiens
aagtagttataatggtgcgtggtatgtattaaatgttgaatgaatgtgaattatcatcattagacctcaggcatcgaagcacagaagtcactattaaattggaatttattaaaaagtggaaaaatgtggaatttgaaagtgaatctaaaggtgaaacatagcaatgatataaagtttatacctagcctataattgtttacctctcctattatctaaggatgttatgtttcgtacatggtgtttggaaatgtaataaacaatagtcatgatgcagagagtcacaatgacagcaaagtcccagagttctg

SEQ ID NO: 13856 - DNA, 451 bp, Homo sapiens
ctcacagtcccacttactttgctctaagcaacactgatctccaaacatgctgtgcatagtatttcccttacacggcacacctgcaaatttattctgcactttcaaatataacttaaaacaatagcactacatgaaatgtgccattttcccaagaagattgtagactctttcccctgtactcgccataccttacacaattctccctttctgcaaataccaaattatgtttcttggtatagtgatcttcccatgggcctacaaaatccatgtggtcaaatgacatgcctttccgttattccttccctagaatcttctcctatgcctgacatccatgtttaatgaatgatcagacacaatataggaagagggatgctgacttttatgtttatgcctctattctcaggatctgaaacagcacctgatatttaacaggtgttcactatgtgtctgt

SEQ ID NO: 13857 - DNA, 625 bp, Homo sapiens
ggttttaccgtgttgcccaggctggtctttaactcctgggctcaaacaatctgcctgcctcagcctcccaagggattacaggcatgagcaactgcccagcccaggattattgtatgtatttttgctaggggattccctggaatgctgcttagttcaagatatttgtccatttcctctgaagaagctagggtgtacaggtgaggaaatatgacaggattattttcttttttaaaaatctcttgtaaaaagacataagggtctgctaaagaaagttgacagactcttgttttctggaggttaaccttgtctctggtccaaattagagtcaggcatttaggatgaggtctgatgatggttcatagaattttgtccacaatctgttatgaaccctggactggtgagccttgttatctgtggccaacctagggaattttaatcttatggaattgaaaaaacaaggaacaatgtttgtgagggatttattaatttcttcccagatttttctttttctcccctgttgtctctcatagtttttccagccctcctagtcacaatccccagaggcagctacttcaattcttctggctacctagttttactttactctgttgtttaaaaaaaaaaa

SEQ ID NO: 13858 - DNA, 207 bp, Homo sapiens
ctagtattgaatataagttttttattaatattgaatagattgcctttcttagtactgtctattgttagaagaagccccctaataaagagactgaagtaattgtagaagaaactggatctctctaagctattaatcatgttttctgaaggaaggagagtcaacattgtggcctcatgccttacaagcatttattataaacgtgaatag

SEQ ID NO: 13859 - DNA, 299 bp, Homo sapiens
aaaagggatttatgaatattttttaaagcttaaaaagcccacatacttatcatcgaattgtctgcttacgataggagctggaagagtcccttatatccactcaactgtacttacattttaaatggttgttttcctttctcttacactactacaagagaaaggaaatgcctaggcaaataaactcagttaaaataactttatggttgtgacacagtttgacaaaagcaaaggaaattcagagtcactgctcacactgtatcctcagctgattccaactgtggaaaataaaatgctttaaa

SEQ ID NO: 13860 - DNA, 469 bp, Homo sapiens
taaattcagatccatatttatagttttgctttagaattggataaagaccatttgtggtctcaatatttgggacttgctaaaagtaggtaccttgatgcattttggaggcacttcttaactcggattcctgagtgtaacccaagtattaactctatggccatagaatgccgacagaagagcagaagaaacttccacttttatggttcctgggcatgcaataagactctcaagaaattagatagccaaatcagtgtgccatttctcatcaccagaatagcaagcttcctggtctgagaaccccaagggaaagtctaaactccattttcgcaatcacttttctattttcctgacttttcactgaattgtactcacgggtataaatctaacctttgatctacgtggacctcatgaataagtacaagttctacttgtttgggattttaagaactagcaaaagcaaacaaacaag

SEQ ID NO: 13861 - DNA, 427 bp, Homo sapiens
gatgtaatacataaatatgttttaggagtggggagggtaaagagacctaaatggaagcaaagtttctgcacttcattcaaaatataaattgtataaattgttgatatcactagactgtgactagttatatatttatattgtgatagagtgaccactaagcctatacaaagtgatatgttcaaaaatactatagctaattcaagatataattctacagaatgtttaagaaactcacatgaggccgggcgcggtggctcacgcttgtaatcccagcactttgggaggctgaggcgggcgaatcaccggaggtcaggagttcgagaccagcctggccagtatggtgaaaccccatctgtactaaaactacaaaaattagccgggcatggtagctcatgcctgtaatcccagctactcgggaggctgaggc

SEQ ID NO: 13862 - DNA, 1293 bp, Homo sapiens
cagcctcctgagtagctaggactataggcacgtgccaccatgcctggctaattaaaatttttctttgtagagacaggggtctcactatgttgcccaggctggtcttgaactcctggactcaagcaatcctcctgcctccgcctcccaaagtgttgggattacaggcatgagccactgcacctggcctgttttctccgttttaatgaagtgagaaatgcatctcaatgggataactgcaggtcagggctctggatcaggatgatatcaagtgatctcacactgaaccaatataatttccatgtggaaccaaagactcactgggagttttatgtggcctctgcagttttctcttggatacgtgtataattttcagtgagattttgaaaggcatcccaggtcagaataccgtgtgctgtagtgcgaccgtcctgatcattgctccttattctcccttgttccagtgaacaaggggagaagaattgccttcagctccacgtcgttactgaaaatggcccccagcgctgaggagaggaccaccatacatgagatgtttctcagcacactggatccaaagactataagttttcggagtcgagttttaccctctaatgcagtgtggatggagaattcaaaactgaagagtttggaaatttgccaccctcaggagcggaacattttcaatcggatctttggtggtttccttatgaggaaggcatatgaacttgcgtgggctactgcttgtagctttggtggttctcgaccgtttgtggtagcagtagatgacatcatgtttcagaaacctgttgaggttggctcattgctctttctttcttcacaggtatgctttactcagaataattatattcaagtcagagtacacagtgaagtggcctccctgcaggagaagcagcatacaaccaccaatgtctttcatttcacgttcatgtcggaaaaagaagtgccattggttttcccaaaaacatatggagagtccatgttgtacttagatgggcagcggcatttcaactccatgagtggcccagcgaccttgagaaaggactaccttgtggagccctaagaacaccacatttgttgaaaactagcactctacccacagtgacgtggtatctgatgaagacctgatcgagtgtattgattttagtattgcttcgtgtcctccacacaggaggaggatgtattcagcctttaggatgatcagaaaagcagaaagagagagtggccggatggggctgaggggagaaagaattattaaacaataaatactttcaagac

SEQ ID NO: 13863 - DNA, 800 bp, Homo sapiens
cagcctcctgagtagctaggactataggcacgtgccaccatgcctggctaattaaaatttttctttgtagagacaggggtctcactatgttgcccaggctggtcttgaactcctggactcaagcaatcctcctgcctccgcctcccaaagtgttgggattacaggcatgagccactgcacctggcctgttttctccgttttaatgaagtgagaaatgcatctcaatgggataactgcaggtcagggctctggatcaggatgatatcaagtgatctcacactgaaccaatataatttccatgtggaaccaaagactcactgggagttttatgtggcctctgcagttttctcttggatacgtgtataattttcagtgagattttgaaaggcatcccaggtcagaataccgtgtgctgtagtgcgaccgtcctgatcattgctccttattctcccttgttccagtgaacaaggggagaagaattgccttcagctccacgtcgttactgaaaatggcccccagcgctgaggagaggaccaccatacatgagatgtttctcagcacactggatccaaagactataagttttcggagtcgagttttaccctctaatgcagtgtggatggagaattcaaaactgaagagtttggaaatttgccaccctcaggagcggaacattttcaatcggatctttggtggtttccttatgaggaaggcatatgaacttgcgtgggctactgcttgtagctttggggggttctaagacccgttggtgggtagccaattataataactatcatgtt

SEQ ID NO: 13864 - DNA, 1020 bp, Homo sapiens
  misc_feature (116)..(116): n is a, c, g, or t
gttagctgtgtcgggaagacatccatgaagtgagatgcaaatgtccagttacatggtgatgaatttgtcctgtttggatgcaacatttgtaatggtggctcgtgattctgaaaatnaagggccggcatttgtaaatccactcatccctgaaagcccagaggaagaggagctctttagacaaggggaattgaacaaggggagaagaattgccttcagctccacgtcgttactgaaaatggcccccagcgctgaggagaggaccaccatacatgagatgtttctcagcacactggatccaaagactataagttttcggagtcgagttttaccctctaatgcagtgtggatggagaattcaaaactgaagagtttggaaatttgccaccctcaggagcggaacattttcaatcggatctttggtggtttccttatgaggaaggcatatgaacttgcgtgggctactgcttgtagctttggtggttctcgaccgtttgtggtagcagtagatgacatcatgtttcagaaacctgttgaggttggctcattgctctttctttcttcacaggtatgctttactcagaataattatattcaagtcagagtacacagtgaagtggcctccctgcaggagaagcagcatacaaccaccaatgtctttcatttcacgttcatgtcggaaaaagaagtgccattggttttcccaaaaacatatggagagtccatgttgtacttagatgggcagcggcatttcaactccatgagtggcccagcgaccttgagaaaggactaccttgtggagccctaagaacaccacatttgttgaaaactagcactctacccacagtgacgtggtatctgatgaagacctgatcgagtgtattgattttagtattgcttcgtgtcctccacacaggaggaggatgtattcagcctttaggatgatcagaaaagcagaaagagagagtggccggatggggctgaggggagaaagaattattaaacaataaatactttcaagac

SEQ ID NO: 13865 - DNA, 330 bp, Homo sapiens
ttttgatagccacacaacctcaggcttctttttggcaatacagtttcagtgtgtatcttaaaatttttaatctaagaattactgatatttaaggatgttaaaagggcaaccaaataaagtcctttgttctgataattgaaagaattttttttctgttttaacacctataaagaaattctacaactgcttaccttcacctgttctaatatttaagcttcctagctgttaggaagttcttctttatatcttacctaaatacagcctaaatgcagaactctttgtcgtagcttagagtcatgtatgaaaatcaaggacagttggtcatgttac

SEQ ID NO: 13866 - DNA, 1196 bp, Homo sapiens
cacaccactgacttcaatgactataaaattagccagcgacttccttaatgctaacaacaacccatgaagtcaggacctaacagaaggaaacaggactcagagagggaaggctgcttctctggggtcactctgtgtgcaccagggctctgactggtgccctgtccctcagtcactactgaggctgatagtggcagtgcccagcagctgacagacgtagaatattttatataggttgggccccatgctcaatggtgtgcacatgagctcgccaaatccccagatgcacccagtgtggtgagctctgccataagccccattttataggggatgacactgagccctagggagggaaactgctcactgggcttctgagcaggagggtgtcaagcaggcctcagctctccacctgcccatgcttgcaaggattgcctggcacttcactgttcatgtatcttggactgtgtgcacacaggctggtctacccagacaccctcctgaaggaaaccaaggactggcaacagctgtggtccccgaggaggggaaacgggacagcagctagagggatgctgaagtgtccatcagtgccatttagtgtacacactgtggtctggtgtcccaaggctgatggctgtgaccacgtcaatcagctcctctgtgaaagtgtcccgttgggatattcacaaacattcacagaagagagacaggagcaagtctttttcaattgcacatgtctgactcctctcatagagttaggtccctctctctctgtcttctgtcttctcttaccttcccctgcttggtttgcttacttcccctttagctctcatctcacatccagtcccagctctccacagtagccatgctggtgtgctagatacgaccctagacatagtagctgggtaaaatgtgcagcattcctgtgggtatgtgttttcaaacatttgcttaaatttggccaggcatggtggctcacacctgtagtcctaacactttgggaggccaaggtaggggtgcgggggagcggacttgcctgaggtcaggagttcgagaccagcctggccaacatggcaaaaccccgtctctactaaaaatacaaaaattagtcaggcgtggtggcaggcgcctatatcccagctactcgggaggctgaggcaggagaatagcttaaacccggggggcggaggttgcagtgagca

SEQ ID NO: 13867 - DNA, 1282 bp, Homo sapiens
cacaccactgacttcaatgactataaaattagccagcgacttccttaatgctaacaacaacccatgaagtcaggacctaacagaaggaaacaggactcagagagggaaggctgcttctctggggtcactctgtgtgcaccagggctctgactggtgccctgtccctcagtcactactgaggctgatagtggcagtgcccagcagctgacagacgtagaatattttatataggttgggccccatgctcaatggtgtgcacatgagctcgccaaatccccagatgcacccagtgtggtgagctctgccataagccccattttataggggatgacactgagccctagggagggaaactgctcactgggcttctgagcaggagggtgtcaagcaggcctcagctctccacctgcccatgcttgcaaggattgcctggcacttcactgttcatgtatcttggactgtgtgcacacaggctggtctacccagacaccctcctgaaggaaaccaaggactggcaacagctgtggtccccgaggaggggaaacgggacagcagctagagggatgctgaagtgtccatcagtgccatttagtgtacacactgtggtctggtgtcccaaggctgatggctgtgaccacgtcaatcagctcctctgtgaaagtgtcccgttgggatattcacaaacattcacagaagagagacaggagcaagtctttttcaattgcacatgtctgactcctctcatagagttaggtccctctctctctgtcttctgtcttctcttaccttcccctgcttggtttgcttacttcccctttagctctcatctcacatccagtcccagctctccacagtagccatgctggtgtgctagatacgaccctagacatagtagctgggtaaaatgtgcagcattcctgtgggtatgtgttttcaaacatttgcttaaatttggccaggcatggtggctcacacctgtagtcctaacactttgggaggccaaggtaggggtgcgggggagcggacttgccatgttggccaggctgatctggaactcctgacctcaagtgatccactcgtcttggcctcccaaagtgctgggattacaggcgtaatcactgcgcctagccaagatttggtttttttagagggctttacttccatgtgactagtatcttgtactgttggacatttttaccatgtgtatggattatacttacaaaagaaaagaacaacataaataaaaataaactaaaagttggaggaagtaaacgacaatcta

SEQ ID NO: 13868 - DNA, 226 bp, Homo sapiens
gcattcttatttttcattctaatggaaaggattattcttcctgaacccatccaagccttttattatgtgaattctttagtgtattttaattgtttgccttaagttatattcaaaatgcctccttttaatttagatgtttctatctttggcagggtttctattcccaattcaagtatgagaattactttgccttctttcttttgtcttctgttcaaatcttttaaat

SEQ ID NO: 13869 - DNA, 473 bp, Homo sapiens
aaggcatagtaagttttcactgaaaacctgcattcattatgaaaggttatattctaaatgacaaaatcagtaagtgaatattagaagattagaaatgtggtcttaaaacctaggaattttttcttctaaagatgaagatgtgtatggagagcgaaacacttgtctttctaggcaatcatattgatcctgctcctcaatttctagtgatgaaaattaatgtaaaaggtttagtttaatcaactacagttttaagttacagttgaagaaagtagtatcagaattctgttttttattctgtaaatattaatgcttaggatatagaaacagtttattcagggttttcctacactgcgtttatcatttaaaatattgaataagctgaacacattagtgtataggaggctgaggcgggaagatcacttcagcctgggattttgagtcaaccggcaactagaccccatctctaaaggaaa

SEQ ID NO: 13870 - DNA, 1921 bp, Homo sapiens
tgagacaaaattctgctgtctcgcccaggctggagctgcagtgagctatgatcacaccactgtactccagcctgggcaacagagcaagaccctgtctctcaaaaagagagaaaaagaaagaaaacatttgagctccatagattgacattctgatttgaacagtttcccatagagggagaattgcggcgaaagaggcaaggcctgcccacaatgcatggtctgggacttagctgatgaagtgctctgcaccacccagcttcgaggagatggggactggggtttccccttgcttgacatcttaactacttcactgcaggaaaggggaggagggacaagaggaggaccaattccccaagggacacggagacccacattaggttttggaacccacgcctggtactatctgaatttaaaagccttgcttgactcaggcggggctgatcaaaggccatttgctgttttagagtgttcctatgtgtgcttggcagacagagttgtctttttattgcttccattcccactaagacctccatccccccactgcccccccaaccccttggtgagcttggtgagatgtgttttttttttctttttttaattttaagttccaggatacatgtgcaggatgtgcaggtttgttacaaggtaaatatgtgccatggtggtttgctgcacctatcaacccatcacctaggtattaagccctgcatgcattagctgtttatcatgatgctgtccctcctgatgagatggttttaagttggcaccagcacctgtttctcatgccttgcgtatgcagcaggaactgtgaactagggacaggttcatgccctttggccactgcagacgtggagctgtggacgccagtacttgtgtggagagtcggtgtctgttggctgtatctcagctttcttttcagggcagacctgatacaggtgttctaggtgggaaaagccttagcacttgttgtgaactattatattgttactctctggaagggaaggtggaaaggggaatctatgccagtgagcacaacacaggccgcatatggacacacatgaggtcgctcggcatgctcttaggcccagaggagacagaatcagatactagcctatcctctggctgctcccaggctagcagggaggtaggtgtctaaaccaggatgtgagctagaggggactatagccgtgcacaggaggggcacagaggacggagcaagcagggcaggcttcacggaggagggcttgtgagctgaatcttgagagagaggagatcctccaagttgagggaactgtgggagcagttagacagcttggattttggggggtgtagcacattgctccttatgggctggggtgtaatgtgcagaggagggcagagggaagattgatttgctcattatgcaacaaatgtctggagctccagtcctgaaccaggcccaagctggggaatagcaactcagtccctgcccttgtggagtctgtggctggcaggggcatgttcattaaacaacttattgcatgattcactacttttctttttctttctttttttctttttttttgtgagacaggatcttgctctgtctcccaggctggagtgcagtggcacaatcaaagctcactgcagccttgaattcctgggctcgagcggttctcctgcgtcagcctcccaagtagctgggaccgcaggcacacatcactgtgcctggctagttttttaaattttttgtggaggtgggtatctcactttgttgcccaggctggttgaactcccgtgagctcaagtgatcctcttgccttggcctcccaaagtattgggactacaggcgtgagccacagtgcctggcctgattcatgattgaagtaccattaccataaatgctatacatccatgcattggatgttaaagggatcataac

SEQ ID NO: 13871 - DNA, 2504 bp, Homo sapiens
ctccatgtttcgatttccccatctgtagacgggaagaatgaaggcatgtggtgggaagcagtgctgattagggcttaagagaagaggcttaggaggcagacagtcttagggtttctttctggcataatagtttcctagctgcttgaccttggggagttcacttaactttgttagtcctcaatttcctgatatgtaaaatgggataataccatatgagcatctacctgacaggattgttgtaatgtttacaggagacagtgttcgtaaagtacaccgcctgggaggtggctagcacattattcctgggggctacttttactattaacagctccatagtgatttgaccaaaggtttctgagagttgagccaagatgcggactagatgggaccacattgagaaaacatttgaggctggatgcagtggctcacgcctacactctgggaggtagaggtgggaggactgattgaggccaggagttggagaccagcctgggcaacacagtgagaaccctctctacaaaaaatacaaaaattagccaagtgaggtggtatatgcctgtagtcccagctactcaggaggttgaagtgggaggatctctcgggccagggaggttgaggctgcagtgagctatgatcacaccactgtactccagcctgggcaacagagcaagaccctgtctctcaaaaagagagaaaaagaaagaaaacatttgagctccatagattgacattctgatttgaacagtttcccatagagggagaattgcggcgaaagaggcaaggcctgcccacaatgcatggtctgggacttagctgatgaagtgctctgcaccacccagcttcgaggagatggggactggggtttccccttgcttgacatcttaactacttcactgcaggaaaggggaggagggacaagaggaggaccaattccccaagggacacggagacccacattaggttttggaacccacgcctggtactatctgaatttaaaagccttgcttgactcaggcggggctgatcaaaggccatttgctgttttagagtgttcctatgtgtgcttggcagacagagttgtctttttattgcttccattcccactaagacctccatccccccactgcccccccaaccccttggtgagcttggtgagatgtgttttttttttctttttttaattttaagttccaggatacatgtgcaggatgtgcaggtttgttacaaggtaaatatgtgccatggtggtttgctgcacctatcaacccatcacctaggtattaagccctgcatgcattagctgtttatcatgatgctgtccctcctgatgagatggttttaagttggcaccagcacctgtttctcatgccttgcgtatgcagcaggaactgtgaactagggacaggttcatgccctttggccactgcagacgtggagctgtggacgccagtacttgtgtggagagtcggtgtctgttggctgtatctcagctttcttttcagggcagacctgatacaggtgttctaggtgggaaaagccttagcacttgttgtgaactattatattgttactctctggaagggaaggtggaaaggggaatctatgccagtgagcacaacacaggccgcatatggacacacatgaggtcgctcggcatgctcttaggcccagaggagacagaatcagatactagcctatcctctggctgctcccaggctagcagggaggtaggtgtctaaaccaggatgtgagctagaggggactatagccgtgcacaggaggggcacagaggacggagcaagcagggcaggcttcacggaggagggcttgtgagctgaatcttgagagagaggagatcctccaagttgagggaactgtgggagcagttagacagcttggattttggggggtgtagcacattgctccttatgggctggggtgtaatgtgcagaggagggcagagggaagattgatttgctcattatgcaacaaatgtctggagctccagtcctgaaccaggcccaagctggggaatagcaactcagtccctgcccttgtggagtctgtggctggcaggggcatgttcattaaacaacttattgcatgattcactacttttctttttctttctttttttctttttttttgtgagacaggatcttgctctgtctcccaggctggagtgcagtggcacaatcaaagctcactgcagccttgaattcctgggctcgagcggttctcctgcgtcagcctcccaagtagctgggaccgcaggcacacatcactgtgcctggctagttttttaaattttttgtggaggtgggtatctcactttgttgcccaggctggttgaactcccgtgagctcaagtgatcctcttgccttggcctcccaaagtattgggactacaggcgtgagccacagtgcctggcctgattcatgattgaagtaccattaccataaatgctatacatccatgcattggatgttaaagggatcataac

SEQ ID NO: 13872 - DNA, 532 bp, Homo sapiens
ctccatgtttcgatttccccatctgtagacgggaagaatgaaggcatgtggtgggaagcagtgctgattagggcttaagagaagaggcttaggaggcagacagtcttagggtttctttctggcataatagtttcctagctgcttgaccttggggagttcacttaactttgttagtcctcaatttcctgatatgtaaaatgggataataccatatgagcatctacctgacaggattgttgtaatgtttacaggagacagtgttcgtaaagtacaccgcctgggaggtggctagcacattattcctgggggctacttttactattaacagctccatagtgatttgaccaaaggtttctgagagttgagccaagatgcggactagatgggaccacattgagaaaacatttgaggctggatgcagtggctcacgcctacactctgggaggtagaggtgggaggactgattgaggccaggagttggagaccagcctgataacacgtcgcgagggtaccggctcgattctatatgagc

SEQ ID NO: 13873 - DNA, 546 bp, Homo sapiens
gtgagaccaggttgggcaggaagtgcattcctcagcagagatcatatctaaaggaaggcagcagttccaagggaaatggggaaatggctctgggccccggcggatgtcagcaatgggcattgccatccttcccagccagcccacccttggcaagagcagtgcagaaaaagattctgcaatccaaaacaataaactctgaccatggagaaataaaactggggtcggggggacagtagtgatgcttatttaaaaaacggactcttgccaggtattgtggctgacacctgtaatcccagcactttaggaggccaaggctgggggatcacgaggtcaggagatcgagacaatcctggctaccacagtgaaaccccatctctacaaaaaataacaaaaaatgccagccacagtggttcatgcctgtaatcccagcactttgggagccaaggcaggtggatcacctgaggtcgggagttcgagaccagcctgaccaacatggtgaattcccatctctattaaaaatacaaaattagccaggcatggtggtgc

SEQ ID NO: 13874 - DNA, 421 bp, Homo sapiens
ctggggcgcagagctgggaggtctggctccgcgggcggttggtggcgacccggggctccggcgcgcggggggcgagtgttctggaggtgtctagagtgaaagaggtgagggcacctcgtgtcctcactaagggcgacctcagaggagctaggcatggccgggaaccgacggcctaggccacagcctgggctgcatgcacttttttagcacactgcgtttcccaaaaggaaggctgggaggaaaagcccatcgctaattactactctagggccccagcccgtgccctgtccttgtcctcccaaaagaaaaatgacctcaacttaatattttgcatttcctgactctgtgccctacattgctttaaacggtgtatgcacacatactcatacaatcctaacaaggtgtgagttatgcaccactt

SEQ ID NO: 13875 - DNA, 362 bp, Homo sapiens
ccatcctccttctagtggggtggtacaggaatgagttgggaagtcctgaataggaaattccacatttagaaaatgtaccttaacatctcagttccactcagggacaatctttgaggactagtcattaggctgagctcacaggggggacctgggggaggagctgccaggatggtgtaggcatatgcatacacagaatctcacccttttttgggagagttgcacagaaggatctgctgatattgcatattcaaaactaggacattcctgatgcttcgtcattttctcaattcaaacaagcaaaagttcacatgtacacgcttgcaccacccccttaaatgtgttaggaggaaagagttcataat

SEQ ID NO: 13876 - DNA, 238 bp, Homo sapiens
gctttttgtgtgaattgaagacttaaagaagtatttgtaaatatgtctgtataagaaccaccagaaagatgaagatgagccgtaatagaaatatcaagaggctacaaagtcttagcaaattataattgctaatggtacattatgtggtgtttagtatcacatttagaatgtagtcatttgttaagtttttcatggggtaaaagaaagaatttattccaagaaaattttggaattttaa

SEQ ID NO: 13877 - DNA, 416 bp, Homo sapiens
acatacagagaataagtttcaagtatgcggaagccggaaggtcctgtgtgtgtctggttagaaggcttcaagtcaatctctttgggaaagaagctttgccttcctcatgagttcagacaagaaagcagaactcgtaaaggtctagcaaaggcgactgcaaagggccaactccacacagctcagagtccggaggaaaggaaacgctccttctggacaaagtataaagaggttaggaaaatttcaaatttctctagttaaaatctgccggtattgaagaaggtaaattctgttacaatgacaaatcaataaaatgctgcctcaaaagacttattacgcttctatattggggtagaaaaaagaaagggaaaacattggtgtctaaaaataaggaatggtatgaacttaagtctgactct

SEQ ID NO: 13878 - DNA, 421 bp, Homo sapiens
ggaaaaatagaattcattatttgtggttaaaatgaagtgaaatatggcgggtctgaatgcagtggtgcttacaactaattgatcacaaccagttacagatttctttgttccttttccactcctattgcttcacttgactagtcataaaaaaatgatgtgaaacgtaattctaggggtgaaaaaagatttttttataaccatgatccgttactttatagaaaatttggttccaataactgcttttcaagtttttgttcttttcagttttagtacttattagtcgccactgccattataatataagcttcccaaaatgtaactgtcattgtttcacatcccctgctgatctgcagcactccccggcgcctaccaaattaaggaatgcctcgcccaatgttcagctgagacattgctgtttgta

SEQ ID NO: 13879 - DNA, 367 bp, Homo sapiens
tttttttttaagactctcactgtcacccaggctggagtgcaatggtgcgatctcggctcactgcagtctctgcctcctgggctcaagggattctccagcctcagcctcctgagtagctgggatcaaaggtgtacatcaccacacccagccaatttcatattcttggtagagatggggtttcgtcatgttggccagacagatctcgaactcctggcctcaagtgatttgctcacctcggcatcccaaagtgctgggattacaggcatgagccactgcacctggcttgtcttatttatgttatgtctacgtgaaacagcccagtggtcagcacacaaaggggtccaaacgtgaaaggaaagagcaaaca

SEQ ID NO: 13880 - DNA, 657 bp, Homo sapiens
gtttcactgcactttgctttattgtgttttgtgaccatgtgttttacgtattgaaggtttgcggccaccctgcaataagcaggtctcactggcaccattgttcctacagcacgtgctcacttcacgtctctgtgtcacatttcggtcattctcacagtattttaagatttttattattgaatctgttgtggtgatctgtaatcagtaatctttaatgctactgttgtcattgttttgggaaccacaaatcacaccaggataagacagcaaacaattgacaaatgcgtttgttctgactgcccaaccaacgggccatttctctttctctttttctcaggcttctttttattaatattaaaatgtggccaattaataaccctacaatagcctctatatgttcatgaaagaagagttgcatgtctgtcactttaaaccaaaaggaagaaataattaagcttagtgaggaaggcatgctgtaacaagacaggccagtagctagacctcatgcaacaaacacttagccaagttgtgaatgcaaacgaagtgttctggaaagaaatttaaagtactgctccagtgaacacatgaatgataaaaagctaaacaatcttgctgctgttatgaagaaagtttaattggtctagatagaagatgaaa

SEQ ID NO: 13881 - DNA, 705 bp, Homo sapiens
attttgtgaggaactgccgtactgttttgtgatagcagcttgttaacagaaagactaaactgtaaaatattttaaagaggtttattttgagccagtatgagtgatgctggcccctcaacgctttatacttcaccagaaatttatttctcactattcttgaggctggaaagtttaaagatcaaggcaccagcaagcagatttggtgtctggtaaaagacctctttctgattgttagaggtaccttctaactgtagcttcacagagtagaaggggagaatgagctccctcaggcttcttatatactaatcccattcgtgagagttctcatgacctaatcacttcccaaaggccccacttcataattccatcactcaaaataagaattttgaggaggtacaaacattcagacaatcgcagacccttaagaactagcttgtctaatttaaagatcacaatttgagtatttagtctagattgttaaatgactattacttaaagctgtgcagaaatccaaaggaagtataagacatggtcttaggaaacagatccagactcttctagttgtaggtgtcagagccttaacttgaattaacaaaagccaaaaggccagtgcctgtggtcctagctactagggaggctgaggctacagtgagctgtgatcataccactgcacaacttgggtgacagagtgaaaccctgtcttta

SEQ ID NO: 13882 - DNA, 439 bp, Homo sapiens
tgtggtttgggcgcctcatgtagtgcctgcatccaacccgattagtcaggatagggatctgagaaatgcccatacagtttgtgagacccagaatagtgacacgtgagggcaaagtggacgtgatactccctcataaaatctaggttccaacctgagaggatcagggttgtttgaacctcagttatgatgattctatactggagttccccagaatgctagtgagaagcaaaacaaaatcttgtctggaggaagttacaactgaaattgtatttttttctttctttctttttttttttttttttttaataactccaaacacctttttcaaataaagtgacccacacacatgaacccgggaggcggaggttgcagtgagccgagatcgcgccattgtactcccgcccgggcaacaagagtgaaactctatctcaaaaaagaa

SEQ ID NO: 13883 - DNA, 390 bp, Homo sapiens
ctaagtttaactcttaaaaccaagttttgttaaatctcacactgacaatgctgataacaagcttatcttcccaggtacagaataaggatgagacaaaatcaaccactcttctgcctaccctgaaacagatgaataactgagtctttactcccttttttcagtttatcttatatgaaacatagatttactgagcgttaatcagagcctcacaagaatgtaatcatttgcctcactgcctaacccctctcccttttccctcctcactctctcccctaaataatgagtttccaaaaccctctttagaaagctcaggtcacagatgctcatgtggcttgcgttttttctctggcatgtctttaaactttggcccaataaacctctactgattta

SEQ ID NO: 13884 - DNA, 460 bp, Homo sapiens
aaatgtacagttaagtgggttttagtatattcacaaggttgtgagaccatcaagactatctaattccaaaacatttcatcaccccaaaaggaaacttctacccattaacccatttatgccagaagttgtaaaaattttttgtgaaaaatcagaccttggcaatcaccttgagcagtaagatatcaataactcccacaagtttagcattccaattttggaacagtaggtaggcataaatgggttaacagtcatcccccatttctccctccccactggcaaccattagtctgctttctctatatctagatttaggcattttatataaatgggatcatgtaacatgtggccttttgtgtctggcttcttttacttggcataacattttcaaggttcctccatgttgtagcatgtatccatactggattcctttttattgccaaataatattccattgaatgga

SEQ ID NO: 13885 - DNA, 390 bp, Homo sapiens
taaaatgtgaaaacagcaatctgagatggagagaccaatgataagtggaattgtaaggaaactgagtatatagcacagttaaaatctgataggaagcagtaaaacatagaattaatactgtaggaaatggaaccattgacataaaggatgatattggaagttctcacaaaatactgagaaaaaaggaaaaaagatttataaaatggtgagaaactgacaaacatgaaggataaagaatagaaatctggcctaagaaattgatgatcttgaggccgggtgcagtggcttacacctgtgatcccagcattttggaggtcaaggcagggggattgcttaagcccaggagtttgaaaccagcctggacaacacggtgagaccctgtctctaaat

SEQ ID NO: 13886 - DNA, 1644 bp, Homo sapiens
agatatgacaggtaggctctttcaggctacagggagaagacactttagagaaaatgttagggagtaatagagtggctttttcgtttttttgcttctctgcttatagtattttgttttgggagggatgggatctggccttgattttgcagagacttcttgtgcccagcccgtagtatctacccaatcagacaaggagccaggaattactgcttctgctactgatactgataatgctaatggagaggaggtaccacatactcaagagatttcagtgtcttgggaaggtgaagctgcccctgagataaggacatctaagttaggccagccagatcctgcaccctctaagaagaaatccaatagactcaccttaagcaaaagaaagaaggaagctcaagatgagaaggtggagaaaactcaaggtggacatgagcacagacaggaagaccgactaaagaaaacagttcaggatcattctcagatcagggaccagcaaaaaggagagataagtggttttggtcaatgtctggtctgggtccagtgttccttcccaaactgtgggaaatggaggcggctgtgtgggaacattgacccctcagttctcccagataattggtcctgtgatcagaacacagatgtgcagtataatcgctgtgatattcctgaggagacctggacagggcttgagagtgatgtggcctatgcctcctacatcccaggatccatcatctgggccaagcaatacggttacccctggtggccaggcatgatagaatctgatcctgacttaggggaatattttctttttacttcccatcttgattccctgccgtctaagtaccatgtgacgttttttggagaaacagtttctcgtgcatggatcccagtcaacatgctaaagaacttccaggagctgtccctggagctatcagtcatgaaaaagcgcagaaatgactgcagccagaaactgggggtggccctgatgatggctcaagaggcagaacagatcagcattcaggaacgggttaacttgtttggtttctggagccgattcaacggatctaacagtaatggggaaagaaaagacttacagctctctggtttgaacagcccaggatcctgcttagagaaaaaggagaaagaggaagagttggaaaaggaggaaggagagaaaacagcccttaagaaaaaatttaaagctccccagagcaaggccttggcagccagcttttcagagggaaaagaagttagaacagtgccaaagaacctgggcctatcagcgtgtaagggggcctgcccctcatctgcgaaagaagagcccagacaccgggaacccctgacccaggaggctggaagtgtcccccttgaggacgaagcctccagtgacctggacctggagcaactcatggaagatgttgggagagagctggggcagagcggggagctgcagcacagcaacagtgatggcgaggacttccccgtggcgctgtttgggaagtagctggtgctcctctgctccctctttttctcccttctctggggcgcaggagggagaagttgctaagtgctgggtctgttcattggctatgaggttcaaatgtgtgtggtgcagtttctgtgttaataaagcaggttacagtcgaaaaa

SEQ ID NO: 13887 - DNA, 2481 bp, Homo sapiens
cccgtcagttcgcgggcctctcaacacccaccgcggcgccacgccgacttatataccagcgagtgtgggcggggacgggggttcggtccgcgctgggcccccccagcttctgccaatgaggaagaagcgagtctacgccgttttcccggggagatgcgccgcccggtctccctgccagcggagtgctgggccgaggacagggcggcaggggtgacagtggggtccaggagagtctcaaaatcctaagctttcagtatttgttattgtgaaagaagttaattcacctgaaacagaggaggggcaacctgagttatcagaaagtgacttcctggccttcccttctttactgatcagaggcacacaaagcgtagtttctaagctgaatgatgacaacgttgcagaataaagaagaatgtggaaagggaccaaagagaatctttgccccacctgcacaaaaatcttacagcctgttaccttgtagccctaactcccctaaggaggagaccccggggatcagttccccagagacagaggccaggataagcctgccaaaggccagtttaaagaagaaagaggaaaaagcaaccatgaagaatgttccaagcagggaacaggagaaaaaaagaaaggcacaaatcaacaagcaagcagagaagaaagaaaaggaaaaatcaagtcttaccaatgcagaatttgaggagattgtccagattgttctgcagaagtcccttcaggagtgcttggggatgggatctggccttgattttgcagagacttcttgtgcccagcccgtagtatctacccaatcagacaaggagccaggaattactgcttctgctactgatactgataatgctaatggagaggaggtaccacatactcaagagatttcagtgtcttgggaaggtgaagctgcccctgagataaggacatctaagttaggccagccagatcctgcaccctctaagaagaaatccaatagactcaccttaagcaaaagaaagaaggaagctcaagatgagaaggtggagaaaactcaaggtggacatgagcacagacaggaagaccgactaaagaaaacagttcaggatcattctcagatcagggaccagcaaaaaggagagataagtggttttggtcaatgtctggtctgggtccagtgttccttcccaaactgtgggaaatggaggcggctgtgtgggaacattgacccctcagttctcccagataattggtcctgtgatcagaacacagatgtgcagtataatcgctgtgatattcctgaggagacctggacagggcttgagagtgatgtggcctatgcctcctacatcccaggatccatcatctgggccaagcaatacggttacccctggtggccaggcatgatagaatctgatcctgacttaggggaatattttctttttacttcccatcttgattccctgccgtctaagtaccatgtgacgttttttggagaaacagtttctcgtgcatggatcccagtcaacatgctaaagaacttccaggagctgtccctggagctatcagtcatgaaaaagcgcagaaatgactgcagccagaaactgggggtggccctgatgatggctcaagaggcagaacagatcagcattcaggaacgggttaacttgtttggtttctggagccgattcaacggatctaacagtaatggggaaagaaaagacttacagctctctggtttgaacagcccaggatcctgcttagagaaaaaggagaaagaggaagagttggaaaaggaggaaggagagaaaacagacccaattttgcccattcgtaagcgagtcaaaatacagacccaaaaaaaccaagccaagagggcttgggggtgatgcaggcacagcagatggccgaggcaggacactgcagaggaagataatgaagagatctctaggcaggaaatccacagctcctcctgcacccagaatgggaaggaaagaaggccaagggaattcagattctgaccagccaggcccttaagaaaaaatttaaagctccccagagcaaggccttggcagccagcttttcagagggaaaagaagttagaacagtgccaaagaacctgggcctatcagcgtgtaagggggcctgcccctcatctgcgaaagaagagcccagacaccgggaacccctgacccaggaggctggaagtgtcccccttgaggacgaagcctccagtgacctggacctggagcaactcatggaagatgttgggagagagctggggcagagcggggagctgcagcacagcaacagtgatggcgaggacttccccgtggcgctgtttgggaagtagctggtgctcctctgctccctctttttctcccttctctggggcgcaggagggagaagttgctaagtgctgggtctgttcattggctatgaggttcaaatgtgtgtggtgcagtttctgtgttaataaagcaggttacagtcgaaaaa

SEQ ID NO: 13888 - DNA, 493 bp, Homo sapiens
  misc_feature (19)..(19): n is a, c, g, or t
  misc_feature (28)..(28): n is a, c, g, or t
  misc_feature (59)..(60): n is a, c, g, or t
cccccttaaaaaaaaaaantttttaaangcttcccccaaagagccaaagggccctttgnnaagccaagctttttttaaagaagggaaaagaagttagaacagtgccaaagaacctgggcctatcagcgtgtaagggggcctgcccctcatctgcgaaagaagagcccagacaccgggaacccctgacccaggaggctggaagtgtcccccttgaggacgaagcctccagtgacctggacctggagcaactcatggaagatgttgggagagagctggggcagagcggggagctgcagcacagcaacagtgatggcgaggacttccccgtggcgctgtttgggaagtagctggtgctcctctgctccctctttttctcccttctctggggcgcaggagggagaagttgctaagtgctgggtctgttcattggctatgaggttcaaatgtgtgtggtgcagtttctgtgttaataaagcaggttacagtcgaaaaa

SEQ ID NO: 13889 - DNA, 362 bp, Homo sapiens
gttttcccgggacgttcgggtggaagatggcggatttacctcagctgcggaaacgcgacgctgtttccagttgcgcatgcgcctcggccccgcgagcgcaccgccctcgggtggagctagtgctcagggcgtcctcgtgccttttcttggtggcgggaaacctgggttgaggtgtgaggggcttgcggagtcgctgcggcagctggttccgcccatcgcctttaggtcctccttgctcctgaaggtagccagctagtttctggttgtaggtgaaggtgctaggcgctgccagtcctggcacccgttgcctgaggagaaactttctcagggcgacaaccagcccttcgccctttttcctcaga

SEQ ID NO: 13890 - DNA, 2434 bp, Homo sapiens
gttttcccgggacgttcgggtggaagatggcggatttacctcagctgcggaaacgcgacgctgtttccagttgcgcatgcgcctcggccccgcgagcgcaccgccctcgggtggagctagtgctcagggcgtcctcgtgccttttcttggtggcgggaaacctgggttgaggtgtgaggggcttgcggagtcgctgcggcagctggttccgcccatcgcctttaggtcctccttgctcctgaagctttcagtatttgttattgtgaaagaagttaattcacctgaaacagaggaggggcaacctgagttatcagaaagtgacttcctggccttcccttctttactgatcagaggcacacaaagcgtagtttctaagctgaatgatgacaacgttgcagaataaagaagaatgtggaaagggaccaaagagaatctttgccccacctgcacaaaaatcttacagcctgttaccttgtagccctaactcccctaaggaggagaccccggggatcagttccccagagacagaggccaggataagcctgccaaaggccagtttaaagaagaaagaggaaaaagcaaccatgaagaatgttccaagcagggaacaggagaaaaaaagaaaggcacaaatcaacaagcaagcagagaagaaagaaaaggaaaaatcaagtcttaccaatgcagaatttgaggagattgtccagattgttctgcagaagtcccttcaggagtgcttgggtatggcatgtagtaagagaaaaagggtttcagttaagcagtgactgttacctgagagggagagttaagtctgacagcttctctctttctctcccatcttctaaataagggatgggatctggccttgattttgcagagacttcttgtgcccagcccgtagtatctacccaatcagacaaggagccaggaattactgcttctgctactgatactgataatgctaatggagaggaggtaccacatactcaagagatttcagtgtcttgggaaggtgaagctgcccctgagataaggacatctaagttaggccagccagatcctgcaccctctaagaagaaatccaatagactcaccttaagcaaaagaaagaaggaagctcaagatgagaaggtggagaaaactcaaggtggacatgagcacagacaggaagaccgactaaagaaaacagttcaggatcattctcagatcagggaccagcaaaaaggagagataagtggttttggtcaatgtctggtctgggtccagtgttccttcccaaactgtgggaaatggaggcggctgtgtgggaacattgacccctcagttctcccagataattggtcctgtgatcagaacacagatgtgcagtataatcgctgtgatattcctgaggagacctggacagggcttgagagtgatgtggcctatgcctcctacatcccaggatccatcatctgggccaagcaatacggttacccctggtggccaggcatgatagaatctgatcctgacttaggggaatattttctttttacttcccatcttgattccctgccgtctaagtaccatgtgacgttttttggagaaacagtttctcgtgcatggatcccagtcaacatgctaaagaacttccaggagctgtccctggagctatcagtcatgaaaaagcgcagaaatgactgcagccagaaactgggggtggccctgatgatggctcaagaggcagaacagatcagcattcaggaacgggttaacttgtttggtttctggagccgattcaacggatctaacagtaatggggaaagaaaagacttacagctctctggtttgaacagcccaggatcctgcttagagaaaaaggagaaagaggaagagttggaaaaggaggaaggagagaaaacagacccaattttgcccattcgtaagcgagtcaaaatacagacccaaaaaaaccaagccaagaggcccttaagaaaaaatttaaagctccccagagcaaggccttggcagccagcttttcagagggaaaagaagttagaacagtgccaaagaacctgggcctatcagcgtgtaagggggcctgcccctcatctgcgaaagaagagcccagacaccgggaacccctgacccaggaggctggaagtgtcccccttgaggacgaagcctccagtgacctggacctggagcaactcatggaagatgttgggagagagctggggcagagcggggagctgcagcacagcaacagtgatggcgaggacttccccgtggcgctgtttgggaagtagctggtgctcctctgctccctctttttctcccttctctggggcgcaggagggagaagttgctaagtgctgggtctgttcattggctatgaggttcaaatgtgtgtggtgcagtttctgtgttaataaagcaggttacagtcgaaaaa

SEQ ID NO: 13891 - DNA, 2263 bp, Homo sapiens
gttttcccgggacgttcgggtggaagatggcggatttacctcagctgcggaaacgcgacgctgtttccagttgcgcatgcgcctcggccccgcgagcgcaccgccctcgggtggagctagtgctcagggcgtcctcgtgccttttcttggtggcgggaaacctgggttgaggtgtgaggggcttgcggagtcgctgcggcagctggttccgcccatcgcctttaggtcctccttgctcctgaagctttcagtatttgttattgtgaaagaagttaattcacctgaaacagaggaggggcaacctgagttatcagaaagtgacttcctggccttcccttctttactgatcagaggcacacaaagcgtagtttctaagctgaatgatgacaacgttgcagaataaagaagaatgtggaaagggaccaaagagaatctttgccccacctgcacaaaaatcttacagcctgttaccttgtagccctaactcccctaaggaggagaccccggggatcagttccccagagacagaggccaggataagcctgccaaaggccagtttaaagaagaaagaggaaaaagcaaccatgaagaatgttccaagcagggaacaggagaaaaaaagaaaggcacaaatcaacaagcaagcagagaagaaagaaaaggaaaaatcaagtcttaccaatgcagaatttgaggagattgtccagattgttctgcagaagtcccttcaggagtgcttggggatgggatctggccttgattttgcagagacttcttgtgcccagcccgtagtatctacccaatcagacaaggagccaggaattactgcttctgctactgatactgataatgctaatggagaggaggtaccacatactcaagagatttcagtgtcttgggaaggtgaagctgcccctgagataaggacatctaagttaggccagccagatcctgcaccctctaagaagaaatccaatagactcaccttaagcaaaagaaagaaggaagctcaagatgagaaggtggagaaaactcaaggtggacatgagcacagacaggaagaccgactaaagaaaacagttcaggatcattctcagatcagggaccagcaaaaaggagagataagtggttttggtcaatgtctggtctgggtccagtgttccttcccaaactgtgggaaatggaggcggctgtgtgggaacattgacccctcagttctcccagataattggtcctgtgatcagaacacagatgtgcagtataatcgctgtgatattcctgaggagacctggacagggcttgagagtgatgtggcctatgcctcctacatcccaggatccatcatctgggccaagcaatacggttacccctggtggccaggcatgatagaatctgatcctgacttaggggaatattttctttttacttcccatcttgattccctgccgtctaagtaccatgtgacgttttttggagaaacagtttctcgtgcatggatcccagtcaacatgctaaagaacttccaggagctgtccctggagctatcagtcatgaaaaagcgcagaaatgactgcagccagaaactgggggtggccctgatgatggctcaagaggcagaacagatcagcattcaggaacgggttaacttgtttggtttctggagccgattcaacggatctaacagtaatggggaaagaaaagacttacagctctctggtttgaacagcccaggatcctgcttagagaaaaaggagaaagaggaagagttggaaaaggaggaaggagagaaaacagcccttaagaaaaaatttaaagctccccagagcaaggccttggcagccagcttttcagagggaaaagaagttagaacagtgccaaagaacctgggcctatcagcgtgtaagggggcctgcccctcatctgcgaaagaagagcccagacaccgggaacccctgacccaggaggctggaagtgtcccccttgaggacgaagcctccagtgacctggacctggagcaactcatggaagatgttgggagagagctggggcagagcggggagctgcagcacagcaacagtgatggcgaggacttccccgtggcgctgtttgggaagtagctggtgctcctctgctccctctttttctcccttctctggggcgcaggagggagaagttgctaagtgctgggtctgttcattggctatgaggttcaaatgtgtgtggtgcagtttctgtgttaataaagcaggttacagtcgaaaaa

SEQ ID NO: 13892 - DNA, 1480 bp, Homo sapiens
gttttcccgggacgttcgggtggaagatggcggatttacctcagctgcggaaacgcgacgctgtttccagttgcgcatgcgcctcggccccgcgagcgcaccgccctcgggtggagctagtgctcagggcgtcctcgtgccttttcttggtggcgggaaacctgggttgaggtgtgaggggcttgcggagtcgctgcggcagctggttccgcccatcgcctttaggtcctccttgctcctgaagctttcagtatttgttattgtgaaagaagttaattcacctgaaacagaggaggggcaacctgagttatcagaaagtgacttcctggccttcccttctttactgatcaggtcaatgtctggtctgggtccagtgttccttcccaaactgtgggaaatggaggcggctgtgtgggaacattgacccctcagttctcccagataattggtcctgtgatcagaacacagatgtgcagtataatcgctgtgatattcctgaggagacctggacagggcttgagagtgatgtggcctatgcctcctacatcccaggatccatcatctgggccaagcaatacggttacccctggtggccaggcatgatagaatctgatcctgacttaggggaatattttctttttacttcccatcttgattccctgccgtctaagtaccatgtgacgttttttggagaaacagtttctcgtgcatggatcccagtcaacatgctaaagaacttccaggagctgtccctggagctatcagtcatgaaaaagcgcagaaatgactgcagccagaaactgggggtggccctgatgatggctcaagaggcagaacagatcagcattcaggaacgggttaacttgtttggtttctggagccgattcaacggatctaacagtaatggggaaagaaaagacttacagctctctggtttgaacagcccaggatcctgcttagagaaaaaggagaaagaggaagagttggaaaaggaggaaggagagaaaacagcccttaagaaaaaatttaaagctccccagagcaaggccttggcagccagcttttcagagggaaaagaagttagaacagtgccaaagaacctgggcctatcagcgtgtaagggggcctgcccctcatctgcgaaagaagagcccagacaccgggaacccctgacccaggaggctggaagtgtcccccttgaggacgaagcctccagtgacctggacctggagcaactcatggaagatgttgggagagagctggggcagagcggggagctgcagcacagcaacagtgatggcgaggacttccccgtggcgctgtttgggaagtagctggtgctcctctgctccctctttttctcccttctctggggcgcaggagggagaagttgctaagtgctgggtctgttcattggctatgaggttcaaatgtgtgtggtgcagtttctgtgttaataaagcaggttacagtcgaaaaa

SEQ ID NO: 13893 - DNA, 1738 bp, Homo sapiens
tactttttagtagagacggggttcaccatatcagccaggttggtctcgaactcctgaccttgtgatccacccgccttggcctcccaaagtgctgggattacaggcgtgagccaccaggcccagcccatttatcatatttctatagatttctctcagctcaggaaagatacctgtttgagttgggaaaaataggcaagtagatggatgaaatggcctcaggaggtcttagagagcttaggattcatctgtcttccttttactcgggttttttcagaagaagagttctgcaattgctctatttttacctttcattaaaataaaacctcattttcagagaggaggtaccacatactcaagagatttcagtgtcttgggaaggtgaagctgcccctgagataaggacatctaagttaggccagccagatcctgcaccctctaagaagaaatccaatagactcaccttaagcaaaagaaagaaggaagctcaagatgagaaggtggagaaaactcaaggtggacatgagcacagacaggaagaccgactaaagaaaacagttcaggatcattctcagatcagggaccagcaaaaaggagagataagtggttttggtcaatgtctggtctgggtccagtgttccttcccaaactgtgggaaatggaggcggctgtgtgggaacattgacccctcagttctcccagataattggtcctgtgatcagaacacagatgtgcagtataatcgctgtgatattcctgaggagacctggacagggcttgagagtgatgtggcctatgcctcctacatcccaggatccatcatctgggccaagcaatacggttacccctggtggccaggcatgatagaatctgatcctgacttaggggaatattttctttttacttcccatcttgattccctgccgtctaagtaccatgtgacgttttttggagaaacagtttctcgtgcatggatcccagtcaacatgctaaagaacttccaggagctgtccctggagctatcagtcatgaaaaagcgcagaaatgactgcagccagaaactgggggtggccctgatgatggctcaagaggcagaacagatcagcattcaggaacgggttaacttgtttggtttctggagccgattcaacggatctaacagtaatggggaaagaaaagacttacagctctctggtttgaacagcccaggatcctgcttagagaaaaaggagaaagaggaagagttggaaaaggaggaaggagagaaaacagcccttaagaaaaaatttaaagctccccagagcaaggccttggcagccagcttttcagagggaaaagaagttagaacagtgccaaagaacctgggcctatcagcgtgtaagggggcctgcccctcatctgcgaaagaagagcccagacaccgggaacccctgacccaggaggctggaagtgtcccccttgaggacgaagcctccagtgacctggacctggagcaactcatggaagatgttgggagagagctggggcagagcggggagctgcagcacagcaacagtgatggcgaggacttccccgtggcgctgtttgggaagtagctggtgctcctctgctccctctttttctcccttctctggggcgcaggagggagaagttgctaagtgctgggtctgttcattggctatgaggttcaaatgtgtgtggtgcagtttctgtgttaataaagcaggttacagtcgaaaaa

SEQ ID NO: 13894 - DNA, 1384 bp, Homo sapiens
cccgtcagttcgcgggcctctcaacacccaccgcggcgccacgccgacttatataccagcgagtgtgggcggggacgggggttcggtccgcgctgggcccccccagcttctgccaatgaggaagaagcgagtctacgccgttttcccggggagatgcgccgcccggtctccctgccagcggagtgctgggccgaggacagggcggcaggggtgacagtggggtccaggagagtctcaaaatcctaagctttcagtatttgttattgtgaaagaagttaattcacctgaaacagaggaggggcaacctgagttatcagaaagtgacttcctggccttcccttctttactgatcagtctaagtaccatgtgacgttttttggagaaacagtttctcgtgcatggatcccagtcaacatgctaaagaacttccaggagctgtccctggagctatcagtcatgaaaaagcgcagaaatgactgcagccagaaactgggggtggccctgatgatggctcaagaggcagaacagatcagcattcaggaacgggttaacttgtttggtttctggagccgattcaacggatctaacagtaatggggaaagaaaagacttacagctctctggtttgaacagcccaggatcctgcttagagaaaaaggagaaagaggaagagttggaaaaggaggaaggagagaaaacagacccaattttgcccattcgtaagcgagtcaaaatacagacccaaaaaaaccaagccaagagggcttgggggtgatgcaggcacagcagatggccgaggcaggacactgcagaggaagataatgaagagatctctaggcaggaaatccacagctcctcctgcacccagaatgggaaggaaagaaggccaagggaattcagattctgaccagccaggcccttaagaaaaaatttaaagctccccagagcaaggccttggcagccagcttttcagagggaaaagaagttagaacagtgccaaagaacctgggcctatcagcgtgtaagggggcctgcccctcatctgcgaaagaagagcccagacaccgggaacccctgacccaggaggctggaagtgtcccccttgaggacgaagcctccagtgacctggacctggagcaactcatggaagatgttgggagagagctggggcagagcggggagctgcagcacagcaacagtgatggcgaggacttccccgtggcgctgtttgggaagtagctggtgctcctctgctccctctttttctcccttctctggggcgcaggagggagaagttgctaagtgctgggtctgttcattggctatgaggttcaaatgtgtgtggtgcagtttctgtgttaataaagcaggttacagtcgaaaaa

SEQ ID NO: 13895 - DNA, 864 bp, Homo sapiens
ttgtttcttggttcccttaggaacgggttaacttgtttggtttctggagccgattcaacggatctaacagtaatggggaaagaaaagacttacagctctctggtttgaacagcccaggatcctgcttagagaaaaaggagaaagaggaagagttggaaaaggaggaaggagagaaaacagacccaattttgcccattcgtaagcgagtcaaaatacagacccaaaaaaaccaagccaagagggcttgggggtgatgcaggcacagcagatggccgaggcaggacactgcagaggaagataatgaagagatctctaggcaggaaatccacagctcctcctgcacccagaatgggaaggaaagaaggccaagggaattcagattctgaccagccaggcccttaagaaaaaatttaaagctccccagagcaaggccttggcagccagcttttcagagggaaaagaagttagaacagtgccaaagaacctgggcctatcagcgtgtaagggggcctgcccctcatctgcgaaagaagagcccagacaccgggaacccctgacccaggaggctggaagtgtcccccttgaggacgaagcctccagtgacctggacctggagcaactcatggaagatgttgggagagagctggggcagagcggggagctgcagcacagcaacagtgatggcgaggacttccccgtggcgctgtttgggaagtagctggtgctcctctgctccctctttttctcccttctctggggcgcaggagggagaagttgctaagtgctgggtctgttcattggctatgaggttcaaatgtgtgtggtgcagtttctgtgttaataaagcaggttacagtcgaaaaa

SEQ ID NO: 13896 - DNA, 1044 bp, Homo sapiens
gttttcccgggacgttcgggtggaagatggcggatttacctcagctgcggaaacgcgacgctgtttccagttgcgcatgcgcctcggccccgcgagcgcaccgccctcgggtggagctagtgctcagggcgtcctcgtgccttttcttggtggcgggaaacctgggttgaggtgtgaggggcttgcggagtcgctgcggcagctggttccgcccatcgcctttaggtcctccttgctcctgaagctttcagtatttgttattgtgaaagaagttaattcacctgaaacagaggaggggcaacctgagttatcagaaagtgacttcctggccttcccttctttactgatcagaggcacacaaagcgtagtttctaagctgaatgatgacaacgttgcagaataaagaagaatgtggaaagggaccaaagagaatctttgccccacctgcacaaaaatcttacagcctgttaccttgtagccctaactcccctaaggaggagaccccggggatcagttccccagagacagaggccaggataagcctgccaaaggccagtttaaagaagaaagaggaaaaagcaaccatgaagaatgttccaagcagggaacaggagaaaaaaagaaaggcacaaatcaacaagcaagcagagaagaaagaaaaggaaaaatcaagtcttaccaatgcagaatttgaggagattgtccagattgttctgcagaagtcccttcaggagtgcttggggatgggatctggccttgattttgcagagacttcttgtgcccagcccgtagtatctacccaatcagacaaggagccaggaattactgcttctgctactgatactgataatgctaatgggtaagtttatttcagtgaggcaagttgaacacagaatggactacacattcatggtcagtcagtctatctatctgtctgtctatctggtcatttatcatatttctttttttttttttttttgagacggagtctcgctctgtcgcccaggctggagtacagtggcgtgatcttagctcactgcaacc

SEQ ID NO: 13897 - DNA, 5233 bp, Homo sapiens
cggccgcccgggcaggttttgtagactttcatagccaaagaaaccggcttcggcttctttaaaatccccgacgactcacctgattaacctgctgcagttctgaccctgccaagagctgacaatttactggttcatcaatgaaacaatattaaattatgaagatgtaaggaaaaaatcctacgctaacactgtcgcagtttgaaaggcttctctgcagaatgtcaaacaaagatcgacacattgattccagctgttcgtccttcatcaagacggaaccttccagcccagcctccctgacggacagcgtcaaccaccacagccctggtggctcttcagacgccagtgggagctacagttcaaccatgaatggccatcagaacggacttgactcgccacctctctacccttctgctcctatcctgggaggtagtgggcctgtcaggaaactgtatgatgactgctccagcaccattgttgaagatccccagaccaagtgtgaatacatgctcaactcgatgcccaagagactgtgtttagtgtgtggtgacatcgcttctgggtaccactatggggtagcatcatgtgaagcctgcaaggcattcttcaagaggacaattcaaggcaatatagaatacagctgccctgccacgaatgaatgtgaaatcacaaagcgcagacgtaaatcctgccaggcttgccgcttcatgaagtgtttaaaagtgggcatgctgaaagaaggggtgcgtcttgacagagtacgtggaggtcggcagaagtacaagcgcaggatagatgcggagaacagcccatacctgaaccctcagctggttcagccagccaaaaagccatataacaagattgtctcacatttgttggtggctgaaccggagaagatctatgccatgcctgaccctactgtccccgacagtgacatcaaagccctcactacactgtgtgacttggccgaccgagagttggtggttatcattggatgggcgaagcatattccagggcttctccacgctgtccctggcggaccagatgagccttctgcagagtgcttggatggaaattttgatccttggtgtcgtataccggtctctttcgtttgaggatgaacttgtctatgcagacgattatataatggacgaagaccagtccaaattagcaggccttcttgatctaaataatgctatcctgcagctggtaaagaaatacaagagcatgaagctggaaaaagaagaatttgtcaccctcaaagctatagctcttgctaattcagactccatgcacatagaagatgttgaagccgttcagaagcttcaggatgtcttacatgaagcgctgcaggattatgaagctggccagcacatggaagaccctcgtcgagctggcaagatgctgatgacactgccactcctgaggcagacctctaccaaggccgtgcagcatttctacaacatcaaactagaaggcaaagtcccaatgcacaaactttttttggaaatgttggaggccaaggtctgactaaaagctccctgggccttcccatccttcatgttgaaaaagggaaaataaacccaagagtgatgtcgaagaaacttagagtttagttaacaacatcaaaaatcaacagactgcactgataatttagcagcaagactatgaagcagctttcagattcctccataggttcctgatgagtttctttctactttctccatcatcttctttcctctttcttcccacatttctctttctctttattttttctccttttcttctttcacctcccttatttctttgcttctttcattcctagttcccattctcctttattttcttcccgtctgcctgccttctttcttttctttacctactctcattcctctcttttctcatccttccccttttttctaaatttgaaatagctttagtttaaaaaaaaatcctcccttccccctttcctttccctttctttcctttttccctttccttttccctttcctttcctttcctcttgaccttctttccatctttctttttcttccttctgctgctgaacttttaaaagaggtctctaactgaagagagatggaagccagccctgccaaaggatggagatccataatatggatgccagtgaacttattgtgaaccataccgtccccaatgactaaggaatcaaagagagagaaccaacgttcctaaaagtacagtgcaacatatacaaattgactgagtgcagtattagatttcatgggagcagcctctaattagacaacttaagcaacgttgcatcggctgcttcttatcattgcttttccatctagatcagttacagccatttgattccttaattgttttttcaagtcttccaggtatttgttagtttagctactatgtaactttttcagggaatagtttaagctttattcattcatgcaatactaaagagaaataagaatactgcaattttgtgctggctttgaacaattacgaacaataatgaaggacaaatgaatcctgaaggaagatttttaaaaatgttttgtttcttcttacaaatggagatttttttgtaccagctttaccacttttcagccatttattaatatgggaatttaacttactcaagcaatagttgaagggaaggtgcatattatcacggatgcaatttatgttgtgtgcccagtctggtcccaaacatcaatttcttaacatgagctccagtttacctaaatgttcactgacacaaaggatgagattacacctacagtgactctgagtagtcacatatataagcactgcacatgagatatagatccgtagaattgtcaggagtgcacctctctacttgggaggtacaattgccatatgatttctagctgccatggtggttaggaatgtgatactgcctgtttgcaaagtcacagaccttgcctcagaaggagctgtgagccagtattcatttaagaggcaataaggcaaatgccagaattaaaaaaaaaaaatcatcaaagacagaaaatgcctgaccaaattctaaaacctaatccatataagtttattcatttaggaatgttcgtttaaattaatctgcagtttttaccaagagctaagccaatatatgtgcttttcaaccagtattgtcacagcatgaaagtcaagtcaggttccagactgttaagaggtgtaatctaatgaagaaatcaattagatgccccgaaatctacagtcgctgaataaccaataaacagtaacctccatcaaatgctataccaatggaccagtgttagtagctgctccctgtattatgtgaacagtcttattctatgtacacagatgtaattaaaattgtaatcctaacaaacaaaagaaatgtagttcagcttttcaatgtttcatgtttgctgtgcttttctgaattttatgttgcattcaaagactgttgtcttgttcttgtggtgtttggattcttgtggtgtgtgcttttagacacagggtagaattagagacaatattggatgtacaattcctcaggagactacagtagtatattctattccttaccagtaataaggttcttcctaataataattaagagattgaaactccaaacaagtattcattatgaacagatacacatcaaaatcataataatattttcaaaacaaggaataatttctctaatggtttattatagaataccaatgtatagcttagaaataaaactttgaatatttcaagaatatagataagtctaatttttaaatgctgtatatatggctttcactcaatcatctctcagatgttgttattaactcgctctgtgttgttgcaaaactttttggtgcagattcgtttccaaaactattgctactttgtgtgctttaaacaaaataccttgggttgatgaaacatcaacccagtgctaggaatactgtgtatctatcattagctatatgggactatattgtagattgtggtttctcagtagagaagtgactgtagtgtgattctagataaatcatcattagcaattcattcagatggtcaataacttgaaatttatagctgtgataggagttcagaaattggcacatccctttaaaaataacaacagaaaatacaactcctgggaaaaaaggtgctgattctataagattatttatatatgtaagtgtttaaaaagattattttccagaaagtttgtgcagggtttaagttgctactattcaactacactatatataaataaaatatatacaatatatacattgttttcactgtatcacattaaagtacttgggcttcagaagtaagagccaaccaactgaaaacctgagatggagatatgttcaaagaatgagatacaattttttagttttcagtttaagtaactctcagcattacaaaagagtaagtatctcacaaataggaaataaaactaaaacgtagatttaaaaagaactgcacgggctttagggtaaatgctcatcttaaacctcactagagggaagtcttctcaagtttcaagcaagaccatttacttaatgtgaagttttggaaagttataaaggtgtatgttttagccatatgattttaattttaattttgcttcttttaggttcgttcttatttaaagcaatatgattgtgtgactccttgtagttacacttgtgtttcaatcagatcagattgttgtatttattccactattttgcatttaaatgataacataaaagatataaaaaatttaaaactgctatttttcttatagaagagaaaatgggtgttggtgattgtattttaattatttaagcgtctctgtttacctgcctaggaaaacattttatggcagtcttatgtgcaaagatcgtaaaaggacaaaaaatttaaactgcttataataatccaggagttgcattatagccagtagtaaaaataataataataataataaaaccatgtctatagctgtagatgggcttcacatctgtaaagcaatcaattgtatatttttgtgatgtgtaccatactgtgtgctccagcaaatgtccatttgtgtaaatgtatttattttatattgtatatattgttaaatgcaaaaaggagatatgattctgtaactccaatcagttcagatgtgtaactcaaattattatgcctttcaggatgatggtagagcaatattaaacaagcttccacttttgactgctacttttgtatt

SEQ ID NO: 13898 - DNA, 5239 bp, Homo sapiens
aagtccttgattaggagagtgtgagagctttggtcccaactggctgtgcctataggcttgtcactaggagaacatttgtgttaattgcactgtgctctgtcaaggaaactttgatttatagctggggtgcacaaataatggttgccggtcgcacatggattcggtagaactttgccttcctgaatctttttccctgcactacgaggaagaggcttctctgcagaatgtcaaacaaagatcgacacattgattccagctgttcgtccttcatcaagacggaaccttccagcccagcctccctgacggacagcgtcaaccaccacagccctggtggctcttcagacgccagtgggagctacagttcaaccatgaatggccatcagaacggacttgactcgccacctctctacccttctgctcctatcctgggaggtagtgggcctgtcaggaaactgtatgatgactgctccagcaccattgttgaagatccccagaccaagtgtgaatacatgctcaactcgatgcccaagagactgtgtttagtgtgtggtgacatcgcttctgggtaccactatggggtagcatcatgtgaagcctgcaaggcattcttcaagaggacaattcaaggcaatatagaatacagctgccctgccacgaatgaatgtgaaatcacaaagcgcagacgtaaatcctgccaggcttgccgcttcatgaagtgtttaaaagtgggcatgctgaaagaaggggtgcgtcttgacagagtacgtggaggtcggcagaagtacaagcgcaggatagatgcggagaacagcccatacctgaaccctcagctggttcagccagccaaaaagccatataacaagattgtctcacatttgttggtggctgaaccggagaagatctatgccatgcctgaccctactgtccccgacagtgacatcaaagccctcactacactgtgtgacttggccgaccgagagttggtggttatcattggatgggcgaagcatattccagggcttctccacgctgtccctggcggaccagatgagccttctgcagagtgcttggatggaaattttgatccttggtgtcgtataccggtctctttcgtttgaggatgaacttgtctatgcagacgattatataatggacgaagaccagtccaaattagcaggccttcttgatctaaataatgctatcctgcagctggtaaagaaatacaagagcatgaagctggaaaaagaagaatttgtcaccctcaaagctatagctcttgctaattcagactccatgcacatagaagatgttgaagccgttcagaagcttcaggatgtcttacatgaagcgctgcaggattatgaagctggccagcacatggaagaccctcgtcgagctggcaagatgctgatgacactgccactcctgaggcagacctctaccaaggccgtgcagcatttctacaacatcaaactagaaggcaaagtcccaatgcacaaactttttttggaaatgttggaggccaaggtctgactaaaagctccctgggccttcccatccttcatgttgaaaaagggaaaataaacccaagagtgatgtcgaagaaacttagagtttagttaacaacatcaaaaatcaacagactgcactgataatttagcagcaagactatgaagcagctttcagattcctccataggttcctgatgagtttctttctactttctccatcatcttctttcctctttcttcccacatttctctttctctttattttttctccttttcttctttcacctcccttatttctttgcttctttcattcctagttcccattctcctttattttcttcccgtctgcctgccttctttcttttctttacctactctcattcctctcttttctcatccttccccttttttctaaatttgaaatagctttagtttaaaaaaaaatcctcccttccccctttcctttccctttctttcctttttccctttccttttccctttcctttcctttcctcttgaccttctttccatctttctttttcttccttctgctgctgaacttttaaaagaggtctctaactgaagagagatggaagccagccctgccaaaggatggagatccataatatggatgccagtgaacttattgtgaaccataccgtccccaatgactaaggaatcaaagagagagaaccaacgttcctaaaagtacagtgcaacatatacaaattgactgagtgcagtattagatttcatgggagcagcctctaattagacaacttaagcaacgttgcatcggctgcttcttatcattgcttttccatctagatcagttacagccatttgattccttaattgttttttcaagtcttccaggtatttgttagtttagctactatgtaactttttcagggaatagtttaagctttattcattcatgcaatactaaagagaaataagaatactgcaattttgtgctggctttgaacaattacgaacaataatgaaggacaaatgaatcctgaaggaagatttttaaaaatgttttgtttcttcttacaaatggagatttttttgtaccagctttaccacttttcagccatttattaatatgggaatttaacttactcaagcaatagttgaagggaaggtgcatattatcacggatgcaatttatgttgtgtgcccagtctggtcccaaacatcaatttcttaacatgagctccagtttacctaaatgttcactgacacaaaggatgagattacacctacagtgactctgagtagtcacatatataagcactgcacatgagatatagatccgtagaattgtcaggagtgcacctctctacttgggaggtacaattgccatatgatttctagctgccatggtggttaggaatgtgatactgcctgtttgcaaagtcacagaccttgcctcagaaggagctgtgagccagtattcatttaagaggcaataaggcaaatgccagaattaaaaaaaaaaaatcatcaaagacagaaaatgcctgaccaaattctaaaacctaatccatataagtttattcatttaggaatgttcgtttaaattaatctgcagtttttaccaagagctaagccaatatatgtgcttttcaaccagtattgtcacagcatgaaagtcaagtcaggttccagactgttaagaggtgtaatctaatgaagaaatcaattagatgccccgaaatctacagtcgctgaataaccaataaacagtaacctccatcaaatgctataccaatggaccagtgttagtagctgctccctgtattatgtgaacagtcttattctatgtacacagatgtaattaaaattgtaatcctaacaaacaaaagaaatgtagttcagcttttcaatgtttcatgtttgctgtgcttttctgaattttatgttgcattcaaagactgttgtcttgttcttgtggtgtttggattcttgtggtgtgtgcttttagacacagggtagaattagagacaatattggatgtacaattcctcaggagactacagtagtatattctattccttaccagtaataaggttcttcctaataataattaagagattgaaactccaaacaagtattcattatgaacagatacacatcaaaatcataataatattttcaaaacaaggaataatttctctaatggtttattatagaataccaatgtatagcttagaaataaaactttgaatatttcaagaatatagataagtctaatttttaaatgctgtatatatggctttcactcaatcatctctcagatgttgttattaactcgctctgtgttgttgcaaaactttttggtgcagattcgtttccaaaactattgctactttgtgtgctttaaacaaaataccttgggttgatgaaacatcaacccagtgctaggaatactgtgtatctatcattagctatatgggactatattgtagattgtggtttctcagtagagaagtgactgtagtgtgattctagataaatcatcattagcaattcattcagatggtcaataacttgaaatttatagctgtgataggagttcagaaattggcacatccctttaaaaataacaacagaaaatacaactcctgggaaaaaaggtgctgattctataagattatttatatatgtaagtgtttaaaaagattattttccagaaagtttgtgcagggtttaagttgctactattcaactacactatatataaataaaatatatacaatatatacattgttttcactgtatcacattaaagtacttgggcttcagaagtaagagccaaccaactgaaaacctgagatggagatatgttcaaagaatgagatacaattttttagttttcagtttaagtaactctcagcattacaaaagagtaagtatctcacaaataggaaataaaactaaaacgtagatttaaaaagaactgcacgggctttagggtaaatgctcatcttaaacctcactagagggaagtcttctcaagtttcaagcaagaccatttacttaatgtgaagttttggaaagttataaaggtgtatgttttagccatatgattttaattttaattttgcttcttttaggttcgttcttatttaaagcaatatgattgtgtgactccttgtagttacacttgtgtttcaatcagatcagattgttgtatttattccactattttgcatttaaatgataacataaaagatataaaaaatttaaaactgctatttttcttatagaagagaaaatgggtgttggtgattgtattttaattatttaagcgtctctgtttacctgcctaggaaaacattttatggcagtcttatgtgcaaagatcgtaaaaggacaaaaaatttaaactgcttataataatccaggagttgcattatagccagtagtaaaaataataataataataataaaaccatgtctatagctgtagatgggcttcacatctgtaaagcaatcaattgtatatttttgtgatgtgtaccatactgtgtgctccagcaaatgtccatttgtgtaaatgtatttattttatattgtatatattgttaaatgcaaaaaggagatatgattctgtaactccaatcagttcagatgtgtaactcaaattattatgcctttcaggatgatggtagagcaatattaaacaagcttccacttttgactgctacttttgtatt

SEQ ID NO: 13899 - DNA, 1535 bp, Homo sapiens
aagtccttgattaggagagtgtgagagctttggtcccaactggctgtgcctataggcttgtcactaggagaacatttgtgttaattgcactgtgctctgtcaaggaaactttgatttatagctggggtgcacaaataatggttgccggtcgcacatggattcggtagaactttgccttcctgaatctttttccctgcactacgaggaagagacttgaatgagacctgcctcatcagtcatgggatcatagtgtcacagatggaaaagcaactatcagctgaattgtactgaactacacacttggctaattcatcttattgctctacacatctaaaggaaggctcattctgttcttggagtctagacagcatcaggagttgggctcagtgaacaaaactttaatgtctagagcatttatgagggttttaatgattggaaaatctatcctgagaatgtggtcaccatatgtgacagccttgctttctatcttgtcttcagtttctggggcttctctgcagaatgtcaaacaaagatcgacacattgattccagctgttcgtccttcatcaagacggaaccttccagcccagcctccctgacggacagcgtcaaccaccacagccctggtggctcttcagacgccagtgggagctacagttcaaccatgaatggccatcagaacggacttgactcgccacctctctacccttctgctcctatcctgggaggtagtgggcctgtcaggaaactgtatgatgactgctccagcaccattgttgaagatccccagaccaagtgtgaatacatgctcaactcgatgcccaagagactgtgtttagtgtgtggtgacatcgcttctgggtaccactatggggtagcatcatgtgaagcctgcaaggcattcttcaagaggacaattcaaggcaatatagaatacagctgccctgccacgaatgaatgtgaaatcacaaagcgcagacgtaaatcctgccaggcttgccgcttcatgaagtgtttaaaagtgggcatgctgaaagaaggggtgcgtcttgacagagtacgtggaggtcggcagaagtacaagcgcaggatagatgcggagaacagcccatacctgaaccctcagctggttcagccagccaaaaagccatataacaagattgtctcacatttgttggtggctgaaccggagaagatctatgccatgcctgaccctactgtccccgacagtgacatcaaagccctcactacactgtgtgacttggccgaccgagagttggtggttatcattggatgggcgaagcatattccagggcttctccacgctgtccctggcggaccagatgagccttctgcagagtgcttggatggaaattttgatccttggtgtcgtataccggtctctttcgtttgaggatgaacttgtctatgcagacgattatataatggacgaagaccagtccaaattagcaggccttcttgatctaaataatgctatcctgcagctggtaaagaaatacaagagcatgaagctgg

SEQ ID NO: 13900 - DNA, 359 bp, Homo sapiens
tgagccataattggaatatttagcgtttattgtaggatatttggattgtttttcaaaacacaaaatgctctagggtttataaaagagggatgatactactagtgatcttgtagtgctctggtctgatcctgcagataacaagattgtctcacatttgttggtggctgaaccggagaagatctatgccatgcctgaccctactgtccccgacagtgacatcaaagccctcactacactgtgtgacttggccgaccgagagttggtggttatcattggatgggcgaagcatattccagggcttttgtcctcattcaagatgtgaccattcccaccagttgttgatttttcaattctgcaaa

SEQ ID NO: 13901 - DNA, 5534 bp, Homo sapiens
aagtccttgattaggagagtgtgagagctttggtcccaactggctgtgcctataggcttgtcactaggagaacatttgtgttaattgcactgtgctctgtcaaggaaactttgatttatagctggggtgcacaaataatggttgccggtcgcacatggattcggtagaactttgccttcctgaatctttttccctgcactacgaggaagagacttgaatgagacctgcctcatcagtcatgggatcatagtgtcacagatggaaaagcaactatcagctgaattgtactgaactacacacttggctaattcatcttattgctctacacatctaaaggaaggctcattctgttcttggagtctagacagcatcaggagttgggctcagtgaacaaaactttaatgtctagagcatttatgagggttttaatgattggaaaatctatcctgagaatgtggtcaccatatgtgacagccttgctttctatcttgtcttcagtttctggggcttctctgcagaatgtcaaacaaagatcgacacattgattccagctgttcgtccttcatcaagacggaaccttccagcccagcctccctgacggacagcgtcaaccaccacagccctggtggctcttcagacgccagtgggagctacagttcaaccatgaatggccatcagaacggacttgactcgccacctctctacccttctgctcctatcctgggaggtagtgggcctgtcaggaaactgtatgatgactgctccagcaccattgttgaagatccccagaccaagtgtgaatacatgctcaactcgatgcccaagagactgtgtttagtgtgtggtgacatcgcttctgggtaccactatggggtagcatcatgtgaagcctgcaaggcattcttcaagaggacaattcaaggcaatatagaatacagctgccctgccacgaatgaatgtgaaatcacaaagcgcagacgtaaatcctgccaggcttgccgcttcatgaagtgtttaaaagtgggcatgctgaaagaaggggtgcgtcttgacagagtacgtggaggtcggcagaagtacaagcgcaggatagatgcggagaacagcccatacctgaaccctcagctggttcagccagccaaaaagccatataacaagattgtctcacatttgttggtggctgaaccggagaagatctatgccatgcctgaccctactgtccccgacagtgacatcaaagccctcactacactgtgtgacttggccgaccgagagttggtggttatcattggatgggcgaagcatattccagggcttctccacgctgtccctggcggaccagatgagccttctgcagagtgcttggatggaaattttgatccttggtgtcgtataccggtctctttcgtttgaggatgaacttgtctatgcagacgattatataatggacgaagaccagtccaaattagcaggccttcttgatctaaataatgctatcctgcagctggtaaagaaatacaagagcatgaagctggaaaaagaagaatttgtcaccctcaaagctatagctcttgctaattcagactccatgcacatagaagatgttgaagccgttcagaagcttcaggatgtcttacatgaagcgctgcaggattatgaagctggccagcacatggaagaccctcgtcgagctggcaagatgctgatgacactgccactcctgaggcagacctctaccaaggccgtgcagcatttctacaacatcaaactagaaggcaaagtcccaatgcacaaactttttttggaaatgttggaggccaaggtctgactaaaagctccctgggccttcccatccttcatgttgaaaaagggaaaataaacccaagagtgatgtcgaagaaacttagagtttagttaacaacatcaaaaatcaacagactgcactgataatttagcagcaagactatgaagcagctttcagattcctccataggttcctgatgagtttctttctactttctccatcatcttctttcctctttcttcccacatttctctttctctttattttttctccttttcttctttcacctcccttatttctttgcttctttcattcctagttcccattctcctttattttcttcccgtctgcctgccttctttcttttctttacctactctcattcctctcttttctcatccttccccttttttctaaatttgaaatagctttagtttaaaaaaaaatcctcccttccccctttcctttccctttctttcctttttccctttccttttccctttcctttcctttcctcttgaccttctttccatctttctttttcttccttctgctgctgaacttttaaaagaggtctctaactgaagagagatggaagccagccctgccaaaggatggagatccataatatggatgccagtgaacttattgtgaaccataccgtccccaatgactaaggaatcaaagagagagaaccaacgttcctaaaagtacagtgcaacatatacaaattgactgagtgcagtattagatttcatgggagcagcctctaattagacaacttaagcaacgttgcatcggctgcttcttatcattgcttttccatctagatcagttacagccatttgattccttaattgttttttcaagtcttccaggtatttgttagtttagctactatgtaactttttcagggaatagtttaagctttattcattcatgcaatactaaagagaaataagaatactgcaattttgtgctggctttgaacaattacgaacaataatgaaggacaaatgaatcctgaaggaagatttttaaaaatgttttgtttcttcttacaaatggagatttttttgtaccagctttaccacttttcagccatttattaatatgggaatttaacttactcaagcaatagttgaagggaaggtgcatattatcacggatgcaatttatgttgtgtgcccagtctggtcccaaacatcaatttcttaacatgagctccagtttacctaaatgttcactgacacaaaggatgagattacacctacagtgactctgagtagtcacatatataagcactgcacatgagatatagatccgtagaattgtcaggagtgcacctctctacttgggaggtacaattgccatatgatttctagctgccatggtggttaggaatgtgatactgcctgtttgcaaagtcacagaccttgcctcagaaggagctgtgagccagtattcatttaagaggcaataaggcaaatgccagaattaaaaaaaaaaaatcatcaaagacagaaaatgcctgaccaaattctaaaacctaatccatataagtttattcatttaggaatgttcgtttaaattaatctgcagtttttaccaagagctaagccaatatatgtgcttttcaaccagtattgtcacagcatgaaagtcaagtcaggttccagactgttaagaggtgtaatctaatgaagaaatcaattagatgccccgaaatctacagtcgctgaataaccaataaacagtaacctccatcaaatgctataccaatggaccagtgttagtagctgctccctgtattatgtgaacagtcttattctatgtacacagatgtaattaaaattgtaatcctaacaaacaaaagaaatgtagttcagcttttcaatgtttcatgtttgctgtgcttttctgaattttatgttgcattcaaagactgttgtcttgttcttgtggtgtttggattcttgtggtgtgtgcttttagacacagggtagaattagagacaatattggatgtacaattcctcaggagactacagtagtatattctattccttaccagtaataaggttcttcctaataataattaagagattgaaactccaaacaagtattcattatgaacagatacacatcaaaatcataataatattttcaaaacaaggaataatttctctaatggtttattatagaataccaatgtatagcttagaaataaaactttgaatatttcaagaatatagataagtctaatttttaaatgctgtatatatggctttcactcaatcatctctcagatgttgttattaactcgctctgtgttgttgcaaaactttttggtgcagattcgtttccaaaactattgctactttgtgtgctttaaacaaaataccttgggttgatgaaacatcaacccagtgctaggaatactgtgtatctatcattagctatatgggactatattgtagattgtggtttctcagtagagaagtgactgtagtgtgattctagataaatcatcattagcaattcattcagatggtcaataacttgaaatttatagctgtgataggagttcagaaattggcacatccctttaaaaataacaacagaaaatacaactcctgggaaaaaaggtgctgattctataagattatttatatatgtaagtgtttaaaaagattattttccagaaagtttgtgcagggtttaagttgctactattcaactacactatatataaataaaatatatacaatatatacattgttttcactgtatcacattaaagtacttgggcttcagaagtaagagccaaccaactgaaaacctgagatggagatatgttcaaagaatgagatacaattttttagttttcagtttaagtaactctcagcattacaaaagagtaagtatctcacaaataggaaataaaactaaaacgtagatttaaaaagaactgcacgggctttagggtaaatgctcatcttaaacctcactagagggaagtcttctcaagtttcaagcaagaccatttacttaatgtgaagttttggaaagttataaaggtgtatgttttagccatatgattttaattttaattttgcttcttttaggttcgttcttatttaaagcaatatgattgtgtgactccttgtagttacacttgtgtttcaatcagatcagattgttgtatttattccactattttgcatttaaatgataacataaaagatataaaaaatttaaaactgctatttttcttatagaagagaaaatgggtgttggtgattgtattttaattatttaagcgtctctgtttacctgcctaggaaaacattttatggcagtcttatgtgcaaagatcgtaaaaggacaaaaaatttaaactgcttataataatccaggagttgcattatagccagtagtaaaaataataataataataataaaaccatgtctatagctgtagatgggcttcacatctgtaaagcaatcaattgtatatttttgtgatgtgtaccatactgtgtgctccagcaaatgtccatttgtgtaaatgtatttattttatattgtatatattgttaaatgcaaaaaggagatatgattctgtaactccaatcagttcagatgtgtaactcaaattattatgcctttcaggatgatggtagagcaatattaaacaagcttccacttttgactgctacttttgtatt

SEQ ID NO: 13902 - DNA, 3016 bp, Homo sapiens
aagtccttgattaggagagtgtgagagctttggtcccaactggctgtgcctataggcttgtcactaggagaacatttgtgttaattgcactgtgctctgtcaaggaaactttgatttatagctggggtgcacaaataatggttgccggtcgcacatggattcggtagaactttgccttcctgaatctttttccctgcactacgaggaagaggcttctctgcagaatgtcaaacaaagatcgacacattgattccagctgttcgtccttcatcaagacggaaccttccagcccagcctccctgacggacagcgtcaaccaccacagccctggtggctcttcagacgccagtgggagctacagttcaaccatgaatggccatcagaacggacttgactcgccacctctctacccttctgctcctatcctgggaggtagtgggcctgtcaggaaactgtatgatgactgctccagcaccattgttgaagatccccagaccaagtgtgaatacatgctcaactcgatgcccaagagactgtgtttagtgtgtggtgacatcgcttctgggtaccactatggggtagcatcatgtgaagcctgcaaggcattcttcaagaggacaattcaaggcaatatagaatacagctgccctgccacgaatgaatgtgaaatcacaaagcgcagacgtaaatcctgccaggcttgccgcttcatgaagtgtttaaaagtgggcatgctgaaagaaggggtgcgtcttgacagagtacgtggaggtcggcagaagtacaagcgcaggatagatgcggagaacagcccatacctgaaccctcagctggttcagccagccaaaaagccatataacaagattgtctcacatttgttggtggctgaaccggagaagatctatgccatgcctgaccctactgtccccgacagtgacatcaaagccctcactacactgtgtgacttggccgaccgagagttggtggttatcattggatgggcgaagcatattccagggcttctccacgctgtccctggcggaccagatgagccttctgcagagtgcttggatggaaattttgatccttggtgtcgtataccggtctctttcgtttgaggatgaacttgtctatgcagacgattatataatggacgaagaccagtccaaattagcaggccttcttgatctaaataatgctatcctgcagctggtaaagaaatacaagagcatgaagctggaaaaagaagaatttgtcaccctcaaagctatagctcttgctaattcagactccatgcacatagaagatgttgaagccgttcagaagcttcaggatgtcttacatgaagcgctgcaggattatgaagctggccagcacatggaagaccctcgtcgagctggcaagatgctgatgacactgccactcctgaggcagacctctaccaaggccgtgcagcatttctacaacatcaaactagaaggcaaagtcccaatgcacaaactttttttggaaatgttggaggccaaggtctgactaaaagctccctgggccttcccatccttcatgttgaaaaagggaaaataaacccaagagtgatgtcgaagaaacttagagtttagttaacaacatcaaaaatcaacagactgcactgataatttagcagcaagactatgaagcagctttcagattcctccataggttcctgatgagtttctttctactttctccatcatcttctttcctctttcttcccacatttctctttctctttattttttctccttttcttctttcacctcccttatttctttgcttctttcattcctagttcccattctcctttattttcttcccgtctgcctgccttctttcttttctttacctactctcattcctctcttttctcatccttccccttttttctaaatttgaaatagctttagtttaaaaaaaaatcctcccttccccctttcctttccctttctttcctttttccctttccttttccctttcctttcctttcctcttgaccttctttccatctttctttttcttccttctgctgctgaacttttaaaagaggtctctaactgaagagagatggaagccagccctgccaaaggatggagatccataatatggatgccagtgaacttattgtgaaccataccgtccccaatgactaaggaatcaaagagagagaaccaacgttcctaaaagtacagtgcaacatatacaaattgactgagtgcagtattagatttcatgggagcagcctctaattagacaacttaagcaacgttgcatcggctgcttcttatcattgcttttccatctagatcagttacagccatttgattccttaattgttttttcaagtcttccaggtatttgttagtttagctactatgtaactttttcagggaatagtttaagctttattcattcatgcaatactaaagagaaataagaatactgcaattttgtgctggctttgaacaattacgaacaataatgaaggacaaatgaatcctgaaggaagatttttaaaaatgttttgtttcttcttacaaatggagatttttttgtaccagctttaccacttttcagccatttattaatatgggaatttaacttactcaagcaatagttgaagggaaggtgcatattatcacggatgcaatttatgttgtgtgcccagtctggtcccaaacatcaatttcttaacatgagctccagtttacctaaatgttcactgacacaaaggatgagattacacctacagtgactctgagtagtcacatatataagcactgcacatgagatatagatccgtagaattgtcaggagtgcacctctctacttgggaggtacaattgccatatgatttctagctgccatggtggttaggaatgtgatactgcctgtttgcaaagtcacagaccttgcctcagaaggagctgtgagccagtattcatttaagagaattccaccacactggcggcccgcgcttgat

SEQ ID NO: 13903 - DNA, 4518 bp, Homo sapiens
tgagccataattggaatatttagcgtttattgtaggatatttggattgtttttcaaaacacaaaatgctctagggtttataaaagagggatgatactactagtgatcttgtagtgctctggtctgatcctgcagataacaagattgtctcacatttgttggtggctgaaccggagaagatctatgccatgcctgaccctactgtccccgacagtgacatcaaagccctcactacactgtgtgacttggccgaccgagagttggtggttatcattggatgggcgaagcatattccagggcttctccacgctgtccctggcggaccagatgagccttctgcagagtgcttggatggaaattttgatccttggtgtcgtataccggtctctttcgtttgaggatgaacttgtctatgcagacgattatataatggacgaagaccagtccaaattagcaggccttcttgatctaaataatgctatcctgcagctggtaaagaaatacaagagcatgaagctggaaaaagaagaatttgtcaccctcaaagctatagctcttgctaattcagactccatgcacatagaagatgttgaagccgttcagaagcttcaggatgtcttacatgaagcgctgcaggattatgaagctggccagcacatggaagaccctcgtcgagctggcaagatgctgatgacactgccactcctgaggcagacctctaccaaggccgtgcagcatttctacaacatcaaactagaaggcaaagtcccaatgcacaaactttttttggaaatgttggaggccaaggtctgactaaaagctccctgggccttcccatccttcatgttgaaaaagggaaaataaacccaagagtgatgtcgaagaaacttagagtttagttaacaacatcaaaaatcaacagactgcactgataatttagcagcaagactatgaagcagctttcagattcctccataggttcctgatgagtttctttctactttctccatcatcttctttcctctttcttcccacatttctctttctctttattttttctccttttcttctttcacctcccttatttctttgcttctttcattcctagttcccattctcctttattttcttcccgtctgcctgccttctttcttttctttacctactctcattcctctcttttctcatccttccccttttttctaaatttgaaatagctttagtttaaaaaaaaatcctcccttccccctttcctttccctttctttcctttttccctttccttttccctttcctttcctttcctcttgaccttctttccatctttctttttcttccttctgctgctgaacttttaaaagaggtctctaactgaagagagatggaagccagccctgccaaaggatggagatccataatatggatgccagtgaacttattgtgaaccataccgtccccaatgactaaggaatcaaagagagagaaccaacgttcctaaaagtacagtgcaacatatacaaattgactgagtgcagtattagatttcatgggagcagcctctaattagacaacttaagcaacgttgcatcggctgcttcttatcattgcttttccatctagatcagttacagccatttgattccttaattgttttttcaagtcttccaggtatttgttagtttagctactatgtaactttttcagggaatagtttaagctttattcattcatgcaatactaaagagaaataagaatactgcaattttgtgctggctttgaacaattacgaacaataatgaaggacaaatgaatcctgaaggaagatttttaaaaatgttttgtttcttcttacaaatggagatttttttgtaccagctttaccacttttcagccatttattaatatgggaatttaacttactcaagcaatagttgaagggaaggtgcatattatcacggatgcaatttatgttgtgtgcccagtctggtcccaaacatcaatttcttaacatgagctccagtttacctaaatgttcactgacacaaaggatgagattacacctacagtgactctgagtagtcacatatataagcactgcacatgagatatagatccgtagaattgtcaggagtgcacctctctacttgggaggtacaattgccatatgatttctagctgccatggtggttaggaatgtgatactgcctgtttgcaaagtcacagaccttgcctcagaaggagctgtgagccagtattcatttaagaggcaataaggcaaatgccagaattaaaaaaaaaaaatcatcaaagacagaaaatgcctgaccaaattctaaaacctaatccatataagtttattcatttaggaatgttcgtttaaattaatctgcagtttttaccaagagctaagccaatatatgtgcttttcaaccagtattgtcacagcatgaaagtcaagtcaggttccagactgttaagaggtgtaatctaatgaagaaatcaattagatgccccgaaatctacagtcgctgaataaccaataaacagtaacctccatcaaatgctataccaatggaccagtgttagtagctgctccctgtattatgtgaacagtcttattctatgtacacagatgtaattaaaattgtaatcctaacaaacaaaagaaatgtagttcagcttttcaatgtttcatgtttgctgtgcttttctgaattttatgttgcattcaaagactgttgtcttgttcttgtggtgtttggattcttgtggtgtgtgcttttagacacagggtagaattagagacaatattggatgtacaattcctcaggagactacagtagtatattctattccttaccagtaataaggttcttcctaataataattaagagattgaaactccaaacaagtattcattatgaacagatacacatcaaaatcataataatattttcaaaacaaggaataatttctctaatggtttattatagaataccaatgtatagcttagaaataaaactttgaatatttcaagaatatagataagtctaatttttaaatgctgtatatatggctttcactcaatcatctctcagatgttgttattaactcgctctgtgttgttgcaaaactttttggtgcagattcgtttccaaaactattgctactttgtgtgctttaaacaaaataccttgggttgatgaaacatcaacccagtgctaggaatactgtgtatctatcattagctatatgggactatattgtagattgtggtttctcagtagagaagtgactgtagtgtgattctagataaatcatcattagcaattcattcagatggtcaataacttgaaatttatagctgtgataggagttcagaaattggcacatccctttaaaaataacaacagaaaatacaactcctgggaaaaaaggtgctgattctataagattatttatatatgtaagtgtttaaaaagattattttccagaaagtttgtgcagggtttaagttgctactattcaactacactatatataaataaaatatatacaatatatacattgttttcactgtatcacattaaagtacttgggcttcagaagtaagagccaaccaactgaaaacctgagatggagatatgttcaaagaatgagatacaattttttagttttcagtttaagtaactctcagcattacaaaagagtaagtatctcacaaataggaaataaaactaaaacgtagatttaaaaagaactgcacgggctttagggtaaatgctcatcttaaacctcactagagggaagtcttctcaagtttcaagcaagaccatttacttaatgtgaagttttggaaagttataaaggtgtatgttttagccatatgattttaattttaattttgcttcttttaggttcgttcttatttaaagcaatatgattgtgtgactccttgtagttacacttgtgtttcaatcagatcagattgttgtatttattccactattttgcatttaaatgataacataaaagatataaaaaatttaaaactgctatttttcttatagaagagaaaatgggtgttggtgattgtattttaattatttaagcgtctctgtttacctgcctaggaaaacattttatggcagtcttatgtgcaaagatcgtaaaaggacaaaaaatttaaactgcttataataatccaggagttgcattatagccagtagtaaaaataataataataataataaaaccatgtctatagctgtagatgggcttcacatctgtaaagcaatcaattgtatatttttgtgatgtgtaccatactgtgtgctccagcaaatgtccatttgtgtaaatgtatttattttatattgtatatattgttaaatgcaaaaaggagatatgattctgtaactccaatcagttcagatgtgtaactcaaattattatgcctttcaggatgatggtagagcaatattaaacaagcttccacttttgactgctacttttgtatt

SEQ ID NO: 13904 - DNA, 464 bp, Homo sapiens
atgtactacctaaaagaggtagaagtataaccaagaagtcattcagtgatatgtttactttttaaaagtttccagacataacactgcacaactgcagctttcctccgcaaagtcatcaaagagctaaaatgtacaaatgggaatagggatataaagtggaactgaagataaatggagagccacagcagcccccgcaatacttccctggtgttggttcctcctgggaccataatctgggctgacatcttctctccttccagcatctctttcaaataacatgaagatctggtaaatggccagtcacagcctctggctgctcattctggtaggtctgaggtcagtttggctataatatatctttcttattttgtccctctattgtggttttgtatagattttcttgcctgtactacttcttaactaaaggatagttaccatggcaacacctgttgatgacagacaaa

SEQ ID NO: 13905 - DNA, 548 bp, Homo sapiens
caccacgcctggctaattttgtatttttagtagagacagggtttctccatgttagtcaggctggtctcgaactcccgacctcaggtgatccacctgccttggcctcccaaagtgctgggattacaggcatgagccagcatgcctggccaaaaaataaagatttttaaaagtggatttaaaatctcttatcacctagctcagtatatggccttccttagtcagtactcaataaatatttactaaatgaaaaaatcaatcattaataataaaagtggttgggcatggtggtatatgcctataatcccagcactttgagcacaggagttcaagagcctgagcaaggaggagttcaagggcctgagcagcatagcgagacgcacctgtggtcccagctcctggggagtgcttaggtgggagatggcttgagcctgagaggtcgaggccgcactgagccgtgactgcaccattgcactccagccttgaggctgcactgagctgtggctgcaccactgcactccagcctgggtggcagagcgagaccctgtctc

SEQ ID NO: 13906 - DNA, 760 bp, Homo sapiens
tgaatttcagagtagttagaatgtttttcttaagactttgctagaaaggaactggtttgttagtaattctgccatcaactcatggagttataattgccaaatgagttaatttttatataccttaagctatcttgcctacaaaaagtaaaataaggcaggattcataaatgttacttgtaaattgagtgtttcacatgaggccaagtatgattttaacataatgaatatcattgctcctcatctgtaaatttgctgctgctttcatatgtgtatctgtacatagagttatgaatgaaaatccagtaatgccctaaagcaactttcttccatagggtcaaagctcacttaaggtaaacgtgtgaaaaaagtgactgcagtgtgtttgaaaccacaagctgtttctatgtcataaattaacatcagcttgcaagtctctgaaagaaccactcatttgtaattggtatatatgtcacaacctcccacattcctttagcccatctcagggaattattgaaacgctggcagggttagtttcattttgttttggtttttttgggtttttttgtttgtttgaggattttttttttcttttatcatttgtttgctcctgtgtaagcttaatatataatggcagtttggcatctgttcttcgcacatgtctaacccagcagagttatgcaaaaatgatgacttcattttaggtcaaattggctttgttcccagtcctcattgttggtcactttgttcagttctggtgact

SEQ ID NO: 13907 - DNA, 563 bp, Homo sapiens
tgtgcgcctgtgcttcattttcctcctagtgattccagtgattaaagtaacttttctaaggtttttcagggaactctacatgaaaaaggaacccctaatcttaggaggaggatcctcccgaggaatccaagtcctccccagctgtcaggggcacgacttactttaaataacagatgctttgggaaaattgtccaaaacaatttttgtgactgacgtaatatctcaaagcctgccagggaagattgctattaaaagaaagtccattgtgggccaggcgccgtggctcatgcctggaatcccagtactttgggaggctgaggtgggcagatcgcttgagcccaggagtttgagaccagcctggcaacgtagtgagaaccccatctcaaaaaaaaaaaaaaaaaattagccgagcgtggtggtgcatacctgtagtcccagttacttggaaggctgaggtgggaggatcccttgagcccaggaggtggaggttgcagtgagctgagatcacgccagcgcactctagcctgggcaatggagtgagaccctgtctcaaaaaaaaaaaa

SEQ ID NO: 13908 - DNA, 1171 bp, Homo sapiens
cccagacaacccctgcaaagtgactctgagaaggacgacaagccctgctgcagtcacacccagaagctgactcatctatgcacagccaaagcatgaggaaactcatcgtgggacttattctccttaaaatttggacttatgtaataaggacttccactgattttccccacatggaggactgttcccaatgtattcatcaggtcactgagtagggcaacaagttaaaacagtttctgttttatagttattattgttgcgggacaatcaaagatgggagagaccaaacaaagtgagttcaggaaaggtctttattaaaagatgatcacttggctcagtaggattagtgtacaggaaagtctgagccctggacaaagaaagcagccaccttttaagcagtcagtggctgggagctacgtgatgcaggaagcacacttagagaagcaagaacaaaggcagttgatcagtcttttacatttatctatactacatgttccaaatccttgggaaaccatgtttctgtataaaccttgtaactttgcagctgcacgggggaggtgaagcagaaactcgctgagcctcaaggaatgtgaaactagcaagtacagataaggctcaaatgtattacatgaatcattatcaatctgtcttgcaggaagacctaggtagtgaagatgaaagtgagaactcccactaataagtgagattctcaaaggggggaatgaggaaggagaccacctctcttattgtttcatacctcagaaaaagaaggaagaaataagttaaagaaggcaaaaatgagataaatagtcaggcagcctggccccgcaccccaggcctggtctgctaattaaatatcaacccctgactaactgcttgtactatctatagattccagacattgtatgaggaagcattgtgaaactttctgttctgttctgtcttaactaccaatgcatggggccccagccatgtaccccatgcttgctcaattgatcacaaccctttcacgtggacccccttagaactgtaagcccttaaaaggggcaggaatttccctcttggggagctcagtttttgagatgcaggtctgctgacgttcctggccaaataaagctacctcttccctcaacccagtgtctgaggggttttggccatggcttatcctgctaca

SEQ ID NO: 13909 - DNA, 806 bp, Homo sapiens
cccacaaagtttttatatgtcagaactggaggtggcacataccacttctgttcaaatgccattatgtagaactcagtcacttggctacacttaagtgtaagtttaggaggctaggaaatgtagtctgtgggcccaggatgaagagaataagagtttggtgctagctttctgcaataaacttttgggctgtctgctaggtgctggaaacaaaattataaaagagatattccagctaagtgcaaataaattgcaacatagtgaaaaaaatgcctcactacagatatagcaaatgtcatttcacagagtaagtcaaatgacacatgatcacagttttgcctcaaacaaaatcccatggtataacttgggacactgaactgaagctcttagtttcttgaatccctatcaccatatgtgcacatacaggctaataggttataaatattctgtgttccatttcagataaccacagtaaagtgaatactgcaataaagcaagtcaccagaattttttaatttcccagtgcatataaaagttatgtttacactatactgtagcttattaagtgtgcaatagtattatgttttttaaaagccaatgtacataccttaatttaaaaattctttattgtgaaaagatgctaacgatcatctgagccttcagcgagtcgtaatctttttgctggtagagggtcctgccttgatgttgatggctgctgactgctcaaggtggtggctactaaaggttggagtgactgtggcaatttcttaaaataaaacagcaatgcaattttccacaaacgttgactg

SEQ ID NO: 13910 - DNA, 431 bp, Homo sapiens
atctacgtgtaaacaagcacccaggggagttctgctcactgaaatttgagaatccctgatttagaaggaggactatgctctgtgcatgttctctgaaatgttgggtcaatcaggacctgtctactgaaactgctccaaccagccaaggtgcagagaaaagatgcgtgcagggccgaaaaccagggtgctctggaggcagggagccctcgagaatgtaaagccagcaagctgttacagagtgatttgcacagaacagacactcagttgatatttgtcaatttgctgtgtttaagaaccttgctgaattaatttaaaaggtatttttaaaagaatgaaattgaggaaaaaaccttcaaggttcagaaaatgtgaagttctcatttacttgtttatgaaattgtttttgagtccaataaagatgctcagctaaa

SEQ ID NO: 13911 - DNA, 576 bp, Homo sapiens
gggagggagggataaaagactacaaatagggttcagtgtatattgctcgggtgatgggtgcacccaaatctcacaaatcaccacaaaagaacttactcatgtgagcaaataccacctgtaccccaataacctatggggaaaaaagagaagaatatacaaaaaatttaaaaactgggccgagcgcagtggctcacgcctataatcccagcactttgggaggctgagtaagcccaaagtcactgaggtctgtctcacgccattctcttcagcaagtcactccatggcctgcatcctccacaaccaggagtctccagcctcctcccccagggcagattttgtctgaatctcaaagagttggaaagggagagggcagccacacagagttcccgctgacaaccaccactctagactgggttagtggatcaggttgactggtgttgggggccaggggtacatggaatcctatggccatctggatgtcagcaagtgcagggcacagtggctcacacctgtaatcccagccaaaggaggaggatcacttgagacaaggagttcaagaccagtctgggcaacaga

SEQ ID NO: 13912 - DNA, 441 bp, Homo sapiens
ctaagtattaggaatggaattattaggtcaaaagataacttcattttttgtgtttatagctatagctgggttgcaagctttctattatttgcttgctatatcttcattttaattctttgtgttttatgttagtgtttcttatgtctgtttttgttatctgagtggttttatcttttaataggctaatttaacccattcatatttgtaattattgtattatttagacataatttggaagccctattttatttgtagttatactattgtttagggtttttttctattaagctttttgttggattgactgtataatttttttcttctagtattctttgaaaatttgaaaattgttatattttatgtctagtgttctttgaaaataattctttgaaaattatttttatgtcctaattttaccattaaaattatgaccacttgaaa

SEQ ID NO: 13913 - DNA, 704 bp, Homo sapiens
ggaaacacaaatgttgttgacagttaataaccgtactcactcagaacctggtgcaagtgtgttgagaatgccctcccactatgagtaaaggcctgcccgcattgcatgggctcagggctaggaaaggctgctttcctgtgctatgtcacagataagtgacacactcagctggatgaggggaccccaagagaaggaggaatcaagtcaccctccttggctccattcttgggaaagttttgcaacaagaatattccgtcttcactgtcgtgggagttgaaggtggagaagggaagtcagtccttcaccttgagggagaaggggccacctgctgaggctgtgggccatggtgtcagagatgcctgggttagggccccacatccatctcttcagcctttcaagcctcgctttcctcatctgtaagttggggataaagataataatccctgcgtcctgaaggccactgaattgaatgaaagcttcatgtggggctcttagctgagagcttggcatgcactaagtgctaaataaacggtagctgctattgtccttgtcatcatcatcatcaccatcatcatcgtcatcgtctatacctatcctatgaccctttcagaaatctctgttctccttcgctattcatgggaattctgttttcttgatgccctcatgctcaagaatctcctcatagttcctcatccagggctaaa

SEQ ID NO: 13914 - DNA, 159 bp, Homo sapiens
cttttggtttgaattaataccagttattaatttcagaaaacataatcttagtatgacttctaaaatcagtctacttaaaatgaacatgcttttttgttataaatgtttcatgcaatgactgtttgtctccagagtaaataaatatccattaacacctta

SEQ ID NO: 13915 - DNA, 254 bp, Homo sapiens
ctccgaaatttctcaagaaatttatgtatatttaatatacatacttaaaaacttgtatgagttatctgttgcttcataacaaattactccgaaatttagcagctttaacagccagcttagaacagatgagtcaggaatctgagcacagcttagctgggtgctctggctcagggtgtctgactaggctgtcaaggtgttggacagggctgcagtcatctcagggtttgaatgaggtaaaatctagttctaaactc

SEQ ID NO: 13916 - DNA, 564 bp, Homo sapiens
tgttgggaccaggaataaggcaaggaaagagataactgattattataagacaatccacggcaagccaggtcatcctttctgactaaccacaactcttgtctccttacaccagtatttttcaacctcagcaatagagatttttgggccagatgattctttgtgtggagagctgccctttgcactgtaggatgtttagcagcatccctggctctattcactagataccagtagcaccctctcccagtggtgacaaccaaaaatgtctccagacattgccaaatgtccagtggttggggaggagaagagcatgtcaaaaatcactgcttgaagcccctgtttaagagccactgcctgacgaataacattattaaggccactcaggaaagtttgcttcccctttgccatggttgctgctgcttctcagtctaaagctgactagcacatagtccctcctctttttgtatcaggcatccaaatgcccgctgtctcatggaagaacatatttttgagacagagcctcgctgtcgccaggctggagcaaaactccgcctcaaaaaaaaaaaa

SEQ ID NO: 13917 - DNA, 489 bp, Homo sapiens
acttcctgtccccacatgtttacaaaggagcttgtccactccacgcctggcaaaaaatgtcacagttctaagcttatacactattggtgggaatataaattagttcatctattgaaaatagtatggtgatttctcaaaggactaaacacaagtaccattggacccagcaatccatatagagctaccaatccaaacggaactaccattcgacccaggatctactcaaaggaaaccattgtattaaaaagacaactgcactcctatgactatcactgtactattcacaatagcaaagtatggaatcaacctaagtgttcatcaacggatgactggataaaggaaatgtggtgtatctatacgatggaatactacagagccatcaaaaagaaaggaaacatgtcttttgcaacaacatggatggaactggaggccattaccttacgcgataactcagaaataaaatcaaatgcacatgttctcacttttaag

SEQ ID NO: 13918 - DNA, 459 bp, Homo sapiens
taaagcagtgatagtatcagctctttaaataatactatgcttgatgaagtggtacttttcgggataatttgagaccagccgacttgctgcttgaagaggacagggctatatttggtaataatatatatgtgataatatgtatgtaatattattataatgtaatatacaataatatttggtgtaactggtgactctgaggccagtctttgatcgaacctctcaagctatgatttacattatggtcaatgttagcataatgcaattatcagcaatcacttgctgttgctttgaaagtcagaaggatggctaataaaaatcttagaaaaagaaaacaggccgggtgcagtggctcacccctgtaatcccagcactttgggaggctgaggcgggcagatcatgaggtcaggagattgagaccatcctggccaacatggtgaaaccccatctgtactagaatac

SEQ ID NO: 13919 - DNA, 152 bp, Homo sapiens
tgtaaaggatgttatcttttatagtgaaaaattccttctacagcatatcctaatattaatagatctcatgaaaagcctatgagctggagtcacctgacacccagttcaatgctgtttctgtatttcatggtacaacatcatatagctcaaga

SEQ ID NO: 13920 - DNA, 469 bp, Homo sapiens
tccttatgtctcaaatacttcatatttaaaatattttaaggactttatacagtatacataacccagatcttcagtgaatggtaggtagtatggaataggatgactgaggcttaaaaatgctaaattacttccccaccagaaagaactgctggcagtgccaggacttgaactcgtgcatatatatggatttacagcaatctatactttgcaatacacaggaggatgaagcatttctccagttctgtttttaaatttggcctagttactggtggaggtgaccagctgcttcacaatttaattctagtccaacagattttagtgccacgcacttgtgggtggacatagtagttcttcctcatgccttgctcacttctaccaagtattccttctagtcttcttttctaccagttccttccattttcctccctcggttcaggcagcagctagttcaatgtctattttaggcttg

SEQ ID NO: 13921 - DNA, 413 bp, Homo sapiens
caaaaaaaaaaaaaaaaaaagttttacacatcagtttttataaaagggaagagcatgttaatgtcttagataactgtatattcttccttaatactgtaccaaaacaagtagaagtttcttaaagattagttgcaatgtagaatataaaaccatatcgaataatttctcgtagcctgttacattgttacattaaaatccattgatctgtcttaaactttgggtctttcctcccatgcatcattttataacatcatacatcgatcatttggaaaatactggttcactgagtttttcaggttttccaaatcttgacacatttcattgtatattttaaaaagtcacatttgttgacattgccaccagtctcatcagaaaagcctctgtgtattgggaagtggttatgttcaccatgg

SEQ ID NO: 13922 - DNA, 435 bp, Homo sapiens
gtagaataggtcagagaagactttgcctttttatttagaggttctgtgtaattcataaagttttcaaacagaaagaagaggcatctgactaaaaccataaaaaagttgctaataatagctagtgcagtgcttcctatgtgctaggtaggcactgtgcaaaatgccttagataaattatctcacttaattctaagactgcaaggtgggccctgttactctatcttataaagaaggaaagttgccccaaagccacacagctcataggtgatggaatcaaagtttgaactctaccaatctgatactggtggagtatcagtctatcagtcttcttaaccactatggctgtctatttaggactgtttcacattcagaattccctagcaaaccttatcagataacataggaagaggtaagagctgaggtgttaaagaagta

SEQ ID NO: 13923 - DNA, 412 bp, Homo sapiens
gctgtatactgtatgattccatttctataacattctggaaaaggtaaaacaatagggatggaaaacagatcagtggtttccaggggttaacagagtggggaggtttgagggtgaacccttcgaaaggatagcatgaaggaatttgggaaggtaatggaactgctgccgtgcctacacaactctgtgcatttggcaaaactcagaactgtataccccgaagagcaaactttactgtatgtaaactaaaaaataaaataaacctgtattacactagtacaggtttaaacaggtcaatggaacatcacagagagctacaaatgaaatccaatatagttaatttgttttgctaaagatggcatttttaaatccatggagaaaatacacagtgctgggaaaactggttcttatcatt

SEQ ID NO: 13924 - DNA, 768 bp, Homo sapiens
ttcagggtcaccctctcccagaagtgagatcatggagaaaaagggcaaatcacagaaagaaattaaatccatgaggacccagcaggcccagcaagaacctgaactcacgccggagacctgcaggagtggtgccaggtcacccactaaccaaacaactgaagcgagagctggtggtcttgcttggtctcacagtgggcacagcggtaggcggtcagtcatgttgctgaacgacggagggtaaactccccagccccaaggaaacctgtgttggaagtaacaacaacctccctgctcctggcaccagccgttttggtcatggtgggccagctgcaaagcgtcttccattctctgggcagtggtggccccgaggctgtggcctctcagggggtttctgtggacacgggcagcagagtgtgtccaggccagcccccaagaatgccctgctcctgacagcttggccaacccctggtcagggcagagggagttgggtgggtcaggctctgggctcacctccatctccagagcatcccctgcctgcagttgtggcaagaacgcccagctcagaatgaacacaccccaccaagagcctccttgttcataaccacaggttaccctacaaaccactgtccccacacaaccctggggatgttttaaaacacacacctctaacgcatatcttacagtcactgttgtcttgcctgagggttgaattttttttaatgaaagtgcaatgaaaatcactggattaaatctacggacacagagctg

SEQ ID NO: 13925 - DNA, 380 bp, Homo sapiens
gcatagtgaaatttgcattttattttatagcaaatgttattattactccacctgccctctcttagatggaacaccaaaactaagagcgaaaatagaaacaatttaagaagagaacaaatattggaaacacttcagttaggcatcctcgcttgacaatactgaatttggcagccaggatagggcatgccaaaccttgatgctttctacctttcgtgtatgagtgtaccagctttccatttcaatcatctctctctctgtttctctgtctctccgcctctctctctctctctctgagtgtgtgtgtgtgtgcacgcgcacgtccaagtacttgtgtctactgttgcagttcaataaaggtaatttccacaagtgacactaag

SEQ ID NO: 13926 - DNA, 151 bp, Homo sapiens
tatcaggcccaggttcagaaatgtggtctttcttgctgtttttaatttgaataactacgtacaaattaatataactctggagtcttactccacggacgttttgacaggaaggtatacctcttactctaatgcaatggatatacatctatct

SEQ ID NO: 13927 - DNA, 2126 bp, Homo sapiens
atctaaagaaaaaaaagaagaaaagggaaagctcaggtgtttcagggtcccagaatgtatgttgtagagaacagtcattagctcaggcccatggtaaccgcctctactgtgcactcgaccagtagaggcgatgatgacggcacttgattctcttgtgtgtaactcagccatcctccctagacccacgtcccaggaggcagggctggtaaagctatgactgggcagtgtttgacccagctgtgcttttactctgtgcctcctctttatattgtggcatttctctcttctcctttatgttctttttctttttatgccaaaattcttgctgttgccaaaacaaaaacagaaaaacacacccacacccaattacaacctgcagttcaaagaaccactctaggtcggctttaaagtattgtctttctctggtaaccaaatctgtacctgctgcctaatttagtgtttgggggcattgtttacagtatttctgtttgtaatgtgcttttaatatagaaatcctcttttttgttcttaaatctatgaatgctgtgtttccaagcttatacttactactgcgtgttagtggttctggcacagattttcttaccctggccttgtactgtccaccatgactttagaaaaagcttgaacaataggcagagaaaggaaatccccaaaagggattattttccccttggacatgagaagtttagttacaggtttcttgaattcgtttttgtccagaggaatcctctttttatctgatacggttgatgaccaaaaatgaagtagggaagccgaaggcatagccggaaaggaacagaagagctttttccccgagtgctcatcaccgggttcattaccggccagagatggacggggagaagcacgttagtttcctgtcatcttatggaaaagatgatctgaagttaaaaaatgaaggtcacaagtggcagttgcctgacccctgtccccagacattccttgcccgataaccatgaggttccatagttcggatcctgaatgggcctttaggaaatgcaggcctttcccacaccagctagaagggtagccaggcagtagaatttcattcaaccctagggttcccacctgacagagggaagttcggaagtcttactgcttcccacgtccccttcccttctaggcatttatggaaagctttttagtggagcaagagaattctacaatccagcttacctcccaccttaccccaagagccatagctgacggtgatgtgtgaatgtttatatataggtacacgtttgtatgtatatagatctaattgcacatatatgggtagatatttatttatatgttgcaccctaaattatagtaattataataattgtgaagctgtttctaaagctgcttgttcctggttctgagaaccacgggagcctcacactggggagccgtactccaggtcagggctttggggatgcacagcagcgtacgggcagcacgcctgtaaggaggtgagtgggtgggtgtctcagaaaatggggcagcacacccccaagaaagggccccaagagcagactagggaacgcagggggctgctgctgccaggacaccacggagagccgggcacccgcctcacatgtctcctgtctggctccactgagttagccgtttgagcccactcctatcttttggtggttagtgcatcttcagctcttttctgcaagacactggaacattcctaggctgtcccaaaaggagttccaccatagcctttaaggtccgagcagggcaccaaggggttcacttttctcccgagccattcagcttggggtgcctgcgggaggggcggacagccagccggcttcccggcggcggtacgagagcccaacaggagaggattagctgtgccaaggaacacgccactgctgcctgtctactgcccgccttctctccacttccatttttgcctttgtttttaacttgtgctcttgtgagttcttggtgtgtttctttgtgagtttttatttaattgtgtaactttgtttttgccgttgactgtgaaaccaagttgtcgtgcttttaattttttttttaacaaatgttacattcttatttaagagaataaattccaaacaatcttcgga

SEQ ID NO: 13928 - DNA, 446 bp, Homo sapiens
gaaacggttaacatcaaacagcaaacaactaatcaaaatcctcagaaggcatttatctcccaaagttcctcttcagctgccaatttgccagtttcttcctttcttgttcccatcctcattcaactttcttcccgtttcttatcaagatcaatctaggctgggcatggtggctcatgcctgtaatcccagcactttgggaggccaaggcaggaggattgcttgagctcaggagttcaagaccagcctggccaacatggtgaaaccccgtctctactaaaaatacaaaaattagctgggcgtggtggcacacgcctgtaatcccagctactcaggaggctgaggcacaagaaccgctttaacccgggaggcagaggttgccatgagccaagatcatgccactatactccaacctgggcgacagagtgagactctgtcaaaaaaaaaaa

SEQ ID NO: 13929 - DNA, 565 bp, Homo sapiens
tttaatgctcacaactaccctgagagttgctattgttaccctcattagctagctaggaactggaagagtgggattgaaacccagagctgtgggattcaaaggcccacgctcttaaccacatcatgatattgccttgaaaacagaaataatatctgtaaactgaccagcacaatgccacatagaaagaaaatgttcattgtaaagttatggtttggggtttgtttattgctattgctgttattgatgttatcttgacctgcccaagggcaagagttcaaactctccaccgtaacaattagctttgtcttctgtttctgtggccttttacctgccactcttttcagcttctcagtcatcacccagtaaaagtaatctttttattctggttggtgaactaatctagcctttaatgtcaagtgtgaacttcagttcctcagtgctcattgttttctgctgaaaggttccctttcacacctgtgttagttactaccccagatgcttaagactagcaggatctctcagtagctgagctattaccataatagcctttcttatagtgaaggag

SEQ ID NO: 13930 - DNA, 662 bp, Homo sapiens
gtgctgtgtggacaaagaagagtgtttatttatttgccttttatgcatatacatatgcatatggtacatatggtgatgggagaaacttgtctaatttgaaactgttcacctcctactgtaagatggcatagaatctacgtccagtatcaaaagttattataattgaattgctcaaacttaaagggcaactgttaaaaggtttgcttccaagggaaatcagcctttaaaaggtaatttaaagtcaaaacaaaggtcagactggcagaggtacacatatccacttagggacagatggattgaatctgcacttgcattggtagccaattaggtaagtgaaaacttctgctttgagtattttagctttaaaaacttgatataacagaagtttgattatagtaactgaaattggaagtggaattacagtgctgtattataactggaaactggaaattggtatggctctttgttcctctctagagttttagtctccagtttggtggtgggtagctagtgaagtttgaatatactgtattaccaaaaaaccgttataggctgggtgtggtggctcatgcctataattctagctctttgggaggccaaggtgggagaatcacttgagcctaggagttcaagaccagcttaggcaacatattgagatccca

SEQ ID NO: 13931 - DNA, 327 bp, Homo sapiens
tcctatcttacaaccttgaaatacatagttaattctgcagggtctcagacatcctactgagttgccaaatattgaacaccaagctgggcttgtcaacactcagggctacaaagaggagatctcaaaactaccatggcctcaggattctgaatgtgggtctgaaatccctacttcttactttggattaaaagctcacctgagctacacacatctgttgtcctagaatggatatttttatttagatatcaaccaattcaacttcactcctttattgagtcagtcaagaaatcaataaaattgacttcaaaaattgaaatcacttcttaa

SEQ ID NO: 13932 - DNA, 336 bp, Homo sapiens
ccttatagattaatggctagactagtatctgctttctgttgctaagtttgtgagtccctatctatatcttctttaggagttgactttcccataggtaaaagtttgattgtttgaatacatttaacatgggctttggcgttagtgagaaacgaagtccaagcctgactcttttattagtatttaacctttaacatttctgagcctctatttcctgatatataaaaagtaaacaataaaacatacatatatgtttattatgtatgttggtagatattatctaaacatatgttattatatatgttgtttatgcaaaaagtaataaaacatgttttatat

SEQ ID NO: 13933 - DNA, 418 bp, Homo sapiens
ctctcacttcacaaaggcagcctcctctcccccgctcccatctggaaggctaccaggcagcactgccccaggggcactgaacaaggggacaatttaaaacattgacactggtgctgacacagtgcctagctctgaggtcaggatgagaaagactccacaagtcagacattttctgattctctgctttcaacaaaacacaaggaggtcctagtggaagtgtcatctgatagattgcggaaagtcatatctgacgacaaattatacttttggcattattatggaaagaattcaaataactgagtgacactgtaacaaaactatcattcccatctacttactcacgtaaacaaggtttctgggcacttacgtgtttaaaaaaaccatacaatttatttccaataaatgttaagcaaaaatg

SEQ ID NO: 13934 - DNA, 470 bp, Homo sapiens
gattcagggaccacactccgcttctttcactcattcgtttagtgtttcctttaagcctttgccttgttgttatgagaatacaaaaataaataagaccagtacttccctccaaagcactaattgtgagagcatgctgatggctttagcaggcagcatgcttgctgtgttgagataagagcagaatacagtcatgcaccaaataacatttcagtgttggactgcatatacgacagtattcccctaagactgtaatgaagctacaaaaatcctatcacctagtgatgtcttgcgatccttacccaaggaggtcttggcttacgtgtatgtgtatcttaatttttgagaaaaatgtttaaaaagtaaaaagttaaaaaaatgaaagcttacagaataagaatgtaaagaaagaaaacatttttgtacagttgtgcagtgttttaagctgttattacaaaagaatccaaaagtta

SEQ ID NO: 13935 - DNA, 472 bp, Homo sapiens
ttcttagcacagtagcagctacccatcccccatcccctatccttgtggcaggtgggtgtgcacatgttcctggagcagcttgcatgcaggttgtgggagccagggtggataaaaaaagactctgtcctccaaatagtggagatctgtgctttgattgctaattgctgcttctgattacagaggttcagaggtggacattgtggtttcacctccctccattgttgcaagctccccctaccctctggctgaagtgacttcctggttatttaaaaggctggtgcctttttgtttttcctgtgctcttcatttttctcttttcccccctttgggagccagacactgaagactatgacattcaaaagtaacctcatatacaagagaaattagaaagttacagtacatgtgcaggggaaggtgcaagctctgaaaacaccctaattttatacctcagactgatcctcagcacagggat

SEQ ID NO: 13936 - DNA, 406 bp, Homo sapiens
ggaggtcttctggatttttatagcttgcagataaagatccaacaacatctggattttctcagatgtgagaagctggtcatagattggtgtcatttagaagacaaaacatgagattgatgtgttttaaaagcacgcagcggatgctgcacacaagaaaggcgtggttaatgagcactccaggcctgcgtttcagcagggtgtgccaaagaatgatgcctcatgaggcctcctccatcatcctccatgtagcgcctgttgtgtgagctgatccaccgagctccccactaggtgaagcatgagttgtcggaggtctgggagaaaggagcagctgtctctgccgtggctgctgcagggacactgtgtaggctctgtgccctggtctgcatcagaggctggggcctggggc

SEQ ID NO: 13937 - DNA, 716 bp, Homo sapiens
ggtctattcttgtcaaatatgtcttaagtgtgtttacatatagtttgcctttctggtattttctgcttgcacagacctgatctccacctattttgtgtcaacagttgctgaggctggtgttgggtgattaaccgttaagcacggaagcgcagtacccagagagaccctctctctcctctcacttacatcatcatctggcttcaggctgtgcctacagaaaacaaacagcatttttgagtggttaaaaagtcagcctgaaatattaaaaaatggggcaaatgttgcctcctggttgaatagaacagttttcttgaaaaatggagtggagccaggggctcgggggaaggaagtgtttccgagggcaaacgttggtcttagatccggtctgcattgctccagtgtgtgcacgccgaggagctttctgtagacgctgagggttatgttctgcttcgtttttgattttcaaggggaaagaggacatacaaaacaaaaacaaaaaaaaacctacaacaacatggatgcctgtaactttggcaaatataaggctgtcctgttcaatgccctcataaatcattaatattttcctgtctattttattttcattcttacaacgctcttagcctgaccccttaatatggaaaataattaactctttcatgctcctgatgcctgaacaataacaaataaacaaaagaatattaatctgttccgacata

SEQ ID NO: 13938 - DNA, 422 bp, Homo sapiens
gtgccaagtactaggtgaagtttttacctctgttttcactgtgccagtcactgacttgtctaccagggtgaaattgttcatatttaaagaaggaataaactgagcaggtaggatgttaggagttggcagaggctagagtcccggtgttcttcattttatttcgaagtttgtactaatctctgctctcttttgtatttcagtcacattagcagtaataggaaggtgttttcagcgacagtggggatgttgtggcagagagggaaatatttgaagtccctaaatgtggaggtccagtttaaaacttgtcaagattaaaaaaactgtttagagtgagaccgggcgcggtggctcatgcctgtaatccgaacactttgggaggctgaggtgggaggatagcttgagcccaggagtttcacaccagc

SEQ ID NO: 13939 - DNA, 483 bp, Homo sapiens
gagatcaattcttccattagcaatgccacacataattcctaattctccaaattccagttccccatctagccaaacacacagtcactaacattacattgtggttccacttacaaatgactgcattttcaggtggaggtgttcccttaaaccattttctctggatggcgttccttcctccctcttcttcttcatccccattttcagtccgtaggatgagcttctttgtatgtaatctcccaaacgtctaccgctggagttctcagctttgacccccatcagactacacatgaggcagggtgcagattcttccactttcacctcctctccccttctctccctccgccgcctttttaaaaaatgttacttgtcccatttctacattgtgaaaacacgtagagttgcattccattcctcagccctgaaccacacctttgtttttgtcttggatctgcaattgaagatattaaaagctgtttgccattc

SEQ ID NO: 13940 - DNA, 737 bp, Homo sapiens
cttactataggcatagtttcatttttaaaatttgggataattaaagaacatacaatggtgtttaaaaaatcatttccacactctgagctgtagtaataataataataccgcaatgatactctctttattgcatgcctgctaggacaacagagttgggaggaggtgagaatctctgcttttctgatttatttatgcagataacctgcagtaggctaaatggcagcccccagagagatagtaagtatgtctgctttcaaactgaatcactggaaaaagactgattaaggatcttgagaggaggcatttgttctggattatccagatgggaactaaatgcaatccatgtatccttaaaagagagaagcagagaccaggacagagagaagaggaaggtaagaagacggaggcagagaccggagtgatgcggccacaagccaaggaacgccagagctactagaaggtggaagagacaagacacacatcttccctagtgtgcctggagggagggcagccctgctagatttacaacttctggccaccagaactttgaaatgaatctgctgtgttaagccctgtagtctgtgataatttgttatagcagtcccaggaagaaaagatataaccagacttcccttatacctattagaagcatgaaatgcacaggtacatgagaaaacaactttggtagacctgtgtatgttggcaaacacaaataatccattcattccagatactta

SEQ ID NO: 13941 - DNA, 279 bp, Homo sapiens
agatcatgaccattcatctcaacctcaggtctcaacctcaggtatgggcaatggccagtgggaaggcctggacacaaggagctggcattctgttaagcatgaatgtggaaaggttacccaagtgcataaggctgttcttgtgttgctataaagaaatacatgtctgggcacagtggctcccaaagtgctgggattccaggcatgagtcagtatgcccggctgacttgaggaacttctgtaagctccctcccttcatctcctgccaacctaagctgcatg

SEQ ID NO: 13942 - DNA, 485 bp, Homo sapiens
agtgagccgggaaggacagagacccaagtcccatccctctggggcccccttggaatgggggaggcgaacaggaaaccaccacaaacatgcccccccgccatcccaggagaagcagcagctctctgcctccttgactgagctccattacctccaagctgagagggttgttcaagagggcgtgtgggattcttttgaaaacacatttttagaaagcacccttttaacaactgaacatgatttggttgaaaataaacatccccgggtactcttgtggtacatgtttatgattttgatgcttctggtctgaatgtacaaccttcacattgtacattacaaacactactgtcaagtttatagattttcattttatttgctaattcattttccagttctctgcactgcttgtaaatcaggcaaacctgataaactgtctaaacatatgatgatactgaattgattaagttatggtcgtaggtgagaaaaca

SEQ ID NO: 13943 - DNA, 645 bp, Homo sapiens
tttttttttaagcaaaggcagctaccaaagtgttccgggcggggaggggggcgagggaggtgagtatgaggagtggagtggagctggacccttacaaagggacagcgacaaacacctcatactcaaaacaaggggactttccgtgtcatttgcgccgtcgggccattgcaaatgtccgcgctgagatgcctaccttgtcactcgacgcagccgccaaagctcacccggagctgcgtcagtccccactgggttcctccaggccaaggaggtacgacctccgccgcagcatataaagtaaatgtccaggagatgggaagaaacccgccgatacagcacccgggtgcccaagcccccgagaactaggccgcgcgggtactacggggtgcgcgatcggccagaaagcccgggccaggacgggcccaggagcgagcaccgtcgggaacaagcgtcgggaacaagccgggattaagaggaagcgccggcgccaacggtctcccgcccgccgcggtccccccaggactcttcctgcgcttgcaagcgccacgccgcccacaggactgcgccagccggccggcgcctcaacagagcgcgccacggagcagcgcccctcgggagacatgacgcctgagccatcgaggcggccgc

SEQ ID NO: 13944 - DNA, 353 bp, Homo sapiens
acattacaaaggaaaaggaagcagacagcattgttttcacagcatataagtatcacactggatgttattccatgcatgcattacagagtgtcagtaaaactagagcagacatcactgatggtaataaagttccctgttgccccgtggggacccatgactttttactctgttccacagctgctcgggatgtgccatttccaatgggcaaaaggcttggctgtacatatgtcttgaaactatttaatagttggaaatttgcctgcagtgtagcttcagcagctttgctaagtttttttttttttttaagggagaaggaacactaccccaactgccaagtctggaaagaaaaaaaa

SEQ ID NO: 13945 - DNA, 469 bp, Homo sapiens
catctcggcacgaggcttccttcaagcacgtggaccgacacccaggcctcctggtgtcctgacactgcagactcctggaatatacctccaccagcaggcaggaatctgtcctattcccagcaaccactagaggcactgcctgaccctactgcggccacaagcagagggaccccaggattctcaaatctgttaccttgtctcacctcccctaggaagcagaagagtgctatgaaaatctttagctgctgatcacagctataaacgagatgaggagggtccctgtcctcttggtgtttccagtctcccaaagaagacagacatgaaacaatgatggttacagttcaagatggaggtactatctgagcttatggcaaggggttttaatctcatccaaagggccaaggaatgcctctttaaagaagagagaacaaataaaaatcattcataattccatcacctataaataaca

SEQ ID NO: 13946 - DNA, 371 bp, Homo sapiens
gcaacaaaataattaggaaagaaaaaatggcgtcagtgtaagtacatcacatttctcattgcgttatttttctcatacactaaattaccttacataggtctggttctgatttactgtctgttaaatgcactcactgctaggataaaaatacccaaaaacatttgaatttctcataagaaatattggaattagaagaaaactattttaaaataacagttgttttaatattgttgggtacaccaactctttaaagttaatgttaatttttcccacaattttgtagagatagctttttcagcttttgttagtattttaaagtgtagcatacatgtcttaaggaaagaacaaggtgacatttcagtagcatttta

SEQ ID NO: 13947 - DNA, 446 bp, Homo sapiens
acttcgaccctccttctagcaatctccatttaacccaaaacaaagggcctcgatcacctgtacagcctgtgttccaagggatagggcagggatatggctgtccttcatagataagtagtgaatctcagtgttggctactcccggattccttagcctgggactccaaacacacttagaatagggtaattctcaggtatgctccagttatggctcagccatacaccaaggtgtatacaccaacccctgccatgcaccaatatgcatataaatatgaatagcctctgaaagggcgaattcctagattgacctataggcccacatgaaaagttctatattaatagctatgtcatgactgggtgcagtggctcatacctgtaatcccaacactttgggaggtcgaggtgggtggatcccttgaggccaggagttggagaccagcctgggca

SEQ ID NO: 13948 - DNA, 236 bp, Homo sapiens
tctctattgtaagaacttttcattattttatcttgtgtatataacttgtatcctctgctacctgccagtgcatcatcttctcttaacatctgttggttcttcctttgaaaaactcacgtcaggatgcttttgtgttttccccttttcaaaatttatatattcttctttgtcaagtgtaggttaattatgtcattttatagtgcaattgattaaagaaggcagattttaaaagataa

SEQ ID NO: 13949 - DNA, 388 bp, Homo sapiens
gtggggggaggagtgctattttatacatggtatgtctgataaggtgatatttgagtagagacctggggtaagggagccagctatgcagtagtaaggcatagtgagataagtaagacagagaaagcatcaggtggaaaagccccctagtaggagtgtgccggatatcttcaagtcacagaaggaggccactgtggccagtattcagtgaacaaaggtatagccataagaggtgagatcagagggggactggaggcccccatcatgtagggccttattaggacacaagaacagctcacctttacctgaatgagatgggagcctttggaaggttttgaatagacatataacatgattttgatttaaattgtacagtaatctctcaggctgt

SEQ ID NO: 13950 - DNA, 971 bp, Homo sapiens
caatgagtcactccctggctgctctgggttgtcacatcccaagctgagaccttgggaatgcgtaactggtttctgttcgctgatgcccgcctaatcctgggcactggcaggtaccaggagggctctgctgacgtcctcagctcccctcccagcttcacctttaccctcttcaaatctgggctcccctctttttcctccgttagactctcagtgttccttagggttcccctttacttgggtgtcctctgccctggggaagggattacaagcccaggctcaggtggtggtgtataacttggaggctggagggacctgtgataactccaggggcctcccagggcagccagactccccgctgtcctacctctacacctctgcttatgctgtgagtctgcctggaatgcctttatgtggctatcctgccccagccaatctcagcaagcccacctgctgtcccaccttcaatgtttctaaaatgctgtcaaaagctgcctcctccagcaagtctgcccagattgctcccaagtgaaatccttttaaaaagccccacagagcactttatctttttccttttatatcattaaatatttgtgaattcattcaagaaatattgagagaatacctgccaggcgtccagcactggagacccaggttgccatggcccctgctctggaggctttacagtccagtatggggtgggggaggcactaaacaaacacacttataattacaactgtggtaagtctacagggagacctggcctagtgtggggacatccggggaggcctctaagagaaagactgaggaggtacctgaagggtgtggagagtcttccttcccaggcaggaggaacagcccaggcccttctggctaacggctgggctggtctctggtggtcaaaggaagtgatagcagtgagccgagatcgcgccactgcactccagcctgaggacagtgagagactccatgtc

SEQ ID NO: 13951 - DNA, 326 bp, Homo sapiens
ccaagtgttgtaggtccttctgcacaaaagttccataccctcccttctcctttggttttctaatttaagtgtgatgagtagcagccagccaagtgaaagaaaggcccagggatttcaaaggaaagatacaaggctggcggcaaaaaggaagggctttctcctcactgggccctcttcagtggcttgaactgtgagactcctggaggtatcagcgcttggttcaaccctaaaagaagttgcatcagacatggcaactttggcctgctttgcttgtattctctgtggcgaatggagtattaataagtggctctctggggaagtttgcg

SEQ ID NO: 13952 - DNA, 337 bp, Homo sapiens
gacacctttcgtcctttctaatctcactttaattagatgcactcttccaagcaaattggcctttagctcagtaaatgattctacatttggccagagatccaagaatcacagtgcctgatacattctgtatcaccagtgggctcagccactactttgtactggatactttctgcagacagtcttaacactgattattctaagaatggaaggtacatgagtgattcatgtttcttctttaattgtatgtattttccagaatatctaaagtaaaaatgattaccacttacaattgcaaatgtaaccataactaaaaataaaaattgttttttaattccgt

SEQ ID NO: 13953 - DNA, 504 bp, Homo sapiens
agtgcgagttttcaaagtatctcttggattggggaaagtattattgagctttaaaaataatcccattaagttctgtcatttcctgtgacgtcttagaagtttgcccagggtgtaataataccaatgtgagagaggcagagagatactggggtttctaattaaaacgaaggctatagtgagtgcagggtgatgcgatccagcaactgagtcggtggggctgacggccgcatcactgattcagggtgagaggccgtcagataaggaggccctggcagctgggacctccctcaccaaacaccagctgatagcaggggcagcctactcgtggggaaggtggggctccttgcttttgccatctccctgccatcatccttcccggcttgtggtatccggcaggctttggttgggttttgtttgtagtaggatctccataagaggaagtatagcatggagctttgtgctcaaagccattctgggtcaggaaagccccagaaataaaatata

SEQ ID NO: 13954 - DNA, 875 bp, Homo sapiens
gagatagtctcgctcggacgctcaggttggactgcagccccgtgatcaacaactgctgcaagaggggccgtttgttcgactcgctagtcttctgcggctctatgcggtactaaagagcagaagacagaagatacaaaaaccacaaaaagtagccgggcgtggtgctgcccgtcaataatcccagctactcgggaggctgagacaggagaatcgcttgaacccgggaggcggaagtttcagcgagccgagatcacgccgttgcagtccaacctgagcgtccgagcgagactctatctcagaaaataaagacagaatgaaagagcccggcgcggtggcttacgcctgtaatcccagcgctttgggaggccgaggcgggcggatcgcctgaggtcaggagctcgagaccagcctggccgacatggcgaaaccccctaaaaatacaaaaattagccgggcgtggtggcctgcgcctgtaatcccagctacccaggaggctgaggcaggagaatcgctggaacccgggaggtagaggctgcagtgagccgagatcgcgccactgcactccagcctgggcgacagagcgagagtttgtctgaaaaaaaaaaaaaaaaaagccagggtgagcggtggctcaagcctgtaatcgcaagcaacactttgggaggcggcagctgggcagatcaccggagttcgggagttggagaccagcctgagcaacgtggagaaaccccatctgtactaaaaatacaaagttagccgggcgtggtggcacatgcctgtagtcccagctgctcgggaggctgaggcaggggaatcgcttgaacccgggaggcggaggttgcagagagcctagatcgcgccattggactccaggc

SEQ ID NO: 13955 - DNA, 1814 bp, Homo sapiens
gcgtgtgatgttcccctccctgtgtcccatgtgttctcgctgttcaactcccacttaggagcgagaacatgcggtgtttggttttcgcttcctgtgtcagtttgctgagaatgaggccttccagcttcatccacgttcccgcagaggtcatgaactcatccttttttatggctgcgtagtaattccatgctgtatacgtgccacactttctttatccagcctatcattcatgggcattcgagttggttccaagtctttgctattgtaaatagtgctgcagtaaacatacgtgtccacgtgtcttcctagtaggaacttcttcctcttcagcccgctgagtagctggcactttaaggcaggtgccaacgcaccggcagcaagcttccttttttgcccgggaaaaactgaggtgcaggtagtataagccattgatcacggaacgcacaggagcagagctcgagtccaagcatcgtggctccacccgtcatgctggatgcatctttaggctccgctctaggtatgtgtatcctttacgggatcagccaccggcagttgccttgcgagcacgatgacaaacctctgccggctcttttgggtctcatccctgtatctatacgttgcatcccaacataaagaccggaatgttcctttcgctgacccagtctctcaccctttccaaactccagaaatcttgtctgtcctcggaagaactccccctgcttctttctctaaaggctgtcttcaggccgggcacagtgggaggatcgcttgagcccagaaggccgcagtgaggtgagatcgcgccattgcactgcagcccccggcggcagagccggagccccgtctcgaaacaaacaaacaaaaaccaaccaaccaaccaaccaacaaacacagacaaagaaagaaagagcccaggcaacctagtgaaaacctgttcgggctggggcgtacctgtaccccagctgttccggaggctgaggccaggaggatgggtggacgctgggaggtggatgctgcagtgagcagtgattgcaccactgcactccagcctgggtgacagagccagaccccgtcccaaataaataaacataaaaataaaggaaccagtttgtagaaagcgggagagggtcccattgaacttcaagccttcgagcaacagctgtggctggacaggttggaccagcaggctggagcagtcgccatcttggcagggatcattgaccctgatctatcgtcgggaggaggaagagctgatcttacgcagggagggcaggtggactatgtgtggactctggtgacctgtttgggtgccaggtgttactcccagggccacccgtaactgtgaatgtgcaggaaccctgacttgagaagggcctggccacggggggcttaggcccctggggaatgagagtttggttcccggtacccagggaaaccaccagcatcggcagaggtgatagctgaggaggagcggggatttggacgagagacacaggatgagtaccggggggcagccccgtgatcaacaactgctgcaagaggggccgtttgttcgactcgctagtcttctgcggctctatgcggtactaaagagcagaagacagaagatacaaaaaccacaaaaagtagccgggcgtggtgctgcccgtcaataatcccagctactcgggaggctgagacaggagaatcgcttgaacccgggaggcggaagtttcagcgagccgagatcacgccgttgcagtccaacctgagcgtccgagcgagactctatctgtcgagcggccgccaatttagtagtagtagtaggcggccgc

SEQ ID NO: 13956 - DNA, 1940 bp, Homo sapiens
gctccgtaccctgtctcactttccggaacgcacaggagcagagctcgagtccaagcatcgtggctccacccgtcatgctggatgcatctttaggctccgctctaggtatgtgtatcctttacgggatcagccaccggcagttgccttgcgagcacgatgacaaacctctgccggctcttttgggtctcatccctgtatctatacgttgcatcccaacataaagaccggaatgttcctttcgctgacccagtctctcaccctttccaaactccagaaatcttgtctgtcctcggaagaactccccctgcttctttctctaaaggctgtcttcaggccgggcacagtgggaggatcgcttgagcccagaaggccgcagtgaggtgagatcgcgccattgcactgcagcccccggcggcagagccggagccccgtctcgaaacaaacaaacaaaaaccaaccaaccaaccaaccaacaaacacagacaaagaaagaaagagcccaggcaacctagtgaaaacctgttcgggctggggcgtacctgtaccccagctgttccggaggctgaggccaggaggatgggtggacgctgggaggtggatgctgcagtgagcagtgattgcaccactgcactccagcctgggtgacagagccagaccccgtcccaaataaataaacataaaaataaaggaaccagtttgtagaaagcgggagagggtcccattgaacttcaagccttcgagcaacagctgtggctggacaggttggaccagcaggctggagcagtcgccatcttggcagggatcattgaccctgatctatcgtcgggaggaggaagagctgatcttacgcagggagggcaggtggactatgtgtggactctggtgacctgtttgggtgccaggtgttactcccagggccacccgtaactgtgaatgtgcaggaaccctgacttgagaagggcctggccacggggggcttaggcccctggggaatgagagtttggttcccggtacccagggaaaccaccagcatcggcagaggtgatagctgaggaggagcggggatttggacgagagacacaggatgagtaccggggggcagccccgtgatcaacaactgctgcaagaggggccgtttgttcgactcgctagtcttctgcggctctatgcggtactaaagagcagaagacagaagatacaaaaaccacaaaaagtagccgggcgtggtgctgcccgtcaataatcccagctactcgggaggctgagacaggagaatcgcttgaacccgggaggcggaagtttcagcgagccgagatcacgccgttgcagtccaacctgagcgtccgagcgagactctatctcagaaaataaagacagaatgaaagagcccggcgcggtggcttacgcctgtaatcccagcgctttgggaggccgaggcgggcggatcgcctgaggtcaggagctcgagaccagcctggccgacatggcgaaaccccctaaaaatacaaaaattagccgggcgtggtggcctgcgcctgtaatcccagctacccaggaggctgaggcaggagaatcgctggaacccgggaggtagaggctgcagtgagccgagatcgcgccactgcactccagcctgggcgacagagcgagagtttgtctgaaaaaaaaaaaaaaaaaagccagggtgagcggtggctcaagcctgtaatcgcaagcaacactttgggaggcggcagctgggcagatcaccggagttcgggagttggagaccagcctgagcaacgtggagaaaccccatctgtactaaaaatacaaagttagccgggcgtggtggcacatgcctgtagtcccagctgctcgggaggctgaggcaggggaatcgcttgaacccgggaggcggaggttgcagagagcctagatcgcgccattggactccaggc

SEQ ID NO: 13957 - DNA, 885 bp, Homo sapiens
gcgtgtgatgttcccctccctgtgtcccatgtgttctcgctgttcaactcccacttaggagcgagaacatgcggtgtttggttttcgcttcctgtgtcagtttgctgagaatgaggccttccagcttcatccacgttcccgcagaggtcatgaactcatccttttttatggctgcgtagtaattccatgctgtatacgtgccacactttctttatccagcctatcattcatgggcattcgagttggttccaagtctttgctattgtaaatagtgctgcagtaaacatacgtgtccacgtgtcttcctagtaggaacttcttcctcttcagcccgctgagtagctggcactttaaggcaggtgccaacgcaccggcagcaagcttccttttttgcccgggaaaaactgaggtgcaggtagtataagccattgatcacggaacgcacaggagcagagctcgagtccaagcatcgtggctccacccgtcatgctggatgcatctttaggctccgctctaggtatgtgtatcctttacgggatcagccaccggcagttgccttgcgagcacgatgacaaacctctgccggctcttttgggtctcatccctgtatctatacgttgcatcccaacataaagaccggaatgttcctttcgctgacccagtctctcaccctttccaaactccagaaatcttgtctgtcctcggaagaactccccctgcttctttctctaaaggctgtcttcaggccgggcacagtgggaggatcgcttgagcccagaaggccgcagtgaggtgagatcgcgccattgcactgcagcccccggcggcagagccggagccccgtcccaggaaaagcaggggatcctgtagagacgagcaacaaac

SEQ ID NO: 13958 - DNA, 885 bp, Homo sapiens
gcgtgtgatgttcccctccctgtgtcccatgtgttctcgctgttcaactcccacttaggagcgagaacatgcggtgtttggttttcgcttcctgtgtcagtttgctgagaatgaggccttccagcttcatccacgttcccgcagaggtcatgaactcatccttttttatggctgcgtagtaattccatgctgtatacgtgccacactttctttatccagcctatcattcatgggcattcgagttggttccaagtctttgctattgtaaatagtgctgcagtaaacatacgtgtccacgtgtcttcctagtaggaacttcttcctcttcagcccgctgagtagctggcactttaaggcaggtgccaacgcaccggcagcaagcttccttttttgcccgggaaaaactgaggtgcaggtagtataagccattgatcacggaacgcacaggagcagagctcgagtccaagcatcgtggctccacccgtcatgctggatgcatctttaggctccgctctaggtatgtgtatcctttacgggatcagccaccggcagttgccttgcgagcacgatgacaaacctctgccggctcttttgggtctcatccctgtatctatacgttgcatcccactgtgcccggcctgaagacagcctttagagaaagaagcagggggagttcttccgaggacagacaagatttctggagtttggaaagggtgagagactgggtcagcgaaaggaacattccggtctttatgtgtcctgaaggcctcggcggaaaccgtggaccccgcctcgctctgggagtactagggccggcctgccttccccgctcctgcccacatgcggctcacatgccaaccctcccggatatgcacgtccctgtaa

SEQ ID NO: 13959 - DNA, 1110 bp, Homo sapiens
cccttctttctctgtggcccgggccccagttctgaaccagctggaggagttgctgagcgacatgaaggcggacgtgacccgcctgcaatccacggtcaacccacgtggcttgaaccctgacttgagaagggcctggccacggggggcttaggcccctggggaatgagagtttggttcccggtacccagggaaaccaccagcatcggcagaggtgatagctgaggaggagcggggatttggacgagagacacaggatgagtaccggggggcagccccgtgatcaacaactgctgcaagaggggccgtttgttcgactcgctagtcttctgcggctctatgcggtactaaagagcagaagacagaagatacaaaaaccacaaaaagtagccgggcgtggtgctgcccgtcaataatcccagctactcgggaggctgagacaggagaatcgcttgaacccgggaggcggaagtttcagcgagccgagatcacgccgttgcagtccaacctgagcgtccgagcgagactctatctcagaaaataaagacagaatgaaagagcccggcgcggtggcttacgcctgtaatcccagcgctttgggaggccgaggcgggcggatcgcctgaggtcaggagctcgagaccagcctggccgacatggcgaaaccccctaaaaatacaaaaattagccgggcgtggtggcctgcgcctgtaatcccagctacccaggaggctgaggcaggagaatcgctggaacccgggaggtagaggctgcagtgagccgagatcgcgccactgcactccagcctgggcgacagagcgagagtttgtctgaaaaaaaaaaaaaaaaaagccagggtgagcggtggctcaagcctgtaatcgcaagcaacactttgggaggcggcagctgggcagatcaccggagttcgggagttggagaccagcctgagcaacgtggagaaaccccatctgtactaaaaatacaaagttagccgggcgtggtggcacatgcctgtagtcccagctgctcgggaggctgaggcaggggaatcgcttgaacccgggaggcggaggttgcagagagcctagatcgcgccattggactccaggc

SEQ ID NO: 13960 - DNA, 2352 bp, Homo sapiens
gcgtgtgatgttcccctccctgtgtcccatgtgttctcgctgttcaactcccacttaggagcgagaacatgcggtgtttggttttcgcttcctgtgtcagtttgctgagaatgaggccttccagcttcatccacgttcccgcagaggtcatgaactcatccttttttatggctgcgtagtaattccatgctgtatacgtgccacactttctttatccagcctatcattcatgggcattcgagttggttccaagtctttgctattgtaaatagtgctgcagtaaacatacgtgtccacgtgtcttcctagtaggaacttcttcctcttcagcccgctgagtagctggcactttaaggcaggtgccaacgcaccggcagcaagcttccttttttgcccgggaaaaactgaggtgcaggtagtataagccattgatcacggaacgcacaggagcagagctcgagtccaagcatcgtggctccacccgtcatgctggatgcatctttaggctccgctctaggtatgtgtatcctttacgggatcagccaccggcagttgccttgcgagcacgatgacaaacctctgccggctcttttgggtctcatccctgtatctatacgttgcatcccaacataaagaccggaatgttcctttcgctgacccagtctctcaccctttccaaactccagaaatcttgtctgtcctcggaagaactccccctgcttctttctctaaaggctgtcttcaggccgggcacagtgggaggatcgcttgagcccagaaggccgcagtgaggtgagatcgcgccattgcactgcagcccccggcggcagagccggagccccgtctcgaaacaaacaaacaaaaaccaaccaaccaaccaaccaacaaacacagacaaagaaagaaagagcccaggcaacctagtgaaaacctgttcgggctggggcgtacctgtaccccagctgttccggaggctgaggccaggaggatgggtggacgctgggaggtggatgctgcagtgagcagtgattgcaccactgcactccagcctgggtgacagagccagaccccgtcccaaataaataaacataaaaataaaggaaccagtttgtagaaagcgggagagggtcccattgaacttcaagccttcgagcaacagctgtggctggacaggttggaccagcaggctggagcagtcgccatcttggcagggatcattgaccctgatctatcgtcgggaggaggaagagctgatcttacgcagggagggcaggtggactatgtgtggactctggtgacctgtttgggtgccaggtgttactcccagggccacccgtaactgtgaatgtgcaggaaccctgacttgagaagggcctggccacggggggcttaggcccctggggaatgagagtttggttcccggtacccagggaaaccaccagcatcggcagaggtgatagctgaggaggagcggggatttggacgagagacacaggatgagtaccggggggcagccccgtgatcaacaactgctgcaagaggggccgtttgttcgactcgctagtcttctgcggctctatgcggtactaaagagcagaagacagaagatacaaaaaccacaaaaagtagccgggcgtggtgctgcccgtcaataatcccagctactcgggaggctgagacaggagaatcgcttgaacccgggaggcggaagtttcagcgagccgagatcacgccgttgcagtccaacctgagcgtccgagcgagactctatctcagaaaataaagacagaatgaaagagcccggcgcggtggcttacgcctgtaatcccagcgctttgggaggccgaggcgggcggatcgcctgaggtcaggagctcgagaccagcctggccgacatggcgaaaccccctaaaaatacaaaaattagccgggcgtggtggcctgcgcctgtaatcccagctacccaggaggctgaggcaggagaatcgctggaacccgggaggtagaggctgcagtgagccgagatcgcgccactgcactccagcctgggcgacagagcgagagtttgtctgaaaaaaaaaaaaaaaaaagccagggtgagcggtggctcaagcctgtaatcgcaagcaacactttgggaggcggcagctgggcagatcaccggagttcgggagttggagaccagcctgagcaacgtggagaaaccccatctgtactaaaaatacaaagttagccgggcgtggtggcacatgcctgtagtcccagctgctcgggaggctgaggcaggggaatcgcttgaacccgggaggcggaggttgcagagagcctagatcgcgccattggactccaggc

SEQ ID NO: 13961 - DNA, 171 bp, Homo sapiens
tttatggcttaaaagtcacttggttagactcaaacattgttgcaacatgctatatgttattcttaactaacattatacaaaatgcacaataaaggtagataatgaggatcttacacgttatttgtacatttattgaatacctatttataatcacgcatgatttctccgcaa

SEQ ID NO: 13962 - DNA, 2112 bp, Homo sapiens
cgcgggggcggggacgctgggcgcaggaggcgcggccgggagcgccgcgcgccgggagcggggcggcgggcgccggggctggcatggcgtggccctgtatcagccgcctgtgctgcctggcgcggcgctggaaccagctggaccgctccgacgtggcggtgccgctcactctgcacggctactcggacctcgacagcgaggagccgggcacgggcggcgccgcctcgcgcaggggccagcctcccgcgggcgcccgggattccggccgggacgtgccgctcactcagtaccagcgggacttcggcttgtggaccacgcccgccgggcccaaggatccgccgccggggcgcggaccgggggcgggcggccgcaggggcaaatcctccgcgcagtcctccgcgccacctgcgcccggcgcccgcggggtctacgtgctgcccatcggcgacgcggacgcggctgcagcagtgaccacgtcgtacagacaggaattccaggcttggactggagtgaagccctcaagatccacaaagacaaaaccagcccgagtcatcacaacccacacttcgggatgggacagcagccctggggccggcttccaggtcccagaggtgaggaagaagttcactcctaacccctccgccatctttcaggcctcagctccccggattctcaacgtgtgactgcctgcaccgtgacaccatggctgccgacaggacagggctggggagcggcctcaggacccactgccgcggggctgggcgagagcatggcatgggcccctgcgggagggcacagcccctctcaaagctgtcaccagggccaaagtgctggtgtggagcagatgcaccgatggacttggcacacccagctcagcctcaagcatcctcttgagaagcctgtggaaggctcctgcgttcgttaactgccatctggccgtctctcagttttgaaatctctgaggagcctgaggatcaagtcagttgggaaccgaattggtccatggaagctgaggaatgtggacacatccggcccttgaaagaaccagttatgtccacttttggtggatttcccaggatgcgtgagcacttgattaatttcataacctacagtgagacccttggctcttcctacaaatggcccctgcagttgaagctgttggaatcttgggccgtcacctgcatgactcatggtgatgctgagtatccaggaggaaatttccagaagaaacagaccgtcagtcacgggcttccacttcacagacctccttatggccaagatgagcctcatgttttaacaaaacagttcttgggattgaatgactcacatttaccttgtgctaggttctaaagattgaatccacattttgttactaatgattttcccgctaacataaggatgatgagcagggcactatcatacacactggctgagaactggaactgtttttgggaaggtggcatttgtctcattccctgaaataccttaaaatgtcctctacaccaacccttccgtctaccctgctcacatgtacagtgacggggaactcaccaccttttgaagaggcagttcattttctttgcaaagctctctcctaacttcctccgtaaattccagccagcatggccacatgggtcacgcctggtgccttcacacgtttgaggggtcttcgtctctttttaaagcttagaggtacaagctcaggacagtcttcagtaaggaaatttgtggatttccctttggatctttcttcctctccagcccacaagtggctctagtgagacgagcatttaagctgcaggtggtggcactcgggtctcagagccaccagacgtgcaggtgggacagtggttccagctccgactgcctgtcagcgtccctcccaggtgctagccctggcaggcacagccctcccctcatgccagcaaaggaaatgctcttgatgagaggctcgctttaaagaagcccaaagcgtgtgcttatccaaggggttcagctattcctgacttcacggcttgcatgtttgatttttctaagagaaaagaggctgcctgctgggtgtctgtggaaatgagattaaaaactgtacaatctcagattttactaaaatgc

SEQ ID NO: 13963 - DNA, 2049 bp, Homo sapiens
cgcgggggcggggacgctgggcgcaggaggcgcggccgggagcgccgcgcgccgggagcggggcggcgggcgccggggctggcatggcgtggccctgtatcagccgcctcgcgcaggggccagcctcccgcgggcgcccgggattccggccgggacgtgccgctcactcagtaccagcgggacttcggcttgtggaccacgcccgccgggcccaaggatccgccgccggggcgcggaccgggggcgggcggccgcaggggcaaatcctccgcgcagtcctccgcgccacctgcgcccggcgcccgcggggtctacgtgctgcccatcggcgacgcggacgcggctgcagcagtgaccacgtcgtacagacaggaattccaggcttggactggagtgaagccctcaagatccacaaagacaaaaccagcccgagtcatcacaacccacacttcgggatgggacagcagccctggggccggcttccaggtcccagaggtgaggaagaagttcactcctaacccctccgccatctttcaggcctcagctccccggattctcaacgtgtgactgcctgcaccgtgacaccatggctgccgacaggacagggctggggagcggcctcaggacccactgccgcggggctgggcgagagcatggcatgggcccctgcgggagggcacagcccctctcaaagctgtcaccagggccaaagtgctggtgtggagcagatgcaccgatggacttggcacacccagctcagcctcaagcatcctcttgagaagcctgtggaaggctcctgcgttcgttaactgccatctggccgtctctcagttttgaaatctctgaggagcctgaggatcaagtcagttgggaaccgaattggtccatggaagctgaggaatgtggacacatccggcccttgaaagaaccagttatgtccacttttggtggatttcccaggatgcgtgagcacttgattaatttcataacctacagtgagacccttggctcttcctacaaatggcccctgcagttgaagctgttggaatcttgggccgtcacctgcatgactcatggtgatgctgagtatccaggaggaaatttccagaagaaacagaccgtcagtcacgggcttccacttcacagacctccttatggccaagatgagcctcatgttttaacaaaacagttcttgggattgaatgactcacatttaccttgtgctaggttctaaagattgaatccacattttgttactaatgattttcccgctaacataaggatgatgagcagggcactatcatacacactggctgagaactggaactgtttttgggaaggtggcatttgtctcattccctgaaataccttaaaatgtcctctacaccaacccttccgtctaccctgctcacatgtacagtgacggggaactcaccaccttttgaagaggcagttcattttctttgcaaagctctctcctaacttcctccgtaaattccagccagcatggccacatgggtcacgcctggtgccttcacacgtttgaggggtcttcgtctctttttaaagcttagaggtacaagctcaggacagtcttcagtaaggaaatttgtggatttccctttggatctttcttcctctccagcccacaagtggctctagtgagacgagcatttaagctgcaggtggtggcactcgggtctcagagccaccagacgtgcaggtgggacagtggttccagctccgactgcctgtcagcgtccctcccaggtgctagccctggcaggcacagccctcccctcatgccagcaaaggaaatgctcttgatgagaggctcgctttaaagaagcccaaagcgtgtgcttatccaaggggttcagctattcctgacttcacggcttgcatgtttgatttttctaagagaaaagaggctgcctgctgggtgtctgtggaaatgagattaaaaactgtacaatctcagattttactaaaatgcaaaaatgtagtttcagtttcttaaattataagcacgagtcttctcaaaaaaaa

SEQ ID NO: 13964 - DNA, 2033 bp, Homo sapiens
cgcgggggcggggacgctgggcgcaggaggcgcggccgggagcgccgcgcgccgggagcggggcggcgggcgccggggctggcatggcgtggccctgtatcagccgcctgtgctgcctggcgcggcgctggaaccagctggaccgctccgacgtggcggtgccgctcactctgcacggctactcggacctcgacagcgaggagccgggcacgggcggcgccgcctcgcgcaggggccagcctcccgcgggcgcccgggattccggccgggacgtgccgctcactcagtaccagcgggacttcggcttgtggaccacgcccgccgggcccaaggatccgccgccggggcgcggaccgggggcgggcggccgcaggggcaaatcctccgcgcagtcctccgcgccacctgcgcccggcgcccgcggggtctacgtgctgcccatcggcgacgcggacgcggctgcagcagtgaccacgtcgtacagacaggaattccaggcttggactggagtgaagccctcaagatccacaaagacaaaaccagcccgagtcatcacaacccacacttcgggatgggacagcagccctggggccggcttccaggtcccagaggtgaggaagaagttcactcctaacccctccgccatctttcaggcctcagctccccggattctcaaagctgtcaccagggccaaagtgctggtgtggagcagatgcaccgatggacttggcacacccagctcagcctcaagcatcctcttgagaagcctgtggaaggctcctgcgttcgttaactgccatctggccgtctctcagttttgaaatctctgaggagcctgaggatcaagtcagttgggaaccgaattggtccatggaagctgaggaatgtggacacatccggcccttgaaagaaccagttatgtccacttttggtggatttcccaggatgcgtgagcacttgattaatttcataacctacagtgagacccttggctcttcctacaaatggcccctgcagttgaagctgttggaatcttgggccgtcacctgcatgactcatggtgatgctgagtatccaggaggaaatttccagaagaaacagaccgtcagtcacgggcttccacttcacagacctccttatggccaagatgagcctcatgttttaacaaaacagttcttgggattgaatgactcacatttaccttgtgctaggttctaaagattgaatccacattttgttactaatgattttcccgctaacataaggatgatgagcagggcactatcatacacactggctgagaactggaactgtttttgggaaggtggcatttgtctcattccctgaaataccttaaaatgtcctctacaccaacccttccgtctaccctgctcacatgtacagtgacggggaactcaccaccttttgaagaggcagttcattttctttgcaaagctctctcctaacttcctccgtaaattccagccagcatggccacatgggtcacgcctggtgccttcacacgtttgaggggtcttcgtctctttttaaagcttagaggtacaagctcaggacagtcttcagtaaggaaatttgtggatttccctttggatctttcttcctctccagcccacaagtggctctagtgagacgagcatttaagctgcaggtggtggcactcgggtctcagagccaccagacgtgcaggtgggacagtggttccagctccgactgcctgtcagcgtccctcccaggtgctagccctggcaggcacagccctcccctcatgccagcaaaggaaatgctcttgatgagaggctcgctttaaagaagcccaaagcgtgtgcttatccaaggggttcagctattcctgacttcacggcttgcatgtttgatttttctaagagaaaagaggctgcctgctgggtgtctgtggaaatgagattaaaaactgtacaatctcagattttactaaaatgcaaaaatgtagtttcagtttcttaaattataagcacgagtcttctcaaaaaaaa

SEQ ID NO: 13965 - DNA, 1142 bp, Homo sapiens
cgcgggggcggggacgctgggcgcaggaggcgcggccgggagcgccgcgcgccgggagcggggcggcgggcgccggggctggcatggcgtggccctgtatcagccgcctgtgctgcctggcgcggcgctggaaccagctggaccgctccgacgtggcggtgccgctcactctgcacggctactcggacctcgacagcgaggagccgggcacgggcggcgccgcctcgcgcaggggccagcctcccgcgggcgcccgggattccggccgggacgtgccgctcactcagtaccagcgggacttcggcttgtggaccacgcccgccgggcccaaggatccgccgccggggcgcggaccgggggcgggcggccgcaggggcaaatcctccgcgcagtcctccgcgccacctgcgcccggcgcccgcggggtctacgtgctgcccatcggcgacgcggacgcggctgcagcagtgaccacgtcgtacaggtatgggctgggtagggaccgcaacgagtccccaccctgtggtgggaggacgcggaggcccggctctctccggtcactgcctagtgtgcgggcgttggtggtgaggaccgagcgcagggtcccgtgtgggtgagcccttcagagtcccactgtgacaggggctttcagggagaacgggtccgcgggccctccccacctcccagcccagctctgctcctggacagccgagggctttctcccttttttcctcttaccacaaaagtaattcatactgtagaaaaatgggaaagtacagaaattacaacaaaatacgtatctccttgatccctccccagacgagttctttctactccgtaatgtgcatttggtgcatatgcactgatatatttttacgtggttagattcttactgtacacttttttcaccagttgtagaagtctgtccgtgttactacatgttctgcaacatgaattttaataaacgtgcagtattttatcctatggatatgcctttatatcttcaagttttatttatctacttccttaccattgactatttagggtgtttctaatgtgggactattaaaagcactacttttcctttgatgcagctatttcactactaggaattttccctacaggtatcctacaaggtaggg

SEQ ID NO: 13966 - DNA, 2165 bp, Homo sapiens
cgcgggggcggggacgctgggcgcaggaggcgcggccgggagcgccgcgcgccgggagcggggcggcgggcgccggggctggcatggcgtggccctgtatcagccgcctgtgctgcctggcgcggcgctggaaccagctggaccgctccgacgtggcggtgccgctcactctgcacggctactcggacctcgacagcgaggagccgggcacgggcggcgccgcctcgcgcaggggccagcctcccgcgggcgcccgggattccggccgggacgtgccgctcactcagtaccagcgggacttcggcttgtggaccacgcccgccgggcccaaggatccgccgccggggcgcggaccgggggcgggcggccgcaggggcaaatcctccgcgcagtcctccgcgccacctgcgcccggcgcccgcggggtctacgtgctgcccatcggcgacgcggacgcggctgcagcagtgaccacgtcgtacagacaggaattccaggcttggactggagtgaagccctcaagatccacaaagacaaaaccagcccgagtcatcacaacccacacttcgggatgggacagcagccctggggccggcttccaggtcccagaggtgaggaagaagttcactcctaacccctccgccatctttcaggcctcagctccccggattctcaacgtgtgactgcctgcaccgtgacaccatggctgccgacaggacagggctggggagcggcctcaggacccactgccgcggggctgggcgagagcatggcatgggcccctgcgggagggcacagcccctctcaaagctgtcaccagggccaaagtgctggtgtggagcagatgcaccgatggacttggcacacccagctcagcctcaagcatcctcttgagaagcctgtggaaggctcctgcgttcgttaactgccatctggccgtctctcagttttgaaatctctgaggagcctgaggatcaagtcagttgggaaccgaattggtccatggaagctgaggaatgtggacacatccggcccttgaaagaaccagttatgtccacttttggtggatttcccaggatgcgtgagcacttgattaatttcataacctacagtgagacccttggctcttcctacaaatggcccctgcagttgaagctgttggaatcttgggccgtcacctgcatgactcatggtgatgctgagtatccaggaggaaatttccagaagaaacagaccgtcagtcacgggcttccacttcacagacctccttatggccaagatgagcctcatgttttaacaaaacagttcttgggattgaatgactcacatttaccttgtgctaggttctaaagattgaatccacattttgttactaatgattttcccgctaacataaggatgatgagcagggcactatcatacacactggctgagaactggaactgtttttgggaaggtggcatttgtctcattccctgaaataccttaaaatgtcctctacaccaacccttccgtctaccctgctcacatgtacagtgacggggaactcaccaccttttgaagaggcagttcattttctttgcaaagctctctcctaacttcctccgtaaattccagccagcatggccacatgggtcacgcctggtgccttcacacgtttgaggggtcttcgtctctttttaaagcttagaggtacaagctcaggacagtcttcagtaaggaaatttgtggatttccctttggatctttcttcctctccagcccacaagtggctctagtgagacgagcatttaagctgcaggtggtggcactcgggtctcagagccaccagacgtgcaggtgggacagtggttccagctccgactgcctgtcagcgtccctcccaggtgctagccctggcaggcacagccctcccctcatgccagcaaaggaaatgctcttgatgagaggctcgctttaaagaagcccaaagcgtgtgcttatccaaggggttcagctattcctgacttcacggcttgcatgtttgatttttctaagagaaaagaggctgcctgctgggtgtctgtggaaatgagattaaaaactgtacaatctcagattttactaaaatgcaaaaatgtagtttcagtttcttaaattataagcacgagtcttctcaaaaaaaa

SEQ ID NO: 13967 - DNA, 2114 bp, Homo sapiens
cgcgggggcggggacgctgggcgcaggaggcgcggccgggagcgccgcgcgccgggagcggggcggcgggcgccggggctggcatggcgtggccctgtatcagccgcctgtgctgcctggcgcggcgctggaaccagctggaccgctccgacgtggcggtgccgctcactctgcacggctactcggacctcgacagcgaggagccgggcacgggcggcgccgcctcgcgcaggggccagcctcccgcgggcgcccgggattccggccgggacgtgccgctcactcagtaccagcgggacttcggcttgtggaccacgcccgccgggcccaaggatccgccgccggggcgcggaccgggggcgggcggccgcaggggcaaatcctccgcgcagtcctccgcgccacctgcgcccggcgcccgcggggtctacgtgctgcccatcggcgacgcggacgcggctgcagcagtgaccacgtcgtacagacaggaattccaggcttggactggagtgaagccctcaagatccacaaagacaaaaccagcccgagtcatcacaacccacacttcgggatgggacagcagccctggggccggcttccaggcctcagctccccggattctcaacgtgtgactgcctgcaccgtgacaccatggctgccgacaggacagggctggggagcggcctcaggacccactgccgcggggctgggcgagagcatggcatgggcccctgcgggagggcacagcccctctcaaagctgtcaccagggccaaagtgctggtgtggagcagatgcaccgatggacttggcacacccagctcagcctcaagcatcctcttgagaagcctgtggaaggctcctgcgttcgttaactgccatctggccgtctctcagttttgaaatctctgaggagcctgaggatcaagtcagttgggaaccgaattggtccatggaagctgaggaatgtggacacatccggcccttgaaagaaccagttatgtccacttttggtggatttcccaggatgcgtgagcacttgattaatttcataacctacagtgagacccttggctcttcctacaaatggcccctgcagttgaagctgttggaatcttgggccgtcacctgcatgactcatggtgatgctgagtatccaggaggaaatttccagaagaaacagaccgtcagtcacgggcttccacttcacagacctccttatggccaagatgagcctcatgttttaacaaaacagttcttgggattgaatgactcacatttaccttgtgctaggttctaaagattgaatccacattttgttactaatgattttcccgctaacataaggatgatgagcagggcactatcatacacactggctgagaactggaactgtttttgggaaggtggcatttgtctcattccctgaaataccttaaaatgtcctctacaccaacccttccgtctaccctgctcacatgtacagtgacggggaactcaccaccttttgaagaggcagttcattttctttgcaaagctctctcctaacttcctccgtaaattccagccagcatggccacatgggtcacgcctggtgccttcacacgtttgaggggtcttcgtctctttttaaagcttagaggtacaagctcaggacagtcttcagtaaggaaatttgtggatttccctttggatctttcttcctctccagcccacaagtggctctagtgagacgagcatttaagctgcaggtggtggcactcgggtctcagagccaccagacgtgcaggtgggacagtggttccagctccgactgcctgtcagcgtccctcccaggtgctagccctggcaggcacagccctcccctcatgccagcaaaggaaatgctcttgatgagaggctcgctttaaagaagcccaaagcgtgtgcttatccaaggggttcagctattcctgacttcacggcttgcatgtttgatttttctaagagaaaagaggctgcctgctgggtgtctgtggaaatgagattaaaaactgtacaatctcagattttactaaaatgcaaaaatgtagtttcagtttcttaaattataagcacgagtcttctcaaaaaaaa

SEQ ID NO: 13968 - DNA, 1456 bp, Homo sapiens
cgcgggggcggggacgctgggcgcaggaggcgcggccgggagcgccgcgcgccgggagcggggcggcgggcgccggggctggcatggcgtggccctgtatcagccgcctgtgctgcctggcgcggcgctggaaccagctggaccgctccgacgtggcggtgccgctcactctgcacggctactcggacctcgacagcgaggagccgggcacgggcggcgccgcctcgcgcaggggccagcctcccgcgggcgcccgggattccggccgggacgtgccgctcactcagtaccagcgggacttcggcttgtggaccacgcccgccgggcccaaggatccgccgccggggcgcggaccgggggcgggcggccgcaggggcaaatcctccgcgcagtcctccgcgccacctgcgcccggcgcccgcggggtctacgtgctgcccatcggcgacgcggacgcggctgcagcagtgaccacgtcgtacaggtatgggctgggtagggaccgcaacgagtccccaccctgtggtgggaggacgcggaggcccggagccagagggatggggtgggcggcagagcggaggcgcctggagcccggatcccacgcgacctcggagctgccggcggcctcagaggtcacccccgtttggtccgtgggcactgcaggcggcgccttcgctgctccatgcccggactcagtgctcgagcacccccgtgccgggagcgcaccgctgccctcgcagccgccctcctgggggcagccgtcagaatggcctgccttcagccgagttggaaccggcctccctttaactcccaccgccgggcctagccgtgcgaggggtgcgcgcaggccatgtcccccagctctctccggtcactgcctagtgtgcgggcgttggtggtgaggaccgagcgcagggtcccgtgtgggtgagcccttcagagtcccactgtgacaggggctttcagggagaacgggtccgcgggccctccccacctcccagcccagctctgctcctggacagccgagggctttctcccttttttcctcttaccacaaaagtaattcatactgtagaaaaatgggaaagtacagaaattacaacaaaatacgtatctccttgatccctccccagacgagttctttctactccgtaatgtgcatttggtgcatatgcactgatatatttttacgtggttagattcttactgtacacttttttcaccagttgtagaagtctgtccgtgttactacatgttctgcaacatgaattttaataaacgtgcagtattttatcctatggatatgcctttatatcttcaagttttatttatctacttccttaccattgactatttagggtgtttctaatgtgggactattaaaagcactacttttcctttgatgcagctatttcactactaggaattttccctacaggtatcctacaaggtaggg

SEQ ID NO: 13969 - DNA, 258 bp, Homo sapiens
tacaggccccatgttaagtccaaaatccaacaggacagtcaaatcttaaagctccgaaatgacctcctttgactccacgtctcacatccaggtcacattgatgcaagaggtgggctcccacggtcttgggcagctctgcccttgtggctttgcatggttcagccctgctcccagctgctttcatgggctggcagtgtctacaacttttcaggcagacagtgcaaggtgttagtagatctacagttctggggtctggaa

SEQ ID NO: 13970 - DNA, 674 bp, Homo sapiens
ctgtgttttagctattcaataaatacgcttttatatgagcaatttaaaactagatagtcttaaataatgagttatgaattatgagcactagagcagatcagagtgttagatttttgtgaggacattcactacccatatgcatgttttaaaagaaaattgattgtaatcccagcactttgagaggctgaggcgggtggattgcttgaggccaggagtttgagaccagcctggtcaacatggtgaaaccccgtttctactaaaaatacataataattagccaggcatggtggtgcgcacctgtaatcccagctactcgggaggctgaggcaccagtattgcttgaacccaggaggaggaggttgcagtgagctgagatcacaccactgcactccagcatgggtgacagagcaagactctgtctcaaaaaaaaaaaaaaaaaaaagcgatttattgcattaaaatgccagatttattccctatggattttttttttttctggctgcaatgtggtgtcctataacaagaaaccaaaaaacagaaaaaactccttatctgcagatctctttaagaaaaggcatgcaactagaagatttgtagttcatgtgcttctgatttttgagtataatcttttcatgtaactacaattttgatttttagtaagtcttttaatgagg

SEQ ID NO: 13971 - DNA, 455 bp, Homo sapiens
gttaattgatttccacatacttcagttacacattttctaacagcattagccagacagagataaattggatacattggaataaatatagatgcattttctgcaggctatttttctaatataatagcaatttaacagtttgaagtgtcattatcaaatgtgtagtttaactcatacattttacaaatgcacaaactaggccaaatccagtttcaaactaagatattttattccataaacaatgcaatatctatcaaaaagcaccattgcacaattgtttgcgtaaataaaactgtctttgaacttgatatgttttgaaagtggccatacatttttgtattctgatttgtttttctggcatatagaacctttgaatctttagaattaaatataatgaaaaaaagaaaagtgatgaaaggttgaggactgtatttttattatcaatttttattgcactg

SEQ ID NO: 13972 - DNA, 359 bp, Homo sapiens
cagactcgattcatataaagatagatttttcaaatctaattttgaaaactggacattattttttcttaagaatgagcaccttaaatgagggtaacaacttgaaagtaaactattacttataagactttcccacagaaaagttgtaaaataaagatattgtgtgcattgtatatttgtgtataagatatatatctgtataaattcacattttaagataatttctgatttgttttgaggtagggtctcactctgtcagcaaggctggagtacagtgccatgatcatggctcactgtagcctcaacctcttgggatgaagcaatcctcctacctcagcctccagagtagctgagactgcagg

SEQ ID NO: 13973 - DNA, 2727 bp, Homo sapiens
caggaaaggatgcagggagcattggactgtaggaaattctcctttatacaagttaattagttttgtctctggtggctgtctcttaaaacagaatcccctggagacccgggttttcattttgtaattcaacacccaaatatttgcaacactaaataacaactccctaaagacttcagtcttgcatgggcataagcaactcacactggttagcttttgtcagatttcgtcgtttccgcagcaaaatttcttagtgttgatgttgatagcttctgggttggcaaactggcagttcactctagtcttactgggttgggcaagtccttgcccctagaaaattggggatagctttggccatgggaggagcaagaacactacgcagtcgtaagctctgttttttgttttgttttgttttgttttgttttcggcaccattatgtacgatgaagacttacagccacagcataggggacactttgaggagccctagtatcattgtttgaaatcattgtacagggaactgcaggggtgaacaccattgtaccaatccccgggccagtgtctcatttcctaacagaatcatcccattcttgttcactcttcagtcatcccaagccaaaagggaaaattcgaaacccactgtgacaccccaaccctaatttccaacctttggaggactcacctggggcagaagggagaaagggctttgctgaagtctcaggctgccgagagccatgtatgggcataggagcaagctgatggcatggctcttgacaaggttttctatagggcagcagctgctgctcccaggggaaccctctcctgttgcctccgcagtctattctggggtggaaacaccattctctattatttctctcacatacatgtggatttctaatatcaagttatgtgactgcctaccacttaaggcctacaaaaccacatgggagtttctttattgcgtatgcagccagtcaacatgaatgggaccctagaaactgtgaggagcaggattctctaaggtgctcttagatacggtgtcacttccacatacaagcacaattctcccagttaaggggctggaagacaagcggggcaactggttttgaaaagcccgctggcgtgccagagggggtgtttgcccacaccctccttgaatttaactgccacaatctatccgcagatgtgttttgttctatttcttgtttttcactagcgtttgcgttgcttcctctgaagccagagggtgaaaggccctagcaaagttagttatcagtcaactgatgataactgtgatccttaaagatgaattcccagcctgaggtgacacacagaggttcagcagacgtctcaggatctgtcatatgtcatgttgcttggtgtgaagatggaagaacaaagtccacatcagtttctgctccttcaaacagtgtgtcgatatgaaacattgagatttggcagaaacatgtgcctagtttgcagcaccaaatactggtcttctcagaagtgtttctgtttttttgtttttgtttttgtttttgttttgttttgttttgtttaatttcctcttctggcatcccaatttggatcatttcctctctttctttcctggagaaacaggatggcaggtgctggagcccagagagggggttaccctccagctaaaatgatttaaatggaaaggagaatgacagcaaagcctcacgtgaactttaatgaccttatcaatgacctttactaactgactcttggtacccggattgttgagaggtgagtgggactaaaagccaggatcaagatcaggttgctccacacatttgcagatcaggaaccccgggaatatgagttagacccagaaagtattgaactggacattgaatgaagcttgaggccatgcattgataacatttttagagtctgttacattattttctcaaaaggaacacatgtttactacaaaccatttagaaaataccaataaccaaacagaagggaaatgtctggaaccttccagttgtttaattctgtagaaactgttcacgaaaggctgaatgagtggggacaagtcacagagatctcgccatggttagcaccagggacaagtctggctctaatgtatgttttatgaagtctgattagctttgaaatgcatctttgccagctgaacttgtcatgcactaaacttcccattgatcattagagtgtctacgattaagtggaaaaggtggtcaaccatttggatgtttgactttcacaacatcaagcattggccattgggcgtatctgggcattggtatggaataaacaggatactcagtgaaacatccaaactattgactggatttttcccatggggcatctgtctaagagtcacagatctgagaaatagaaggaccaggtccgtgtggatgctcctagtgcgttcaaataacccttgaattcacccaggtctcattgcatttatttaaagatggagcccattgtcccccctcctcctcagctcacccatggaactagaaattcacaaacctgaagctgaaccacaggacaagaaattaaacagcaacggccacatggcctcttttttcacaggttttgcattgaatgttttagaactttattcccccgccccctcacccatgtataccaaaactggttttattttcattttcctaaattattttctgatacaataaactgttaactgtttatttatacttttaaaaaaaaa

SEQ ID NO: 13974 - DNA, 358 bp, Homo sapiens
tttttgtttgctgttgtcgttgttgttttagattgaagatctgtttggtattttcctcctctctagaattgattggccaatagtttagtttagtttatgtcagttacagagagaaacaggggtgaagaagagagagagtcttccatacgggttacaaagaaagggactgatctgaaaattaattttcaaaacacattaatttagaaaaaaatacacactaagcggtaaaattcactagctacttcaacaactgaagtcagattaggtgcagttttttaaattcactgcagatttcttagtgattagatatagtgatgaaatcctcaaaagattttggaagtagggaaaacacagtgcc

SEQ ID NO: 13975 - DNA, 292 bp, Homo sapiens
tctgtataataaagtaattgataagatgatatgcagttctggatttatgccagatacatgttttataagaaattttacatgggtaattacttaaaatataagattctggtgtattgaaatacgtatttgagtagcctgccattttaaagttataatgcaagttaacttctaaattttaataaaattttgagttttgtgaataccgttttcttcagcaaagctcaagtattaggctattcgtgtaaaactattatatctttgggcacatgtttcttaatatgattttaaaagg

SEQ ID NO: 13976 - DNA, 262 bp, Homo sapiens
catgatggaacatacacagggtgcggcagtcactagtgacactttgtagaagctcacttacagaatgagtttctttgtggctcttgtcaacccaaataaagatttgcgtcaaaaactgtcccttcttggtatctatgttaagagtaaagcttagcatatctaatgctaccctttcgctctaagtttaatgaaataaccatttaggtgaggggagtggccttagaaatttgggctaaatcaatggttccttggcagatcgctg

SEQ ID NO: 13977 - DNA, 360 bp, Homo sapiens
gccgccgcagccgccagcctcttcctgctcatgcttttcctcatcttcatctcggtctgagtgggctctggacctctccaccagcctctgccccagaactgttaactgcgggggggaaaaaaggaatttgtcgtcgcaacgcgcgttccgatggagccgcacgccacaaaggaagactcatgctgcaccccgcggggcagatgcggcgacactggacatcgctgcacagctgggtctgcccgtttccagagctgcttagcgccgacgcccataaatgaggaggactccctgtgtattaaaagggggatccgcagggtttaatttgataaggattatagccttcataaaggcatttttaac

SEQ ID NO: 13978 - DNA, 684 bp, Homo sapiens
ctcgggaggctgaggcaggggaatcgcttgaacccgggaggcggaggttgcagagagcctagatcgcgccattggactccaggctgggtaacaagagcggaacctccgtctgaaaaaaaaaaaaaaaaaaaaaaattgggagaattttgctcccactgccgtcaaaatcccacgtgtatttcacacttacagcacagctccattagaactgaccacatttccagggctccctagatacctgtggctagcggctgccatactacaccgtgctgggctgtagaatggggatgacaagacagggcggcggagattgtgttggcgtgaagcgagggaaacactcggccgcaggacaaaactaaaacagcaagggggcaccgaaagactcagtagtccacgtgaatatcctgattatgttgtagctgagataatgtagggtccacccctaccgggtctgtgggttttctcttcgcgtgtgtgcggagacgagagatcgaagagataaagacagaagacaaagagataggaagaaagacagctgggcccgggggaccactgccaccaaagcgcggagacagacaggtagtggccccgagtgcctggaggcgctgctatttattgtagtcaaggcaagggggcagggtaaggagtgccagtcatctccaatgatcgataggtcacgcgagt

SEQ ID NO: 13979 - DNA, 645 bp, Homo sapiens
tttcctagggaatgcagtcggatttttggtgaagatggtctgacgctgaaactctttcttaaaagaactgctcccttttctattctatggacttcgactaattacctttatttactggctttaaagaagctgacggccacggatgtctccgctctgttctgttgtaacaaagcctttgtcttcttgctgtcatggattgtgctgaaagacaggttcatgggagtgaggatagttgctgcaataatggcaattaccggcattgtcatgatggcatatgcagataatttccacgctgattccatcataggagtggcatttgcggtgggctcagcctctacatctgcattatataaggtcttgtttaaaatgtttcttggaagtgccaactttggggaagctgcacactttgtctccaccttgggtttcttcaatttgatcttcatctccttcaccccagtcatcttgtatttcaccaaggtgggagcactggtcctcttttgctgctctgccatggggctgtctctgtggggatgggcagggctgtggctggccttcaacatcctggggtgaatgttgggggtggtgctgacatacccaatcctaatctccattggggacagtggctcagcgttcctggaaatgcag

SEQ ID NO: 13980 - DNA, 823 bp, Homo sapiens
tttcctagggaatgcagtcggatttttggtgaagatggtctgacgctgaaactctttcttaaaagaactgctcccttttctattctatggacttcgactaattacctttatttactggctttaaagaagctgacggccacggatgtctccgctctgttctgttgtaacaaagcctttgtcttcttgctgtcatggattgtgctgaaagacaggttcatgggagtgagggtaatggcatacttgattcaatgcgcgatgcctgcctttttcataactccttggcttcaggagagcctgtctgctttgtttcgtggagttgctgtaaaacttttctcacttgttctgagtacaaaccgaaatctgaagacgcattagaaagcccaggcagttgcaacatcatagaaggataaacagtttgtttccactggttagtgagctcattccaacaggaggcactaaaacaggcagagaaaacaagttcctatattagaattaatttttagaactaatggtgtgttcacctccttctgtcctcaggaacgaagggtctgagaaaattagccactataaagattatggtttgcatttttcaatcaacatatgttgagatgaccccccattccccccaccagatggacttaattaatattggtgtaagtagataagattaccaaacagtaattaaagtcactggtaatggcacaatgctgttaaaagtgactatatatctagtgtgactaatgcagaaatggaagtacaagcaacaacttcttttggatacaaatccttaattgaactgcattaaacttccaccaacaacttc

SEQ ID NO: 13981 - DNA, 746 bp, Homo sapiens
tttcctagggaatgcagtcggatttttggtgaagatggtctgacgctgaaactctttcttaaaagaactgctcccttttctattctatggacttcgactaattacctttatttactggctttaaagaagctgacggccacggatgtctccgctctgttctgttgtaacaaagcctttgtcttcttgctgtcatggattgtgctgaaagacaggttcatgggagtgaggattgctgggaagccctgaagatttaaggagccagatctcattcatataatccggcatgccactatgatgaacatattgagacaacacttctttagaaggagatagttgctgcaataatggcaattaccggcattgtcatgatggcatatgcagataatttccacgctgattccatcataggagtggcatttgcggtgggctcagcctctacatctgcattatataaggtcttgtttaaaatgtttcttggaagtgccaactttggggaagctgcacactttgtctccaccttgggtttcttcaatttgatcttcatctccttcaccccagtcatcttgtatttcaccaaggtgggagcactggtcctcttttgctgctctgccatggggctgtctctgtggggatgggcagggctgtggctggccttcaacatcctggggtgaatgttgggggtggtgctgacatacccaatcctaatctccattggggacagtggctcagcgttcctggaaatgcag

SEQ ID NO: 13982 - DNA, 194 bp, Homo sapiens
tccgaaagggacaaatggaacaaaaagagaagacttgctcagacattcagagtgggggacattgatggcattatgagtctcaccagaaacttttatgttcttcatatcctgtgacctctttatggaagaattaaactacaaaagaaccagggctgtaaacacagcatttttgaatcccctatgccgggacagcc

SEQ ID NO: 13983 - DNA, 492 bp, Homo sapiens
gagtgaagatgtgtgctgaagcctggaggtgagagttacggagggtggagggggagagagaagcctgagccattagcaggggcagagtctaaagggctctgcaaaccacttgaaagtccttggccttcatcctgaaggcagtgctgaggggcttgcgcagagagttgggctggttttgagtttactgtgtgccagtcctatgccaggctcttggcatgtcttacatcagagttacccacacggtaagtctgtgaaggaggtgtgatgctcatcttacagagaaggcaaccaaggcctagagaggttagagaacttgtctaaggtcacatggccagtaggtgacaacctgggcttggaacccaagtctgactctgaagcttgggctctgaaggtgtgcaccacactgccagactcatcagggcgtgtggctggtcagtgcaatgccaggacagcgaagacactagtctgcctgcaccagagggctagcctcag

SEQ ID NO: 13984 - DNA, 275 bp, Homo sapiens
  misc_feature (13)..(13): n is a, c, g, or t
  misc_feature (55)..(55): n is a, c, g, or t
  misc_feature (63)..(63): n is a, c, g, or t
gcctcgagccagngtgcctctgcccgggctgaccccgccctcggtcccggtcctngctccctntcctgcctctcctccctggcctggccttcacttcctgctgaccctcaggagggcgtaaaagaatgcaggacctgctgcattccagccaccctggcccagggtcccagaacaggatgagacaggcccctgaggcggcagtcctgaggaaagttgctggaattcctgctgacaacgcccccccttgaccccacccctctgaccaagccaggctc

SEQ ID NO: 13985 - DNA, 418 bp, Homo sapiens
gaacacaggagaaacattttaatgtttactaatatagtggcttatagttaaaaataaatgataaagaaaaggcatattaacttatcaaataatgattaagtgtgtactatgtgtctgccactgtgctgggccctggggggctaatcataagcaagaaagatacagtccttaccctcatggcaaaacctaatggggaagaggaaaaatactgaccaagcaataacaatggagtgagatgtgccaaaatggtgacagagagggacttttatgagtaatgtttgatctggtttctattctattaacaacagctccagtattatcttatttgctcagactctaaagtgtgttcatttttttttcactactccctgttacccttcaataagtgaactaattgaagggtaacagggagtagtga

SEQ ID NO: 13986 - DNA, 459 bp, Homo sapiens
gaggaaaccgcataggcaattggtgtctttatatgatagcgctagatcgcatgaaatcttacccttgaactcctaagttctaataaacaataatgtgatcgtgcaagttattcatcctctcttcacatcagtttccttgtccataaaatggagaaagttgtgtttatgcttgggaatggatagaacaagacaatgcaaggaaatgagcattgtaaactatttaacatgaagcgaactacattttagtagtatggcacaaaagcctaagaagttctgatcctatttccttctgtcatcatcatgctgtggtcccattaagcagtatcagttgccaacactgtgattgtgtgtgaagccaaggcagagacagaacaactggagctagtgatttatcttcaccaacttcgcccagcaacatcctgcctttcgtagaggacttcataaagcttttccattggc

SEQ ID NO: 13987 - DNA, 130 bp, Homo sapiens
ttttatttttaatctgtcttgattttgcttccttcctaaacagttttggcttcgtgatcacgtaaaccaagagtcacaaactgaaatgccatcaaggggccaagcaggtaacaaaattcaagtcatacag

SEQ ID NO: 13988 - DNA, 203 bp, Homo sapiens
ggttaatttttattgctgcatagtattcaagttaatgtatcttgttagtggatatttttgttgcttcccatttttttcttttacacagtgccactgtaaacacttttgtcatatatccttgtgcacacatctgagtttctcaaggatgattaataagagtggaatttctgggtcattgggaatgtgcatcttctttattaaat

SEQ ID NO: 13989 - DNA, 202 bp, Homo sapiens
gatgttttctggttttgtttttgttaatagagtatctttattaatacagtatctaatgcatcacatttacttgtcagatctctttatcatcctgtaatctagaaaagtttctccatctattttggagtggtgtttggtaaaattaacatttttagagaattcatacccactgttttattatttaaaataagaaatatttaaa

SEQ ID NO: 13990 - DNA, 802 bp, Homo sapiens
gtaaaggctttctaaggactgatctcagaggccaaagggcttttgaactggaaagtggtgccaaagtcagtgcctgctgtacgttgcctctgcatgtctctgagtccttttgagaggccagcggggagcgggtctcccattcaacaggagatgccctggtgaccatggatctgtgtgtatcctgcctgtttcccggagtgtcaggtctgccagctgatggccctggcaattttcccagggcaggtggtcctgacctggctgagcccacgcagatcaccagggacatggcttgactgcccctcccagcatgcttccgggggccagaagagctctaagaacggaccacaagagatcgggaccctcccttctctctgggatctagtcaactctaagaaagtacaaaccaagctgtttctgtctcgcagtccttagagaaagccacaggcttctgctttctcagaggaatcagggagcccaggccataaagacagcaagcaattctgaggcgctcactctgtgcaggcaatgccctgagcacttcccatgcataaactccctgcatcctcacagccgccctactgggcacccacattcttgtcgctatttaaacaagggcaaactgtgacacaaagggattaagtcactgtcctggggtcctgtgattaacaaatggcaacactaggatgtgaacacaggcatgtagctcccaagatccagcaagtgttcgcaggagatgcatccaccagtggaatgttctggaaggcactggtcccagactctgcgggagtcaagaggcccactt

SEQ ID NO: 13991 - DNA, 451 bp, Homo sapiens
gcttcaataccctgtattatctgggaacaacaacccctttccctgtactggcatcaacaagataaggtttccatggagctgccataatttttctataacgctgcccctaggccagaattggttggtctacaggtagatacctgatccaaactatgacaaccacaatattccagcccttgacaatgattgactcttccaggacgggcacttaactcaagctaggccaatcatagtcatttctcaactagatcctgccccactggtcatagctaattggtgcaggactggaactggatgcaagctgactctctggattgagaactagaggtcagaccattccctgtcccatgtctgaaactgaaatatgcagcactggaaaactgctcatgctcatggccatgggatcagccttccccttagcctcagaaggccttggagtggaagcaacagg

SEQ ID NO: 13992 - DNA, 607 bp, Homo sapiens
cccacacctccacgcaggcctggaaggcaggagagagcaagctttcttctcctttatttgtgaattatcagcacctagaaacttaagcgggcaaatgctgaattgctggagactgtgaagctgtgatacacacagagttgctccttcccttcctggctggggtgctggcctggggagcctcctgcccgggtcactccactgcgcatgctctgtggctaccgtgagactgacctgcctcagacacccttctccttgagcctcaagggcctcatggcctggacctccgtgatcagccagaggagcccagagtccatggtgctgtggcctcctgcccactctgggaccccagggagagggcctgtcctcgctgagcctccgacaccggttctgagcctcttggacaacattttctctccagtttacaagtaggagccccttgcataaataagatggggaaaatccctgcagatgacatggccggggccctgggccccgggagccatttctgttccttgtcactcagcctggccagtccttgagtttttccccagagtgtcctcaataaggaatagcaagcctgggtattttcttctggtcagtattccgt

SEQ ID NO: 13993 - DNA, 282 bp, Homo sapiens
gattttaggagttgtatgccaagaaaaggtgggtggggtggaagaccaaatatatattttacaatatcacatacacaaaagaaatacatatggccaaggaagagactgaaatgtattcatggcctgacgcagcagctcacctgtagtcccagttactccggaggctgaggtgggaggattgcttgagcacaggaattcaaggttacggtgaactatgatcacaccagtccactctagccttggtgacagagcaagaccctatctctttaaacaaaaaagaaa

SEQ ID NO: 13994 - DNA, 414 bp, Homo sapiens
gcaagttacctggggagaaattacacaaggctgtgaacaccaggaggcggggacactggggggcttcttagaagctgccaatcagagtagatatagacaaacggattttaaaatttttatggaaaggcaaagttactataatatctaaaataaatctgaaggaaagtaaaaaggtgaagcaaatatactacccattttttagacatatgaaaaaacgacggtaatcggggcaatgtcatttagcctcaaaaacagatgaatagatcaatgcaatagaatagagagtccagaaatggacccatacaaatatggccaattgatttttgacagaggtgcaaaaatagttcaatggagaaaacatcctttttaacaaatggtattgaaactattggacatccatatgcaaaaaaataa

SEQ ID NO: 13995 - DNA, 1189 bp, Homo sapiens
ctggagtgcagtggtgcaatctcagctcattgcagccttaacctcccagctcaagcagtcctctgacctcagcctcccaagaacctaccaccatgtgcatcaccacgcctggctaatatttgtactttttgtagatatagggttttaccacgttgcccaggctggaggcataatttttaaactgcagatgattttaattcagaattgtgaagaccctcttccatagacttggagattccaacttgctacggaacagtctcttatcatttggataccttttcctttacatgggattgtgtttagtattggaaagcttttaggattttaagaaaatgtgattcctaattgatgttttctttaaaaagttatctctcttaattcattttctaatgcttatatggctacccagttatcctagcactttttatagaaaaatttgtatttttcagactcagtgcaaggtaatttctaagttgttttcttccccattgtttgtctgtctttgcgtcagtggcattcttcttattgctttgctaaaagtcttgatatccagtagagtgagtccttccaccttggacattcttagccctttccatttgtttccatttgttacaaattttagaatcagcttttctaagaatcagcaattttccagagaaaaatctgtttggattttgattgggattgcaatgaacttatgatctgtttggacgaatttgcatctttacaatgttaagtcttccagtccagtatctactccattgaggtctgctttaatatctttcaaagttttatagttctctccagaaagataataaacacttttgttagacttattcctaagtacatgatagttcttggtgcttttataaatggtagcttttaaatttcattttctggccgggcacaatggcttgcccctgtaatcgcagcactttggggggctgaggtgggcggatcacttgagattaggagttcaagagtagcctggccaacatggcgaaaccctgtctactaaaaatacaacaattagccatatgtggtggcacgtgcctgtaatcccagctactcaggaggctgaggcatgagaatatcttgaacctgggaggcagaggttgcaatgagccgagattataccactgcactccagcccgagtgatggagtgagactctgtcctcaaaaaaaaaa

SEQ ID NO: 13996 - DNA, 292 bp, Homo sapiens
actatgacctcaacaggacactgttctatggggaggccaaccagccacttggttgcaagttgagcatttaggatcattccaaaaaggggagcagttggttttgagtaaggctcatgtaaaatttgcttttcttgctaacaatggctaggaccacactactagttaaggatagtattgttcacagatatattgacatgggaccctgtattatatactcacaggcaaagaaacctgttttatggtgaaagaggtgtgttaatggacacaagacgattgcatactaaaccccata

SEQ ID NO: 13997 - DNA, 4476 bp, Homo sapiens
  misc_feature (2558)..(2558): n is a, c, g, or t
  misc_feature (2696)..(2696): n is a, c, g, or t
  misc_feature (3176)..(3176): n is a, c, g, or t
  misc_feature (3720)..(3720): n is a, c, g, or t
tgcgagttttgcctctctcactggcagcaacccagcgcttccattgctgacctctaccgacctctacctgtggtccttcctctactgcagcagagacactgttttcttcctttgttcttccaaccccatggcacagaaacactctccactgcggccaaggattgcaggagaggtggcatcagtgattcaagacttcttttcctacctcttcagtgtttctttcagtgatctgaagttaaagccagggggaatatcacagaagtgaagtgcaattctcatcatgtcatatcaagagcacacactaacaaacaacatgacttattgctgaatattgaacttgatcacctggctgaggtagtgtttgccagatttctctgtaaaggtgaataaactgacactggaacattcaggaacttcttcatggtcatggtcacccagctagagtgtggaagccaggctgtctgattccaggatctgtgttcttaatcctatacataaggaagccataatgagtcaaccactatttttaagattcacagatgttcgggtccaattcaccagaatgccaagttatacagggttgtggaatcaaaaactgcaattagtaataaaatgtgatgctatctagaatgtttttcatacatatatatgcttcttgggactctccctgcaggttaagagaaattgagaaacgatggagaatttaagtgttttagatcctacatacattagacttaaaaatagtaactatgtacatgagtatttgtaaacttaagaatgaacataacatgaaccatgtggcacctataaaatgaaaataaaatacctacaaaccaaatgagagcaataaaagaagctttaaggactttcacttcagggagtctgaattagatgcgcttcttcccattcctccctctaattacaacaagcttggacgttacatacagaacaaacagaaggagtctctgaaagatgaagagaaggcaagtaagctacagacttcacaatgtaaggaataatatggtggtgagttacatttgtgatttttttttgtctcatatcccataatatctcatatctcataatcagttagaaagcacaatggaaaagtattccactgccaatggtgttagagaactgctcacaaattcaacagaaatgcacagataccaaagcagaaaggacaataaacaagagtcttcatggtcaaaagattagaagctgcagctttcaatgggagggacaggttctggaccacactgcagtgcttttctgctttctgtgctttcccactctagagctgaagaaggtaacgaccccaaaatgtcaatatacgtagaccaaaaaccagccccaataaaagtctgctctctctagccaaaggactacagtagggcagcccagcaagacagaaaaccttcagacaacctaccccagccaaacactaccaaaaaaagtaaagtgagccatcacccaatccacatcagtaaaaactaagtggaaagtccagactttcacctcaagaggttgcgacaagctactccaatacccctgctgggatagtgtcacagaaggctaaataaggagctgtaatgttgattcccctccagaagtaaagagtccgtacctgctattttcagagagaccacatggaaagcctagatttcaacacctacccagcattaatgaggtattccttcccttctttactctctggtgtcaaagaagctccatgcagagtcagaatgtttggcattactcctcagtagggaggccacccccaccacggtgttagtggagaccatgtgaggaccaggacttgtaccctgcccagaagtaatgagtagacccccctctacaggaaggccaaagggcaacctaaacttctacctctctctggcagtaataaagtagggcctcacttttccctgctgagcaatgtcaaaaaaaaaagccagctgaagtaaaagcttatttctttctttctttatacatatttttggagacagggtcttattctgtcacccacgctggagtacagtggcctcatcaggtctcactgcagcctcaacctcctgggctcaagcaatcctcccacctcagcctcttgagtagctgagaccacagatgtgcaccaccacacatagctaacattaacattttttctagagatggggtcttcctgtgttgcccaggctggtctggaactcctgggctcaagtgatcctcccaccttgacctcctggagggctgggattacaggtatgagtcatcactccaggctgaagctttatataataaccagagtctcatattacaaaatgtcaaagattcagtcaaaagttacttgatatcaatggacaactcaaactaaatgaaaaaaagacaattaatagatgctaacactgagataacaaagttgttagaatcatctaacaaagattttaaagcagctataataaaagtgctactgcaagtgattataaacatgcttgagacaaatgaaaaagtgctataaagctaagaaataaaatatataaataagaatcaaagagaanttatagaactaaaagataccataactgaaatgcaaagctccgtggatggactcaacaacagaatggaaaagactgaggaaagaagtagtttacaggaaattagaatagactagaaaaaatgaacaagaccctgtgctnaagagcaaatatttatgtcattggattccaggaaagagaaaagaatgaaaaagtacttaaataatggcttaaaaacttctcacattttgcaaagatttaaacctacaatttgagaagctgggtaaaccttaaacaggataaatcaaggacactcacaccaagaaacatagtaattaaacttctgattaaggaagaaaaagaaaaatctggaaagcagcaagaaaaaaatgacacactttctatatggtaaaagcaatttgaacaacagaagatttctcatcagaaactgtggggaccatgaggaagtaacagatatttttcaagtgctgaaataaatcaactgtcaatacaaaatgctctactcagtgaaaatatctttcaggaataaaggggaaatcaggacacgcacagactttttttaaattaagaatttattgtcagcttatctccctaaaagaatggctaacattctccaaacangaaggaaattgataaggaatcttgaaatttcagttagaaacaatgaatatggcaagcaaaatgtaggtcagtacactaagtttaatttctcctcttgaattttctaaattatgacttatgattgaagcaaaaatcataacattatctgatgtatatgtagaggaaagatttaagacagtgatgttataaatgaggggagtaaaggaacatgagataaccactaatatgacataccaatagactatgataaattatgtgtctaatgtgattactagaaaaaccagttaaaatataaagattgacggagtgaatttaaaaacatgacacactatatgctgtttatcataaactcactttgaagataatgccatcgtcaggttgaaatcaaaaggaataaaatagtgtattatgtaaaccatcaaaaagagcaggaatggccatattaataacattaaagtcagcttcagaactaaggaaattatcagagagggacattatataatgaaatagtcgatttaccaaaagaacatagcaatcataaatntgcatgaagcaaacaacaaagctggaaaatatatgaagtgaaactgatagatctaaaaggagaaacagataaatccattcattatagttggggcctttatcacccctcactcaacaattgatagaactggacagaaaaccagtaagaatataaaagaactcaacaacatgagacaataggatctagttgatatttatagaacattccaacagcagaatacatgttcttcaagtgctcacagaacacacatataaagatagaccctgagcataaaacaagcctcaacaaatttaaaagaactgaaatactacaagtactttctccaaccacaaaagaaccaaactagaaataaataacaatgataatgggaaaatcaccaaacacttgaaaactgaacaacaatattttataacccatggtcatagaggaaatctcaaaagaaattttaaaaatgcactgaactgaatgaaaatgaaaacaacataaaatttgtgagacacataaagcagaactgatgggaaaatatatagcactaaatgcatgctctagaaaagaaaagtcttcaaccagtaacctaagcttccacctcaaaaacctaaaaaaagaaggaaaaatagacccaatgccagcagaaagatgcaataacaaagagtagaactcaatgaaattgaaaacagataaacactttaaagaataaaacaaagagctggttattagaaaagatcaattaattgataaacctcaagcaagaccgtc

SEQ ID NO: 13998 - DNA, 4448 bp, Homo sapiens
  misc_feature (2530)..(2530): n is a, c, g, or t
  misc_feature (2668)..(2668): n is a, c, g, or t
  misc_feature (3148)..(3148): n is a, c, g, or t
  misc_feature (3692)..(3692): n is a, c, g, or t
tgcgagttttgcctctctcactggcagcaacccagcgcttccattgctgacctctaccgacctctacctgtggtccttcctctactgcagcagagacactgttttcttcctttgttcttccaaccccatggcacagaaacactctccactgcggccaaggattgcaggagaggtggcatcagtgattcaagacttcttttcctacctcttcagtgtttctttcagtgatctgaagttaaagccagggggaatatcacagaagtgaagtgcaattctcatcatgtcatatcaagagcacacactaacaaacaacatgacttattgctgaatattgaacttgatcacctggctgaggtgaataaactgacactggaacattcaggaacttcttcatggtcatggtcacccagctagagtgtggaagccaggctgtctgattccaggatctgtgttcttaatcctatacataaggaagccataatgagtcaaccactatttttaagattcacagatgttcgggtccaattcaccagaatgccaagttatacagggttgtggaatcaaaaactgcaattagtaataaaatgtgatgctatctagaatgtttttcatacatatatatgcttcttgggactctccctgcaggttaagagaaattgagaaacgatggagaatttaagtgttttagatcctacatacattagacttaaaaatagtaactatgtacatgagtatttgtaaacttaagaatgaacataacatgaaccatgtggcacctataaaatgaaaataaaatacctacaaaccaaatgagagcaataaaagaagctttaaggactttcacttcagggagtctgaattagatgcgcttcttcccattcctccctctaattacaacaagcttggacgttacatacagaacaaacagaaggagtctctgaaagatgaagagaaggcaagtaagctacagacttcacaatgtaaggaataatatggtggtgagttacatttgtgatttttttttgtctcatatcccataatatctcatatctcataatcagttagaaagcacaatggaaaagtattccactgccaatggtgttagagaactgctcacaaattcaacagaaatgcacagataccaaagcagaaaggacaataaacaagagtcttcatggtcaaaagattagaagctgcagctttcaatgggagggacaggttctggaccacactgcagtgcttttctgctttctgtgctttcccactctagagctgaagaaggtaacgaccccaaaatgtcaatatacgtagaccaaaaaccagccccaataaaagtctgctctctctagccaaaggactacagtagggcagcccagcaagacagaaaaccttcagacaacctaccccagccaaacactaccaaaaaaagtaaagtgagccatcacccaatccacatcagtaaaaactaagtggaaagtccagactttcacctcaagaggttgcgacaagctactccaatacccctgctgggatagtgtcacagaaggctaaataaggagctgtaatgttgattcccctccagaagtaaagagtccgtacctgctattttcagagagaccacatggaaagcctagatttcaacacctacccagcattaatgaggtattccttcccttctttactctctggtgtcaaagaagctccatgcagagtcagaatgtttggcattactcctcagtagggaggccacccccaccacggtgttagtggagaccatgtgaggaccaggacttgtaccctgcccagaagtaatgagtagacccccctctacaggaaggccaaagggcaacctaaacttctacctctctctggcagtaataaagtagggcctcacttttccctgctgagcaatgtcaaaaaaaaaagccagctgaagtaaaagcttatttctttctttctttatacatatttttggagacagggtcttattctgtcacccacgctggagtacagtggcctcatcaggtctcactgcagcctcaacctcctgggctcaagcaatcctcccacctcagcctcttgagtagctgagaccacagatgtgcaccaccacacatagctaacattaacattttttctagagatggggtcttcctgtgttgcccaggctggtctggaactcctgggctcaagtgatcctcccaccttgacctcctggagggctgggattacaggtatgagtcatcactccaggctgaagctttatataataaccagagtctcatattacaaaatgtcaaagattcagtcaaaagttacttgatatcaatggacaactcaaactaaatgaaaaaaagacaattaatagatgctaacactgagataacaaagttgttagaatcatctaacaaagattttaaagcagctataataaaagtgctactgcaagtgattataaacatgcttgagacaaatgaaaaagtgctataaagctaagaaataaaatatataaataagaatcaaagagaanttatagaactaaaagataccataactgaaatgcaaagctccgtggatggactcaacaacagaatggaaaagactgaggaaagaagtagtttacaggaaattagaatagactagaaaaaatgaacaagaccctgtgctnaagagcaaatatttatgtcattggattccaggaaagagaaaagaatgaaaaagtacttaaataatggcttaaaaacttctcacattttgcaaagatttaaacctacaatttgagaagctgggtaaaccttaaacaggataaatcaaggacactcacaccaagaaacatagtaattaaacttctgattaaggaagaaaaagaaaaatctggaaagcagcaagaaaaaaatgacacactttctatatggtaaaagcaatttgaacaacagaagatttctcatcagaaactgtggggaccatgaggaagtaacagatatttttcaagtgctgaaataaatcaactgtcaatacaaaatgctctactcagtgaaaatatctttcaggaataaaggggaaatcaggacacgcacagactttttttaaattaagaatttattgtcagcttatctccctaaaagaatggctaacattctccaaacangaaggaaattgataaggaatcttgaaatttcagttagaaacaatgaatatggcaagcaaaatgtaggtcagtacactaagtttaatttctcctcttgaattttctaaattatgacttatgattgaagcaaaaatcataacattatctgatgtatatgtagaggaaagatttaagacagtgatgttataaatgaggggagtaaaggaacatgagataaccactaatatgacataccaatagactatgataaattatgtgtctaatgtgattactagaaaaaccagttaaaatataaagattgacggagtgaatttaaaaacatgacacactatatgctgtttatcataaactcactttgaagataatgccatcgtcaggttgaaatcaaaaggaataaaatagtgtattatgtaaaccatcaaaaagagcaggaatggccatattaataacattaaagtcagcttcagaactaaggaaattatcagagagggacattatataatgaaatagtcgatttaccaaaagaacatagcaatcataaatntgcatgaagcaaacaacaaagctggaaaatatatgaagtgaaactgatagatctaaaaggagaaacagataaatccattcattatagttggggcctttatcacccctcactcaacaattgatagaactggacagaaaaccagtaagaatataaaagaactcaacaacatgagacaataggatctagttgatatttatagaacattccaacagcagaatacatgttcttcaagtgctcacagaacacacatataaagatagaccctgagcataaaacaagcctcaacaaatttaaaagaactgaaatactacaagtactttctccaaccacaaaagaaccaaactagaaataaataacaatgataatgggaaaatcaccaaacacttgaaaactgaacaacaatattttataacccatggtcatagaggaaatctcaaaagaaattttaaaaatgcactgaactgaatgaaaatgaaaacaacataaaatttgtgagacacataaagcagaactgatgggaaaatatatagcactaaatgcatgctctagaaaagaaaagtcttcaaccagtaacctaagcttccacctcaaaaacctaaaaaaagaaggaaaaatagacccaatgccagcagaaagatgcaataacaaagagtagaactcaatgaaattgaaaacagataaacactttaaagaataaaacaaagagctggttattagaaaagatcaattaattgataaacctcaagcaagaccgtc

SEQ ID NO: 13999 - DNA, 595 bp, Homo sapiens
tgcgagttttgcctctctcactggcagcaacccagcgcttccattgctgacctctaccgacctctacctgtggtccttcctctactgcagcagagacactgttttcttcctttgttcttccaaccccatggggaatatcacagaagtgaagtgcaattctcatcatgtcatatcaagagcacacactaacaaacaacatgacttattgctgaatattgaacttgatcacctggctgaggtagtgtttgccagatttctctgtaaaggtgaataaactgacactggaacattcaggaacttcttcatggtcatggtcacccagctagagtgtggaagccaggctgtctgattccaggatctgtgttcttaatcctatacataaggaagccataatgagtcaaccactatttttaagattcacagatgttcgggtccaattcaccagaatgccaagttatacagggttgtggaatcaaaaactgcaattagtaataaaatgtgatgctatcttacaaaaaacaaaacacaacacacaccacacaaacaacccccttttgcggcccccctcgcgccccgcgggaacctctcatagaac

SEQ ID NO: 14000 - DNA, 4408 bp, Homo sapiens
  misc_feature (2490)..(2490): n is a, c, g, or t
  misc_feature (2628)..(2628): n is a, c, g, or t
  misc_feature (3108)..(3108): n is a, c, g, or t
  misc_feature (3652)..(3652): n is a, c, g, or t
tgcgagttttgcctctctcactggcagcaacccagcgcttccattgctgacctctaccgacctctacctgtggtccttcctctactgcagcagagacactgttttcttcctttgttcttccaaccccatggcacagaaacactctccactgcggccaaggattgcaggagaggtggcatcagtgattcaagacttcttttcctacctcttcagtgtttctttcagtgatctgaagttaaagccagggggaatatcacagaagtgaagtgcaattctcatcatgtcatatcaagagcacacactaacaaacaacatgacttattgctgaatattgaacttgatcacctggctgaggtagtgtttgccagatttctctgtaaaggtgaataaactgacactggaacattcaggaacttcttcatggtcatggtcacccagctagagtgtggaagccaggctgtctgattccagatgttcgggtccaattcaccagaatgccaagttatacagggttgtggaatcaaaaactgcaattagtaataaaatgtgatgctatctagaatgtttttcatacatatatatgcttcttgggactctccctgcaggttaagagaaattgagaaacgatggagaatttaagtgttttagatcctacatacattagacttaaaaatagtaactatgtacatgagtatttgtaaacttaagaatgaacataacatgaaccatgtggcacctataaaatgaaaataaaatacctacaaaccaaatgagagcaataaaagaagctttaaggactttcacttcagggagtctgaattagatgcgcttcttcccattcctccctctaattacaacaagcttggacgttacatacagaacaaacagaaggagtctctgaaagatgaagagaaggcaagtaagctacagacttcacaatgtaaggaataatatggtggtgagttacatttgtgatttttttttgtctcatatcccataatatctcatatctcataatcagttagaaagcacaatggaaaagtattccactgccaatggtgttagagaactgctcacaaattcaacagaaatgcacagataccaaagcagaaaggacaataaacaagagtcttcatggtcaaaagattagaagctgcagctttcaatgggagggacaggttctggaccacactgcagtgcttttctgctttctgtgctttcccactctagagctgaagaaggtaacgaccccaaaatgtcaatatacgtagaccaaaaaccagccccaataaaagtctgctctctctagccaaaggactacagtagggcagcccagcaagacagaaaaccttcagacaacctaccccagccaaacactaccaaaaaaagtaaagtgagccatcacccaatccacatcagtaaaaactaagtggaaagtccagactttcacctcaagaggttgcgacaagctactccaatacccctgctgggatagtgtcacagaaggctaaataaggagctgtaatgttgattcccctccagaagtaaagagtccgtacctgctattttcagagagaccacatggaaagcctagatttcaacacctacccagcattaatgaggtattccttcccttctttactctctggtgtcaaagaagctccatgcagagtcagaatgtttggcattactcctcagtagggaggccacccccaccacggtgttagtggagaccatgtgaggaccaggacttgtaccctgcccagaagtaatgagtagacccccctctacaggaaggccaaagggcaacctaaacttctacctctctctggcagtaataaagtagggcctcacttttccctgctgagcaatgtcaaaaaaaaaagccagctgaagtaaaagcttatttctttctttctttatacatatttttggagacagggtcttattctgtcacccacgctggagtacagtggcctcatcaggtctcactgcagcctcaacctcctgggctcaagcaatcctcccacctcagcctcttgagtagctgagaccacagatgtgcaccaccacacatagctaacattaacattttttctagagatggggtcttcctgtgttgcccaggctggtctggaactcctgggctcaagtgatcctcccaccttgacctcctggagggctgggattacaggtatgagtcatcactccaggctgaagctttatataataaccagagtctcatattacaaaatgtcaaagattcagtcaaaagttacttgatatcaatggacaactcaaactaaatgaaaaaaagacaattaatagatgctaacactgagataacaaagttgttagaatcatctaacaaagattttaaagcagctataataaaagtgctactgcaagtgattataaacatgcttgagacaaatgaaaaagtgctataaagctaagaaataaaatatataaataagaatcaaagagaanttatagaactaaaagataccataactgaaatgcaaagctccgtggatggactcaacaacagaatggaaaagactgaggaaagaagtagtttacaggaaattagaatagactagaaaaaatgaacaagaccctgtgctnaagagcaaatatttatgtcattggattccaggaaagagaaaagaatgaaaaagtacttaaataatggcttaaaaacttctcacattttgcaaagatttaaacctacaatttgagaagctgggtaaaccttaaacaggataaatcaaggacactcacaccaagaaacatagtaattaaacttctgattaaggaagaaaaagaaaaatctggaaagcagcaagaaaaaaatgacacactttctatatggtaaaagcaatttgaacaacagaagatttctcatcagaaactgtggggaccatgaggaagtaacagatatttttcaagtgctgaaataaatcaactgtcaatacaaaatgctctactcagtgaaaatatctttcaggaataaaggggaaatcaggacacgcacagactttttttaaattaagaatttattgtcagcttatctccctaaaagaatggctaacattctccaaacangaaggaaattgataaggaatcttgaaatttcagttagaaacaatgaatatggcaagcaaaatgtaggtcagtacactaagtttaatttctcctcttgaattttctaaattatgacttatgattgaagcaaaaatcataacattatctgatgtatatgtagaggaaagatttaagacagtgatgttataaatgaggggagtaaaggaacatgagataaccactaatatgacataccaatagactatgataaattatgtgtctaatgtgattactagaaaaaccagttaaaatataaagattgacggagtgaatttaaaaacatgacacactatatgctgtttatcataaactcactttgaagataatgccatcgtcaggttgaaatcaaaaggaataaaatagtgtattatgtaaaccatcaaaaagagcaggaatggccatattaataacattaaagtcagcttcagaactaaggaaattatcagagagggacattatataatgaaatagtcgatttaccaaaagaacatagcaatcataaatntgcatgaagcaaacaacaaagctggaaaatatatgaagtgaaactgatagatctaaaaggagaaacagataaatccattcattatagttggggcctttatcacccctcactcaacaattgatagaactggacagaaaaccagtaagaatataaaagaactcaacaacatgagacaataggatctagttgatatttatagaacattccaacagcagaatacatgttcttcaagtgctcacagaacacacatataaagatagaccctgagcataaaacaagcctcaacaaatttaaaagaactgaaatactacaagtactttctccaaccacaaaagaaccaaactagaaataaataacaatgataatgggaaaatcaccaaacacttgaaaactgaacaacaatattttataacccatggtcatagaggaaatctcaaaagaaattttaaaaatgcactgaactgaatgaaaatgaaaacaacataaaatttgtgagacacataaagcagaactgatgggaaaatatatagcactaaatgcatgctctagaaaagaaaagtcttcaaccagtaacctaagcttccacctcaaaaacctaaaaaaagaaggaaaaatagacccaatgccagcagaaagatgcaataacaaagagtagaactcaatgaaattgaaaacagataaacactttaaagaataaaacaaagagctggttattagaaaagatcaattaattgataaacctcaagcaagaccgtc

SEQ ID NO: 14001 - DNA, 576 bp, Homo sapiens
tgcccaaggtcaccaccctcttgccaagggggtcacttggatctaatgattggttaatgctggggggagggggtaagtcttggcccccagcctcaacagtgatggcggtggctccggggtcatcctagcttccgagtttcgtctaggttgagggcgccatgttgggactgcatcagcttctctctctgcctggttctgcttcctttactttaccatttgttgttagtccagggcacaccccagtaaacttcctgcatgcgagttcatcttagactgcttcccagggaatcgtatgtacaacactcgggagtagagagtcactgaaacggccctagctctgagagacccctcctgaccagccatcacccctcccgctcttccttactctgatttattgtcttcgtagaatttaactctcaggtctatggccatactgccctgaatgcgcctgatcttgtctgatttcagaagctaagcagggtcgtgcccggttagtacttggatgggagaatttagtgctcgaacactattgctgtagctttctttaataaataaatttgactgccattcctgcta

SEQ ID NO: 14002 - DNA, 504 bp, Homo sapiens
tgcccaaggtcaccaccctcttgccaagggggtcacttggatctaatgattggttaatgctggggggagggggtaagtcttggcccccagcctcaacagtgatggcggtggctccggggtcatcctagcttccgagtttcgtctaggttgagggcgccatgttgggactgcatcagcttctctctctgcctggttctgcttcctttactttaccatttgttgttagtccagggcacaccccagtaaacttcctgcatgcgagttcatcttagactgcttcccagggaatcgtatgtacaacactcgggagtagagagtcactgaaacggccctagctctgagagacccctcctgaccagccatcacccctcccgctcttccttactctgatttcagaagctaagcagggtcgtgcccggttagtacttggatgggagaatttagtgctcgaacactattgctgtagctttctttaataaataaatttgactgccattcctgcta

SEQ ID NO: 14003 - DNA, 396 bp, Homo sapiens
gcacaaataactcttaaacagggcaatagttggtacattcctagttgatttctcctttacatttgtcaaacaagacttagtattcatagttctctatctgcaaaacatcctttacaaagatttgaaaagaaaagcaatcctttaaataattctttataacattccattagcctcaggcatatttttatagtcaattaaacacaggcttttctaatgggacattgattctcatttccatacacaattgcctccataagagcctgggtaatgccatctctggcacatgtccaataatccctgtcttcagggcagtggtactggtcaggaactttttctagactttaatcttaagcaaagccagtcatataattttaggtattggctttatctgctagg

SEQ ID NO: 14004 - DNA, 505 bp, Homo sapiens
gagatattaaccttttctgatgccttttatcaatccaatctctatgttaggcacgtaccttttaatgctattttattttgggatcatacttgcctgatcatctctcaattagagtgattccaaacatttttccacggagaatactgcgcctacctaaaggaagcccttaggctgcctctcagtcttagtgaagtgactgctactaggagtgtgagttgcccactcaatttactaaaggaatgtcccctctacctcccctcttaattattgattaaggcaaatggatctttatttcattggcaacctgggaggagtagtagtccaaccacttcccagggcaacatagagcgatggtcgctatataaatgcttaaatgaacacaggccaggggacccatgggagccacctgggaccatgccatgtggaactagccagtgtgaagcatgggttctggggacatcagaatgagattgtgtctacagaaagtttgttaggaaagactgac

SEQ ID NO: 14005 - DNA, 556 bp, Homo sapiens
gcatatagctagtgtaagcatacctctggtttgccctgaatagttatgggttacatctgttttcccaaaacaataatagctccccctttcacacacgcacaaaaattgtctcatttgtatgataaacttgtgtgcctcctacacatagccctgtgaattcgattttgaatcacagcatggatggagatcaacaaagttgtatagatattgaagtgttggctgggggggcgctattcatggagaatcccctccttaattctgcaaaccagatctagtacattgtgaatattctataatcattggctattttttacagctagcttttcagatctatacctgcttatgtacatgaaatgtagctcctgtaaattgcagattagtgtatattaatctaagatgccatcaactgtaaaatacctgttattttctataccacgaagaaaggatactgccaattaaactttggtatgcattgttggtaaaatgcatcctatttgtggaaaaaaattagcattttaagattaatacaatacaatacctgtaaagctctataaga

SEQ ID NO: 14006 - DNA, 644 bp, Homo sapiens
gaaaatcaatgcttagtaatgagcactgtgtgcaacactaaatattccttaatgtggggaaaaggaagaaagcaatttgttataattaagcaattgaagacaccctttttagacagatattttttcagctctgtatctattttatgactgtgcaacatgtcatttaagaaaaaatcccatcttcaatggtcatacttcactcaacagtaacagaatacaccacccaataatatgccactttgacattaggattatttttaaggattattttgagctaaacacatttgggaaatagacaatgcaaaaaagggcattctaaacctcccttttcttcctaaaatcagattaaaaactcccttgttaaagatacctccttcccccataaaagtggtcatagccaagagaattctatgcaaacatactttgttaaaataattctcatcttgttttagcctccccacataatttagttactgttacacaattgcctctttttgttcaacctgttataaaaacttttagcgctaggtgcaatggatcatgcctgtaatctcggcactttgggaggtggaggtgggagaatcccttgtgcccaggagttcaagaccagccttggaaacataacgagaccgccatctctaaaa

SEQ ID NO: 14007 - DNA, 790 bp, Homo sapiens
cttcctctctgggccgcgagcccctcttgtgattggtaagacctttccagctgtgacaggctgagcccaactcgactctgtgaaacgtaccccaccccccagcccttcttccagtccccctcttccatgaggagacccactctgctcccaccctctgaaaacctaaagcacagcccaaatcccccaccccagcagcatacctagggagctcctagtcctggtaaaacggcaggagtaggtgctggggatgctgagaaaggaacaggaatcctgtccaggcaggtcctacctctgcccatgtggctggccctcatgtctgggtcttctcactctactctcattactcctccgggaccctcagccccatctttggttccaaatgtccccaggccccatgaaccttaactcttctccctgcacactgaccctggtcttgtctcaaatttcctctttctggagctctgtgtatagtggaaagacaggctcagaaatgcccagcggggacttctttgagttgcagcaacatctttgaggggcacagaggcctgagtgatcacatctgacttggaagcctggggagggcttcacagaggaggtggcgtttgagaaggattttgacagagagtggggaggatgggcgttttgagctgaggtaagcctggagaaaggcccgaagggctggaggtgctaagtgtgttctgcagcctggcatgtgtgaaggatggggtggagatgagacaagagagacaggggctggatcatgaaggtccttgatggcctgtctgtggag

SEQ ID NO: 14008 - DNA, 409 bp, Homo sapiens
cttcctctctgggccgcgagcccctcttgtgattggtaagacctttccagctgtgacaggctgagcccaactcgactctgtgaaacgtaccccaccccccagcccttcttccagtccccctcttccatgaggagacccactctgctcccaccctctgaaaacctaaagcacagcccaaatcccccaccccagcagcatacctagggagctcctagtcctggtaaaacggcaggagtaggtgctggggatgctgagaaaggaacaggaatcctgtccaggcaggtcctacctctgcccatgtggctggccctcatgtctgggtcttctcactctactctcattactcctccgcgcctgtcaaacccctcattgttcgcagctgatgtcactcgcagttgtgagcggccgc

SEQ ID NO: 14009 - DNA, 326 bp, Homo sapiens
cagatgaacaagatttcatactgacaccaccatactctgttaaatagttaaaaatcctattttggcttttgtttgctcacttagatttgtacacccaaggtgatgaagagagcacagatagaatctagagacaaatagtttctggagtcaggaatcagatccagattctaacacgaggtgatgtgggaaaaagtcagttaaaatttctgagattcaatttactcatctataaaatcatcctcataataattgctccccccttcaaaggtttgttatgaggagcaagtggaaaaatgtctattaacgggctctgctgtcagtggatt

SEQ ID NO: 14010 - DNA, 1182 bp, Homo sapiens
ttttttcctgaggcggagtctcgctctgttgcccaggcgggggtgcagtggcacatctcggctcactgcaagctccgcctcccgggttcacgccattctcccgccgcaggagaatcgtttgaacccaggaggcagaggttgcagtgagttaagattgcatcactgtactccagcctggcaacagagcgagattccatctcaaaaaaagagaaaaaactttaaatttaaaaattaattagcacaatgctttatataattcaattgctactctttaagctaatgttacttcctgtaatcttacctacacatttctttatgaaatgttcagaaaaacttcttgtgattgccctgaatacctgaagtgctacccttgaactgcagtgtcccagttcctatcaatcaaatcttaatctaagtccatgtatgacagtctacacgtgtagggtcctcctagatgaaaacctgtgtctgctatcaagtcaggaagacattgaagtctaatttcaagatgaagcagtgcctctttggtatgaaacaaattagccagatgaaacaccattctttaatgttcagaaattaaagctcttgattctaaaatttatagaaaggtcacaccaagagcaataatggaatatcactaataaattatcacatccttattttaaaattacacctttgtagctaaatgctacccagctggtagaacaaagggaggatggtaactaaactaatatcattatttgagataaccaatcataagaaataaaacttcacttgactcatatttcatgcaaaaacaaaagtctcaagtctttggtcttggccaacatgcaaaggcgtgccacggggcggctctgtgaggacaccttgtgcgcctggtgccacgtggggcaggtccagctgagcccagactcgcaggccaggtgagctgcccatgccacttcctgccaatcgctggtttctgctctctgaggcctcccacccaattactgaccaggcccagacctgcccgaataggatcttctgagaacacccagagcagtgttatgccaagtcaactgctatccgaatcaaccccctataagcaccacaacgacagcgagcacaaggaaaacccagccggcgactaacaccaccacgtagcgctgggacaaccagaccaccgggaatacaagccagccc

SEQ ID NO: 14011 - DNA, 1015 bp, Homo sapiens
ttttttcctgaggcggagtctcgctctgttgcccaggcgggggtgcagtggcacatctcggctcactgcaagctccgcctcccgggttcacgccattctcccgccgcaggagaatcgtttgaacccaggaggcagaggttgcagtgagttaagattgcatcactgtactccagcctggcaacagagcgagattccatctcaaaaaaagagaaaaaactttaaatttaaaaattaattagcacaatgctttatataattcaattgctactctttaagctaatgttacttcctgtaatcttacctacacatttctttatgaaatgttcagaaaaacttcttgtgattgccctgaatacctgaagtgctacccttgaactgcagtgtcccagttcctatcaatcaaatcttaatctaagtccatgtatgacagtctacacgtgtagggtcctcctagatgaaaacctgtgtctgctatcaagtcaggaagacattgaagtctaatttcaagatgaagcagtgcctctttggtatgaaacaaattagccagatgaaacaccattctttaatgttcagaaattaaagctcttgattctaaaatttatagaaaggtcacaccaagagcaataatggaatatcactaataaattatcacatccttattttaaaattacacctttgtagctaaatgctacccagctggtagaacaaagggaggatggtaactaaactaatatcattatttgagataaccaatcataagaaataaaacttcacttgactcatatttcatgcaaaaacaaaagtctcaagtctttggtcttggccaacatgcaaaggcgtgccacggggcggctctgtgaggacaccttgtgcgcccgggggccccgggaggccagtcacactgggccccaatacccaggcaccagagcaggccaaaggcagacgggcacaacgcgggaacggcacacgaagcccacaccaatacggacaggccagactgccgaggatctctggc

SEQ ID NO: 14012 - DNA, 870 bp, Homo sapiens
tcaagtagtctgcctgccttggcctcccacagtgctgggattacagccgtgagccaccatgcctggccttttttttttctttaaactaaagacttaactgtttttttccgtatctcctcagccccatgttttagactattttaccccaaaattgtatttattaatttggctttcccatttgaaaaaacaaattgatcttagcatggtggttagcttgaggcaatctttagtgagtcagtataattttagctaaaacagttgtatctcatgtaaaagtatgattttctttaggttttttttttttaattgaaagtaactcatgaattctctttattatctcttctaagggcttgaggatatcatgttatccctggatgagatatccttcccaggcctaacattctgatttaacaacactttcactaaagccttttgccccacctttgttcctgtttattaatatatttagttatatgattaaaattgaactattttatcctagatggaaagtatcagatggaaattcgtttaggtcataattaaacttgtgtgccttagaaaacatctgtatttgaaaatcaaattggccaggcaccatggctcatgtctgtaatcccagcaccttgtggggccaaagtgggcaaattgcttgagctcagaagttcaagaacaaactgggcgggcaacatggtgaaatcccgtctctacaaaaaataacaagaattagccacatgtggtggtgtgcacctgtagtcccagcttcttaggaagctgagatgggaggattacttgagcccaggaggttgaggctgcagtgagccgtggttatgccactgcactccagcctgggcgatggtgagaccctgtttt

SEQ ID NO: 14013 - DNA, 387 bp, Homo sapiens
tccaaaacattcaaaaagtaaacccactgaagaataataacacaacaataaaaataatacacattttaaaatacaatataacaactatttacatagcattttcattgtattaggtattataagtaatctaaagatgatttaaaatacacgagtagaagtgtgtaggttatatgtaaatatgccattttccatcaggagcttgagcatccacatttgcctgtgaggatcttggaatcagtctccctgagaataccaacggacaactgtacaaagataatgctaacataataacagcatctctatttggattttgaatgttaaaaatatttgtaaaacagtgtattgggggtattgggatttttaatcaacaaaggtaaaatgaacatt

SEQ ID NO: 14014 - DNA, 471 bp, Homo sapiens
ccccaccaagattctgttgatgggaggaagggggatatgttgcctggttttaccttctagcgagattatgaacctctgtgtgttctcgtctgagccttaggctatctagacagaaaaccaaagtggagaatcatgaacatcacccagagtaagacagccactcagcgactatactagaggagagcggttgaatgtgacagggccgggctcacatactggccgtgggacctcgggcaaggtacacagcctctctgagcctcattttcctcacctgtgtaatgggctattacttaccttctctgtttgataagtcagttttaaggtgtcatatgcgaatgagctctttgtaaacaataggaagtactcaacccttttattatgaaataaatcactggatgtgtacactgttcctaaatagaatcatacctaatttcttttgctttctaaaattaataaatcagctgttattta

SEQ ID NO: 14015 - DNA, 265 bp, Homo sapiens
ataaattgtagatacataaattatgtgtaaaattcacatgaaaaactctctccacctcattttaccctttattccttctctttaaatctgttgaccaaaacaaatcactgttaacatttgttatttaggggtccagaaatgttttgtgtataaccataagcatgcatatatatacatatcaacagctacatctagatggtccacttactacagccccagaatggaaatttcttcctcaaagcaaacattagaggcatcttctggg

SEQ ID NO: 14016 - DNA, 525 bp, Homo sapiens
ttaatgactattaaatattaggacttaaaagaccttggaattaatttaatcccttagttttccattttgtgacatacatcatgtagctcaaattgttcatagttactagaatacgctaagtaaacagaatttaaaggctagagcttaaattgctgattatctcaagatatataaatggtgagaaatatactaatttcttctaaaagcatatcgcatttttaccatcttcctgtatcctctctgtacgtatagaatggaggaactatatactgtactgtgtttatagtacctttttttgtcttcaaactctgcctcccaggttcaagcgattctccagcctcagcctcccgagtagctggaattacaggcgcgtgccaccacgcccagctaatttttgtattcttggtagaaacagggttttgccatgttcgagaccagcctggctaacatggtgaagccccatctctactaaaaatacaaaaaattagccaggcatggggatgacagagtgagactccatctcac

SEQ ID NO: 14017 - DNA, 1470 bp, Homo sapiens
tctcaaaaggccttttaagcagcagagactgggctaaatactggaactgaattccacttttctgcctgctcatttgctgccaaagaccacttggggctccttgtctagaatgctctaagacgaaatttggccagacacagggttccttgattgttctgttcaactaatagagaacctacattttgccttcttaatatcgactttcttttgtaccaggtttttctttctttcttttttgccttaggagcttagctcaaagttcagctaacctttgacactactagtgtcatttagtaacagtaatctttgacactactagtgtcatttaggagcttagctcaaagttcagctaacctttgacactgctagtgcgttcaagaaagggtagggaatgaagtacccttaatgcagggtcagcaaacttttcctgtaaaaggccagataggaagtatttttggctttttgggctgtttgcttttgctactactactgtgggaatgaccatggtcatggctgtgttccagcacaacttgatttaccaagacaagctgtgggctgtatttggtcctcaggctgtggcttgctagcccctgctctaatggattgtgttggcggcaatggcaagattcccttgctgagaacatgcagatgaataaccttatagctgggatgcagagaggagaaagttctgtaggtaataagtgcactgtattccctctgagctacttcctgggcatagttacatgtatggccagtgtgtgtacttgagccatcaggctcagacacttgttgaatatacctctcattgcattagtttgtaattgtgctagtgctgggtgctgagctcagctgcccggatgacctttccagactgaaggacatactcccctaacagctgggagtgctgctggctggccatttacttccagcccttatgaggagtttcccctgctgaagagccctgcctgccccagatcatacccccttcctgcctgtaacccttaccggctccatatggggtacaaagggctggcctcctcaccccaacttgggaaaccctctggggccatcccagctccagagccccttgtggggtcagtgagacctcattgtggccacattacagcccagtgcctctccctgacaagcctgtacccagccggctcagcccacagcactgtcctatgaaccttcctgcacgccattctccacctcagtatctgctttcggggaacccaacctgcgacagtgcttctgtgtgttttcagtcctgcaggtttgaactctgactttggagacttttccagttatctcgtggaatgacagattgtgcctgtatgatatcaggcacaattaatgcaaattaggcagacctatttattctagatgtgaatttgctatttattttaaatgttgattttatgtgttatgtgactctgaacttattgccaaataaaagtttgaattgta

SEQ ID NO: 14018 - DNA, 1129 bp, Homo sapiens
ctgctagagtcttgaggataaaccgagggggggtaagaaaggaaagataatgaagagctccttaatgcagggtcagcaaacttttcctgtaaaaggccagataggaagtatttttggctttttgggctgtttgcttttgctactactactgtgggaatgaccatggtcatggctgtgttccagcacaacttgatttaccaagacaagctgtgggctgtatttggtcctcaggctgtggcttgctagcccctgctctaatggattgtgttggcggcaatggcaagattcccttgctgagaacatgcagatgaataaccttatagctgggatgcagagaggagaaagttctgtaggtaataagtgcactgtattccctctgagctacttcctgggcatagttacatgtatggccagtgtgtgtacttgagccatcaggctcagacacttgttgaatatacctctcattgcattagtttgtaattgtgctagtgctgggtgctgagctcagctgcccggatgacctttccagactgaaggacatactcccctaacagctgggagtgctgctggctggccatttacttccagcccttatgaggagtttcccctgctgaagagccctgcctgccccagatcatacccccttcctgcctgtaacccttaccggctccatatggggtacaaagggctggcctcctcaccccaacttgggaaaccctctggggccatcccagctccagagccccttgtggggtcagtgagacctcattgtggccacattacagcccagtgcctctccctgacaagcctgtacccagccggctcagcccacagcactgtcctatgaaccttcctgcacgccattctccacctcagtatctgctttcggggaacccaacctgcgacagtgcttctgtgtgttttcagtcctgcaggtttgaactctgactttggagacttttccagttatctcgtggaatgacagattgtgcctgtatgatatcaggcacaattaatgcaaattaggcagacctatttattctagatgtgaatttgctatttattttaaatgttgattttatgtgttatgtgactctgaacttattgccaaataaaagtttgaattgta

SEQ ID NO: 14019 - DNA, 1434 bp, Homo sapiens
tctcaaaaggccttttaagcagcagagactgggctaaatactggaactgaattccacttttctgcctgctcatttgctgccaaagaccacttggggctccttgtctagaatgctctaagacgaaatttggccagacacagggttccttgattgttctgttcaactaatagagaacctacattttgccttcttaatatcgactttcttttgtaccaggtttttctttctttcttttttgccttaggagcttagctcaaagttcagctaacctttgacactactagtgtcatttagtaacagtaatctttgacactactagtgtcatttaggagcttagctcaaagttcagctaacctttgacactgctagtgcgttcaagaaagggtagggaatgaagtacccttaatgcagggtcagcaaacttttcctgtaaaaggccagataggaagtatttttggctttttgggctgtttgcttttgctactactactgtgggaatgaccatggtcatggctgtgttccagcacaacttgatttaccaagacaagctgtgggctgtatttggtcctcaggctgtggcttgctagcccctgctctaatggattgtgttggcggcaatggcaagattcccttgctgagaacatgcagatgaataaccttatagctgggatgcagagaggagaaagttctgtaggtaataagtgcactgtattccctctgagctacttcctgggcatagttacatgtatggccagtgtgtgtacttgagccatcaggctcagacacttgttgaatatacctctcattgcattagtttgtaattgtgctagtgctgggtgctgagctcagctgcccggatgacctttccagactgaaggacatactcccctaacagctgggagtgctgctggctggccatttacttccagcccttatgaggagtttcccctgctgaagagccctgcctgccccagatcatacccccttcctgcctgtaacccttaccggctccatatggggtacaaagggctggcctcctcaccccaacttgggaaaccctctggggccatcccagctccagagccccttgtggggtcagtgagacctcattgtggccacattacagcccagtgcctctcccttgtcctatgaaccttcctgcacgccattctccacctcagtatctgctttcggggaacccaacctgcgacagtgcttctgtgtgttttcagtcctgcaggtttgaactctgactttggagacttttccagttatctcgtggaatgacagattgtgcctgtatgatatcaggcacaattaatgcaaattaggcagacctatttattctagatgtgaatttgctatttattttaaatgttgattttatgtgttatgtgactctgaacttattgccaaataaaagtttgaattgta

SEQ ID NO: 14020 - DNA, 876 bp, Homo sapiens
tctcaaaaggccttttaagcagcagagactgggctaaatactggaactgaattccacttttctgcctgctcatttgctgccaaagaccacttggggctccttgtctagaatgctctaagacgaaatttggccagacacagggttccttgattgttctgttcaactaatagagaacctacattttgccttcttaatatcgactttcttttgtaccaggtttttctttctttcttttttgccttaggagcttagctcaaagttcagctaacctttgacactactagtgtcatttagtaacagtaatctttgacactactagtgtcatttaggagcttagctcaaagttcagctaacctttgacactgctagtgcgttcaagaaagggtagggaatgaagtacccttaatgcagggtcagcaaacttttcctgtaaaaggccagataggaagtatttttggctttttgggctgtttgcttttgctactactactgtgggaatgaccatggtcatggctgtgttccagcacaacttgatttaccaagacaaggacaagcctgtacccagccggctcagcccacagcactgtcctatgaaccttcctgcacgccattctccacctcagtatctgctttcggggaacccaacctgcgacagtgcttctgtgtgttttcagtcctgcaggtttgaactctgactttggagacttttccagttatctcgtggaatgacagattgtgcctgtatgatatcaggcacaattaatgcaaattaggcagacctatttattctagatgtgaatttgctatttattttaaatgttgattttatgtgttatgtgactctgaacttattgccaaataaaagtttgaattgta

SEQ ID NO: 14021 - DNA, 6135 bp, Homo sapiens
ggccgggatagaagccgcagcccaggcggcggtccctcccgctgtcgccgcccgggtgtagcgcatcacccggagcccaccggccgcaggtgcctcctccggccccagggggccccgggagccctgaagggcgaagcggcagggacgcctctcttgggcgaagaggcggcctcaccgccccggatgcggccggagggcgcgggaatggagctcggaggcggcgaggagcgcctgcctgaggagagcaggagggagcactggcagttgctgggtaatttgaagacgacggtggagggtttggtatcaaccaacagccccaacgtctggtctaagtatggtggcttggagcggctttgcagggacatgcagagcatcctctatcacgggcttatccgtgaccaggcgtgccgccgccagacggattactggcagttcgtgaaagacatccggtggctcagtccccactcagcccttcacgtggagaagttcatcagcgtgcacgagaacgaccagagcagtgctgatggtgccagtgaacgtgctgttgccgagctgtggctgcagcacagcctgcagtaccactgcctctcagcccagctccggcccctgctcggggatagacagtatatcagaaaattctacacagatgctgccttcctgctaagtgacgctcatgtcacggccatgctgcagtgcctggaagcagtggaacagaacaacccccgcctcctggctcagatcgatgcgtccatgtttgccagaaagcacgagagcccgctcctggtgacaaagagccagagcctgacagccctgcccagttccacatacacccctccaaacagctatgctcagcattcctactttgggtccttctctagcctccaccaatccgtgcccaacaatggctcagagagaagatctacttcctttccactctctggccctccccggaaacctcaagaaagcagagggcacgtctcaccagcagaggatcaaaccatccaagcccccccagtttcagtctctgcactagccagggattcccctttgaccccaaatgaaatgagctccagtactctgaccagccccatagaggcatcctgggtcagcagccagaatgattccccaggtgatgccagtgaggggcctgagtacctggccattggcaacttggacccccgaggccggactgccagctgtcagagtcacagcagcaatgccgagagcagcagttccaatttgttctcctccagcagctcccagaagccagattctgctgcctcttccttaggggaccaggaaggaggtggggagagccagctgtccagtgtcctccgcaggtccagcttctcagaggggcagacactcactgtcaccagtggggcaaagaaaagccacattcgctcccattcggataccagcattgcctccaggggagctccagaatcctgcaatgataaggcgaagttgagaggccctttgccctactctggtcaaagcagtgaagtcagcacacccagctctctgtacatggaatatgaaggtggtcggtacctgtgctcaggggaaggcatgttccgaagaccatcagaaggacagtccctcatcagctacctctctgagcaagacttcggcagctgtgccgacctggaaaaggagaatgcccacttcagcatctcagagtccttaattgctgccatcgagctaatgaagtgcaacatgatgagccagtgcctagaggaggaggaagtggaagaggaagacagtgatagagagatccaggagctgaagcagaagatccgccttcggcgccagcaaatccgcaccaagaacctgctccccatgtaccaggaggctgagcacggaagctttcgggtcacctccagcagctcccagttcagctcacgtgattcggcacagctctctgactctggctctgctgatgaggttgatgaatttgaaatccaagatgctgacatcagaaggaacacagcctcaagcagcaaatccttcgtttcctcccagtccttctcccactgcttcctgcactccacgtctgctgaggcggtggccatggggctcctgaagcagtttgaggggatgcagcttccagccgcctcggagctggagtggcttgtcccggagcatgatgcccctcagaagctcctgcccattcctgactcactgcccatctcaccggatgacgggcagcacgctgacatctacaagctgcggattcgtgttcgtggcaacttggagtgggccccgccccggcctcagataatttttaatgttcatccagccccaacgaggaaaattgccgtggccaagcagaattaccgctgtgcaggatgtggcatccggactgaccctgattacatcaagcgactgcggtactgtgagtacctgggcaagtacttctgccagtgctgccacgagaatgcccagatggccatccccagccgggttctgcgcaagtgggacttcagcaagtactacgtcagcaacttctccaaggacctgctcattaagatctggaatgatcctctcttcaacgtgcaggacataaacagtgccctctataggaaggtcaagctgctcaatcaagtccggctgctgcgggtccagctgtgtcacatgaagaacatgttcaagacttgccgactggccaaggagcttctggattcctttgacacagtcccaggccacctgacagaggacctccacctgtactcactgaatgacctgactgcgaccaggaagggggagctggggccccggcttgctgagctcaccagggcaggggctacccatgtggagagatgcatgctctgccaagccaaaggcttcatctgtgagttctgtcagaatgaggatgacatcatctttccctttgagctccataagtgccggacctgtgaagagtgtaaagcgtgttaccataaagcctgcttcaagtctggaagctgtccgcgctgcgagcggctgcaggcccggcgggaggcactggccaggcagagcctggagtcttacctgtcagactacgaggaggagcccgcggaagcgctggccctggaagccgccgtcctggaggccacctgaagaaagcacgtgcagccctccctccgggccgggtcacacctgttgcagaactgagccactctttgaaggactcgccccacctggggcttcttttttttttttttttttaattatcatcatctttttttttttttttactgacttgtctgacgtctgtgtgcagtcagccgtcggcaggttgatgggtccagagtctgtggtgacagataatttgtaaacaccaggtgtttccatcagaactgacatgcgggtccttcagtgaagcttctagtgcctctgtcagtggaagagacagcaagaccaagttcttccagcgtctgtggccttctcctctaggtttcacctgcatgtcaggtatcatttccaattttcctttgtttcagttctggagcttctgagccaggcctttctcaaccacctctcctgctgctgaaacggggatggcgttttccctctccctgtcctggactggggtcagactgtgccccgaggagaagcagcagagaataggactacgtcatgggcatttcgtccacttatttgggtattttgggggccacagaacaatcctgactatcctagactcctcagagacctcagaggcagctgtgaatgtccctatgttgccgggagttcctgtttgaaatatttgaagcatagaggatgccacaagctgactttcttcatctaccttggtgatcttgaagcaaagaacagaactgatgctcaggccaggctcacctgtagccttacgccgcaagcatacgtgaggcgccagctctgtcgctgaaggagcgcttactcagaggagcggtcggccccctcttggtgttaaggtctcttagttaacctggctttttggtgcaggtgtgatctttgaagctcaggcaggtccctgatgccatcctaaggtgaggacaggaacctcacccaccatcttcttagcgtgtccctgatgactctgtcctctgttagatggtcgttgtgcttctgagtaaaagtacaacccgactccgttctctccccttcctgcagcagagctgggtccttccctggtggccgagtctctcttgccttagcttctttggtcaaagttggagaaaagcttcctgctattagtgctgttacagaacttgacggtttgtggatgtgagtgtgaatgtccctgtgttcttgggataacaagagcctttatgccaattatgcacttaactctgtgtagcctggtaatgtttatctgttcatttgataatgctgattttagtgtgctgcccccctccccccgttaatgtgtgttgatggtgaagtccttttgataatgctgattttggtgtgctgcctcccccttcccccccgttaatgtgtgtgttgacagtgaagtccttgggtggggccatgtgtgtgtttgtgatgttccttaagttgatgcagcttctaacctctgtgaaaacactggtcagagtggcttctccaagagctggcagctctgtgaactaaagcctgcatcatttttgttctgggattgaattctgcccatgggcatgtcttctcatagttgcttgctggtaggaaagaaatgggcgtgggtgctgccctggaagctgagcggaaagttgcctgtggttggtggaagctgatgagagcttgagctggcggtaagaaggagtctcccagggaagtgggagaggcattaaggtgatggccagggctgaggctccaccagcgtgagagggaacatgtgggaactggcccctgcccttgattcctctgcctcaaagttgggatctgaaagccatgtagggctagaagaccctgaggctgttctcccttctgttcatagtgagactcaaaaagccaagtcccagaagttctgaagggctgtgactagaagtgcccaggtccttcagggagctttaagaatgaccccacagaactcaagtttaactaggggttaggtcccagattcagacccaggagtttataaaaatgagctctacttccagttttggtttaaattacacatccaggccaggcacagtggctcacacctgtaatcccagcactttgggaggccagtgcgggcggatcatgaggtcaggagtttgagaccagcctggccaatgtggtgaaaccctgtctcttccaaaaatacaaaaattagctgggcgtggtggcacacgcctgtaatcccagctacttgggaggctgaggcaggagaatcgcttgaacctgggaggcagaggttgcagtgagccgagattgcgccaccgcactccagcctgggtgacagagtgagactccgtctcaaaaaacaaaaaggtgacacatccagctctttctccaggtcactgcgctggaggacagatgtgccgtcttgtcctgcctgtttcacatcagcataggatcaaaggatgacaatgctgacagcttctgaagccgaactcaacagtctcataggctcctcacttgtcacttatttttccctagctccctcaaccgcaccccatccctttagatcgtgcgtctgttttagtgactctgacacgatgccgtcctcaccttccaaatacccagttatttattcaagaggggggaagtgggtagaggatgggatgttttggaagcactttgcaagttaccactatctgaaaatcccctgctgttgcggggagaagctttgaatgcactgaagagaattccttctaaatgaaggcaggtgatagtgttctttctgtaagtaaagggaaagaaaaaaaacatagtttgcttaccaggtggagacaagattcaagacatagcagaagagtggaagacaaatattttccacttaaatgaggctgtttttgacgttctctgccaaggatttagagctttcgttgaactaacataaaaggagtgcgagtcttagtagagatgttccgtgtgtgccgcccgtgctctgaactgcgtttccacctgctgtggtgcttgtgcagcctggcagttcattgtcatctttaataaactaaggaaataaaattctgtctttcgtca

SEQ ID NO: 14022 - DNA, 2696 bp, Homo sapiens
ggcacgaggccaacaatggctcagagagaagatctacttcctttccactctctggccctccccggaaacctcaagaaagcagagggcacgtctcaccagcagaggatcaaaccatccaagcccccccagtttcagtctctgcactagccagggattcccctttgaccccaaatgaaatgagctccagtactctgaccagccccatagaggcatcctgggtcagcagccagaatgattccccaggtgatgccagtgaggggcctgagtacctggccattggcaacttggacccccgaggccggactgccagctgtcagagtcacagcagcaatgccgagagcagcagttccaatttgttctcctccagcagctcccagaagccagattctgctgcctcttccttaggggaccaggaaggaggtggggagagccagctgtccagtgtcctccgcaggtccagcttctcagaggggcagacactcactgtcaccagtggggcaaagaaaagccacattcgctcccattcggataccagcattgcctccaggggagctccagaatcctgcaatgataaggcgaagttgagaggccctttgccctactctggtcaaagcagtgaagtcagcacacccagctctctgtacatggaatatgaaggtggtcggtacctgtgctcaggggaaggcatgttccgaagaccatcagaaggacagtccctcatcagctacctctctgagcaagacttcggcagctgtgccgacctggaaaaggagaatgcccacttcagcatctcagagtccttaattgctgccatcgagctaatgaagtgcaacatgatgagccagtgcctagaggaggaggaagtggaagaggaagacagtgatagagagatccaggagctgaagcagaagatccgccttcggcgccagcaaatccgcaccaagaacctgctccccatgtaccaggaggctgagcacggaagctttcgggtcacctccagcagctcccagttcagctcacgtgattcggcacagctctctgactctggctctgctgatgaggttgatgaatttgaaatccaagatggtagcgaaggatctaacctgactcacatatcaaagaacggactgtcagtgtcactggcctcgatgttctcagatgctgacatcagaaggaacacagcctcaagcagcaaatccttcgtttcctcccagtccttctcccactgcttcctgcactccacgtctgctgaggcggtggccatggggctcctgaagcagtttgaggggatgcagcttccagccgcctcggagctggagtggcttgtcccggagcatgatgcccctcagaagctcctgcccattcctgactcactgcccatctcaccggatgacgggcagcacgctgacatctacaagctgcggattcgtgttcgtggcaacttggagtgggccccgccccggcctcagataatttttaatgttcatccagccccaacgaggaaaattgccgtggccaagcagaattaccgctgtgcaggatgtggcatccggactgaccctgattacatcaagcgactgcggtactgtgagtacctgggcaagtacttctgccagtgctgccacgagaatgcccagatggccatccccagccgggttctgcgcaagtgggacttcagcaagtactacgtcagcaacttctccaaggacctgctcattaagatctggaatgatcctctcttcaacgtgcaggacataaacagtgccctctataggaaggtcaagctgctcaatcaagtccggctgctgcgggtccagctgtgtcacatgaagaacatgttcaagacttgccgactggccaaggagcttctggattcctttgacacagtcccaggccacctgacagaggacctccacctgtactcactgaatgacctgactgcgaccaggaagggggagctggggccccggcttgctgagctcaccagggcaggggctacccatgtggagagatgcatggtgagaaagtctcactgtagcatgcagctgagcccttgcttttagggatacagggaggggggtggacctggggttcttgccacttagcttgaggaagttgaaatggccagtcagcactgggagaggaactggaaagggctgctgttccttagcctggagagcagccaaatcatcctgatctaaagaacctcgagtgaggggaggagctggtgctggctgtggtcctgggtagctccgggcaagaccgagtagactttcactcaagaagtgttggccaggcacggtggcttaggcctctcatcccagcaatttgggaggccgaggtgggcgggtcacctgaggtcaggagttcaagaccagcctgacgaacatgatgaaaccccatctctactaaaatacagaaattagccgggcatgatggcgggtgcctgtaatcccagctactcgggaggctgaggcaggagaattgcttgaatccaggaggcggaggttgcagtgagccgagatcatgccactgcactccagcctgagcgacaagagtggaaaaaaaaaaggcagttgtcatgatgtgagaggagagctctggattggaatcgagagggagtctaccctcggccgtcatttgttgttctcagtcattatgaccaaaataaatactttgtcccctcaaggcctcga

SEQ ID NO: 14023 - DNA, 6039 bp, Homo sapiens
ggccgggatagaagccgcagcccaggcggcggtccctcccgctgtcgccgcccgggtgtagcgcatcacccggagcccaccggccgcaggtgcctcctccggccccagggggccccgggagccctgaagggcgaagcggcagggacgcctctcttgggcgaagaggcggcctcaccgccccggatgcggccggagggcgcgggaatggagctcggaggcggcgaggagcgcctgcctgaggagagcaggagggagcactggcagttgctgggtaatttgaagacgacggtggagggtttggtatcaaccaacagccccaacgtctggtctaagtatggtggcttggagcggctttgcagggacatgcagagcatcctctatcacgggcttatccgtgaccaggcgtgccgccgccagacggattactggcagttcgtgaaagacatccggtggctcagtccccactcagcccttcacgtggagaagttcatcagcgtgcacgagaacgaccagagcagtgctgatggtgccagtgaacgtgctgttgccgagctgtggctgcagcacagcctgcagtaccactgcctctcagcccagctccggcccctgctcggggatagacagtatatcagaaaattctacacagatgctgccttcctgctaagtgacgctcatgtcacggccatgctgcagtgcctggaagcagtggaacagaacaacccccgcctcctggctcagatcgatgcgtccatgtttgccagaaagcacgagagcccgctcctggtgacaaagagccagagcctgacagccctgcccagttccacatacacccctccaaacagctatgctcagcattcctactttgggtccttctctagcctccaccaatccgtgcccaacaatggctcagagagaagatctacttcctttccactctctggccctccccggaaacctcaagaaagcagagggcacgtctcaccagcagaggatcaaaccatccaagcccccccagtttcagtctctgcactagccagggattcccctttgaccccaaatgaaatgagctccagtactctgaccagccccatagaggcatcctgggtcagcagccagaatgattccccaggtgatgccagtgaggggcctgagtacctggccattggcaacttggacccccgaggccggactgccagctgtcagagtcacagcagcaatgccgagagcagcagttccaatttgttctcctccagcagctcccagaagccagattctgctgcctcttccttaggggaccaggaaggaggtggggagagccagctgtccagtgtcctccgcaggtccagcttctcagaggggcagacactcactgtcaccagtggggcaaagaaaagccacattcgctcccattcggataccagcattgcctccaggggagctccagaaggtggtcggtacctgtgctcaggggaaggcatgttccgaagaccatcagaaggacagtccctcatcagctacctctctgagcaagacttcggcagctgtgccgacctggaaaaggagaatgcccacttcagcatctcagagtccttaattgctgccatcgagctaatgaagtgcaacatgatgagccagtgcctagaggaggaggaagtggaagaggaagacagtgatagagagatccaggagctgaagcagaagatccgccttcggcgccagcaaatccgcaccaagaacctgctccccatgtaccaggaggctgagcacggaagctttcgggtcacctccagcagctcccagttcagctcacgtgattcggcacagctctctgactctggctctgctgatgaggttgatgaatttgaaatccaagatgctgacatcagaaggaacacagcctcaagcagcaaatccttcgtttcctcccagtccttctcccactgcttcctgcactccacgtctgctgaggcggtggccatggggctcctgaagcagtttgaggggatgcagcttccagccgcctcggagctggagtggcttgtcccggagcatgatgcccctcagaagctcctgcccattcctgactcactgcccatctcaccggatgacgggcagcacgctgacatctacaagctgcggattcgtgttcgtggcaacttggagtgggccccgccccggcctcagataatttttaatgttcatccagccccaacgaggaaaattgccgtggccaagcagaattaccgctgtgcaggatgtggcatccggactgaccctgattacatcaagcgactgcggtactgtgagtacctgggcaagtacttctgccagtgctgccacgagaatgcccagatggccatccccagccgggttctgcgcaagtgggacttcagcaagtactacgtcagcaacttctccaaggacctgctcattaagatctggaatgatcctctcttcaacgtgcaggacataaacagtgccctctataggaaggtcaagctgctcaatcaagtccggctgctgcgggtccagctgtgtcacatgaagaacatgttcaagacttgccgactggccaaggagcttctggattcctttgacacagtcccaggccacctgacagaggacctccacctgtactcactgaatgacctgactgcgaccaggaagggggagctggggccccggcttgctgagctcaccagggcaggggctacccatgtggagagatgcatgctctgccaagccaaaggcttcatctgtgagttctgtcagaatgaggatgacatcatctttccctttgagctccataagtgccggacctgtgaagagtgtaaagcgtgttaccataaagcctgcttcaagtctggaagctgtccgcgctgcgagcggctgcaggcccggcgggaggcactggccaggcagagcctggagtcttacctgtcagactacgaggaggagcccgcggaagcgctggccctggaagccgccgtcctggaggccacctgaagaaagcacgtgcagccctccctccgggccgggtcacacctgttgcagaactgagccactctttgaaggactcgccccacctggggcttcttttttttttttttttttaattatcatcatctttttttttttttttactgacttgtctgacgtctgtgtgcagtcagccgtcggcaggttgatgggtccagagtctgtggtgacagataatttgtaaacaccaggtgtttccatcagaactgacatgcgggtccttcagtgaagcttctagtgcctctgtcagtggaagagacagcaagaccaagttcttccagcgtctgtggccttctcctctaggtttcacctgcatgtcaggtatcatttccaattttcctttgtttcagttctggagcttctgagccaggcctttctcaaccacctctcctgctgctgaaacggggatggcgttttccctctccctgtcctggactggggtcagactgtgccccgaggagaagcagcagagaataggactacgtcatgggcatttcgtccacttatttgggtattttgggggccacagaacaatcctgactatcctagactcctcagagacctcagaggcagctgtgaatgtccctatgttgccgggagttcctgtttgaaatatttgaagcatagaggatgccacaagctgactttcttcatctaccttggtgatcttgaagcaaagaacagaactgatgctcaggccaggctcacctgtagccttacgccgcaagcatacgtgaggcgccagctctgtcgctgaaggagcgcttactcagaggagcggtcggccccctcttggtgttaaggtctcttagttaacctggctttttggtgcaggtgtgatctttgaagctcaggcaggtccctgatgccatcctaaggtgaggacaggaacctcacccaccatcttcttagcgtgtccctgatgactctgtcctctgttagatggtcgttgtgcttctgagtaaaagtacaacccgactccgttctctccccttcctgcagcagagctgggtccttccctggtggccgagtctctcttgccttagcttctttggtcaaagttggagaaaagcttcctgctattagtgctgttacagaacttgacggtttgtggatgtgagtgtgaatgtccctgtgttcttgggataacaagagcctttatgccaattatgcacttaactctgtgtagcctggtaatgtttatctgttcatttgataatgctgattttagtgtgctgcccccctccccccgttaatgtgtgttgatggtgaagtccttttgataatgctgattttggtgtgctgcctcccccttcccccccgttaatgtgtgtgttgacagtgaagtccttgggtggggccatgtgtgtgtttgtgatgttccttaagttgatgcagcttctaacctctgtgaaaacactggtcagagtggcttctccaagagctggcagctctgtgaactaaagcctgcatcatttttgttctgggattgaattctgcccatgggcatgtcttctcatagttgcttgctggtaggaaagaaatgggcgtgggtgctgccctggaagctgagcggaaagttgcctgtggttggtggaagctgatgagagcttgagctggcggtaagaaggagtctcccagggaagtgggagaggcattaaggtgatggccagggctgaggctccaccagcgtgagagggaacatgtgggaactggcccctgcccttgattcctctgcctcaaagttgggatctgaaagccatgtagggctagaagaccctgaggctgttctcccttctgttcatagtgagactcaaaaagccaagtcccagaagttctgaagggctgtgactagaagtgcccaggtccttcagggagctttaagaatgaccccacagaactcaagtttaactaggggttaggtcccagattcagacccaggagtttataaaaatgagctctacttccagttttggtttaaattacacatccaggccaggcacagtggctcacacctgtaatcccagcactttgggaggccagtgcgggcggatcatgaggtcaggagtttgagaccagcctggccaatgtggtgaaaccctgtctcttccaaaaatacaaaaattagctgggcgtggtggcacacgcctgtaatcccagctacttgggaggctgaggcaggagaatcgcttgaacctgggaggcagaggttgcagtgagccgagattgcgccaccgcactccagcctgggtgacagagtgagactccgtctcaaaaaacaaaaaggtgacacatccagctctttctccaggtcactgcgctggaggacagatgtgccgtcttgtcctgcctgtttcacatcagcataggatcaaaggatgacaatgctgacagcttctgaagccgaactcaacagtctcataggctcctcacttgtcacttatttttccctagctccctcaaccgcaccccatccctttagatcgtgcgtctgttttagtgactctgacacgatgccgtcctcaccttccaaatacccagttatttattcaagaggggggaagtgggtagaggatgggatgttttggaagcactttgcaagttaccactatctgaaaatcccctgctgttgcggggagaagctttgaatgcactgaagagaattccttctaaatgaaggcaggtgatagtgttctttctgtaagtaaagggaaagaaaaaaaacatagtttgcttaccaggtggagacaagattcaagacatagcagaagagtggaagacaaatattttccacttaaatgaggctgtttttgacgttctctgccaaggatttagagctttcgttgaactaacataaaaggagtgcgagtcttagtagagatgttccgtgtgtgccgcccgtgctctgaactgcgtttccacctgctgtggtgcttgtgcagcctggcagttcattgtcatctttaataaactaaggaaataaaattctgtctttcgtca

SEQ ID NO: 14024 - DNA, 6637 bp, Homo sapiens
ggccgggatagaagccgcagcccaggcggcggtccctcccgctgtcgccgcccgggtgtagcgcatcacccggagcccaccggccgcaggtgcctcctccggccccagggggccccgggagccctgaagggcgaagcggcagggacgcctctcttgggcgaagaggcggcctcaccgccccggatgcggccggagggcgcgggaatggagctcggaggcggcgaggagcgcctgcctgaggagagcaggagggagcactggcagttgctgggtaatttgaagacgacggtggagggtttggtatcaaccaacagccccaacgtctggtctaagtatggtggcttggagcggctttgcagggacatgcagagcatcctctatcacgggcttatccgtgaccaggcgtgccgccgccagacggattactggcagttcgtgaaagacatccggtggctcagtccccactcagcccttcacgtggagaagttcatcagcgtgcacgagaacgaccagagcagtgctgatggtgccagtgaacgtgctgttgccgagctgtggctgcagcacagcctgcagtaccactgcctctcagcccagctccggcccctgctcggggatagacagtatatcagaaaattctacacagatgctgccttcctgctaagtgacgctcatgtcacggccatgctgcagtgcctggaagcagtggaacagaacaacccccgcctcctggctcagatcgatgcgtccatgtttgccagaaagcacgagagcccgctcctggtgacaaagagccagagcctgacagccctgcccagttccacatacacccctccaaacagctatgctcagcattcctactttgggtccttctctagcctccaccaatccgtgcccaacaatggctcagagagaagatctacttcctttccactctctggccctccccggaaacctcaagaaagcagagggcacgtctcaccagcagaggatcaaaccatccaagcccccccagtttcagtctctgcactagccagggattcccctttgaccccaaatgaaatgagctccagtactctgaccagccccatagaggcatcctgggtcagcagccagaatgattccccaggtgatgccagtgaggggcctgagtacctggccattggcaacttggacccccgaggccggactgccagctgtcagagtcacagcagcaatgccgagagcagcagttccaatttgttctcctccagcagctcccagaagccagattctgctgcctcttccttaggggaccaggaaggaggtggggagagccagctgtccagtgtcctccgcaggtccagcttctcagaggggcagacactcactgtcaccagtggggcaaagaaaagccacattcgctcccattcggataccagcattgcctccaggggagctccagaaggtggtcggtacctgtgctcaggggaaggcatgttccgaagaccatcagaaggacagtccctcatcagctacctctctgagcaagacttcggcagctgtgccgacctggaaaaggagaatgcccacttcagcatctcagagtccttaattgctgccatcgagctaatgaagtgcaacatgatgagccagtgcctagaggaggaggaagtggaagaggaagacagtgatagagagatccaggagctgaagcagaagatccgccttcggcgccagcaaatccgcaccaagaacctgctccccatgtaccaggaggctgagcacggaagctttcgggtcacctccagcagctcccagttcagctcacgtgattcggcacagctctctgactctggctctgctgatgaggttgatgaatttgaaatccaagatgctgacatcagaaggaacacagcctcaagcagcaaatccttcgtttcctcccagtccttctcccactgcttcctgcactccacgtctgctgaggcggtggccatggggctcctgaagcagtttgaggggatgcagcttccagccgcctcggagctggagtggcttgtcccggagcatgatgcccctcagaagctcctgcccattcctgactcactgcccatctcaccggatgacgggcagcacgctgacatctacaagctgcggattcgtgttcgtggcaacttggagtgggccccgccccggcctcagataatttttaatgttcatccagccccaacgaggaaaattgccgtggccaagcagaattaccgctgtgcaggatgtggcatccggactgaccctgattacatcaagcgactgcggtactgtgagtacctgggcaagtacttctgccagtgctgccacgagaatgcccagatggccatccccagccgggttctgcgcaagtgggacttcagcaagtactacgtcagcaacttctccaaggacctgctcattaagatctggaatgatcctctcttcaacgtgcaggacataaacagtgccctctataggaaggtcaagctgctcaatcaagtccggctgctgcgggtccagctgtgtcacatgaagaacatgttcaagacttgccgactggccaaggagcttctggattcctttgacacagtcccaggccacctgacagaggacctccacctgtactcactgaatgacctgactgcgaccaggaagggggagctggggccccggcttgctgagctcaccagggcaggggctacccatgtggagagatgcatgctctgccaagccaaaggcttcatctgtgagttctgtcagaatgaggatgacatcatctttccctttgagctccataagtgccggacctgtgaagagtgtaaagcgtgttaccataaagcctgcttcaagtctggaagctgtccgcgctgcgagcggctgcaggcccggcgggaggcactggccaggcagagcctggagtcttacctgtcagactacgaggaggagcccgcggaagcgctggccctggaagccgccgtcctggaggccacctgaagaaagcacgtgcagccctccctccgggccgggtcacacctgttgcagaactgagccactctttgaaggactcgccccacctggggcttcttttttttttttttttttaattatcatcatctttttttttttttttactgacttgtctgacgtctgtgtgcagtcagccgtcggcaggttgatgggtccagagtctgtggtgacagataatttgtaaacaccaggtgtttccatcagaactgacatgcgggtccttcagtgaagcttctagtgcctctgtcagtggaagagacagcaagaccaagttcttccagcgtctgtggccttctcctctaggtttcacctgcatgtcaggtatcatttccaattttcctttgtttcagttctggagcttctgagccaggcctttctcaaccacctctcctgctgctgaaacggggatggcgttttccctctccctgtcctggactggggtcagactgtgccccgaggagaagcagcagagaataggactacgtcatgggcatttcgtccacttatttgggtattttgggggccacagaacaatcctgactatcctagactcctcagagacctcagaggcagctgtgaatgtccctatgttgccgggagttcctgtttgaaatatttgaagcatagaggatgccacaagctgactttcttcatctaccttggtgatcttgaagcaaagaacagaactgatgctcaggccaggctcacctgtagccttacgccgcaagcatacgtgaggcgccagctctgtcgctgaaggagcgcttactcagaggagcggtcggccccctcttggtgttaaggtctcttagttaacctggctttttggtgcaggtgtgatctttgaagctcaggcaggtccctgatgccatcctaaggtgaggacaggaacctcacccaccatcttcttagcgtgtccctgatgactctgtcctctgttagatggtcgttgtgcttctgagtaaaagtacaacccgactccgttctctccccttcctgcagcagagctgggtccttccctggtggccgagtctctcttgccttagcttctttggtcaaagttggagaaaagcttcctgctattagtgctgttacagaacttgacggtttgtggatgtgagtgtgaatgtccctgtgttcttgggataacaagagcctttatgccaattatgcacttaactctgtgtagcctggtaatgtttatctgttcatttgataatgctgattttagtgtgctgcccccctccccccgttaatgtgtgttgatggtgaagtccttttgataatgctgattttggtgtgctgcctcccccttcccccccgttaatgtgtgtgttgacagtgaagtccttgggtggggccatgtgtgtgtttgtgatgttccttaagttgatgcagcttctaacctctgtgaaaacactggtcagagtggcttctccaagagctggcagctctgtgaactaaagcctgcatcatttttgttctgggattgaattctgcccatgggcatgtcttctcatagttgcttgctggtaggaaagaaatgggcgtgggtgctgccctggaagctgagcggaaagttgcctgtggttggtggaagctgatgagagcttgagctggcggtaagaaggagtctcccagggaagtgggagaggcattaaggtgatggccagggctgaggctccaccagcgtgagagggaacatgtgggaactggcccctgcccttgattcctctgcctcaaagttgggatctgaaagccatgtagggctagaagaccctgaggctgttctcccttctgttcatagtgagactcaaaaagccaagtcccagaagttctgaagggctgtgactagaagtgcccaggtccttcagggagctttaagaatgaccccacagaactcaagtttaactaggggttaggtcccagattcagacccaggagtttataaaaatgagctctacttccagttttggtttaaattacacatccaggccaggcacagtggctcacacctgtaatcccagcactttgggaggccagtgcgggcggatcatgaggtcaggagtttgagaccagcctggccaatgtggtgaaaccctgtctcttccaaaaatacaaaaattagctgggcgtggtggcacacgcctgtaatcccagctacttgggaggctgaggcaggagaatcgcttgaacctgggaggcagaggttgcagtgagccgagattgcgccaccgcactccagcctgggtgacagagtgagactccgtctcaaaaaacaaaaaggtgacacatccagctctttctccaggtcactgcgctggaggacagatgtgccgtcttgtcctgcctgtttcacatcagcataggatcaaaggatgacaatgctgacagcttctgaagccgaactcaacagtctcataggctcctcacttgtcacttatttttccctagctccctcaaccgcaccccatccctttagatcgtgcgtctgttttagtgactctgacacgatgccgtcctcaccttccaaatacccagttatttattcaagaggggggaagtgggtagaggatgggatgttttggaagcactttgcaagttaccactatctgaaaatcccctgctgttgcggggagaagctttgaatgcactgaagagaattccttctaaatgaaggcaggtgatagtgttctttctgtaagtaaagggaaagaaaaaaaacatagtttgcttaccaggtggagacaagattcaagacatagcagaagagtggaagacaaatattttccacttaaatgaggctgtttttgacgttctctgccaaggatttagagctttcgttgaactaacataaaaggagtgcgagtcttagtagagatgttccgtgtgtgccgcccgtgctctgaactgcgtttccacctgctgtggtgcttgtgcagcctggcagttcattgtcatctttaataaactaaggaaataaaattctgtctttcgtcagcctgccttgactgtcaagaaatggcatgtgtccactgtaaagcaggtatatctgaacattgagaaggtttctgtgttataatgtaaagcaaactggaccacacacatcaaggaaagtgaggtggagtggctgtgtctctaacttgccatgagacctcgagcgaaccacttcacttctctgggtttctggtgcatggtgtaactgtcacttaaaatgaggtgtcttcctctccgcaacatctgacttgccttagatgcttcagttcccacttctgtgagcagctagcatctttctcttctgctcctggcccactggagctccagctctacgctgcaactctctcaacatttccccttaaatgtccccttgtcatctccaaccagtgtgtctaaaaccagcataaattccgtatttccaaaaacctaaccattagtcacccaggtttgaaaattaattgtcttcaacttcctctgtaagtggcacactgagctcatcacgcatcgtctcattcctactccctgtcatcaagttctgtggatgttttcctctaaaataaatctctcattacttttctgccactagcacacaaaaaaaagt

SEQ ID NO: 14025 - DNA, 5249 bp, Homo sapiens
ggcacgaggccaacaatggctcagagagaagatctacttcctttccactctctggccctccccggaaacctcaagaaagcagagggcacgtctcaccagcagaggatcaaaccatccaagcccccccagtttcagtctctgcactagccagggattcccctttgaccccaaatgaaatgagctccagtactctgaccagccccatagaggcatcctgggtcagcagccagaatgattccccaggtgatgccagtgaggggcctgagtacctggccattggcaacttggacccccgaggccggactgccagctgtcagagtcacagcagcaatgccgagagcagcagttccaatttgttctcctccagcagctcccagaagccagattctgctgcctcttccttaggggaccaggaaggaggtggggagagccagctgtccagtgtcctccgcaggtccagcttctcagaggggcagacactcactgtcaccagtggggcaaagaaaagccacattcgctcccattcggataccagcattgcctccaggggagctccagaatcctgcaatgataaggcgaagttgagaggccctttgccctactctggtcaaagcagtgaagtcagcacacccagctctctgtacatggaatatgaaggtggtcggtacctgtgctcaggggaaggcatgttccgaagaccatcagaaggacagtccctcatcagctacctctctgagcaagacttcggcagctgtgccgacctggaaaaggagaatgcccacttcagcatctcagagtccttaattgctgccatcgagctaatgaagtgcaacatgatgagccagtgcctagaggaggaggaagtggaagaggaagacagtgatagagagatccaggagctgaagcagaagatccgccttcggcgccagcaaatccgcaccaagaacctgctccccatgtaccaggaggctgagcacggaagctttcgggtcacctccagcagctcccagttcagctcacgtgattcggcacagctctctgactctggctctgctgatgaggttgatgaatttgaaatccaagatgctgacatcagaaggaacacagcctcaagcagcaaatccttcgtttcctcccagtccttctcccactgcttcctgcactccacgtctgctgaggcggtggccatggggctcctgaagcagtttgaggggatgcagcttccagccgcctcggagctggagtggcttgtcccggagcatgatgcccctcagaagctcctgcccattcctgactcactgcccatctcaccggatgacgggcagcacgctgacatctacaagctgcggattcgtgttcgtggcaacttggagtgggccccgccccggcctcagataatttttaatgttcatccagccccaacgaggaaaattgccgtggccaagcagaattaccgctgtgcaggatgtggcatccggactgaccctgattacatcaagcgactgcggtactgtgagtacctgggcaagtacttctgccagtgctgccacgagaatgcccagatggccatccccagccgggttctgcgcaagtgggacttcagcaagtactacgtcagcaacttctccaaggacctgctcattaagatctggaatgatcctctcttcaacgtgcaggacataaacagtgccctctataggaaggtcaagctgctcaatcaagtccggctgctgcgggtccagctgtgtcacatgaagaacatgttcaagacttgccgactggccaaggagcttctggattcctttgacacagtcccaggccacctgacagaggacctccacctgtactcactgaatgacctgactgcgaccaggaagggggagctggggccccggcttgctgagctcaccagggcaggggctacccatgtggagagatgcatgctctgccaagccaaaggcttcatctgtgagttctgtcagaatgaggatgacatcatctttccctttgagctccataagtgccggacctgtgaagagtgtaaagcgtgttaccataaagcctgcttcaagtctggaagctgtccgcgctgcgagcggctgcaggcccggcgggaggcactggccaggcagagcctggagtcttacctgtcagactacgaggaggagcccgcggaagcgctggccctggaagccgccgtcctggaggccacctgaagaaagcacgtgcagccctccctccgggccgggtcacacctgttgcagaactgagccactctttgaaggactcgccccacctggggcttcttttttttttttttttttaattatcatcatctttttttttttttttactgacttgtctgacgtctgtgtgcagtcagccgtcggcaggttgatgggtccagagtctgtggtgacagataatttgtaaacaccaggtgtttccatcagaactgacatgcgggtccttcagtgaagcttctagtgcctctgtcagtggaagagacagcaagaccaagttcttccagcgtctgtggccttctcctctaggtttcacctgcatgtcaggtatcatttccaattttcctttgtttcagttctggagcttctgagccaggcctttctcaaccacctctcctgctgctgaaacggggatggcgttttccctctccctgtcctggactggggtcagactgtgccccgaggagaagcagcagagaataggactacgtcatgggcatttcgtccacttatttgggtattttgggggccacagaacaatcctgactatcctagactcctcagagacctcagaggcagctgtgaatgtccctatgttgccgggagttcctgtttgaaatatttgaagcatagaggatgccacaagctgactttcttcatctaccttggtgatcttgaagcaaagaacagaactgatgctcaggccaggctcacctgtagccttacgccgcaagcatacgtgaggcgccagctctgtcgctgaaggagcgcttactcagaggagcggtcggccccctcttggtgttaaggtctcttagttaacctggctttttggtgcaggtgtgatctttgaagctcaggcaggtccctgatgccatcctaaggtgaggacaggaacctcacccaccatcttcttagcgtgtccctgatgactctgtcctctgttagatggtcgttgtgcttctgagtaaaagtacaacccgactccgttctctccccttcctgcagcagagctgggtccttccctggtggccgagtctctcttgccttagcttctttggtcaaagttggagaaaagcttcctgctattagtgctgttacagaacttgacggtttgtggatgtgagtgtgaatgtccctgtgttcttgggataacaagagcctttatgccaattatgcacttaactctgtgtagcctggtaatgtttatctgttcatttgataatgctgattttagtgtgctgcccccctccccccgttaatgtgtgttgatggtgaagtccttttgataatgctgattttggtgtgctgcctcccccttcccccccgttaatgtgtgtgttgacagtgaagtccttgggtggggccatgtgtgtgtttgtgatgttccttaagttgatgcagcttctaacctctgtgaaaacactggtcagagtggcttctccaagagctggcagctctgtgaactaaagcctgcatcatttttgttctgggattgaattctgcccatgggcatgtcttctcatagttgcttgctggtaggaaagaaatgggcgtgggtgctgccctggaagctgagcggaaagttgcctgtggttggtggaagctgatgagagcttgagctggcggtaagaaggagtctcccagggaagtgggagaggcattaaggtgatggccagggctgaggctccaccagcgtgagagggaacatgtgggaactggcccctgcccttgattcctctgcctcaaagttgggatctgaaagccatgtagggctagaagaccctgaggctgttctcccttctgttcatagtgagactcaaaaagccaagtcccagaagttctgaagggctgtgactagaagtgcccaggtccttcagggagctttaagaatgaccccacagaactcaagtttaactaggggttaggtcccagattcagacccaggagtttataaaaatgagctctacttccagttttggtttaaattacacatccaggccaggcacagtggctcacacctgtaatcccagcactttgggaggccagtgcgggcggatcatgaggtcaggagtttgagaccagcctggccaatgtggtgaaaccctgtctcttccaaaaatacaaaaattagctgggcgtggtggcacacgcctgtaatcccagctacttgggaggctgaggcaggagaatcgcttgaacctgggaggcagaggttgcagtgagccgagattgcgccaccgcactccagcctgggtgacagagtgagactccgtctcaaaaaacaaaaaggtgacacatccagctctttctccaggtcactgcgctggaggacagatgtgccgtcttgtcctgcctgtttcacatcagcataggatcaaaggatgacaatgctgacagcttctgaagccgaactcaacagtctcataggctcctcacttgtcacttatttttccctagctccctcaaccgcaccccatccctttagatcgtgcgtctgttttagtgactctgacacgatgccgtcctcaccttccaaatacccagttatttattcaagaggggggaagtgggtagaggatgggatgttttggaagcactttgcaagttaccactatctgaaaatcccctgctgttgcggggagaagctttgaatgcactgaagagaattccttctaaatgaaggcaggtgatagtgttctttctgtaagtaaagggaaagaaaaaaaacatagtttgcttaccaggtggagacaagattcaagacatagcagaagagtggaagacaaatattttccacttaaatgaggctgtttttgacgttctctgccaaggatttagagctttcgttgaactaacataaaaggagtgcgagtcttagtagagatgttccgtgtgtgccgcccgtgctctgaactgcgtttccacctgctgtggtgcttgtgcagcctggcagttcattgtcatctttaataaactaaggaaataaaattctgtctttcgtca

SEQ ID NO: 14026 - DNA, 4406 bp, Homo sapiens
tttacttgaaactttctaaagggaaagtttccatttctctctgttgaggtcatatcagatcccttatattgtgacactggaaggacaagaagacctctttctgccctgtttattcctttttgtttttaaacataacaggctttcgggtcacctccagcagctcccagttcagctcacgtgattcggcacagctctctgactctggctctgctgatgaggttgatgaatttgaaatccaagatgctgacatcagaaggaacacagcctcaagcagcaaatccttcgtttcctcccagtccttctcccactgcttcctgcactccacgtctgctgaggcggtggccatggggctcctgaagcagtttgaggggatgcagcttccagccgcctcggagctggagtggcttgtcccggagcatgatgcccctcagaagctcctgcccattcctgactcactgcccatctcaccggatgacgggcagcacgctgacatctacaagctgcggattcgtgttcgtggcaacttggagtgggccccgccccggcctcagataatttttaatgttcatccagccccaacgaggaaaattgccgtggccaagcagaattaccgctgtgcaggatgtggcatccggactgaccctgattacatcaagcgactgcggtactgtgagtacctgggcaagtacttctgccagtgctgccacgagaatgcccagatggccatccccagccgggttctgcgcaagtgggacttcagcaagtactacgtcagcaacttctccaaggacctgctcattaagatctggaatgatcctctcttcaacgtgcaggacataaacagtgccctctataggaaggtcaagctgctcaatcaagtccggctgctgcgggtccagctgtgtcacatgaagaacatgttcaagacttgccgactggccaaggagcttctggattcctttgacacagtcccaggccacctgacagaggacctccacctgtactcactgaatgacctgactgcgaccaggaagggggagctggggccccggcttgctgagctcaccagggcaggggctacccatgtggagagatgcatgctctgccaagccaaaggcttcatctgtgagttctgtcagaatgaggatgacatcatctttccctttgagctccataagtgccggacctgtgaagagtgtaaagcgtgttaccataaagcctgcttcaagtctggaagctgtccgcgctgcgagcggctgcaggcccggcgggaggcactggccaggcagagcctggagtcttacctgtcagactacgaggaggagcccgcggaagcgctggccctggaagccgccgtcctggaggccacctgaagaaagcacgtgcagccctccctccgggccgggtcacacctgttgcagaactgagccactctttgaaggactcgccccacctggggcttcttttttttttttttttttaattatcatcatctttttttttttttttactgacttgtctgacgtctgtgtgcagtcagccgtcggcaggttgatgggtccagagtctgtggtgacagataatttgtaaacaccaggtgtttccatcagaactgacatgcgggtccttcagtgaagcttctagtgcctctgtcagtggaagagacagcaagaccaagttcttccagcgtctgtggccttctcctctaggtttcacctgcatgtcaggtatcatttccaattttcctttgtttcagttctggagcttctgagccaggcctttctcaaccacctctcctgctgctgaaacggggatggcgttttccctctccctgtcctggactggggtcagactgtgccccgaggagaagcagcagagaataggactacgtcatgggcatttcgtccacttatttgggtattttgggggccacagaacaatcctgactatcctagactcctcagagacctcagaggcagctgtgaatgtccctatgttgccgggagttcctgtttgaaatatttgaagcatagaggatgccacaagctgactttcttcatctaccttggtgatcttgaagcaaagaacagaactgatgctcaggccaggctcacctgtagccttacgccgcaagcatacgtgaggcgccagctctgtcgctgaaggagcgcttactcagaggagcggtcggccccctcttggtgttaaggtctcttagttaacctggctttttggtgcaggtgtgatctttgaagctcaggcaggtccctgatgccatcctaaggtgaggacaggaacctcacccaccatcttcttagcgtgtccctgatgactctgtcctctgttagatggtcgttgtgcttctgagtaaaagtacaacccgactccgttctctccccttcctgcagcagagctgggtccttccctggtggccgagtctctcttgccttagcttctttggtcaaagttggagaaaagcttcctgctattagtgctgttacagaacttgacggtttgtggatgtgagtgtgaatgtccctgtgttcttgggataacaagagcctttatgccaattatgcacttaactctgtgtagcctggtaatgtttatctgttcatttgataatgctgattttagtgtgctgcccccctccccccgttaatgtgtgttgatggtgaagtccttttgataatgctgattttggtgtgctgcctcccccttcccccccgttaatgtgtgtgttgacagtgaagtccttgggtggggccatgtgtgtgtttgtgatgttccttaagttgatgcagcttctaacctctgtgaaaacactggtcagagtggcttctccaagagctggcagctctgtgaactaaagcctgcatcatttttgttctgggattgaattctgcccatgggcatgtcttctcatagttgcttgctggtaggaaagaaatgggcgtgggtgctgccctggaagctgagcggaaagttgcctgtggttggtggaagctgatgagagcttgagctggcggtaagaaggagtctcccagggaagtgggagaggcattaaggtgatggccagggctgaggctccaccagcgtgagagggaacatgtgggaactggcccctgcccttgattcctctgcctcaaagttgggatctgaaagccatgtagggctagaagaccctgaggctgttctcccttctgttcatagtgagactcaaaaagccaagtcccagaagttctgaagggctgtgactagaagtgcccaggtccttcagggagctttaagaatgaccccacagaactcaagtttaactaggggttaggtcccagattcagacccaggagtttataaaaatgagctctacttccagttttggtttaaattacacatccaggccaggcacagtggctcacacctgtaatcccagcactttgggaggccagtgcgggcggatcatgaggtcaggagtttgagaccagcctggccaatgtggtgaaaccctgtctcttccaaaaatacaaaaattagctgggcgtggtggcacacgcctgtaatcccagctacttgggaggctgaggcaggagaatcgcttgaacctgggaggcagaggttgcagtgagccgagattgcgccaccgcactccagcctgggtgacagagtgagactccgtctcaaaaaacaaaaaggtgacacatccagctctttctccaggtcactgcgctggaggacagatgtgccgtcttgtcctgcctgtttcacatcagcataggatcaaaggatgacaatgctgacagcttctgaagccgaactcaacagtctcataggctcctcacttgtcacttatttttccctagctccctcaaccgcaccccatccctttagatcgtgcgtctgttttagtgactctgacacgatgccgtcctcaccttccaaatacccagttatttattcaagaggggggaagtgggtagaggatgggatgttttggaagcactttgcaagttaccactatctgaaaatcccctgctgttgcggggagaagctttgaatgcactgaagagaattccttctaaatgaaggcaggtgatagtgttctttctgtaagtaaagggaaagaaaaaaaacatagtttgcttaccaggtggagacaagattcaagacatagcagaagagtggaagacaaatattttccacttaaatgaggctgtttttgacgttctctgccaaggatttagagctttcgttgaactaacataaaaggagtgcgagtcttagtagagatgttccgtgtgtgccgcccgtgctctgaactgcgtttccacctgctgtggtgcttgtgcagcctggcagttcattgtcatctttaataaactaaggaaataaaattctgtctttcgtca

SEQ ID NO: 14027 - DNA, 3062 bp, Homo sapiens
  misc_feature (15)..(15): n is a, c, g, or t
  misc_feature (30)..(30): n is a, c, g, or t
  misc_feature (38)..(38): n is a, c, g, or t
  misc_feature (58)..(58): n is a, c, g, or t
  misc_feature (65)..(65): n is a, c, g, or t
  misc_feature (68)..(68): n is a, c, g, or t
  misc_feature (89)..(89): n is a, c, g, or t
  misc_feature (97)..(97): n is a, c, g, or t
  misc_feature (102)..(102): n is a, c, g, or t
  misc_feature (132)..(132): n is a, c, g, or t
tcccgccgggattcntcgtggtggtcaaanaatttttnaatcctctctgggtgagtanttgtggnaantgccctaaattccaaatctangtattaangaatntatattaagtttgcgtgaggagaaaacctntgtgaagcgagggtaaattttttttttttttttactgacttgtctgacgtctgtgtgcagtcagccgtcggcaggttgatgggtccagagtctgtggtgacagataatttgtaaacaccaggtgtttccatcagaactgacatgcgggtccttcagtgaagcttctagtgcctctgtcagtggaagagacagcaagaccaagttcttccagcgtctgtggccttctcctctaggtttcacctgcatgtcaggtatcatttccaattttcctttgtttcagttctggagcttctgagccaggcctttctcaaccacctctcctgctgctgaaacggggatggcgttttccctctccctgtcctggactggggtcagactgtgccccgaggagaagcagcagagaataggactacgtcatgggcatttcgtccacttatttgggtattttgggggccacagaacaatcctgactatcctagactcctcagagacctcagaggcagctgtgaatgtccctatgttgccgggagttcctgtttgaaatatttgaagcatagaggatgccacaagctgactttcttcatctaccttggtgatcttgaagcaaagaacagaactgatgctcaggccaggctcacctgtagccttacgccgcaagcatacgtgaggcgccagctctgtcgctgaaggagcgcttactcagaggagcggtcggccccctcttggtgttaaggtctcttagttaacctggctttttggtgcaggtgtgatctttgaagctcaggcaggtccctgatgccatcctaaggtgaggacaggaacctcacccaccatcttcttagcgtgtccctgatgactctgtcctctgttagatggtcgttgtgcttctgagtaaaagtacaacccgactccgttctctccccttcctgcagcagagctgggtccttccctggtggccgagtctctcttgccttagcttctttggtcaaagttggagaaaagcttcctgctattagtgctgttacagaacttgacggtttgtggatgtgagtgtgaatgtccctgtgttcttgggataacaagagcctttatgccaattatgcacttaactctgtgtagcctggtaatgtttatctgttcatttgataatgctgattttagtgtgctgcccccctccccccgttaatgtgtgttgatggtgaagtccttttgataatgctgattttggtgtgctgcctcccccttcccccccgttaatgtgtgtgttgacagtgaagtccttgggtggggccatgtgtgtgtttgtgatgttccttaagttgatgcagcttctaacctctgtgaaaacactggtcagagtggcttctccaagagctggcagctctgtgaactaaagcctgcatcatttttgttctgggattgaattctgcccatgggcatgtcttctcatagttgcttgctggtaggaaagaaatgggcgtgggtgctgccctggaagctgagcggaaagttgcctgtggttggtggaagctgatgagagcttgagctggcggtaagaaggagtctcccagggaagtgggagaggcattaaggtgatggccagggctgaggctccaccagcgtgagagggaacatgtgggaactggcccctgcccttgattcctctgcctcaaagttgggatctgaaagccatgtagggctagaagaccctgaggctgttctcccttctgttcatagtgagactcaaaaagccaagtcccagaagttctgaagggctgtgactagaagtgcccaggtccttcagggagctttaagaatgaccccacagaactcaagtttaactaggggttaggtcccagattcagacccaggagtttataaaaatgagctctacttccagttttggtttaaattacacatccaggccaggcacagtggctcacacctgtaatcccagcactttgggaggccagtgcgggcggatcatgaggtcaggagtttgagaccagcctggccaatgtggtgaaaccctgtctcttccaaaaatacaaaaattagctgggcgtggtggcacacgcctgtaatcccagctacttgggaggctgaggcaggagaatcgcttgaacctgggaggcagaggttgcagtgagccgagattgcgccaccgcactccagcctgggtgacagagtgagactccgtctcaaaaaacaaaaaggtgacacatccagctctttctccaggtcactgcgctggaggacagatgtgccgtcttgtcctgcctgtttcacatcagcataggatcaaaggatgacaatgctgacagcttctgaagccgaactcaacagtctcataggctcctcacttgtcacttatttttccctagctccctcaaccgcaccccatccctttagatcgtgcgtctgttttagtgactctgacacgatgccgtcctcaccttccaaatacccagttatttattcaagaggggggaagtgggtagaggatgggatgttttggaagcactttgcaagttaccactatctgaaaatcccctgctgttgcggggagaagctttgaatgcactgaagagaattccttctaaatgaaggcaggtgatagtgttctttctgtaagtaaagggaaagaaaaaaaacatagtttgcttaccaggtggagacaagattcaagacatagcagaagagtggaagacaaatattttccacttaaatgaggctgtttttgacgttctctgccaaggatttagagctttcgttgaactaacataaaaggagtgcgagtcttagtagagatgttccgtgtgtgccgcccgtgctctgaactgcgtttccacctgctgtggtgcttgtgcagcctggcagttcattgtcatctttaataaactaaggaaataaaattctgtctttcgtca

SEQ ID NO: 14028 - DNA, 4017 bp, Homo sapiens
ggccgggatagaagccgcagcccaggcggcggtccctcccgctgtcgccgcccgggtgtagcgcatcacccggagcccaccggccgcaggtgcctcctccggccccagggggccccgggagccctgaagggcgaagcggcagggacgcctctcttgggcgaagaggcggcctcaccgccccggatgcggccggagggcgcgggaatggagctcggaggcggcgaggagcgcctgcctgaggagagcaggagggagcactggcagttgctgggtaatttgaagacgacggtggagggtttggtatcaaccaacagccccaacgtctggtctaagtatggtggcttggagcggctttgcagggacatgcagagcatcctctatcacgggcttatccgtgaccaggcgtgccgccgccagacggattactggcagttcgtgaaagacatccggtggctcagtccccactcagcccttcacgtggagaagttcatcagcgtgcacgagaacgaccagagcagtgctgatggtgccagtgaacgtgctgttgccgagctgtggctgcagcacagcctgcagtaccactgcctctcagcccagctccggcccctgctcggggatagacagtatatcagaaaattctacacagatgctgccttcctgctaagtgacgctcatgtcacggccatgctgcagtgcctggaagcagtggaacagaacaacccccgcctcctggctcagatcgatgcgtccatgtttgccagaaagcacgagagcccgctcctggtgacaaagagccagagcctgacagccctgcccagttccacatacacccctccaaacagctatgctcagcattcctactttgggtccttctctagcctccaccaatccgtgcccaacaatggctcagagagaagatctacttcctttccactctctggccctccccggaaacctcaagaaagcagagggcacgtctcaccagcagaggatcaaaccatccaagcccccccagtttcagtctctgcactagccagggattcccctttgaccccaaatgaaatgagctccagtactctgaccagccccatagaggcatcctgggtcagcagccagaatgattccccaggtgatgccagtgaggggcctgagtacctggccattggcaacttggacccccgaggccggactgccagctgtcagagtcacagcagcaatgccgagagcagcagttccaatttgttctcctccagcagctcccagaagccagattctgctgcctcttccttaggggaccaggaaggaggtggggagagccagctgtccagtgtcctccgcaggtccagcttctcagaggggcagacactcactgtcaccagtggggcaaagaaaagccacattcgctcccattcggataccagcattgcctccaggggagctccagaaggtggtcggtacctgtgctcaggggaaggcatgttccgaagaccatcagaaggacagtccctcatcagctacctctctgagcaagacttcggcagctgtgccgacctggaaaaggagaatgcccacttcagcatctcagagtccttaattgctgccatcgagctaatgaagtgcaacatgatgagccagtgcctagaggaggaggaagtggaagaggaagacagtgatagagagatccaggagctgaagcagaagatccgccttcggcgccagcaaatccgcaccaagaacctgctccccatgtaccaggaggctgagcacggaagctttcgggtcacctccagcagctcccagttcagctcacgtgattcggcacagctctctgactctggctctgctgatgaggttgatgaatttgaaatccaagatgctgacatcagaaggaacacagcctcaagcagcaaatccttcgtttcctcccagtccttctcccactgcttcctgcactccacgtctgctgaggcggtggccatggggctcctgaagcagtttgaggggatgcagcttccagccgcctcggagctggagtggcttgtcccggagcatgatgcccctcagaagctcctgcccattcctgactcactgcccatctcaccggatgacgggcagcacgctgacatctacaagctgcggattcgtgttcgtggcaacttggagtgggccccgccccggcctcagataatttttaatgttcatccagccccaacgaggaaaattgccgtggccaagcagaattaccgctgtgcaggatgtggcatccggactgaccctgattacatcaagcgactgcggtactgtgagtacctgggcaagtacttctgccagtgctgccacgagaatgcccagatggccatccccagccgggttctgcgcaagtgggacttcagcaagtactacgtcagcaacttctccaaggacctgctcattaagatctggaatgatcctctcttcaacgtgcaggacataaacagtgccctctataggaaggtcaagctgctcaatcaagtccggctgctgcgggtccagctgtgtcacatgaagaacatgttcaagacttgccgactggccaaggagcttctggattcctttgacacagtcccaggccacctgacagaggacctccacctgtactcactgaatgacctgactgcgaccaggaagggggagctggggccccggcttgctgagctcaccagggcaggggctacccatgtggagagatgcatgctctgccaagccaaaggcttcatctgtgagttctgtcagaatgaggatgacatcatctttccctttgagctccataagtgccggacctgtgaagagtgtaaagcgtgttaccataaagcctgcttcaagtctggaagctgtccgcgctgcgagcggctgcaggcccggcgggaggcactggccaggcagagcctggagtcttacctgtcagactacgaggaggagcccgcggaagcgctggccctggaagccgccgtcctggaggccacctgaagaaagcacgtgcagccctccctccgggccgggtcacacctgttgcagaactgagccactctttgaaggactcgccccacctggggcttcttttttttttttttttttaattatcatcatctttttttttttttttactgacttgtctgacgtctgtgtgcagtcagccgtcggcaggttgatgggtccagagtctgtggtgacagataatttgtaaacaccaggtgtttccatcagaactgacatgcgggtccttcagtgaagcttctagtgcctctgtcagtggaagagacagcaagaccaagttcttccagcgtctgtggccttctcctctaggtttcacctgcatgtcaggtatcatttccaattttcctttgtttcagttctggagcttctgagccaggcctttctcaaccacctctcctgctgctgaaacggggatggcgttttccctctccctgtcctggactggggtcagactgtgccccgaggagaagcagcagagaataggactacgtcatgggcatttcgtccacttatttgggtattttgggggccacagaacaatcctgactatcctagactcctcagagacctcagaggcagctgtgaatgtccctatgttgccgggagttcctgtttgaaatatttgaagcatagaggatgccacaagctgactttcttcatctaccttggtgatcttgaagcaaagaacagaactgatgctcaggccaggctcacctgtagccttacgccgcaagcatacgtgaggcgccagctctgtcgctgaaggagcgcttactcagaggagcggtcggccccctcttggtgttaaggtctcttagttaacctggctttttggtgcaggtgtgatctttgaagctcaggcaggtccctgatgccatcctaaggtgaggacaggaacctcacccaccatcttcttagcgtgtccctgatgactctgtcctctgttagatggtcgttgtgcttctgagtaaaagtacaacccga

SEQ ID NO: 14029 - DNA, 2126 bp, Homo sapiens
ggccgggatagaagccgcagcccaggcggcggtccctcccgctgtcgccgcccgggtgtagcgcatcacccggagcccaccggccgcaggtgcctcctccggccccagggggccccgggagccctgaagggcgaagcggcagggacgcctctcttgggcgaagaggcggcctcaccgccccggatgcggccggagggcgcgggaatggagctcggaggcggcgaggagcgcctgcctgaggagagcaggagggagcactggcagttgctgggtaatttgaagacgacggtggagggtttggtatcaaccaacagccccaacgtctggtctaagtatggtggcttggagcggctttgcagggacatgcagagcatcctctatcacgggcttatccgtgaccaggcgtgccgccgccagacggattactggcagttcgtgaaagacatccggtggctcagtccccactcagcccttcacgtggagaagttcatcagcgtgcacgagaacgaccagagcagtgctgatggtgccagtgaacgtgctgttgccgagctgtggctgcagcacagcctgcagtaccactgcctctcagcccagctccggcccctgctcggggatagacagtatatcagaaaattctacacagatgctgccttcctgctaagtgacgctcatgtcacggccatgctgcagtgcctggaagcagtggaacagaacaacccccgcctcctggctcagatcgatgcgtccatgtttgccagaaagcacgagagcccgctcctggtgacaaagagccagagcctgacagccctgcccagttccacatacacccctccaaacagctatgctcagcattcctactttgggtccttctctagcctccaccaatccgtgcccaacaatggctcagagagaagatctacttcctttccactctctggccctccccggaaacctcaagaaagcagagggcacgtctcaccagcagaggatcaaaccatccaagcccccccagtttcagtctctgcactagccagggattcccctttgaccccaaatgaaatgagctccagtactctgaccagccccatagaggcatcctgggtcagcagccagaatgattccccaggtgatgccagtgaggggcctgagtacctggccattggcaacttggacccccgaggccggactgccagctgtcagagtcacagcagcaatgccgagagcagcagttccaatttgttctcctccagcagctcccagaagccagattctgctgcctcttccttaggggaccaggaaggaggtggggagagccagctgtccagtgtcctccgcaggtccagcttctcagaggggcagacactcactgtcaccagtggggcaaagaaaagccacattcgctcccattcggataccagcattgcctccaggggagctccagaaggtggtcggtacctgtgctcaggggaaggcatgttccgaagaccatcagaaggacagtccctcatcagctacctctctgagcaagacttcggcagctgtgccgacctggaaaaggagaatgcccacttcagcatctcagagtccttaattgctgccatcgagctaatgaagtgcaacatgatgagccagtgcctagaggaggaggaagtggaagaggaagacagtgatagagagatccaggagctgaagcagaagatccgccttcggcgccagcaaatccgcaccaagaacctgctccccatgtaccaggaggctgagcacggaagtcagtggagcctgtggatgcttctgttcccacattttcccaacttcagcataaggcctggtgcccaaaccagtggttcctctgctgtcagatgtttctatgtagtcctactttttttctatcatgctaggaatactcatcctagagtcgctccgtttcctgcatcagaaatacctgccttccaggccaggcagagtggctcacgcctggaatcccagcactttgggaggccgaggcgggtggatcacttgaggccaggagtttgagacctgcctggccaacatggtgaaaccccagctctaaatatatatatgtatatatataaataaaggaatagctcccttcccaaatagct

SEQ ID NO: 14030 - DNA, 247 bp, Homo sapiens
agcacctacccaaggatgcaagttcctaaacgccatttcatgtttgggagcaaatggcaagttttgattccaggaacatatggtatagaatattagtttatttcctgctggaatactaagggcccccttttatcatcattattacacagatggtagcgaaggatctaacctgactcacatatcaaagaacggactgtcagtgtcactggcctcgatgttctcaggtagcctactttgcaagcgtgga

SEQ ID NO: 14031 - DNA, 490 bp, Homo sapiens
aagccagttgtcagtcagagtgtgggacaatctgaagccaggtgtcgagtcagagcataggacagtctggagccagttgtcagagcgtaggacagtctgctctgggtgcagcatgcaaggcttctagaaccccagggtttaaaggccctgggcttcccacactggattcctcttctcacatctccctcccactcctgcccccctctctttcttttcagctgctgcgggtccagctgtgtcacatgaagaacatgttcaagacttgccgactggccaaggagtaagtccttttggagctagagccctctggccacgttgctgtctccgaaagggacacatccccgcgcttggctcttgttatgtaacgaaggagagtagagagattttgcagaactgtaaagtggtaaacaggaggccacagcagtaactgtatctgtgtccttctctctggaaggggatctgtggtcattccatccaggacaggccacct

SEQ ID NO: 14032 - DNA, 383 bp, Homo sapiens
cttgtgatatttggggggagcccccaccacaaaaataatttctctctctgctaggtgatttcttccattttattattattttctttttatggtgatgttgaattgaggagagatgttcctgctacatttattaaaagttaaaagaaaatcccagcaccttgggaggccaagacatgtggatcacttgaggaaggccaggagttcgagaccagcctggccaacatagtgaaaccgtttctgtactaaaaatacaaaaaaaattaggctggcatggtggcgcatgcctgtagttcctagttccagctactcaggagtctgaggcacaaaaatcctttgaaccagaggaacaggtttcagtgagccaagaatgtgccacactgcac

SEQ ID NO: 14033 - DNA, 819 bp, Homo sapiens
gtcaagaaaacaaaaacaaaaacaaacacaaaaaaacctcttccatgttccagacatgacttcctatcaaaccaagatgcgctacaatcacaggagagcttcctttcccttgggcctgcagttttgctgggcccggaagacaagtcaagtttatctcaagcagtcccgctgacacagggttaaatgtttccatgttaccatgtgactaattcaaactcattctaattcctgctgttgctgcttttgatcggttacaaattttcaaggctgtgttaacagcacctcgtggaatcctttttagactcaacttggcttgagttattagtgaaggtttcatcaataacttctaattcaaacatgctaactaaatgactcaaactagcttttctggcctaacgtggatacaatatctcattagtggaaagcctgaaaaatttcaattcagtaagaggggataatccaatttgtactctcttaagaaaattgcttctcaaaagtcacggtggaataatgacctggaatgaagaaaacagaaagaaagttgaagaggcttggaaggaaatactaattgaactgtgaaggcttttaattcaaagctattgtttggcattcatttctgtaaatgtattaactaatatgctgatacctgactcataaacagacaagtacttgtcatgccactgtctttttttttttttttttttgagacagagtctcactctagcctcagtgacgtgagtgaaattccatctcaaaaataaaaataagaaaactccaatgaactaaatgaactaaggaacaatttcctgttctagccac

SEQ ID NO: 14034 - DNA, 542 bp, Homo sapiens
tactcgggaggctgaggcaggagaatcgcttgaacctgggaggtggaggttgcagtgagctgagacagtgccactgcactctagcctcagtgacgtgagtgaaattccatctcaaaaataaaaataagaaaactccaatgaactaaatgaactaaggaacaatttcctgttctagccacaaaaaaaagaaagaaaatacataggttcctgaatttagaatattaaaatatgctgaatttaaatgacatctgattttttacccactagctaagagctttctagggggaaaatgctgaatatgtggaaaagtttaattactctatgaattagaagaaattttcttgtaataagaccattcatggaaatggtgcctcaagggccctgtgaactctacaacccaagatgtaaaatttatatctcaccatcattttctctcccaagacagactgtccctgaagtgttgtctactgttgtggaggcaatcactgtcattcccaggcactgagcctcgaaactgcagagtcaaaggtgacctccttttc

SEQ ID NO: 14035 - DNA, 279 bp, Homo sapiens
gtcttggggggcctgacacagcctgactcacaggccaaccaccagctcagatctaacctggtgaccaggtacctctgggaactgggttaaagctagttataaaagacaggaactgtgtagaagctggattaattaacgcttagatctctgtgtcctgacagtggggaggttaaaaatagcaaaattctcattctccatatggggaatttaataggtgatgcttgaaaaacagttctaagtaaacaatataagcatgttacttggaaatatgaacataaa

SEQ ID NO: 14036 - DNA, 343 bp, Homo sapiens
gagatttcatctcaaaaaaaaaaaaagaaagcttgtaaagcgattccctagaattaaaccatgtagtgcgtatatattaacataagtattttgaaaaaaggctgaaatatctctgtgtgagcagatagcccaaattgaatgctaacaaccgtatagcaaggagacatgttgaaagagatcatataacttaattataaactattaagtgtagctctttaatttaaaacttgtaaccagccttcctactttccttaaataaatacaccccatcatcaagaaacttgaacacccttggtttttctctctttactttcactgggttaaggaagttctagttttacct

SEQ ID NO: 14037 - DNA, 400 bp, Homo sapiens
aaaatatgatatgttccatggtgcctttgaggatccaccaaatacagtactccaagtgtgtgtgagtggggtcttcataaacttagtccaccgccaagctaattaagttttctgcataagataactatttaggggcagtcactctgtgattctccccatgctcatgttaaataaatttgtatgccttttctcttattaaaaaactgtttagtcaacttcacaaactttccatatgtagatatatatatatatatatatatatatatacacacacacatgcacatatatatacacatatatagatatatacacacatatatatacacacacatatatgtacacacacacacatatatatataatatacacacacacacacatatatatatgtagtacgacc

SEQ ID NO: 14038 - DNA, 224 bp, Homo sapiens
aaataacttgggtaattgccatttggccctgtgaaacttaatgttagagctaaactttctgcctcctggaaacatgctaggaaaatttcattccttagattttgctaatgttactgtttttatgatagtaagtatgaggaagtgaaataaaacttctctgtcctttatgttgtgcttgggatccatgtggaagttctgaaatgtaccagctccttagtggggaa

SEQ ID NO: 14039 - DNA, 504 bp, Homo sapiens
ggggtgtttcatccctagcaagtgcctcctgtggacttttaagatgaaaaacttctgcctaactcttcaggaagcctagcgtagttgtaaaaatacttcagaaagcacttctggttttagctcagacacgtagagtttgaaagttatcctatccttaccacaagaaaaagctgggcaaactcaaaagcattggcctttcttggtcccattagagagctgagtgtgcaggtcaaactgccatcccaaaatctagagagaggtgagtccagagagtgagcaagatctaattgcctggagcagaagccacgggagccatagctagtaggaaaacttaaatggtaattttgatgaactgctggaggttgagtgtggactagcatgggagggagcaactccccctcacccccaacgctttcctgggttttaccctacttggttctattggtgaagagctgaggaagaccctctggtgactctggcaggggaaagggagaatcatctttg

SEQ ID NO: 14040 - DNA, 485 bp, Homo sapiens
ctgtgtgtcagagtcctttttggaagcaatgcctatcctcctatgtgagtaatgcatgtaaagcagcccagccctaaaatggtgctggccagggagctgatggccatcgacaggagacctctattaccagttaggccttgggggcttcagggaatatccaggcctctaagctataaagaaaaacaggaccttgaatgaagccagaggactgcttctctctctgtgaagcgcctcttccatttaaacatccaacacatgagattcaggtatgggaaaccacagaggaagagcaggtaataggtaaaataatatttatttcttcttccagtgctttctggcttcaaaatttcttctattcataggtagagttgcaatgaagctggtaaaaatgagcccccatgggaaaatccaataggaagtattgccaagctatgcttcaaaatactatctgtaaaatttctcaaaactctagagtttgagaccag

SEQ ID NO: 14041 - DNA, 331 bp, Homo sapiens
acagattgacacccagattgtgttacataatagaaatgtgtcctaatttgttgtgaattttgtgtgaaaatacttcctaactcatttttgtaaagtgtctttagacttgacagataatacaggcaccagtgccttgaaaatgtcactgtgaagaactgttttcttcagacttttcatctaccagaagatttactcttctaatcatgcaattgcacaatagaaaaatctgctacaggaccatgacatgaacctgggaggcggagcttgcagtgagtcgagatcacgccactgcactccagcctgggtgacagagcgagactccgtctcaaga

SEQ ID NO: 14042 - DNA, 424 bp, Homo sapiens
aagctagactcagcactcagagcctatttttgtcttgatggcacctactgaaccagctaaacctgggcttatggtttcattgccttcgcagacatagaggataggagactaagctcagtctatgaggagactccaccgagtgtctgtgcacccctccccacccctactcctgccaactccgaggaaactggactgtcacaaatgttggcactaagttgaagtggtggtgcaggtttgggggttgttattctttgacattttatagttgcaacctagcctttatgtttccatatctaaatcacactttttgggttagcccaaaagtatcttaaaatttgactatggttcaaagtaattctggccactagtaactccaggcacttgcagaagcaaatgcacatcacagtaaaagatcacacaactc

SEQ ID NO: 14043 - DNA, 814 bp, Homo sapiens
accagcacagatgttatcaggcatcttccgacctggggaaggggacctgagtgtttgcacctgttttgttatccatgggagtatctatcagcacacccatcccagggctgttagaatgaaatgaggaaatgcttgtaaggcactcagcactttcttaacacattatacatccccagtcactgactatttgttatttattaatgaagcatgtggggaggctgtgaccttgtgcttggccttcggcagtgctgctgagagagctgagcttcatctgaactggaccacatgggcttgcatctgatcagcctgggataggtggggaataggcttcggagagcatgcaggtggctgaggttgctttcaaagctccacagtatcctgcccatcccacaactccaatagccagttgaggttatggtgtctgagactcactgggcagggtagacagagtgtctgtgcccttctgtgacttgcttctattgtgtaaaactgccttgcagaaggttctttggagagccaggttctaaaagggattctttcccacctgtgaaatttggctctgtcctttgtagggctctgcagctctttttgccctgtggcatatcaactcaagatgtcaggaagttgtaaatgcagaaccagagggtaatgacatgtgttgctttcaaaacacacagctaagctctatttttaaaacccccaattttaagtgatgtttttcagtgtgtgtactcttaagcaagagtgtaaaaatcctctttgtaaccaagcattgagcactgggaaatttcttggatgctttttggagattaat

SEQ ID NO: 14044 - DNA, 1524 bp, Homo sapiens
gatatgtaaagtttttgtcaacctcccaatatctagcatacttttcagctaaacccagtacgcagcgtccattcttcctatttcaatctataccatataactcagaataattttcataatatttacttttcccatgttacacatagtacttttatattcagaatactccagtgatgtctctcttccttaagggtgacttctatattcatgagcctagcatacagggctctctatagtagacctatttctgaaacgtcatctctagtctctagagtagatctctctcctaaccccacaaattgtctaaacaataaccttcctttgaagccaaggtcaaaagacacattctttaatgggctgaaacttctatatttgtttcttaggcgttgattcctaaatcaacatgagggaaactatggacagtcatttaggcactctcaaaatataagcggaccctctttattctttgttataaccctaacatgtgaactgagttcttcttacagtaattgaaaacacattttacatcttgcttccttcaacattgattctgatttcaggttactatttgcacacgttgtttttttttcccccattttactcaacctgtgtgcattattcaattttattttgacatttcctgattttggcatcactgctaattcttagtcagtccatctgttgttgggcctctgatagtgggtgtccaaccctgtgccatgtcctttcttacatgaggaactcagtgagctagtgggaagaacctcacttgctttctgatgtttgattttctacccaggctgtgcacgttcatgaaaacaattcaggagctggtgcttgagtgctgccaatttttgcattttttttaaggaaatagacacaagaatctgtgatatttcaaaactaaaaagatgctttgaagaactgttgtgttaaggacaagatttttattcttggcttttgactatgcaaaaaacatatgttctttaggatagaattaaaagataacattctaggaccttttctaagaacgtgtaatgttgtaggaagaaaacaaactttaaaaaagaaataaatttgtaatgtagtaaaatactagtctattatacagcctaaagaaactgaaaaataatggcctatatgtcatttagcctaccttcaaaatggtttatttaaggataatacatgttacatttatttggccttgttttcacaataaaaagttgtaatgataatttgttttagattatatgccatctgtttatatcgggacacagtatctttttaacacaactcattgataattttttattatcaaaatgtgtgttaatttgaaacaaatgctatcttatttcagagatacaaagcattatgttttatctacatcacatagaaatagaagaaaatatatggaacttgggagagcatatgtgtacagtaaagaaaagaaatctcatgtagtggtcagattccctcccactctaggaggctgactggtcactacaaaatgtgactaaaaaaaaa

SEQ ID NO: 14045 - DNA, 378 bp, Homo sapiens
tcttaatgttgttctgagctagagaatctaggagtggccaacccggagatttgttccttgtttgtgaggagtatctgagcccccaagcccgtctcatgggacatgggctgtacagggaactgaggccctgagttttgggttaaaaaaaggttcccaggtagaggtccttgggggaaggttaagtgaaaatgctatataaactgcatgctgtttataagtggtgatggttttcctgccccacctgggccgtgggctgtgttgttcagccgctgccactgaaccatctgtttctgtacgaaaagcagttctcctgtccagcctgccgcctctggactgttcccctgtatgtaagcccctaataaagcccacatcctgttt

SEQ ID NO: 14046 - DNA, 467 bp, Homo sapiens
tcttaatgttgttctgagctagagaatctaggagtggccaacccggagatttgttccttgtttgtgaggagtatctgagcccccaagcccgtctcatgggacatgggctgtacagggaactgaggccctgagttttgggttaaaaaaaggttcccaggtagaggtccttgggggaaggttaagtgaaaatgctatataaactgcatgctgtttataagtggtgatggttttcctgccccacctgggccgtgggctgtgttgttcagccgctgccactgaaccatctgtttctgtacgaaaagcagttctcctgtccagcctgccgcctctggactgttcccctgtatgtaagcccctaataaagcccacatcctgtttgctggctctgtgggtctcttctcaggccccttgaacctggtgcctcccctactgaggttaataggggtttggcacaacacagccataga

SEQ ID NO: 14047 - DNA, 2037 bp, Homo sapiens
  misc_feature (1837)..(1837): n is a, c, g, or t
attgtgtagctatacctagcaggaataaatactaagtctgtgtcagtattcttccccttggtttcagttatctattgctgtgtaaaaaaccatcccaactttgttgcttgaagcacccaggattcattgtttctcataagaattttctgctggtctcatgcggacttgctcgtgtcctagctgggatggctggattgttcatcttgcagttggtgctggacaatggtgggctctctctcagtggctttcatgcacaaggaggctcacacaggcttcttgatacagcagcctcagagcatcagaagggcaagagtggatgctgtctggtctttgaagtctcactcagaagtcacctgttgtcacttctgtgttctattagtgcaactgagtcctgaggcttgcccaggtttgcactgaggaaatcgattccacctcttgctgagaggagcagcaaagaatttatcgccacttttaacccactacaacctcaatttcaactgattgtctctaatgacttcttctgtaagcatccaaaacatcccttgattgaaactatctcaaggtgacctatcttccttcaacaatattttgtggttcgaaactatgtcattaagagagtgactttgaaaacctatataaggacccagatgtgaggtgactgcctagtctgaggaataatgactttaagttatatttgtagagaggtggtaaagccagcgaagcagacccatggagaaatgcaaatctgtcatcagccttgaaggatgggacaaatttggtggtgccctggttaaggaggaacagcactgtgtcttgctggcaaagcctaggagactaatttgtaaaattaacatttctttgagaatatgctttgttactagaaagcagtttgatcaatgtactcttgtataagcaactagattaaggaacaaaagagacaccttaaagaaacacagtgagccttcagaggaggagagccttcatatcactgtaattagcaaacgtctcttatgcatcagttgggctgccatgaggctgtaattaccaggtcttagagtttgcctctacctacatcattgtataaaatgaaaaccagatgaaacaatcaaatgttctatgcaggagaaaaatggatgcaaaacaaggcttgcaaaactcttaagtgctctatattgctaaaggttaactgcattgcctgacataaggaaaaaccaggaaactactctaaatgaggagtagcatcaagaaaccacaaaagaaagagctcgacataataaatacattattaaaatgcatagtatacagtgtaaaaggcagtctgcaatttttgaattatgtgtcctataaaagtacatcaggtaaatatgtgtaattggagtccctggtgctctggcaaagctcattttgctgaccttcagaaaactacactgacttttttaggagtattattttgatttgaaaaagctcttctttgccagtaaggaaaagtacagtatttacagaaaatgagacaaccacagtgtacttaaagtgtatgtagtgcatgcatgttctctgcaagaaaattaaaagtctctgtttttcattcagaagtaattagagaatgtcttttgtggctgctggaaaacagatgcaagactcctagaagtctgaagtgtaaaattaaagtagaatgtatcattgggtgtcctaatcttcaggtaatggcccaggcctgggaaaagtgaacagactttgtgttcccagttgtaaatgtgctccatggagtctatgatcatgctcactcaagatgtgacaaagcataaagagtcattttggtccagaaatccctgttggnacattaaactgggtgctgatattgactatgatacctggaaaaaaggcctcccatcatttcttaaagaagataacagttgtaccaggcacaacggttcactcctgtaatcccagcacttcagaaagccgaggcgggcggatcatttgagatcaggaggtcgagaccagcctggccgacacagtgaaaccccgtctttactt

SEQ ID NO: 14048 - DNA, 494 bp, Homo sapiens
ttacattcccatggcttcttataatcttttaccaaaaacatattttactttctttacacaccttgcatgtcttttttatataaacatcacacgcataacacatatataactacacagatagacaaaacgtgcagtagttgtaagatttttcatttgccaatctgctaattggattactggcctcagggtggagctcttcacgcaacagggccaggaaaacatgcagtttctatgacttaataagcagatatagctggaagacaagaatagattttgagagggatctatcatagcacttttaattcttggggttctgaggaaaacagggtttttctcccaaaatagggtccttggtgacttttctgtttttcccaaagagtcccatgctctcagaagtgatcttagggcctctcatgtgtgcattaagagtggcaagacaaaatggagaaaaataactcagtcaactgtgaagagaattaaaaaaagcttctttc

SEQ ID NO: 14049 - DNA, 379 bp, Homo sapiens
agaagtgttctgtttgaatagagaaaccgtttgtttttctcagtgtgtgtgtgtgtatgtatgcgtgtgtgtatgtatctgtgtggctgtatgtacatatgtgtgtgtgcatatagagacatatatatgtatatatgtgcatatataatttatatatttatatatagtacttaagaagcaatctaatggcacatcacctttatgaaaaatttttaagaactttaaggatacaaaggaatatttaagcaaatgacaggatattacatgttcaaaaatatttgatgtcagattttctccaagtaatctatggaatctacacaaactcagtcaaaattcttatgaagatataaagatccacagacagcaaaataagtttgag

SEQ ID NO: 14050 - DNA, 485 bp, Homo sapiens
ataacattttactttaaggctaaactgctttttggatacaacaacaacaaaaatacagctatttttatcacatgagaatatggaaaagggtaatttcagtgatataggaaatgagttgtcctcattatccagtggtgagttgacttctcaataaaataccagctctacttatcttcattgttattattatattttcaaagactattccaagccaggcttcgtggctcatgcccatagtctcagtacggagcagacgaatcacttgagcccaggtgtttgagatcagcttgggcaacatggctaaatccttttctacaaataatacaaaaattagctgggcatggtggaccacacctgtagtcccatctacttggaaggctacagtgggaggatcacctgagtctgagaggttaaggctgcagtaagcagtgatcacaccactgcacacaagcctgggtgactgacactctgtttcaaaaaaaaaa

SEQ ID NO: 14051 - DNA, 547 bp, Homo sapiens
tggaagaattcagaaaaaactgctaacaatgacttccccttttgagggtacctggagacagacagggattattcaccctgaaaaactacttgaatggttaccacgtgcataaaaatgtttttaatgttttaaaaacatctgtgaaataatggtcaccataactaagttttttagcaaaaaattagaaataaatatgtttttcctttgggaaggattggtataaatttcagcccatccatactctagaatcctcttcagatattaaaatatttgaaaaattaaatgtgggccaggtgtggtggctcacacctgtaatcccagcattttgggaggccgaggtgggggcatcacttgagcccagttgttcaagacaagcctggccaacataacaaggcctcatctctacaaaaaaatagaaaaaaatagcctgtagccctagctactcaggaggtgggaggatcacatgtgcccaggagtttgaggctgtagtgagtcgtgatcgcactactgcactccagcgtgggtgacagagcaagatcctagctca

SEQ ID NO: 14052 - DNA, 443 bp, Homo sapiens
gtaccaggagtctgttttatgacttcagcctaccctggtcaccagcagattgagtgcaataaatttgggggcagtgaaaagcattttatattgtgataagtaaagatgacttcaaagccagcttgtactagtgtatctcaaaagccttgaaatatgtatttgtgttaatttagcaattcagccccaggacaaagtatgcaaagctgttacgtacaagcatgtttattataatgttatttgtgatagtcaaaaattggagataatctaaatgtgattagttaaataaattataatctacttgatggcatatcaggcagccattaaaatgacattttaggtgtgtactactacatattaaaaataatattagaatattctgtgtatagaatgattcattaaaaaatctatgcataaataaaaatttacaaagctgtccaacacaa

SEQ ID NO: 14053 - DNA, 488 bp, Homo sapiens
gaccacaaatgagtgttattatcccctcgtaaaagcaggcaaagtatatgtgctggcccatgagcccagctccgacgcacaggcttaagtgctacctgggtctcctgtcatctcgacacatgtataatctgggccctgttttcctgcttgcctaattcaagcctttttggcctgatttaggagcatggcagattctggttattaaaaagtcatgctatgactttaattgctaatactttttaaatgcaccatggaatcatggaatgtctgagctgaaaggagccttcagacgtcgtctcattcaaccccctcattttacagataggcatcccctgtcgccagaggggatgtgactgggcaaaggtcacacagcaaaccagcaaccgagcccagggatcctgattccaagattggagtgcctttttttctccaaaaaaacacataacatataataaatgaaagcagtctgtatttattcctgtaaaatt

SEQ ID NO: 14054 - DNA, 537 bp, Homo sapiens
cgggctgcaggaattcggcacgagtcaggttatatagctgtgggtcaccaagtttaaaatggcacaaattagaagacctggattcttagtttcccttttgctgctgaatagctggatgaccttggacaaatcacataatttcttaaggcctcagctttctcactttaaaaaaaaaaggataggttctgatgtctttaagttcctttcagttctggagtcttaacaagcagcctaatcagcttgtgatcatttaagaactgtagagtgccaaattaatacattttatttatttattttggttctctgtttatcttacacaataatgaatacattttaaaactgggttccagctgggcgcagtggttcatgcctgtaatcctaacactttgggagaccgaggtgggtggatcacttgagcccaggaggctgaggtgggaggattgcctgagccccagggaggtggaagcctcagtaagccgtgatcgtgccactccactccagcctgggcaacagagggagaccctgtctcaaaaaaaa

SEQ ID NO: 14055 - DNA, 535 bp, Homo sapiens
ggagtaaatgcaaagggacagcaggtatttctgaaagatatctggccgactagagacgagatccaggcagtggagcgtcagtatgtcatcccggggatgtttaaggaagtctatcagaaaatagagactgtgaatgaaagctggaatgccttagcaaccccatcagataagctgtttttctggaattccaaatctacgtatatcaaatcaccaccattctttgaaaacctgactttggatcttcagccccctaaatctatagtggatgcctatgtgctgctaaatttgggagattcggtaacaactgaccacatctccccagctggaaatattgcaagaaacagtcctgctgctcgctacttaactaacagaggatttgaaagacaattaacccaggagaatactgacttatgcctctcaccaccccttctcacctctctctcttctccgttgaagctttggggacagcttttctgccatggagaacaatgcttaggagacttagagaaatagccaggtctatgttttgttttgt

SEQ ID NO: 14056 - DNA, 470 bp, Homo sapiens
actgtgaatgaaagctggaatgccttagcaaccccatcagataagctgtttttctggaattccaaatctacgtatatcaaatcaccaccattctttgaaaacctggtatggctttttattttttaacaaaatgaattctttgaagggtttctttcctaataatatctactttattaccccatgctcttgctttgactacccattttattaaaccctttgcaaacccaagcagatactgctggggaaagttttgggaggctgggatatttggctgccgtgggtctatagtttctctatgcaggggttctgcgtggatgtacacagccaccctagtaatcacctggacttaaacctagtagagtctgagggactgtcccaggagaccatccccagagcccaccatagtgaaccttatacccataaaaaccagggacattgtccctgaaactgatgatctagaagttggtgct

SEQ ID NO: 14057 - DNA, 420 bp, Homo sapiens
ccctgtttgtggctccatctgatttgcctaccctaattcttccctttgcttccattttctcacttatttttaatttagctctttatcttatatgaagctttataggctaccctactaacaaataaaacattcttttttagacttccttcttatttttctaaccagatttgaaagacaattaacccaggagaatactgacttatgcctctcaccaccccttctcacctctctctcttctccgttgaagctttggggacagcttttctgccatggagaacaatgcttaggagacttagagaaatagccaggtctatgttttgttttgttttgtttttttcttttcttggtgtaagctaaggttaatctttgcttgcttcactaagccagctcctttcttgcttgccttcttagcctaactcc

SEQ ID NO: 14058 - DNA, 462 bp, Homo sapiens
atcagtccctgttattccaataggcattggcaacatggacatgtatcaggaaacttccagccatggggcctgggttgtttcaagaaaagttgttttgaccaaaggcgaaccaaatttctgtctattctaggaatggcagtggaagacacagttgcagccaaactcatctatgattcctggtcatctggtaaataaaacaaaggaacttgatgttgagatggatgcttgaggaatattgctgctggttctcataatttctagagtaaatgagggagtccagtccccagtgaactctccttttgtgcttatcatgttttaccttaaatgctgagatcctcatttatgtttgtagttggaaagcaaagctaggtagccatttcttctgttctaccaagttataatagcattcatttccctttatatttccctgaaataaagcacattccaattgtgcaaaaaaaa

SEQ ID NO: 14059 - DNA, 2080 bp, Homo sapiens
ttgttcccgtgctcttctcatgatagtgagtaagtctcataagaactgatggttttcaaatggggagtttccctgcacaagctttcttgtctgccactatgtgagatatacctttcaccttctgccgtgattgtgaggcctcctcagccacgtggaactgtaaaaactcctggaagaaaagatcctgcaatttggctttttgtgagatggaaaagattacaccttgccctgcaaacttcccccctttaaaggcgaaggtttgttaggttagttagcctgtgagaaaactgtgcgttcttagcaatcaaaggccagacatctgggggtacaggggggaggaagactaggataagagactctagacggggacagaattaaaaggaaaaaaaaattaaataagcctccgtctccttttatctcctagcagtaggcagtaatttaataaataaaggagccccgttagcgttttccctgtccattctttcccaggcacggtgacctagacagcagcaaaaagcgagttaatagggaggggttatgtaggaagcaaaagtcaaggaatgtggctacagctgattacaggaactgagaaagtggaccaaacaatattgactcccagcacgccaccgcgatgtccatcttggggaatccgttgctggaagggacccatctcgcccacccttaggggtcgaggtgggcgaagggggaggagagggctggcggggcggggcggggttgctccgcccccggaggctgggctgtgaccagcaggcggctccacagagcagcgggcgcgctcataaagggcacagccgagggtacgtggatcgcggtgcggagactgaggttagaaggcacaggtggcgagatgagccgggtaccagcgttcctgagcgcggccgaggtggaggaacacctccgcagctccagcctcctcatcccgcctctagagacggccctggccaacttctccagcggtcccgaaggaggggtcatgcagcccgtgcgcaccgtggtgccggtgaccaagcacaggggctacctgggggtcatgcccgcctacagtgctgcagaggatgcactgaccaccaagttggtcaccttctacgaggaccgcggcatcacctcggtcgtcccttcccaccaggctactgtgctactctttgagcccagcaatggcaccctgctggcggtcatggatggaaatgtcataactgcaaagagaacagctgcagtttctgccattgccaccaagtttctgaaacctcccagcagtgaagtgctgtgcatccttggggctggggtccaggcctacagccattatgagatcttcacagagcagttctcctttaaggaggtgaggatatggaaccgcaccaaagaaaatgcagagaagtttgcagacacagtgcaaggagaggtacgggtctgttcttcggtccaggaggctgtggcaggtgcagatgtgatcatcacagtcaccctggcaacagagcccattttgtttggtgaatgggtgaagccaggggctcacatcaatgctgttggagccagcagacctgactggagagaactggatgatgagctcatgaaagaagctgtgctgtacgtggattcccaggaggctgccctgaaggagtctggagatgtcctgctgtcaggggccgagatctttgctgagctgggagaagtgattaagggagtgaaaccagcccactgtgagaagaccaccgtgttcaagtctttgggaatggcagtggaagacacagttgcagccaaactcatctatgattcctggtcatctggtaaataaaacaaaggaacttgatgttgagatggatgcttgaggaatattgctgctggttctcataatttctagagtaaatgagggagtccagtccccagtgaactctccttttgtgcttatcatgttttaccttaaatgctgagatcctcatttatgtttgtagttggaaagcaaagctaggtagccatttcttctgttctaccaagttataatagcattcatttccctttatatttccctgaaataaagcacattccaattgtgcaaaaaaaa

SEQ ID NO: 14060 - DNA, 2108 bp, Homo sapiens
ttgttcccgtgctcttctcatgatagtgagtaagtctcataagaactgatggttttcaaatggggagtttccctgcacaagctttcttgtctgccactatgtgagatatacctttcaccttctgccgtgattgtgaggcctcctcagccacgtggaactgtaaaaactcctggaagaaaagatcctgcaatttggctttttgtgagatggaaaagattacaccttgccctgcaaacttcccccctttaaaggcgaaggtttgttaggttagttagcctgtgagaaaactgtgcgttcttagcaatcaaaggccagacatctgggggtacaggggggaggaagactaggataagagactctagacggggacagaattaaaaggaaaaaaaaattaaataagcctccgtctccttttatctcctagcagtaggcagtaatttaataaataaaggagccccgttagcgttttccctgtccattctttcccaggcacggtgacctagacagcagcaaaaagcgagttaatagggaggggttatgtaggaagcaaaagtcaaggaatgtggctacagctgattacaggaactgagaaagtggaccaaacaatattgactcccagcacgccaccgcgatgtccatcttggggaatccgttgctggaagggacccatctcgcccacccttaggggtcgaggtgggcgaagggggaggagagggctggcggggcggggcggggttgctccgcccccggaggctgggctgtgaccagcaggcggctccacagagcagcgggcgcgctcataaagggcacagccgagggtacgtggatcgcggtgcggagactgaggttagaaggcacaggtggcgagatgagccgggtaccagcgttcctgagcgcggccgaggtggaggaacacctccgcagctccagcctcctcatcccgcctctagagacggccctggccaacttctccagcggtcccgaaggaggggtcatgcagcccgtgcgcaccgtggtgccggtgaccaagcacaggggctacctgggggtcatgcccgcctacagtgctgcagaggatgcactgaccaccaagttggtcaccttctacgaggaccgcggcatcacctcggtcgtcccttcccaccaggctactgtgctactctttgagcccagcaatggcaccctgctggcggtcatggatggaaatgtcataactgcaaagagaacagctgcagtttctgccattgccaccaagtttctgaaacctcccagcagtgaagtgctgtgcatccttggggctggggtccaggcctacagccattatgagatcttcacagagcagttctcctttaaggaggtgaggatatggaaccgcaccaaagaaaatgcagagaagtttgcagacacagtgcaaggagaggtacgggtctgttcttcggtccaggaggctgtggcaggtgcagatgtgatcatcacagtcaccctggcaacagagcccattttgtttggtgaatgggtgaagccaggggctcacatcaatgctgttggagccagcagacctgactggagagaactggatgatgagctcatgaaagaagctgtgctgtacgtggattcccaggaggctgccctgaaggagtctggagatgtcctgctgtcaggggccgagatctttgctgagctgggagaagtgattaagggagtgaaaccagcccactgtgagaagaccaccgtgttcaagtctttgggaatggcagtggaagacacagttgcagccaaactcatctatgattcctggtcatctggtaaataaaacaaaggaacttgatgttgagatggatgcttgaggaatattgctgctggttctcataatttctagagtaaatgagggagtccagtccccagtgaactctccttttgtgcttatcatgttttaccttaaatgctgagatcctcatttatgtttgtagtactgggagatgatggcacctcggctgcggcccatggtgcggctgggcatgctggcccggatgcggagtgtggccgtgctctgggtgcactcggccgcccgagtgtctgctgctacttccacatgaatggagccccaa

SEQ ID NO: 14061 - DNA, 1289 bp, Homo sapiens
ttgttcccgtgctcttctcatgatagtgagtaagtctcataagaactgatggttttcaaatggggagtttccctgcacaagctttcttgtctgccactatgtgagatatacctttcaccttctgccgtgattgtgaggcctcctcagccacgtggaactagacggccctggccaacttctccagcggtcccgaaggaggggtcatgcagcccgtgcgcaccgtggtgccggtgaccaagcacaggggctacctgggggtcatgcccgcctacagtgctgcagaggatgcactgaccaccaagttggtcaccttctacgaggaccgcggcatcacctcggtcgtcccttcccaccaggctactgtgctactctttgagcccagcaatggcaccctgctggcggtcatggatggaaatgtcataactgcaaagagaacagctgcagtttctgccattgccaccaagtttctgaaacctcccagcagtgaagtgctgtgcatccttggggctggggtccaggcctacagccattatgagatcttcacagagcagttctcctttaaggaggtgaggatatggaaccgcaccaaagaaaatgcagagaagtttgcagacacagtgcaaggagaggtacgggtctgttcttcggtccaggaggctgtggcaggtgcagatgtgatcatcacagtcaccctggcaacagagcccattttgtttggtgaatgggtgaagccaggggctcacatcaatgctgttggagccagcagacctgactggagagaactggatgatgagctcatgaaagaagctgtgctgtacgtggattcccaggaggctgccctgaaggagtctggagatgtcctgctgtcaggggccgagatctttgctgagctgggagaagtgattaagggagtgaaaccagcccactgtgagaagaccaccgtgttcaagtctttgggaatggcagtggaagacacagttgcagccaaactcatctatgattcctggtcatctggtaaataaaacaaaggaacttgatgttgagatggatgcttgaggaatattgctgctggttctcataatttctagagtaaatgagggagtccagtccccagtgaactctccttttgtgcttatcatgttttaccttaaatgctgagatcctcatttatgtttgtagttggaaagcaaagctaggtagccatttcttctgttctaccaagttataatagcattcatttccctttatatttccctgaaataaagcacattccaattgtgcaaaaaaaa

SEQ ID NO: 14062 - DNA, 1349 bp, Homo sapiens
cggccagcgcagaggacgcaggcagaaggaggaagggctggccggggctcccgagcactcactgctcaagcctcgccgccgcctccgccgctgcggggtgcgcgtccatctggttggggctcctcatcccaacaccctccccaacggcccgccgcgcagccgcccgcgggcgagtctgtagcctgatcctgcgcggacccgccagaggcacaccaggagagacggccctggccaacttctccagcggtcccgaaggaggggtcatgcagcccgtgcgcaccgtggtgccggtgaccaagcacaggggctacctgggggtcatgcccgcctacagtgctgcagaggatgcactgaccaccaagttggtcaccttctacgaggaccgcggcatcacctcggtcgtcccttcccaccaggctactgtgctactctttgagcccagcaatggcaccctgctggcggtcatggatggaaatgtcataactgcaaagagaacagctgcagtttctgccattgccaccaagtttctgaaacctcccagcagtgaagtgctgtgcatccttggggctggggtccaggcctacagccattatgagatcttcacagagcagttctcctttaaggaggtgaggatatggaaccgcaccaaagaaaatgcagagaagtttgcagacacagtgcaaggagaggtacgggtctgttcttcggtccaggaggctgtggcaggtgcagatgtgatcatcacagtcaccctggcaacagagcccattttgtttggtgaatgggtgaagccaggggctcacatcaatgctgttggagccagcagacctgactggagagaactggatgatgagctcatgaaagaagctgtgctgtacgtggattcccaggaggctgccctgaaggagtctggagatgtcctgctgtcaggggccgagatctttgctgagctgggagaagtgattaagggagtgaaaccagcccactgtgagaagaccaccgtgttcaagtctttgggaatggcagtggaagacacagttgcagccaaactcatctatgattcctggtcatctggtaaataaaacaaaggaacttgatgttgagatggatgcttgaggaatattgctgctggttctcataatttctagagtaaatgagggagtccagtccccagtgaactctccttttgtgcttatcatgttttaccttaaatgctgagatcctcatttatgtttgtagttggaaagcaaagctaggtagccatttcttctgttctaccaagttataatagcattcatttccctttatatttccctgaaataaagcacattccaattgtgcaaaaaaaa

SEQ ID NO: 14063 - DNA, 2005 bp, Homo sapiens
ttgttcccgtgctcttctcatgatagtgagtaagtctcataagaactgatggttttcaaatggggagtttccctgcacaagctttcttgtctgccactatgtgagatatacctttcaccttctgccgtgattgtgaggcctcctcagccacgtggaactgtaaaaactcctggaagaaaagatcctgcaatttggctttttgtgagatggaaaagattacaccttgccctgcaaacttcccccctttaaaggcgaaggtttgttaggttagttagcctgtgagaaaactgtgcgttcttagcaatcaaaggccagacatctgggggtacaggggggaggaagactaggataagagactctagacggggacagaattaaaaggaaaaaaaaattaaataagcctccgtctccttttatctcctagcagtaggcagtaatttaataaataaaggagccccgttagcgttttccctgtccattctttcccaggcacggtgacctagacagcagcaaaaagcgagttaatagggaggggttatgtaggaagcaaaagtcaaggaatgtggctacagctgattacaggaactgagaaagtggaccaaacaatattgactcccagcacgccaccgcgatgtccatcttggggaatccgttgctggaagggacccatctcgcccacccttaggggtcgaggtgggcgaagggggaggagagggctggcggggcggggcggggttgctccgcccccggaggctgggctgtgaccagcaggcggctccacagagcagcgggcgcgctcataaagggcacagccgagggtacgtggatcgcggtgcggagactgaggttagaaggcacaggtggcgagatgagccgggtaccagcgttcctgagcgcggccgaggtggaggaacacctccgcagctccagcctcctcatcccgcctctagagacggccctggccaacttctccagcggtcccgaaggaggggtcatgcagcccgtgcgcaccgtggtgccggtgaccaagcacaggggctacctgggggtcatgcccgcctacagtgctgcagaggatgcactgaccaccaagttggtcaccttctacgaggaccgcggcatcacctcggtcgtcccttcccaccaggctactgtgctactctttgagcccagcaatggcaccctgctggcggtcatggatggaaatgtcataactgcaaagagaacagctgcagtttctgccattgccaccaagtttctgaaacctcccagcagtgaagtgctgtgcatccttggggctggggtccaggcctacagccattatgagatcttcacagagcagttctcctttaaggaggtgaggatatggaaccgcaccaaagaaaatgcagagaagtttgcagacacagtgcaaggagaggtacgggtctgttcttcggtccaggaggctgtggcaggtgcagatgtgatcatcacagtcaccctggcaacagagcccattttgtttggtgaatgggtgaagccaggggctcacatcaatgctgttggagccagcagacctgactggagagaactggatgatgagctcatgaaagaagctgtgctgtacgtggattcccaggaggctgccctgaaggagtctggagatgtcctgctgtcaggggccgagatctttgctgagctgggagaagtgattaagggagtgaaaccagcccactgtgagaagaccaccgtgttcaagtctttgggaatggcagtggaagacacagttgcagccaaactcatctatgattcctggtcatctgctgcacccatttcactgaatcttaaatgatgctttcaagacagaaggaagaacagtacacctgagatgaccccaaaggtgggccttcttttgagaaaatttcaaatgcaaaattccagatttacagatgaaactgtcagtaagacaattcatgggttttcctagtggctttaagctattaaaacttgcaaaactttggct

SEQ ID NO: 14064 - DNA, 1509 bp, Homo sapiens
ttgttcccgtgctcttctcatgatagtgagtaagtctcataagaactgatggttttcaaatggggagtttccctgcacaagctttcttgtctgccactatgtgagatatacctttcaccttctgccgtgattgtgaggcctcctcagccacgtggaactgtaaaaactcctggaagaaaagatcctgcaatttggctttttgtgagatggaaaagattacaccttgccctgcaaacttcccccctttaaaggcgaaggtttgttaggttagttagcctgtgagaaaactgtgcgttcttagcaatcaaaggccagacatctgggggtacaggggggaggaagactaggataagagactctagacggggacagaattaaaaggaaaaaaaaattaaataagcctccgtctccttttatctcctagcagtaggcagtaatttaataaataaaggagccccgttagcgttttccctgtccattctttcccaggcacggtgacctagacagcagcaaaaagcgagttaatagggaggggttatgtaggaagcaaaagtcaaggaatgtggctacagctgattacaggaactgagaaagtggaccaaacaatattgactcccagcacgccaccgcgatgtccatcttggggaatccgttgctggaagggacccatctcgcccacccttaggggtcgaggtgggcgaagggggaggagagggctggcggggcggggcggggttgctccgcccccggaggctgggctgtgaccagcaggcggctccacagagcagcgggcgcgctcataaagggcacagccgagggtacgtggatcgcggtgcggagactgaggttagaaggcacaggtggcgagatgagccgggtaccagcgttcctgagcgcggccgaggtggaggaacacctccgcagctccagcctcctcatcccgcctctagagacggccctggccaacttctccagcggtcccgaaggaggggtcatgcagcccgtgcgcaccgtggtgccggtgaccaagcacaggggctacctgggggtcatgcccgcctacagtgctgcagaggatgcactgaccaccaagttggtcaccttctacgaggaccgcggcatcacctcggtcgtcccttcccaccaggctactgtgctactctttgagcccagcaatggcaccctgctggcggtcatggatggaaatgtcataactgcaaagagaacagctgcagtttctgccattgccaccaagtttctgaaacctcccagcagtgaagtgctgtgcatccttggggctggggtccaggcctacagccattatgagatcttcacagagcagttctcctttaaggaggttatctaatttttgcataaaatttgcatagtcttctatcaagaagggtgaagaggttaaccatgcacttccggccgggcaaaatgtcctgtttttcaccttgcttggtgaacttgcttagacataaagtttgtttccgtatgtattatatt

SEQ ID NO: 14065 - DNA, 430 bp, Homo sapiens
tgttatcattgttgtcgtcactattattatttcagaccttggtttctccccactctttcatgaagcccttatctaaccactccaggtcaaaatcatctctcttttctttgaattaacttacttttcctatcactgatttgatgactaggatttattgccttaagctttacatcattcctttccgattttatttccccatctcaggtaaaaactcctggaagaaaagatcctgcaatttggctttttgtgagatggaaaagattacaccttgccctgcaaacttcccccctttaaaggcgaaggtttgttaggttagttagcctgtgagaaaactgtgcgttcttagcaatcaaaggccagacatctgggggtacaggggggaggaagactaggataagagactctagacggggacagaattaaaaggaaa

SEQ ID NO: 14066 - DNA, 436 bp, Homo sapiens
atataaattagatccctgctgtactctcataatatatttgaatcacttgtcacatatcatgacatatattacctgcatagtcagccgactaatgtctctctttcccacaaactatgtgttcattaaaaacaaggaccaggtttgggggttgtggtgttgtgttttgtactgtttttttcttgccattctattctaagcattcattccaaggacataataacattttgtaaacactgttcaatcaatcaataaataaaaacaaaaaatatactttatgaaaaatttcaagctacttttaaaatactacataaaaggccaggcatagcggctcatgactgtaaccccagcgctttgggagggcaaggggggcttggatcacttgagtctgggagttcaagaccagcctggacaacacagtgagaccacatctctatca

SEQ ID NO: 14067 - DNA, 332 bp, Homo sapiens
ctaccaacacatgaactttggggcacacatccaaacgataacacattaacagtcaattaattgccttatcacaaggatgccaagacaattcaactgggagaaagaatagtcttttcaatagatggtactggaacaactggatagccacatgcagagaatcacacggaagccctacctcattccataaacaaaacattaatgccaaatccatcaaaggcctaaatataagagctaaaactatacaactcttagaggaaagtgtaggtgtaactcttcaataccttgaaattaggcagtgacttcttagatatgacacctaaagcacaagcaac

SEQ ID NO: 14068 - DNA, 172 bp, Homo sapiens
gaggaaggggactcacaggacagcgtttgtgggggtggagaggtttctttattagccaaaagtaggtcattcctgagtcagaggactattccaattaaaccgagagtaacggagaaggaaaggacattcctttgagaacaatcagatcggaaaacaaactggtttgttatgt

SEQ ID NO: 14069 - DNA, 397 bp, Homo sapiens
cattgcaatgaatcttcttagaatataatcctcaattttgagttatctataccttagagaaatttttacaactacattgcagagaaaggagctaatcaccagcatacacggtgtcaagggtagagatcccgttagagactgcctgagtttcagtcctatctcttttgcccagtttctcccttctgtaaagtagtcatgataacagagttcacctcataggtttgtttgttatgcaaattcagtgatttaacatttatgaaacacttagaacagacttggcacatgcttagcactacatggttggctgttaataagcaaaagcaagcaaaccactcctttgtggggtagaaacatatttcaacatagagaggaatatgttgtttttagcaaaaaaaaa

SEQ ID NO: 14070 - DNA, 371 bp, Homo sapiens
gcactttagtttgtagtggtgatttatttttcatcttagttatattaatttttagttcaataattttcattttgttgtttttttcttttttcactcatgatatactctaacttttcaactatcgagacattttccttatttatttaaatataggttttattaattgttgaaaccttaataatagcttcttaaaattctttttctactaaatctgacatcaggcacactcagtcaaattctattgacttcctttcttctgtatatggttcatactcatctttttttaaatttttttgcatgactactcatttttggttgaaagataaatattgaagtctatatatcttagtgatttggatgctcttatgttc

SEQ ID NO: 14071 - DNA, 448 bp, Homo sapiens
tctagacacaagatctcactctgtcacccaggctggggtgcagtggtgcaatctccactcaatgcaacctccccctcctgggctcaagtgatcctgctacctcagcttccaaagtagctgggaccacaggtgtgcaccgccacactcggctaattttttttgtatttttgttggtagagacggggttttcatgttggcaaggctggtctcaaactcctggactcaagtgatccctcctgccttagcctcccaaagtgttgggattacaggcatgagccaccacaccaggcaatctggcttatttatttagacttttcactccagaattttaggcaattctaacaaactcaggtgagaagcaacacattagaagcaggtaccctgaccgcatgaagatgtgatggagaatataccactattaatagagacaaacacaattaaaagcaga

SEQ ID NO: 14072 - DNA, 463 bp, Homo sapiens
tgttctttttaaaaagacacaaaaacattttagctaaattcagaagtttggtcctttaaaaagaacaaaaaggtgtctgctaaaaatatgttggaaatactcagtaaagcagaagctccagaaacactgtgggcataaaactctctcctacatattcagagattgttactgcacctccattccctgaaacagaaatcctctgtgatctggtagcaaaaggcagctgataatttatacacacaccacgcctgtgtgtgtgtgacccaaaggagagctggtctccactcgagagctgttttcagtgaatgagccctggaataggattcaagagttttagactctaccacacctttcaaagatatatactgaagcatttactggtgaaatatgtcaagaatttgtctagatccagtgagagggaatgagggagagtgagtgtggatataaatgaactaagattagc

SEQ ID NO: 14073 - DNA, 249 bp, Homo sapiens
tttattttctttgtatgactaaagcctcggggttagcagctatattgtcagcgaggcaatggtgtgggttttgtgatcagtgggacaaaagaaggaaaaagggaaaggatgtgaaggagaagctctgtccagttcctgttctgtttccctgggagctggacagacattcacagctgggtcttggtgttctcttgtcaaacaaaagtaatttccaggacaccaacatcacacaagaccattccgtgacca

SEQ ID NO: 14074 - DNA, 588 bp, Homo sapiens
attgtccatccagacaatgtgtttgactgcctaccaccttcaagacattgcattaggaaccagggatttggcgtgaccggcaaaaatagctaacactttcatagcatttgcaatttgccgagtgatgttttcagtgttttgcatatattaacccactgaagccttacaaacctctgagggaaactgttgttattttacagaggagagaattgagacacagaggttaaataacttactgtattagcctgctctgacaggcataatgaaacatcacagactgggtgacttaaaccaggggtccctaatgcccctggccacagacccataccagtccctggccttttaggaaccaggccccacagcaagaggtgagtggcaggcgagcaagcattactgcctgagctccacctcctgtcatatcagtggcctcataagattctcacaggagcacaaaccctattgtgaattgcatatgcaaggatctaggttgcatgctccttatgagaatctaatgcctgatgatctgaggtggaacagtttcatcctgaaaccatccaaccccgcccctcccacccccatccattaaaa

SEQ ID NO: 14075 - DNA, 437 bp, Homo sapiens
gttggtaccatcaacaaagcattggctatggatggtagaccagcaacatgagtataacctactgaagtgccaatcagaaaacctgctgagaaagtgaaagattaaactgtcagaatagagggaaggagaaagatgaagagtagtgtgagcatacaacatggaaaggcatactaatggcttcttgaatcattcattactccaatgagtgggattcaagccacgtttcgactgcgagttggtgtaatacattcctttagttaaaataattttttaatcaggtctattctgggagcttaaaaatctccatcataaacttctccagattttgtaaaaaatgctcagcttgaatcatcagagaaaaatgagcatcctgcctagtcaccaagaaattaaacttgaaatggtgtaagcagcttgggaagtaatttgactgattc

SEQ ID NO: 14076 - DNA, 804 bp, Homo sapiens
cttcagaggtgtttatttttcttttcttaaagtgctgaaaaactatttaattttaaaataagagtgctgttgcattgttccttaatacagaagtattgttgaaagtgcaacctctcaggaaagatgagcaaacttgttttttgtgggtagttctttgctgcttaggattcctgtaaatttacaagatactattggcttatgtgtttttattgtgaattactaaaatattaggccataaaaatcaaactttgtggtgccctgatagtgtttttgaacctctccatatcttttgctagcttaaggaaagtgtgaaggactttgaaaatatacctggcctagacttagaacttactgtgtctggccttcccaattttttcagtaggttcagaatacttctctttggtttgaattataattttgtttcttgtggttccaaaagttatctgtaatagcctcgttcttgtcattgcctcattcttaagaagttgctttttttgcttttgaatatttgtgggtgtttgacacagtgtatgcttaagacagatgaaaaaaatactaataatagtgttcatgtgagcaagttcattctgaaaaaggaaatgcttagaagtccttggtgttcttctttacacttgatactaaaaatacaaaaattagctgggcgtagtagcgcatgcctgtaatcccaactacttgggaggtggaggcaggaaaatcacttgaacctgggaggtagaggttacagtgagctgaggtcgtaccactgcactccagccctgggtgacagagggagactcagtatca

SEQ ID NO: 14077 - DNA, 350 bp, Homo sapiens
cgcggcggtgccccgcaaggcagaagtcccatgtgcagccgcagaaggcgggcggcgggagcagtccccgctgctgcacctcgacctcttcaacttcgactgcccagaggcggagggcagccgctacgtgctgaccagcccccgctcgctagaggcctgcgcccgctgtgcggtcaagccggtggagctgctgccacgggccctggccgacctggtgcgagaggctccgggccgctccatgcgggtggccaccggcctgtatgaggcctacgaggcggagcggcgcgccaagctgcagcaatgccgggccgagcgcgagcgcatcatgcgcgaggagaagcggcgtcttt

SEQ ID NO: 14078 - DNA, 368 bp, Homo sapiens
caaaaaaagtgtaacccaggtctctggcctcaaaaggggtgactatttttcttctgtgacaaggaacaaagtttagagagcaatacaagaatgaacataagcccttattaacccttttcccatttagaaaaaaaaagtgcagctcactgccagcactcatttaatttcacataaacacaatatttgaggctgaagcaaatctgactgacttcaatgtaaaaataaaatataaaaactgttctcaggccagtgcagtggctcatgcctgtaatcccagcactttgggaggccgaggaggatggatcacttgaggtcaggagctcgggaccagccttgccaacatggcgaaaccccatctctactaaaaa

SEQ ID NO: 14079 - DNA, 913 bp, Homo sapiens
gagcgagcgggcgggcgggcgagtgcgcgccccgcagccaggagcgaaatccgctatccgggtcttgccggcagccgagccgcagagttctggtcgactccagcgcttgaggcgaagtggccggtgaggccgggtgggcgggagagggaccggaggaaaggagacggggcgctgcgccaagttatcaaggccgcgatcaaagtcggaccaaggcagcgagtcgacagcaggtttccagaagtgccctaacaggactgactagcagccaggaggcgcaggaaggggcaaagagcgtgtggagagcttcgcccccggcgaggatggacgccccgggcggagggagcgctcgggttgcaacacccagtctggctgcacagctcgtaacccctgccctttggcggcaaacaagacgcatctaatgaccagccagccttcgtcttcctcctctgatcatcggacctattttcccccttttgtcgctctcctctttttttgtctctccaacccatgcggtaaactggtggtgcccaaggccctccatcgggtccctgagagtctcccaactgccggtccttagcgccagcctgcaagcccagacccgcctcgccaggctgcctgtgagcctatttttcatgtagctcttgccaaaagccctgatgtggtttgaagtagtggaggcttctttcactttgtgcctctcgtaccttaaccaaccctcataacctcctctctgagtagctcatggagcctctaaaagagaagtccatgttctcatagacattgtgttttctcactcttaaaactcctcattgtcatagctactcccccaatccccccatgctgtcctaacttcgaagtcagttgacttccagaagtccacgaaagcctataaattaaacttggttaaaagaga

SEQ ID NO: 14080 - DNA, 508 bp, Homo sapiens
cacgttttcaaatgaaagaggtggtgctggggcactgaggaatcagggggatggaccccactggagcttgtctcatgctggcagcaagtcccaggcctcaaacacatacctgggccacctcaggagagagactgcagggaagaaatgagttgcaatgctccagcctaaccaactccccttttgttaatccaatcccagaaggtactgggtagggtcagttaacagacagctgcctgtctcctggcagagtctgaccaagccccagtgggcgcttctcttcctaagtcctctggtgtaccccattcttcaagggaaacggtccccttaagaatctatgtgaaagggttctgaaattgctgtaccagttaatgaattatttactctaaacaatgtcttgataaagggggaggatgaagttagctgatgttgactaaggagagacggagttgccaaggaaattcttctaaatgaaaaaaaagtcgacgcggccgcgaatttagtagtagta

SEQ ID NO: 14081 - DNA, 406 bp, Homo sapiens
cagacagctgcctgtctcctggcagagtctgaccaagccccagtgggcgcttctcttcctaagtcctctggtgtaccccattcttcaagggaaacggtccccttaagaatctatgtgaaagggttctgaaattgctgtaccagttaatgaattatttactctaaacaatgtcttgataaagggggaggatgaagttagctgatgttgactaaggagagacggagttgccaaggaaattcttctaaatgaaaaaaaaaaaaaagtaaaagcagtcagccggttttgtctgactatgaaacgtgtcacagagcatgcacctttggccatcttttgcatttatgatttggaagagagatgtagcagtgagtgtggggccagggaggggaatccaacaaagccattctgc

SEQ ID NO: 14082 - DNA, 265 bp, Homo sapiens
ccccttcattatgaagttgatagaggttgtgttttaggggagtgatacaaaagatggtagttttcaaccagaagaaatcttaagaatgaattaaatggtgataaaaaaaaaagattcctggggaggggggagggatagctttaggagatatacctaatgctaaatgacaagttaatgggtgcagcacaccagcatggcacatgtatacatatgtaactaacctgcacattgtgcacatgtaccctaaaacttaaagtataataat

SEQ ID NO: 14083 - DNA, 305 bp, Homo sapiens
agattgcttgagcccaggagtctgaagctgaagtgagctatgatcacagcattgcacttcagcctgggtaacagagggagacccctatcttaaaaaaaaaaaaaaaaaaaagactatcctaaatatatatgtatatatatgtgtgtatgtacatatggtgtgtgtatgtcatgtatatagtagatactgtgtatatacactgtgtaattttgtaccaaagatagtaattgaaatgctctctgtagtacatggtacccctctgtgaaaacttgtctttgccatgcagttaaatttctttttgtgca

SEQ ID NO: 14084 - DNA, 641 bp, Homo sapiens
gagcactcattacatcctgtcattttagatactcttatctaggataggaaatataactcgtttcctgtctctcccactggaccatgagctccatcacacccttccaattttcttccttcagggaccaaacacgaggaaataccgttgaacaaccggctgttctggacccagcccacctcaaaggccaaggccactcatcaagaggtatatattaaatgtataaagctttttcttatatcagtaagaaagagagaagaaagaaagagaggaagaaagaaaggagagaaagttaaacatatctgtcaagaataacacaaaagtgatgttgtgtccttcttagtacatggtatcagaaggcttcttttttctttttttagaaatgaggtctcactgtgttgcccaggttggagtgcactccatagctcactgcagcctcaaatagatgggctgaagcaatcctgccacctcagcctcctgagtggctgggactataggtacattaccacacccactcataacaacagtttgtcttaatcttagtgatcagccaattccttggttaaggcagtatctgccaaatttctccactgtacagttattattttccctttgtaattaataaatatcttgtgagaagagaa

SEQ ID NO: 14085 - DNA, 280 bp, Homo sapiens
gtgcggcccaggggctgtgtgctggagtgggtacgcaacatcgtggccaaccgcctggcctcggatggggccacctgggcagacatcttcaagaggttcaacagcggcacgtataacaaccagtggatgatcgtggactacaaggcgttcatcccgggtgggcccagccccgggagccgggtgcttaccatcctggagcagatccccggcatggtggtggtggctgacaagacctcggagctctaccagaagacctactgggccagctacaacataccgt

SEQ ID NO: 14086 - DNA, 896 bp, Homo sapiens
cctgaaacttcaagttaaacctttaagctgttcatttcctaaaagggtgaaaacgcgggcaccctcgagctagttcatcgccttttaacctgtcaccgacgatgagggcgcacctgctgtcctggagcttccgatctctgttcggggaccctgtgagccttctggccggctgcgtgcagagcccactgggcacggtggtcggcctggtgtgaggccccccggggaccggcagtgtgtccagggaggggatggccctgagcccagcggctcctcccgctgagtgtatttcttcccaccactcagcgcatggctgccctggctcacgaggcagtcgggactcgtgacttgctggctgctggctgctgctgcctcgcgcgctggggttccatggaggaactgggcctgccgccccggcctcacctgctgcccgcatgctggggtcccatggaggaaccaggcctggcgccccggcctcgcccagcggctggtgtgggcagctgttccctgcctcgcagtgtcctggaggcagctgtctcgcagactcagcttggtctcccgcaggcttcagaaaaacccaattgcacgtgtgggattcttccccagcccttgggtgcggggtctctgtgcacttgagagctgggggacccacccaccgtctcccactccaagttcatcccagagcgtggggcccgctgggcacctggcacctggcctgcagatgctgctacgagtgaccagtgctgtgtggaggaggccaagggcggcccctgggaaaccgggcttcaacagtacaaggaaaagaaacttgctctgttttgtaagagcgtgttccttttcctcttttttgtcactttaaagaccaaaaagaataaagaaagaaaagaaaaaaattaatc

SEQ ID NO: 14087 - DNA, 536 bp, Homo sapiens
agcggggggggcctgggacgcggcgggagcatggagccgcgcgccggctgccggctgccggtgcgggtggagcaggtcgtcaacggcgcgctggtggtcacggtgagctgcggcgagcggagcttcgcggggatcctgctggactgcacgaaaaagtccggcctctttggcctacccccgttggctccgctgccccaggtcgatgagtcccctgtcaacgacagccatggccgggctcccgaggagggggatgcagaggtgatgcagctggggtccagctcgcaccgcactcgtggctgctggagggttcaggggcgcggaaaacagggaacacgtttgtgcgcgagcccctggtagatgtccagaatgtctgtgttccaggaaaaggtcacctgcaagaacgggcagggcaactgctacaagagcaactccagcatgcacatcacagactgccgactgacaaacggctccaggtaccccaactgtgcataccggacagcccgaaggagagacagcatcattgtggcctgtgaagg

SEQ ID NO: 14088 - DNA, 2624 bp, Homo sapiens
agcggggggggcctgggacgcggcgggagcatggagccgcgcgccggctgccggctgccggtgcgggtggagcaggtcgtcaacggcgcgctggtggtcacggtgagctgcggcgagcggagcttcgcggggatcctgctggactgcacgaaaaagtccggcctctttggcctacccccgttggctccgctgccccaggtcgatgagtcccctgtcaacgacagccatggccgggctcccgaggagggggatgcagaggtgatgcagctggggtccagctccccccctcctgcccgcggggttcagccccccgagaccacccgccccgagccacccccgcccctcgtgccgccgctgcccgccggaagcctgcccccgtaccctccctacttcgaaggcgcccccttccctcacccgctgtggctccgggacacgtacaagctgtgggtgccccagccgccgcccaggaccatcaagcgcacgcggcggcgtctgtcccgcaaccgcgacccggggcgcctcatcctcagcaccatccgcctgcggccgcgccaggtgctctgtgagaagtgcaagagcacgctgagccccccggaggccagccccggacccccagccgcgcccagggcccgcaggaggctgggcagcggcccggacagggagctccgcaagccggaggagccggagaacggcgagcccacggctgcggccaccgccaggaggagcaagagggagaggcgcgaggaggacagggccccggcagagcaggtcccgcggagcccggtcatcaagatctcctacagcacgccccagggcaagggagaggtggtcaagatcccctcccgcgtgcacggctctctggagcccttccgtccccagcaggccccgcaggacgacggcagccaggaccccgaggtgctggacagagagtcccgggaccggccgtcctgcgcgccctcggcctccatccccaagttgaaactgacacggcctgtgccggccggcgcggacctgccgccccctaagatccgcctgaagccccaccgtctgggggacagcgagcacgagcccgtgtaccgggccgagctggtgggggagctgaacgggtacctgcgggacagctcgccggcgccctgtgcggacggccctgccggtgggctggcggacttgtcttctggaagttcgggtgaggacgatgacttcaagagctgtccccagggtccacagggacgcgagggcttggcttttctcgtcagctgccctgaggggagagcggactgtgccagtgagtcggcgtgcagcagcgacagcctggacgaggccagatcgtccggctcggaagggacgccggcagacacgggtgacctctcgcctggccacggcgcgtcagcgccctcggtgtccagagaggctcgccaaacggtgccgcccctgacggtcaggctgcacacacagagcgtgtcggagtgcatcacggaggacggcaggactgtggccgtgggggacatcgtctggggtaagatccatggttttccttggtggccggcgcgtgttcttgacatcagtctcggccagaaggaggacggagagccgtcttggcgagaagcgaaggtctcgtggtttggttctccgactacgtcgttcttgtctatttcaaaactctcccctttctctgaatttttcaaactgagatttaatcgtaagaagaaggggatgtatcggaaagctataaccgaggctgcaaatgccgcaagacacgtggccccggaaatcagggagctcttaacccagtttgaaacgtaactggttccctgaccaggtcaccgacgatgagggcgcacctgctgtcctggagcttccgatctctgttcggggaccctgtgagccttctggccggctgcgtgcagagcccactgggcacggtggtcggcctggtgtgaggccccccggggaccggcagtgtgtccagggaggggatggccctgagcccagcggctcctcccgctgagtgtatttcttcccaccactcagcgcatggctgccctggctcacgaggcagtcgggactcgtgacttgctggctgctggctgctgctgcctcgcgcgctggggttccatggaggaactgggcctgccgccccggcctcacctgctgcccgcatgctggggtcccatggaggaaccaggcctggcgccccggcctcgcccagcggctggtgtgggcagctgttccctgcctcgcagtgtcctggaggcagctgtctcgcagactcagcttggtctcccgcaggcttcagaaaaacccaattgcacgtgtgggattcttccccagcccttgggtgcggggtctctgtgcacttgagagctgggggacccacccaccgtctcccactccaagttcatcccagagcgtggggcccgctgggcacctggcacctggcctgcagatgctgctacgagtgaccagtgctgtgtggaggaggccaagggcggcccctgggaaaccgggcttcaacagtacaaggaaaagaaacttgctctgttttgtaagagcgtgttccttttcctcttttttgtcactttaaagaccaaaaagaataaagaaagaaaagaaaaaaattaatc

SEQ ID NO: 14089 - DNA, 2321 bp, Homo sapiens
agcggggggggcctgggacgcggcgggagcatggagccgcgcgccggctgccggctgccggtgcgggtggagcaggtcgtcaacggcgcgctggtggtcacggtgagctgcggcgagcggagcttcgcggggatcctgctggactgcacgaaaaagtccggcctctttggcctacccccgttggctccgctgccccaggtcgatgagtcccctgtcaacgacagccatggccgggctcccgaggagggggatgcagaggtgatgcagctggggtccagctccccccctcctgcccgcggggttcagccccccgagaccacccgccccgagccacccccgcccctcgtgccgccgctgcccgccggaagcctgcccccgtaccctccctacttcgaaggcgcccccttccctcacccgctgtggctccgggacacgtacaagctgtgggtgccccagccgccgcccaggaccatcaagcgcacgcggcggcgtctgtcccgcaaccgcgacccggggcgcctcatcctcagcaccatccgcctgcggccgcgccaggtgctctgtgagaagtgcaagagcacgctgagccccccggaggccagccccggacccccagccgcgcccagggcccgcaggaggctgggcagcggcccggacagggagctccgcaagccggaggagccggagaacggcgagcccacggctgcggccaccgccaggaggagcaagagggagaggcgcgaggaggacagggccccggcagagcaggtcccgcggagcccggtcatcaagatctcctacagcacgccccagggcaagggagaggtggtcaagatcccctcccgcgtgcacggctctctggagcccttccgtccccagcaggccccgcaggacgacggcagccaggaccccgaggtgctggacagagagtcccgggaccggccgtcctgcgcgccctcggcctccatccccaagttgaaactgacacggcctgtgccggccggcgcggacctgccgccccctaagatccgcctgaagccccaccgtctgggggacagcgagcacgagcccgtgtaccgggccgagctggtgggggagctgaacgggtacctgcgggacagctcgccggcgccctgtgcggacggccctgccggtgggctggcggacttgtcttctggaagttcgggtgaggacgatgacttcaagagctgtccccagggtccacagggacgcgagggcttggcttttctcgtcagctgccctgaggggagagcggactgtgccagtgagtcggcgtgcagcagcgacagcctggacgaggccagatcgtccggctcggaagggacgccggcagacacgggtgacctctcgcctggccacggcgcgtcagcgccctcggtgtccagagaggctcgccaaacggtgccgcccctgacggtcaggctgcacacacagagcgtgtcggagtgcatcacggaggacggcaggactgtggccgtgggggacatcgtctggggtcaccgacgatgagggcgcacctgctgtcctggagcttccgatctctgttcggggaccctgtgagccttctggccggctgcgtgcagagcccactgggcacggtggtcggcctggtgtgaggccccccggggaccggcagtgtgtccagggaggggatggccctgagcccagcggctcctcccgctgagtgtatttcttcccaccactcagcgcatggctgccctggctcacgaggcagtcgggactcgtgacttgctggctgctggctgctgctgcctcgcgcgctggggttccatggaggaactgggcctgccgccccggcctcacctgctgcccgcatgctggggtcccatggaggaaccaggcctggcgccccggcctcgcccagcggctggtgtgggcagctgttccctgcctcgcagtgtcctggaggcagctgtctcgcagactcagcttggtctcccgcaggcttcagaaaaacccaattgcacgtgtgggattcttccccagcccttgggtgcggggtctctgtgcacttgagagctgggggacccacccaccgtctcccactccaagttcatcccagagcgtggggcccgctgggcacctggcacctggcctgcagatgctgctacgagtgaccagtgctgtgtggaggaggccaagggcggcccctgggaaaccgggcttcaacagtacaaggaaaagaaacttgctctgttttgtaagagcgtgttccttttcctcttttttgtcactttaaagaccaaaaagaataaagaaagaaaagaaaaaaattaatc

SEQ ID NO: 14090 - DNA, 2508 bp, Homo sapiens
ggtcccttctcactgtggtttctctctctccattgccaggtccggcctctttggcctacccccgttggctccgctgccccaggtcgatgagtcccctgtcaacgacagccatggccgggctcccgaggagggggatgcagaggtgatgcagctggggtccagctccccccctcctgcccgcggggttcagccccccgagaccacccgccccgagccacccccgcccctcgtgccgccgctgcccgccggaagcctgcccccgtaccctccctacttcgaaggcgcccccttccctcacccgctgtggctccgggacacgtacaagctgtgggtgccccagccgccgcccaggaccatcaagcgcacgcggcggcgtctgtcccgcaaccgcgacccggggcgcctcatcctcagcaccatccgcctgcggccgcgccaggtgctctgtgagaagtgcaagagcacgctgagccccccggaggccagccccggacccccagccgcgcccagggcccgcaggaggctgggcagcggcccggacagggagctccgcaagccggaggagccggagaacggcgagcccacggctgcggccaccgccaggaggagcaagagggagaggcgcgaggaggacagggccccggcagagcaggtcccgcggagcccggtcatcaagatctcctacagcacgccccagggcaagggagaggtggtcaagatcccctcccgcgtgcacggctctctggagcccttccgtccccagcaggccccgcaggacgacggcagccaggaccccgaggtgctggacagagagtcccgggaccggccgtcctgcgcgccctcggcctccatccccaagttgaaactgacacggcctgtgccggccggcgcggacctgccgccccctaagatccgcctgaagccccaccgtctgggggacagcgagcacgagcccgtgtaccgggccgagctggtgggggagctgaacgggtacctgcgggacagctcgccggcgccctgtgcggacggccctgccggtgggctggcggacttgtcttctggaagttcgggtgaggacgatgacttcaagagctgtccccagggtccacagggacgcgagggcttggcttttctcgtcagctgccctgaggggagagcggactgtgccagtgagtcggcgtgcagcagcgacagcctggacgaggccagatcgtccggctcggaagggacgccggcagacacgggtgacctctcgcctggccacggcgcgtcagcgccctcggtgtccagagaggctcgccaaacggtgccgcccctgacggtcaggctgcacacacagagcgtgtcggagtgcatcacggaggacggcaggactgtggccgtgggggacatcgtctggggtaagatccatggttttccttggtggccggcgcgtgttcttgacatcagtctcggccagaaggaggacggagagccgtcttggcgagaagcgaaggtctcgtggtttggttctccgactacgtcgttcttgtctatttcaaaactctcccctttctctgaatttttcaaactgagatttaatcgtaagaagaaggggatgtatcggaaagctataaccgaggctgcaaatgccgcaagacacgtggccccggaaatcagggagctcttaacccagtttgaaacgtaactggttccctgaccaggtcaccgacgatgagggcgcacctgctgtcctggagcttccgatctctgttcggggaccctgtgagccttctggccggctgcgtgcagagcccactgggcacggtggtcggcctggtgtgaggccccccggggaccggcagtgtgtccagggaggggatggccctgagcccagcggctcctcccgctgagtgtatttcttcccaccactcagcgcatggctgccctggctcacgaggcagtcgggactcgtgacttgctggctgctggctgctgctgcctcgcgcgctggggttccatggaggaactgggcctgccgccccggcctcacctgctgcccgcatgctggggtcccatggaggaaccaggcctggcgccccggcctcgcccagcggctggtgtgggcagctgttccctgcctcgcagtgtcctggaggcagctgtctcgcagactcagcttggtctcccgcaggcttcagaaaaacccaattgcacgtgtgggattcttccccagcccttgggtgcggggtctctgtgcacttgagagctgggggacccacccaccgtctcccactccaagttcatcccagagcgtggggcccgctgggcacctggcacctggcctgcagatgctgctacgagtgaccagtgctgtgtggaggaggccaagggcggcccctgggaaaccgggcttcaacagtacaaggaaaagaaacttgctctgttttgtaagagcgtgttccttttcctcttttttgtcactttaaagaccaaaaagaataaagaaagaaaagaaaaaaattaatc

SEQ ID NO: 14091 - DNA, 448 bp, Homo sapiens
cctattgtagaagactgaatggagctgtatgcctagcactcctttgctaagaactagcccttcaaccatccacatgattaattataaataatcagttgagtggtcctgatatcagcacctgattaaaaagagcctatcacagtaccgtactccctagatagtcaactggtctgtgaaagagtaaattagtcacatcacacccatcagtcccatctatgagactctggaaaatggaccggaaagatcgttatgtttaagtagctgagagcgtaaaacctgttgaaaaacacacatcatcctatttggagaatggagctctgcagaaggcaatctattccaaggattttttctttttaggacagagtcttgctctgtctcccaggctggagtgaagtggtgccatcatagctcaaagcagcctccaactcctgggctcaagtgaacctcc

SEQ ID NO: 14092 - DNA, 334 bp, Homo sapiens
caccaggccagactttatacttatagggcaacaggctaatggcattgactctgagcttgccgttagtccctgggcagcagggctgtggtccatctacccagcatcctgcttctaacattaaatgaaatgggataaccgtcttccaagacacctgccttaaaacttttgaatataccctaaatatctaaattctgcttaacaattttcattgtagatttatccaactatgaatttcaaagggtcctttggggtataatcctagtctttactttcacctttctttcctactctcttcctttgtgcaccctttgcttcaataaatgactacctgata

SEQ ID NO: 14093 - DNA, 403 bp, Homo sapiens
tggatatttagtacagaagagatattccagatattctaatgcagctacatcctcctcacaagatacaaatttaagtttatattaaatttagcataaatttccattttaaggtaagagataaacatattaagccactctagtgggaagttaagggggcagggacaaagaaacaatgaatgagaacttgccccccgccccactgcgctgccgccacccgactatcgacacggagcctggccgttatgtaggggctttcctagctcgactcattaacagctagtccacaacacgtataagtgcctgtgcatgtcagagacagcctccccaaggcacaaggtgtgaaagaaatagtctaaggctgcacctactggaggatgaagttttttgacaaataaataaaaag

SEQ ID NO: 14094 - DNA, 3405 bp, Homo sapiens
ctatagtattaggagatagggccttttggaaggtgactggagaggggcagcaccttcaggaatagaattagtgcccttataaaatagacccaagggaactttttcatcccttacaccctgtgagaacatgatgagaaggcaccatgtatgagccagagaatagatcctcaccacacactgaatctgctggtgccttgatcttggactttctagcctccagaactgtgagaaacaaatttctgctgtttataagctgtccagttaatggaattttgttattgtagcccaaatatactaagacaacaaccaatatagttaaaattactatgcatgttctactttatattaagttctagtgtacgttgtataatgcttacatcaaataaaaggtaaggttaatttacataaaacatgtttaggtaggataattgtaaaaattatttattagagaaattggtaaaattgtggctttgcatagaggcaggagaaagaaaagagcaaggcactagtgagaaaaattgctatggagaatattgagaatagatacaaggagacctacaggtttacaacattaatattggccaatacttgattggacagtttaaatttttcaacctgaaaggcctttgtgccccaaagtttggtaaggagattttgtaaaaacaaacaacaatagcaataaaaaatcagggaagattaagagatttcataaggagcaagaatttataggtaatacttaaaaggtataggtatgattactattttggtgaataataggcacatggtagactgaaattcggcaacagctactgtgcaaataagcatatctgtgattatggcttatatctggttggggacccctgttgtaagccattctttttagtacaggttaagctccatttctcaatcacagttctgttattttcatctgtgggaaataatgaattctgtttcagattttgattgtcttttgtgttctttgtcatccaacagaattgcacatttcactttgtaaaatttttataactagtgtttgacacttgaaactggcttttgagtcttctataatagtttgtgcagaagtctgaggtttaatgttatgatggccttattcatactgtagaaatatatactgcagcaatatgcacccaaatggtcaaatggtcagtaagctttttaaatgaactagctagatttttagttttgattttaattcttggtttgaattgctaaaagctatcttgaccttaggaaaatgaaagcttacatgaggtttagccacttaaaacaaagtatttctttgtgtctccagttcatgtgaaacctgacttttatttacaatatttatgttaggagcacttttattaggatcttttgaagcctttcaagagttttctttcagttattattaatagtactaataaagaaggtgagcaggatttaaagctgaaaggagcatcagagataattgaactttgtttatgccattcattgttaccctatgcaatgtcttttgtttgtttttaattaattgccaatatttaagaagagggtcatagaacagtcattattccagattctcttgaaaaactggaagatctggcaactacaggtttatgttcttgcatgttaacaatatacaggggctggaattaacctgctctgagtccctttagatgtgcatactctctccgatttgccacagttcccaccaattcttatttctcctctctttacttggcccacatcattgggcctatctcattaatttctattaaatattttattactgaggccattagtttatgacccctgaggccaagacagctgttaagaacttgcattactggtggcaaaattatacctttacgattacttactaggttttagaaatctcacttttctaacaagaggtattatggtaatcataagttcaaaataattaaagttcatttgagataattaaatcaaaacctctagtctgggttggagggtgataaagttatctggcgaaatatatgaacttctgttaccttcctcttctgctaaatgaatggtaaaatgaatcctgatttgtttaggcagtttacttatgaagttgggagaatttttttttttctttaaaggactgagtctggctctgttgcctaggctcaagtactgtggatcttggctcactgcagcctccacctcttggattcaagcagttctcctgcctcagcctcccgagtagctgggagccaccatgtccagctgatttttgtatttttagtaaatgagttttcaccatgttggccaggctggtcttgaactcctgacctcaagtgagctgcctacctggcctcccaaagctctgggattataggtgtgagccactgtgccaggcctgaggttgggagaaattttgtccatttctttagaaccaaaattggcaaccagagagtatttggatgttacacaaaatatttagtttccctttctagcctaaattgggttgtttatagcacccgtctctccatttgagaaaaatggttaggatgctggtgcagggatgaggccttattaaaacagagaaggtacccaaatggtggttcaaacacaggctggctaataagctgtgaggtgacttaccaaaaaacaacaacaacaaaaacccttgaacttctgctttcaacttctactttatgctagattatttggtccaatcttcctggtctaacacctggctacatataacaacaaacatctgcttgaatgtgttggaaaggtgatgattaattgccaggctgatatattaaataaaatggaaatctcaaaagttgaacttgctattcagtctgcttttgctctggaggggggatttgttagccaagaagaggctgaaaacatgagtagtgtactttgggagactagaaggacgaacgttaaaagtatacgacctccaaggttgtgactctggtagaattctttggttagagatcctgaaggacagcatcctagggataatggtgaaacagaagtagaccattcacatagagtgtagtttagcattaaatcatcaaggtggattagtaaattgtgagattttggaagtggactaaggtgaccttaggtttctaatgcccctaggaacctgaaagatagaaacctggaggaagaatattttcctaggcctcaaattatttgggtactttttcaaatacagtatctccacataccctggatacaggaggagaaaggcggaatgaaaactggcagaaacagtagacccaaaggggcaccaaataattgcattgtgaggtagactttaagtatgtttactgtattcaaggagataaaagatggaaaatttccatatagaattggaaactataaaaaagtcactgcagatttgttaaaaaaaaa

SEQ ID NO: 14095 - DNA, 2821 bp, Homo sapiens
ctatagtattaggagatagggccttttggaaggtgactggagaggggcagcaccttcaggaatagaattagtgcccttataaaatagacccaagggaactttttcatcccttacaccctgtgagaacatgatgagaaggcaccatgtatgagccagagaatagatcctcaccacacactgaatctgctggtgccttgatcttggactttctagcctccagaactgtgagaaacaaatttctgctgtttataagctgtccagttaatggaattttgttattgtagcccaaatatactaagacaacaaccaatatagttaaaattactatgcatgttctactttatattaagttctagtgtacgttgtataatgcttacatcaaataaaaggtaaggttaatttacataaaacatgtttaggtaggataattgtaaaaattatttattagagaaattggtaaaattgtggctttgcatagaggcaggagaaagaaaagagcaaggcactagtgagaaaaattgctatggagaatattgagaatagatacaaggagacctacaggtttacaacattaatattggccaatacttgattggacagtttaaatttttcaacctgaaaggcctttgtgccccaaagtttggtaaggagattttgtaaaaacaaacaacaatagcaataaaaaatcagggaagattaagagatttcataaggagcaagaatttataggtaatacttaaaaggtataggtatgattactattttggtgaataataggcacatggtagactgaaattcggcaacagctactgtgcaaataagcatatctgtgattatggcttatatctggttggggacccctgttgtaagccattctttttagtacaggttaagctccatttctcaatcacagttctgttattttcatctgtgggaaataatgaattctgtttcagattttgattgtcttttgtgttctttgtcatccaacagaattgcacatttcactttgtaaaatttttataactagtgtttgacacttgaaactggcttttgagtcttctataatagtttgtgcagaagtctgaggtttaatgttatgatggccttattcatactgtagaaatatatactgcagcaatatgcacccaaatggtcaaatggtcagtaagctttttaaatgaactagctagatttttagttttgattttaattcttggtttgaattgctaaaagctatcttgaccttaggaaaatgaaagcttacatgaggtttagccacttaaaacaaagtatttctttgtgtctccagttcatgtgaaacctgacttttatttacaatatttatgttaggagcacttttattaggatcttttgaagcctttcaagagttttctttcagttattattaatagtactaataaagaaggtgagcaggatttaaagctgaaaggagcatcagagataattgaactttgtttatgccattcattgttaccctatgcaatgtcttttgtttgtttttaattaattgccaatatttaagaagagggtcatagaacagtcattattccagattctcttgaaaaactggaagatctggcaactacaggtttatgttcttgcatgttaacaatatacaggggctggaattaacctgctctgagtccctttagatgtgcatactctctccgatttgccacagttcccaccaattcttatttctcctctctttacttggcccacatcattgggcctatctcattaatttctattaaatattttattactgaggccattagtttatgacccctgaggccaagacagctgttaagaacttgcattactggtggcaaaattatacctttacgattacttactaggttttagaaatctcacttttctaacaagaggtattatggtaatcataagttcaaaataattaaagttcatttgagataattaaatcaaaacctctagtctgggttggagggtgataaagttatctggcgaaatatatgaacttctgttaccttcctcttctgctaaatgaatggtaaaatgaatcctgatttgtttaggcagtttacttatgaagttgggagaatttttttttttctttaaaggactgagtctggctctgttgcctaggctcaagtactgtggatcttggctcactgcagcctccacctcttggattcaagcagttctcctgcctcagcctcccgagtagctgggagccaccatgtccagctgatttttgtatttttagtaaatgagttttcaccatgttggccaggctggtcttgaactcctgacctcaagtgagctgcctacctggcctcccaaagctctgggattataggtgtgagccactgtgccaggcctgaggttgggagaaattttgtccatttctttagaaccaaaattggcaaccagagagtatttggatgttacacaaaatatttagtttccctttctagcctaaattgggttgtttatagcacccgtctctccatttgagaaaaatggttaggatgctggtgcagggatgaggccttattaaaacagagaaggtacccaaatggtggttcaaacacaggctggctaataagctgtgaggtgacttaccaaaaaacaacaacaacaaaaacccttgaacttctgctttcaacttctactttatgctagattatttggtccaatcttcctggtctaacacctggctacatataacaacaaacatctgcttgaatgtgttggaaaggtgatgattaattgccaggctgatatattaaataaaatggaaatctcaaaagtt

SEQ ID NO: 14096 - DNA, 454 bp, Homo sapiens
gatgtaaaaacatgctttaataccgtcttggttgttaatttcaaagatttttctcaaaagacactctttgtaaagtaatgagaaaatattgccacttttaattattaaataatatttactacaatacaatttacttttaattattaaacatgcaatatattttaaattatttaattatatatgcaacgtatattttaaaaatgtattaaaataaagttaattgcatgttctctctaatcatgttcttgtagcatgcacacattttaaaaaacccagtacatgtaatttttgaaaatagtatgtaccattacacctttttatttgggagatttattagaaaataactttttattcagaaaagattatgacagaattagataaaaaggagactaaaatgtgtgttaaatcatgtaatattataaatgtaattaactcttcatcttccaaatattga

SEQ ID NO: 14097 - DNA, 134 bp, Homo sapiens
taaaaatgagaaacaaaataactcaaatgaaaaattcactgaacggacctaatagcagttcagacaccgcagaagaaaagataagtgaatggaaaaacaaagcaatataaattaaccaaactgaaaacaagttt

SEQ ID NO: 14098 - DNA, 810 bp, Homo sapiens
caagggtaacgtgttattccgcttggcaagttagattagattatacttgtagaacgtaaaataccaaataggtatagtttatttgaaatttaagtttgaaattaaaatgtcagtggtattggtttacttttttaagcttcagtgggcttaagaagactcaccatataaacaattctgtcatcccaactgaagaacattgaagatgggttcgtatcccagtgcacagagctttcttaatgaccagataaatggtcacagaacttgattctttcatgccttaaagatagaactccaagtccacattctccaaataagtggttcccagctcacattccctagattcatgttacacattaagtgatttttctgactcttcacctgtttgcgcaccgccccccccaccctgccaccaccttaaaacttgtaatttcttcttttactgcttttgttggattttactttgttgttttcagatctttgaaagtattttaaacatcatccttttggggttctgcatctctctcaagaatttattagacctttatgatcacaatctgttaataacatgctgtatattgtagcagtagtgattctgctaaaatgacctgtggttaaaaataatgggattggaacatggaagaatgagtagcacactacagctaaagagaagtttactttgtatgctaacataggatgtttttgtaattctctgattttcagatgttcagtgcctttccaggaagatattatgtatgcattgtgtttgtgtgtgctgtgaatactgaaataagatctttcttttctgctaaa

SEQ ID NO: 14099 - DNA, 485 bp, Homo sapiens
gctttcccgcagctatcccagaagagcctaattcctccacatttgccattgtcacaagaggctacttcccctcacccaacagcaggtcctgttgctcacttctgcctcctatatttgtgcaggtggaagtgcttgaccaaacctgggtcccatgttgaaccaagtggtaaagaagcttggaaaacatggttcctagctttccagggaggcaactacagaggagttgagatggatgctgaattctttattgtatcagccatgattggtggctctagggccaggcacatattttctggggttcttccctgagtcacttcaatcatataccatctgggccatctaaacttgaagctccctctgcttctggccctatgttaatttttgaattgtcaccaagtagtgtttttgaacagaagttcaacatattcagactcactgagtaatccatgttcacaaggctctcaacctcaccagcatatgaaact

SEQ ID NO: 14100 - DNA, 1064 bp, Homo sapiens
tctgaattgtttctagcttatggctaccaagaatagagtggctatgaacacccttataaatgtcttttgatggacatgtatatgcatttattttgaaacatacctaagaagagaatggctggcctgggtaagattatgttcagcttttagaaggtactacccaatggttttctaaaatacttgcatctgcacatgccatgtcccagctacccaagaggctaaagcaggtgtattgcttgagcctaggagttctaggctgtagtgccctacgccagtcgggtgtccgcactgtttggcatcaatatggcgacctcccgagatggggggaccaccagattgcctaaggaggggtgaaccagcccagatcagaaacaaagcaggtcaaaactcctgtgccgatcagtaatgggactgtacctatgaataaccactgcactccagcctgagcaacatagcaagatcctgtctctaaaaaaaatgaataaaatacttgtaccaatttatacttccactagcagtatatgagagttccaggtgatttatatcctcattaatcatagaagggttttttctgtctttttattttagctatttcggtgggtgtgtagtagtatctcattttggttttaatttatatatttccctgatgattaaaaggggatgtcctgtaaatgttttcttttgtgaaataccatagcacacatttaagggataaagaaggcccgtcccagaggcaatgttgcatacagttcctgtcccactggccctgctgactagatggggagtccagggtaacagctacccgataccacggctcgagagttaagatttatggcagattgatacctgcctgggtcgcatgatgcaatgagtatttttagacgagggaattatttcaaggggccatgatagggaggccttgagcttaaggtatccgctttcaaggcctcctatcatgggccttgaaggcggataccttagctcaaggtgggacaaaccaggtatttttaggcccagggggtcagatgaacctggggttccctctgcccttcccctcactcccc

SEQ ID NO: 14101 - DNA, 239 bp, Homo sapiens
agttcgcagacacaataacataaaaagcagtgctgacgtttgaacaggacttttggtttcaaagccattgtaccttataggtgtgttccatatacatttattaattgaattaacgggcaaaggccaatcatactgggctttaacttccctttagtcacaagatgttcttttagctcccagagtgaagatattaaaaacaagaatctggctttggttcagttgctaaaagcatgtgtagt

SEQ ID NO: 14102 - DNA, 401 bp, Homo sapiens
ttgtagttttgcctccagcttgacatttaattcacttaatttatgaaacaagtatagcacatttcatatttttggccatatgttgcaggttttgctctcagtccatttgtgggatagtgaagttgtttcctttctcttttcacagtagacggataattaaccttggcccagtaatgcttatttctgaagaacaaccagctcagcctgcattgccaatccaaccagaaggtacaagggtcgtgtgtgggcactctttcctgtgttggatcccatgccatcctcagagttcttagtttattccttcattttggtggagcacatctactctttgctttctgagaaaagatgcagggaaatattatatttgagctctttttctcttaagtggtttttaatctgat

SEQ ID NO: 14103 - DNA, 2798 bp, Homo sapiens
tcccggaggcggcagcagcagcagctgcagcggcagcagcggcagcagaggcagcagcagtagccaccactccgccgaggccgcaaccccggctcggcctccccaggccccgccgctgccgcagtcatggctgctgatggggtggacgaacgctcgcctctgctgtcagcatcccactccggaaatgtcactcccaccgccccaccgtacttgcaagaaagcagccccagagcggagctcccacctccatatacagccattgccagtccagacgccagtggtattccagtaataaactgccgtgtgtgccaatcactaatcaatttggatggcaagcttcaccagcatgtggttaagtgcacagtttgcaatgaagctacgccaatcaaaaaccccccaacaggcaagaaatatgttagatgcccttgtaattgtcttctcatttgtaaggacacatctcggcgaataggatgcccaagacccaactgtagacggataattaaccttggcccagtaatgcttatttctgaagaacaaccagctcagcctgcattgccaatccaaccagaaggtacaagggtcgtgtgtgggcactgtggaaacacattcctgtggatggaactgaggttcaacactctggcaaaatgcccacactgcaaaaaaatctcctcagtgggtagtgcacttccacgaagacgctgctgtgcatatattaccattggaatgatatgtattttcattggagttgggttaactgttggcaccccagattttgcaaggcgatttcgagcaacctatgtttcttgggcaattgcttatctcctaggattgatctgccttatccgagcttgttattggggagccataagagtcagttatccagaacacagttttgcataagcttgtttatgattcagtaatgcaggtgagagtgtctagcagttcttggtaagctactctggacatctttaaattatttatcctaatggattccattctggtttatgtataatcgtttcaagactttgggagtcttttatgaacaaatgctcattgcactatattatatgcaaattgttttgctgctaggttttcaaaatttgaataataaagccttttcatgttcttttacatctcttatagatatttttggatttgttaccaaacattacatttactctcacccttttattatttttaaataagttatttcattacttgctgatacatgagtattcctaagtgtttataaatatttctataatagtttcacatttatatttacattttaattaaacagtatcaaaattgcttgcttaaaacctaagcaatatgcattttgcttgaactgcttactgtaactttaacctaagattatagtgaccttattcaggaaaaaaaaaaaatttagtgtaacttcaaagacttgacattcttgtcagaggaaaaaaaatttctagatactgtttgcttgttttttgttgtttgtagaaagataaaatattttggtagtaatttaaaatacaagaacgaatatttatttgtccacagttggagatgttggataaatgtcttttctcaaagatcacaggacttttgtctttcatttttgcctttttatttaccatttataaaagatctggtctggattatggaatttaatgtttatcagctctatgtattcctttatagaggcttgaggaagtatttcacataacatgttttataatacttaaccatttatccaaagatatatttacattgggttgtgcccctttcccttagatcatggtaaatttttcttattgaggtaattatgtactacttatatttgaaggaagcttatgacattttacagtagctaaaatgttgagattagaggtacttttactattcttctcaaaggtaactgatcagataattacccaaattattcaagaaaatagatcagaaataaagaacaacataattttctaagaattcattgaaatttatggaatcagctctcgcactgcccatctttgcagttttgaaaaagaaattgcttaatcacaaatgttctacagtctttaaatgtagtagaattagacagtgagatcatctgagtaaattgattggtgattccagagataagactaatattttaaattatttatgatactgattagtataaaaacgtactcatcacagaatttgaagcaaaatacatgtacacttcaaagagtaaatgacaaatgtataaatgctgtagctcaggattatatgtacctttaaaaatacactaataaagattattgttcaaaaattaccttgttttattccattaaaaataatgtcacttccagagttgccttgaaatcttgctgtaaagttttcatgtttaggaatgtacctgtttctttatataatattcatttatgttttttgtactattttcaaatggttttatttttaaaatatagtttttaaatccatttgtaatacacttgatgttaggtataaaataatcttacttcttttcctaatggttaactagttgtaacagcattgtatactgaataatccattctttccctcattgattggaaagctcacattaaattatatgctatgtcatattccttctggaataataactttatgagagcaagaaccctggtagtcttgttcacagctttatccccacttagaacagttcttagtgtacatgtgctcaatttacgtgaatgaatatgcatgaatgaataaatggttgaatgaattgctattttaaattcttaaaaaaaaacttgaatatg

SEQ ID NO: 14104 - DNA, 2640 bp, Homo sapiens
tcccggaggcggcagcagcagcagctgcagcggcagcagcggcagcagaggcagcagcagtagccaccactccgccgaggccgcaaccccggctcggcctccccaggccccgccgctgccgcagtcatggctgctgatggggtggacgaacgctcgcctctgctgtcagcatcccactccggaaatgtcactcccaccgccccaccgtacttgcaagaaagcagccccagagcggagctcccacctccatatacagccattgccagtccagacgccagtggtattccagtaataaactgccgtgtgtgccaatcactaatcaatttggatggcaagcttcaccagcatgtggttaagtgcacagtttgcaatgaagctacgccaatcaaaaaccccccaacaggcaagaaatatgttagatgcccttgtaattgtcttctcatttgtaaggacacatctcggcgaataggatgcccaagacccaactgtagacggataattaaccttggcccagtaatgcttatttctgaagaacaaccagctcagcctgcattgccaatccaaccagaaggtacaagggtcgtgtgtgggcactgtggaaacacattcctgtggatggaactgaggttcaacactctggcaaaatgcccacactgcaaaaaaatctcctcagtgggtagtgcacttccacgaagacgctgctgtgcatatattaccattggaatgatatgtattttcattggagttgggttaactgttggcaccccagattttgcaaggcgatttcgagcaacctatgtttcttgggcaattgcttatctcctaggattgatctgccttatccgagcttgttattggggagccataagagtcagttatccagaacacagttttgcataagcttgtttatgattcagtaatgcaggtgagagtgtctagcagttcttggtaagctactctggacatctttaaattatttatcctaatggattccattctggtttatgtataatcgtttcaagactttgggagtcttttatgaacaaatgctcattgcactatattatatgcaaattgttttgctgctaggttttcaaaatttgaataataaagccttttcatgttcttttacatctcttatagatatttttggatttgttaccaaacattacatttactctcacccttttattatttttaaataagttatttcattacttgctgatacatgagtattcctaagtgtttataaatatttctataatagtttcacatttatatttacattttaattaaacagtatcaaaattgcttgcttaaaacctaagcaatatgcattttgcttgaactgcttactgtaactttaacctaagattatagtgaccttattcaggaaaaaaaaaaaatttagtgtaacttcaaagacttgacattcttgtcagaggaaaaaaaatttctagatactgtttgcttgttttttgttgtttgtagaaagataaaatattttggtagtaatttaaaatacaagaacgaatatttatttgtccacagttggagatgttggataaatgtcttttctcaaagatcacaggacttttgtctttcatttttgcctttttatttaccatttataaaagatctggtctggattatggaatttaatgtttatcagctctatgtattcctttatagaggcttgaggaagtatttcacataacatgttttataatacttaaccatttatccaaagatatatttacattgggttgtgcccctttcccttagatcatggtaaatttttcttattgaggtaattatgtactacttatatttgaaggaagcttatgacattttacagtagctaaaatgttgagattagaggtacttttactattcttctcaaaggtaactgatcagataattacccaaattattcaagaaaatagatcagaaataaagaacaacataattttctaagaattcattgaaatttatggaatcagctctcgcactgcccatctttgcagttttgaaaaagaaattgcttaatcacaaatgttctacagtctttaaatgtagtagaattagacagtgagatcatctgagtaaattgattggtgattccagagataagactaatattttaaattatttatgatactgattagtataaaaacgtactcatcacagaatttgaagcaaaatacatgtacacttcaaagagtaaatgacaaatgtataaatgctgtagctcaggattatatgtacctttaaaaatacactaataaagattattgttcaaaaattaccttgttttattccattaaaaataatgtcacttccagagttgccttgaaatcttgctgtaaagttttcatgtttaggaatgtacctgtttctttatataatattcatttatgttttttgtactattttcaaatggttttatttttaaaatatagtttttaaatccatttgtaatacacttgatgttaggtataaaataatcttacttcttttcctaatggttaactagttgtaacagcattgtatactgaataatccattctttccctcattgattggaaagctcacattaaattatatgctatgtcatatcaaacaaaaagaaacaaaggg

SEQ ID NO: 14105 - DNA, 2745 bp, Homo sapiens
tcccggaggcggcagcagcagcagctgcagcggcagcagcggcagcagaggcagcagcagtagccaccactccgccgaggccgcaaccccggctcggcctccccaggccccgccgctgccgcagtcatggctgctgatggggtggacgaacgctcgcctctgctgtcagcatcccactccggaaatgtcactcccaccgccccaccgtacttgcaagaaagcagccccagagcggagctcccacctccatatacagccattgccagtccagacgccagtggtattccagtaataaactgccgtgtgtgccaatcactaatcaatttggatggcaagcttcaccagcatgtggttaagtgcacagtttgcaatgaagctacgccaatcaaaaaccccccaacaggcaagaaatatgttagatgcccttgtaattgtcttctcatttgtaaggacacatctcggcgaataggatgcccaagacccaactgtagacggataattaaccttggcccagtaatgcttatttctgaagaacaaccagctcagcctgcattgccaatccaaccagaaggtacaagggtcgtgtgtgggcactgtggaaacacattcctgctcctcagtgggtagtgcacttccacgaagacgctgctgtgcatatattaccattggaatgatatgtattttcattggagttgggttaactgttggcaccccagattttgcaaggcgatttcgagcaacctatgtttcttgggcaattgcttatctcctaggattgatctgccttatccgagcttgttattggggagccataagagtcagttatccagaacacagttttgcataagcttgtttatgattcagtaatgcaggtgagagtgtctagcagttcttggtaagctactctggacatctttaaattatttatcctaatggattccattctggtttatgtataatcgtttcaagactttgggagtcttttatgaacaaatgctcattgcactatattatatgcaaattgttttgctgctaggttttcaaaatttgaataataaagccttttcatgttcttttacatctcttatagatatttttggatttgttaccaaacattacatttactctcacccttttattatttttaaataagttatttcattacttgctgatacatgagtattcctaagtgtttataaatatttctataatagtttcacatttatatttacattttaattaaacagtatcaaaattgcttgcttaaaacctaagcaatatgcattttgcttgaactgcttactgtaactttaacctaagattatagtgaccttattcaggaaaaaaaaaaaatttagtgtaacttcaaagacttgacattcttgtcagaggaaaaaaaatttctagatactgtttgcttgttttttgttgtttgtagaaagataaaatattttggtagtaatttaaaatacaagaacgaatatttatttgtccacagttggagatgttggataaatgtcttttctcaaagatcacaggacttttgtctttcatttttgcctttttatttaccatttataaaagatctggtctggattatggaatttaatgtttatcagctctatgtattcctttatagaggcttgaggaagtatttcacataacatgttttataatacttaaccatttatccaaagatatatttacattgggttgtgcccctttcccttagatcatggtaaatttttcttattgaggtaattatgtactacttatatttgaaggaagcttatgacattttacagtagctaaaatgttgagattagaggtacttttactattcttctcaaaggtaactgatcagataattacccaaattattcaagaaaatagatcagaaataaagaacaacataattttctaagaattcattgaaatttatggaatcagctctcgcactgcccatctttgcagttttgaaaaagaaattgcttaatcacaaatgttctacagtctttaaatgtagtagaattagacagtgagatcatctgagtaaattgattggtgattccagagataagactaatattttaaattatttatgatactgattagtataaaaacgtactcatcacagaatttgaagcaaaatacatgtacacttcaaagagtaaatgacaaatgtataaatgctgtagctcaggattatatgtacctttaaaaatacactaataaagattattgttcaaaaattaccttgttttattccattaaaaataatgtcacttccagagttgccttgaaatcttgctgtaaagttttcatgtttaggaatgtacctgtttctttatataatattcatttatgttttttgtactattttcaaatggttttatttttaaaatatagtttttaaatccatttgtaatacacttgatgttaggtataaaataatcttacttcttttcctaatggttaactagttgtaacagcattgtatactgaataatccattctttccctcattgattggaaagctcacattaaattatatgctatgtcatattccttctggaataataactttatgagagcaagaaccctggtagtcttgttcacagctttatccccacttagaacagttcttagtgtacatgtgctcaatttacgtgaatgaatatgcatgaatgaataaatggttgaatgaattgctattttaaattcttaaaaaaaaacttgaatatg

SEQ ID NO: 14106 - DNA, 1717 bp, Homo sapiens
aggtaccggcccgaaattccccgggtcgactaactcctactaaattcgcggccgcgtagacgatatttttggatttgttaccaaacattacatttactctcacccttttattatttttaaataagttatttcattacttgctgatacatgagtattcctaagtgtttataaatatttctataatagtttcacatttatatttacattttaattaaacagtatcaaaattgcttgcttaaaacctaagcaatatgcattttgcttgaactgcttactgtaactttaacctaagattatagtgaccttattcaggaaaaaaaaaaaatttagtgtaacttcaaagacttgacattcttgtcagaggaaaaaaaatttctagatactgtttgcttgttttttgttgtttgtagaaagataaaatattttggtagtaatttaaaatacaagaacgaatatttatttgtccacagttggagatgttggataaatgtcttttctcaaagatcacaggacttttgtctttcatttttgcctttttatttaccatttataaaagatctggtctggattatggaatttaatgtttatcagctctatgtattcctttatagaggcttgaggaagtatttcacataacatgttttataatacttaaccatttatccaaagatatatttacattgggttgtgcccctttcccttagatcatggtaaatttttcttattgaggtaattatgtactacttatatttgaaggaagcttatgacattttacagtagctaaaatgttgagattagaggtacttttactattcttctcaaaggtaactgatcagataattacccaaattattcaagaaaatagatcagaaataaagaacaacataattttctaagaattcattgaaatttatggaatcagctctcgcactgcccatctttgcagttttgaaaaagaaattgcttaatcacaaatgttctacagtctttaaatgtagtagaattagacagtgagatcatctgagtaaattgattggtgattccagagataagactaatattttaaattatttatgatactgattagtataaaaacgtactcatcacagaatttgaagcaaaatacatgtacacttcaaagagtaaatgacaaatgtataaatgctgtagctcaggattatatgtacctttaaaaatacactaataaagattattgttcaaaaattaccttgttttattccattaaaaataatgtcacttccagagttgccttgaaatcttgctgtaaagttttcatgtttaggaatgtacctgtttctttatataatattcatttatgttttttgtactattttcaaatggttttatttttaaaatatagtttttaaatccatttgtaatacacttgatgttaggtataaaataatcttacttcttttcctaatggttaactagttgtaacagcattgtatactgaataatccattctttccctcattgattggaaagctcacattaaattatatgctatgtcatattccttctggaataataactttatgagagcaagaaccctggtagtcttgttcacagctttatccccacttagaacagttcttagtgtacatgtgctcaatttacgtgaatgaatatgcatgaatgaataaatggttgaatgaattgctattttaaattcttaaaaaaaaacttgaatatg

SEQ ID NO: 14107 - DNA, 2300 bp, Homo sapiens
tcccggaggcggcagcagcagcagctgcagcggcagcagcggcagcagaggcagcagcagtagccaccactccgccgaggccgcaaccccggctcggcctccccaggccccgccgctgccgcagtcatggctgctgatggggtggacgaacgctcgcctctgctgtcagcatcccactccggaaatgtcactcccaccgccccaccgtacttgcaagaaagcagccccagagcggagctcccacctccatatacagccattgccagtccagacgccagtggtattccagtaataaactgccgtgtgtgccaatcactaatcaatttggatggcaagcttcaccagcatgtggttaagtgcacagtttgcaatgaagctacgccaatcaaaaaccccccaacaggcaagaaatatgttagatgcccttgtaattgtcttctcatttgtaaggacacatctcggcgaataggatgcccaagacccaactgtagacggataattaaccttggcccagtaatgcttatttctgaagaacaaccagctcagcctgcattgccaatccaaccagaaggtacaagggtcgtgtgtgggcactgtggaaacacattcctgtggatggaactgaggttcaacactctggcaaaatgcccacactgcaaaaaaatctcctcagtgggtagtgcacttccacgaagacgctgctgtgcatatattaccattggaatgatatgtattttcattggagttgggttaactgttggcaccccagattttgcaaggcgatttcgagcaacctatgtttcttgggcaattgcttatctcctaggattgatctgccttatccgagcttgttattggggagccataagagtcagttatccagaacacagttttgcataagcttgtttatgattcagtaatgcaggtgagagtgtctagcagttcttggtaagctactctggacatctttaaattatttatcctaatggattccattctggtttatgtataatcgtttcaagactttgggagtcttttatgaacaaatgctcattgcactatattatatgcaaattgttttgctgctaggttttcaaaatttgaataataaagccttttcatgttcttttacatctcttatagatatttttggatttgttaccaaacattacatttactctcacccttttattatttttaaataagttatttcattacttgctgatacatgagtattcctaagtgtttataaatatttctataatagtttcacatttatatttacattttaattaaacagtatcaaaattgcttgcttaaaacctaagcaatatgcattttgcttgaactgcttactgtaactttaacctaagattatagtgaccttattcaggaaaaaaaaaaaatttagtgtaacttcaaagacttgacattcttgtcagaggaaaaaaaatttctagatactgtttgcttgttttttgttgtttgtagaaagataaaatattttggtagtaatttaaaatacaagaacgaatatttatttgtccacagttggagatgttggataaatgtcttttctcaaagatcacaggacttttgtctttcatttttgcctttttatttaccatttataaaagatctggtctggattatggaatttaatgtttatcagctctatgtattcctttatagaggcttgaggaagtatttcacataacatgttttataatacttaaccatttatccaaagatatatttacattgggttgtgcccctttcccttagatcatggtaaatttttcttattgaggtaattatgtactacttatatttgaaggaagcttatgacattttacagtagctaaaatgttgagattagaggtacttttactattcttctcaaaggtaactgatcagataattacccaaattattcaagaaaatagatcagaaataaagaacaacataattttctaagaattcattgaaatttatggaatcagctctcgcactgcccatctttgcagttttgaaaaagaaattgcttaatcacaaatgttctacagtctttaaatgtagtagaattagacagtgagatcatctgagtaaattgattggtgattccagagataagactaatattttaaattatttatgatactgattagtataaaaacgtactcatcacagaatttgaagcaaaatacatgtacacttcaaagagtaaatgacaaatgtataaatgctgtagctcaggattatatgtacctttaaaaatacactaataaagattattgttc

SEQ ID NO: 14108 - DNA, 2378 bp, Homo sapiens
tcccggaggcggcagcagcagcagctgcagcggcagcagcggcagcagaggcagcagcagtagccaccactccgccgaggccgcaaccccggctcggcctccccaggccccgccgctgccgcagtcatggctgctgatggggtggacgaacgctcgcctctgctgtcagcatcccactccggaaatgtcactcccaccgccccaccgtacttgcaagaaagcagccccagaggtttactaactgtggaatctccagaattacaagtcccatataagaggagatggagctacaagtaaatgtttccttgagcggagctcccacctccatatacagccattgccagtccagacgccagtggtattccagtaataaactgccgtgtgtgccaatcactaatcaatttggatggcaagcttcaccagcatgtggttaagtgcacagtttgcaatgaagctacgccaatcaaaaaccccccaacaggcaagaaatatgttagatgcccttgtaattgtcttctcatttgtaaggacacatctcggcgaataggatgcccaagacccaactgtagacggataattaaccttggcccagtaatgcttatttctgaagaacaaccagctcagcctgcattgccaatccaaccagaaggtacaagggtcgtgtgtgggcactgtggaaacacattcctgtggatggaactgaggttcaacactctggcaaaatgcccacactgcaaaaaaatctcctcagtgggtagtgcacttccacgaagacgctgctgtgcatatattaccattggaatgatatgtattttcattggagttgggttaactgttggcaccccagattttgcaaggcgatttcgagcaacctatgtttcttgggcaattgcttatctcctaggattgatctgccttatccgagcttgttattggggagccataagagtcagttatccagaacacagttttgcataagcttgtttatgattcagtaatgcaggtgagagtgtctagcagttcttggtaagctactctggacatctttaaattatttatcctaatggattccattctggtttatgtataatcgtttcaagactttgggagtcttttatgaacaaatgctcattgcactatattatatgcaaattgttttgctgctaggttttcaaaatttgaataataaagccttttcatgttcttttacatctcttatagatatttttggatttgttaccaaacattacatttactctcacccttttattatttttaaataagttatttcattacttgctgatacatgagtattcctaagtgtttataaatatttctataatagtttcacatttatatttacattttaattaaacagtatcaaaattgcttgcttaaaacctaagcaatatgcattttgcttgaactgcttactgtaactttaacctaagattatagtgaccttattcaggaaaaaaaaaaaatttagtgtaacttcaaagacttgacattcttgtcagaggaaaaaaaatttctagatactgtttgcttgttttttgttgtttgtagaaagataaaatattttggtagtaatttaaaatacaagaacgaatatttatttgtccacagttggagatgttggataaatgtcttttctcaaagatcacaggacttttgtctttcatttttgcctttttatttaccatttataaaagatctggtctggattatggaatttaatgtttatcagctctatgtattcctttatagaggcttgaggaagtatttcacataacatgttttataatacttaaccatttatccaaagatatatttacattgggttgtgcccctttcccttagatcatggtaaatttttcttattgaggtaattatgtactacttatatttgaaggaagcttatgacattttacagtagctaaaatgttgagattagaggtacttttactattcttctcaaaggtaactgatcagataattacccaaattattcaagaaaatagatcagaaataaagaacaacataattttctaagaattcattgaaatttatggaatcagctctcgcactgcccatctttgcagttttgaaaaagaaattgcttaatcacaaatgttctacagtctttaaatgtagtagaattagacagtgagatcatctgagtaaattgattggtgattccagagataagactaatattttaaattatttatgatactgattagtataaaaacgtactcatcacagaatttgaagcaaaatacatgtacacttcaaagagtaaatgacaaatgtataaatgctgtagctcaggattatatgtacctttaaaaatacactaataaagattattgttc

SEQ ID NO: 14109 - DNA, 2418 bp, Homo sapiens
tcccggaggcggcagcagcagcagctgcagcggcagcagcggcagcagaggcagcagcagtagccaccactccgccgaggccgcaaccccggctcggcctccccaggccccgccgctgccgcagtcatggctgctgatggggtggacgaacgctcgcctctgctgtcagcatcccactccggaaatgtcactcccaccgccccaccgtacttgcaagaaagcagccccagagtggatggaactgaggttcaacactctggcaaaatgcccacactgcaaaaaaatctcctcagtgggtagtgcacttccacgaagacgctgctgtgcatatattaccattggaatgatatgtattttcattggagttgggttaactgttggcaccccagattttgcaaggcgatttcgagcaacctatgtttcttgggcaattgcttatctcctaggattgatctgccttatccgagcttgttattggggagccataagagtcagttatccagaacacagttttgcataagcttgtttatgattcagtaatgcaggtgagagtgtctagcagttcttggtaagctactctggacatctttaaattatttatcctaatggattccattctggtttatgtataatcgtttcaagactttgggagtcttttatgaacaaatgctcattgcactatattatatgcaaattgttttgctgctaggttttcaaaatttgaataataaagccttttcatgttcttttacatctcttatagatatttttggatttgttaccaaacattacatttactctcacccttttattatttttaaataagttatttcattacttgctgatacatgagtattcctaagtgtttataaatatttctataatagtttcacatttatatttacattttaattaaacagtatcaaaattgcttgcttaaaacctaagcaatatgcattttgcttgaactgcttactgtaactttaacctaagattatagtgaccttattcaggaaaaaaaaaaaatttagtgtaacttcaaagacttgacattcttgtcagaggaaaaaaaatttctagatactgtttgcttgttttttgttgtttgtagaaagataaaatattttggtagtaatttaaaatacaagaacgaatatttatttgtccacagttggagatgttggataaatgtcttttctcaaagatcacaggacttttgtctttcatttttgcctttttatttaccatttataaaagatctggtctggattatggaatttaatgtttatcagctctatgtattcctttatagaggcttgaggaagtatttcacataacatgttttataatacttaaccatttatccaaagatatatttacattgggttgtgcccctttcccttagatcatggtaaatttttcttattgaggtaattatgtactacttatatttgaaggaagcttatgacattttacagtagctaaaatgttgagattagaggtacttttactattcttctcaaaggtaactgatcagataattacccaaattattcaagaaaatagatcagaaataaagaacaacataattttctaagaattcattgaaatttatggaatcagctctcgcactgcccatctttgcagttttgaaaaagaaattgcttaatcacaaatgttctacagtctttaaatgtagtagaattagacagtgagatcatctgagtaaattgattggtgattccagagataagactaatattttaaattatttatgatactgattagtataaaaacgtactcatcacagaatttgaagcaaaatacatgtacacttcaaagagtaaatgacaaatgtataaatgctgtagctcaggattatatgtacctttaaaaatacactaataaagattattgttcaaaaattaccttgttttattccattaaaaataatgtcacttccagagttgccttgaaatcttgctgtaaagttttcatgtttaggaatgtacctgtttctttatataatattcatttatgttttttgtactattttcaaatggttttatttttaaaatatagtttttaaatccatttgtaatacacttgatgttaggtataaaataatcttacttcttttcctaatggttaactagttgtaacagcattgtatactgaataatccattctttccctcattgattggaaagctcacattaaattatatgctatgtcatattccttctggaataataactttatgagagcaagaaccctggtagtcttgttcacagctttatccccacttagaacagttcttagtgtacatgtgctcaatttacgtgaatgaatatgcatgaatgaataaatggttgaatgaattgctattttaaattcttaaaaaaaaacttgaatatg

SEQ ID NO: 14110 - DNA, 300 bp, Homo sapiens
ctcatttaaactaaataattcagatacagaacatcttgtcatgtttgtctagagaaaatggttccataggtaaaattaagaggctaatttccaaagttgaatattggcacaggaaaaaaaaccaagtatgtatatagagagaatagctcagaaagaaaaaaatgtaactctatgcaattgagagagacgatgtaacttgaaaggattaacaatgcacaacgtcattgatcagctgaaaagcaggtactatctaatgcacacagccaggcatgttctgttaacttcaaagtgttctcagcc

SEQ ID NO: 14111 - DNA, 375 bp, Homo sapiens
attaatacccccatgaccagagatccaaaaatcctcaaaaaaatattaacaaataaaatcccacaatgtataaagggaataatacaccacaaccaaaagggctgtgtctcaggaatgcaagacttaacatttgaaaattaatcagtgaattccatcgatattaacaatctaaaaatctaaaaagcgcagttatatcaattgacatagaaaaagcatttgacaaagattcaacatccattcatgagagcaacactcagcaaactagaaatagaagggagtgtactcaatgtgatataggatcaggaataagacaaatatgtccactctcactgctcctattcaatattgtactggaaatactgggtagtgtataag

SEQ ID NO: 14112 - DNA, 504 bp, Homo sapiens
gtcattggaagctggtattcacagccagtacaatggatgatggaacatcctgagttgtggtgtggcaatcattagacaaatagtattcaggaaatttggtggcaaggagaactatattgcttcagtacaaaatctatatcatttatgaagaaacatagtattacaagtagtaacagcattgctaccattttctttttttgcagaagggccaggaatgtgtaaggcctgatctatgctttcttttattttcttctttttttaaaacataatttcaacttttattttagattcagggggtacatgtgtaggcttgttacctggaatattgcatgatgctgaagtttggggtatgatagatcccatcgcccaggtaatgagtgtagtacccaatagttagtttttaaatccttgccaccctccctgacttcttcttatttcaggagatttaaattagccaaaaataaaacatttgaaaataaagggcctgaatggtccttttctaaa

SEQ ID NO: 14113 - DNA, 309 bp, Homo sapiens
ctattttgtaggctgtttactgtgttgtttctttcggtgtgcagacatttgttatttaagtgttttttgcattgggctcctctaacactcaggatggcccactggcctaagcatgaatacatcttgtcattggttacttctttgctttcaaccttccctaaatctacttttagaaaggaaacattggccaggcaccctgtctctcgcctgtaatcccagcactttgggagactgaggcgggtggatcacttgagatcaggagtttgagaccagcctggccaacatggctaaacctcatctctactaaaa

SEQ ID NO: 14114 - DNA, 195 bp, Homo sapiens
agttaatcatatctgctatgtgccaggctaggttcttggggaataccaaattgaataagaaatgagcccagctttctgggaaccaacaatctagaattcttggtagagagtgacagacagcagttcaatcacagtggcaagtgttaggtaatggaacagaattctgatataacaagtactgtaaaaatggaaagg

SEQ ID NO: 14115 - DNA, 397 bp, Homo sapiens
acaacaaaatagctgggcgtggaggtaggcgcctgtattcccagctactagggaggctgaggcaggagaatcgcttgaacctgggaggcagaggttacagtgagccaagatcgcgccattgcactccagcctgggcaacgagggcaaaactcttctctcaaaaataaataaataaataactagaaaaaaatgtggatacatttggaaaataatttgggattgaagaaggcctttccaaacagataaaacacctaaaagccataaaggaaagtggttgacaaatttgattagataaaaacttttccacagaaaagttaccataagtaacattaaaagataaacacagatgagaaaaccagtcttcaatatattgacagggttgccttgatgtgaaaaa

SEQ ID NO: 14116 - DNA, 396 bp, Homo sapiens
aagtagtatctcacatctttaaagtattttacactctcttgggtgctttcacttgcagtagctctccgacacgcagaagtcaggagaaccaagaagattaccttcctaactatgcagctttatggagaccaggatgagctaacaggagacatggtgaagggtgcattcatgaaaagcacacgtcacagtgtcaagtgtacttgggaaggactcacagaattaaaacacattttctggtttttttttttacatttaaaactttttattttattttattattattatactttaagttttagggtacatgtgcacaatgtgcaggttagttacatatgtatacatgtgccatgctggtgtgctgcacccattaaattgtcatttagcattaactatatc

SEQ ID NO: 14117 - DNA, 181 bp, Homo sapiens
caggaagtcctgatggtcccagttttctttgatggccacatctggacttgcctgtgtgtaaagtggacacaaaagacggggcccctgccgtggccgagaacgtggcggtggctcctgctgcttgccaggcagcacgggagctgggtctccctcggacccctcaaaagatggttcctcaccg

SEQ ID NO: 14118 - DNA, 321 bp, Homo sapiens
ccagtttgagttgatttttgtatatggtgaaaggtaagagactgatatcattctcctgcatgtagatatccagttgtaccaacaatatttattacagagactgtcctttgccttttgtgtgttcttggcacctttgtcaaaaataagttggctgtaaatatgtggatttatttctgggctctctattctgttccattgttctgtgtgtctgtttttctgacagtatggtactgtacatgataaatatgtaccattttaaatgtcaattttaaaaataaacaaatatttttgaaaataaaaaaagataaagctgagaaataa

SEQ ID NO: 14119 - DNA, 381 bp, Homo sapiens
tttctgacgactacgtaaatctttccttttggagctagatgatatttggatatgtgtgggtaaaaaacaacaacaataacaacaaaactgacattttcgaaagcttagctacctgcagtcctcttctatggttttttgtatttggtgaataatagaacctttttagttctcagagttctttgtgtaggtaagggtggcccatctaattaccaacaattagatgaacaagaacacctgaccctcgccagctcaggttctaatgagaaaccagtgcagatagtgtcagatacaacagggctcactcagccatttgtatgaaaataacagaaacctagtagcagccatgtaaagtcattttgttctttctgtcctagattccag

SEQ ID NO: 14120 - DNA, 2391 bp, Homo sapiens
ccccccccggcccaggggtagttggagcggtgcaggttcccaggctccaggtactgggcgccttacgagctgggaggtggtgcctctcacccagctaattgctctctagcccttggccttcacaggtgttggtgcctgccgtgaacgcattctgacctgggccgtatctgtctcccaagactttgtgcctatggttggggacagagtgaggtcgttgccttgacgacgacagcatgcggcccgtggtcctcctaagtgtgagcttgcggcggaccgaggcccacctgcctccctgcctgcttcgccctggactcgtgactgcgtccgcagaagaaatcacaacagcgctggaattgctagtttgctaggcagcatcttttggacctgcgaaccatatgcatttcacctcaaatttgtttccaagttgaaaacctttgggtctttctatgcgaacggattgaagaaacgcaaaaagtttctacggactttaaattaaaatggaaaaatatgaaaacctgggtttggttggagaagggagttatggaatggtgatgaagtgtaggaataaagatactggaagaattgtggccataaagaagttcttagaaagtgacgatgacaaaatggttaaaaagattgcaatgcgagaaatcaagttactaaagcaacttaggcatgaaaacttggtgaatctcttggaagtgtgtaagaaaaaaaaacgatggtacctagtctttgaatttgttgaccacacaattcttgatgacttggagctctttccaaatggactagactaccaagtagttcaaaagtatttgtttcagattattaatggaattggattttgtcacagtcacaatatcatacacagagatataaagccagagaatatattagtctcccagtctggcgttgtcaagctatgcgattttggatttgcgcgaacattggcagctcctggggaggtttatactgattatgtggcaacccgatggtacagagctccagaactattggttggtgatgtcaagtatggcaaggctgttgatgtgtgggccattggttgtctggtaactgaaatgttcatgggggaacccctatttcctggagattctgatattgatcagctatatcatattatgatgtgtttaggtaatctaattccaaggcatcaggagctttttaataaaaatcctgtgtttgctggagtaaggttgcctgaaatcaaggaaagagaacctcttgaaagacgctatcctaagctctctgaagtggtgatagatttagcaaagaaatgcttacatattgaccccgacaaaagacccttctgtgctgagctcctacaccatgatttctttcaaatggatggatttgctgagaggttttcccaagaactacagttaaaagtacagaaagatgccagaaatgtttctttatctaaaaaatcccaaaacagaaagaaggaaaaagaaaaagatgattccttagttgaagaaagaaaaacacttgtggtacaggataccaatgctgatcccaaaattaaggattataaactatttaaaataaaaggctcaaaaattgatggagaaaaagctgaaaaaggcaatagagcttcaaatgccagctgtctccatgacagtaggacaagccacaacaaaatagtgccttcaacaagcctcaaagactgcagcaatgtcagcgtggaccacacaaggaatccaagcgtggcaattcccccacttacacacaatctttctgcagttgctcccagcattaattctggaatggggactgagactataccaattcagggttacagagtggatgagaaaactaagaagtgttctattccatttgttaaaccgaacagacattccccatcaggcatttataacattaatgtgaccacattagtatcaggacctcccctgtcagatgattcaggggctgatttgcctcaaatggaacaccagcactgagaaccattttggttctgaactggatgatgctcttgcacttgagatgacatcttcttgcagcaagagtgctgatatcccaagaggagagattcatggttttgatcatttccttctgaactgcctgcattttctgaggaaggccttctagaagaaggaaagacaaagacttccaaatgtttcaaaggaagattgaacaaatggccctccccaactgttatcccattacctttcacgtccaccgatgctatttcaagacatatccagtggaataacagtgatatggttcttgttacatgaatgtgtatttactgttaggagattgtatattttaagttaccatgattaaaagtgtgtaaaaaagggggacagagagaaatactataaaaggccatgttactcatgcattgaaaaa

SEQ ID NO: 14121 - DNA, 2096 bp, Homo sapiens
ccccccccggcccaggggtagttggagcggtgcaggttcccaggctccaggtactgggcgccttacgagctgggaggtggtgcctctcacccagctaattgctctctagcccttggccttcacaggtgttggtgcctgccgtgaacgcattctgacctgggccgtatctgtctcccaagactttgtgcctatggttggggacagagtgaggtcgttgccttgacgacgacagcatgcggcccgtggtcctcctaagtgtgagcttgcggcggaccgaggcccacctgcctccctgcctgcttcgccctggactcgtgactgcgtccgcagaagaaatcacaacagcgctggaattgctagtttgctaggcagcatcttttggacctgcgaaccatatgcatttcacctcaaatttgtttccaagttgaaaacctttgggtctttctatgcgaacggattgaagaaacgcaaaaagtttctacggactttaaattaaaatggaaaaatatgaaaacctgggtttggttggagaagggagttatggaatggtgatgaagtgtaggaataaagatactggaagaattgtggccataaagaagttcttagaaagtgacgatgacaaaatggttaaaaagattgcaatgcgagaaatcaagttactaaagcaacttaggcatgaaaacttggtgaatctcttggaagtgtgtaagaaaaaaaaacgatggtacctagtctttgaatttgttgaccacacaattcttgatgacttggagctctttccaaatggactagactaccaagtagttcaaaagtatttgtttcagattattaatggaattggattttgtcacagtcacaatatcatacacagagatataaagccagagaatatattagtctcccagtctggcgttgtcaagctatgcgattttggatttgcgcgaacattggcagctcctggggaggtttatactgattatgtggcaacccgatggtacagagctccagaactattggttggtgatgtcaagtatggcaaggctgttgatgtgtgggccattggttgtctggtaactgaaatgttcatgggggaacccctatttcctggagattctgatattgatcagctatatcatattatgatgtgtttaggtaatctaattccaaggcatcaggagctttttaataaaaatcctgtgtttgctggagtaaggttgcctgaaatcaaggaaagagaacctcttgaaagacgctatcctaagctctctgaagtggtgatagatttagcaaagaaatgcttacatattgaccccgacaaaagacccttctgtgctgagctcctacaccatgatttctttcaaatggatggatttgctgagaggttttcccaagaactacagttaaaagtacagaaagatgccagaaatgtttctttatctaaaaaatcccaaaacagaaagaaggaaaaagaaaaagatgattccttagttgaagaaagaaaaacacttgtggtacaggataccaatgctgatcccaaaattaaggattataaactatttaaaataaaaggctcaaaaattgatggagaaaaagctgaaaaaggcaatagagcttcaaatgccagctgtctccatgacagtaggacaagccacaacaaaatagtgccttcaacaagcctcaaagactgcagcaatgtcagcgtggaccacacaaggaatccaagcgtggcaattcccccacttacacacaatctttctgcagttgctcccagcattaattctggaatggggactgagactataccaattcagggttacagagtggatgagaaaactaagaagtgttctattccatttgttaaaccgaacagacattccccatcaggcatttataacattaatgtgaccacattagtaagtaagcagttctcagtagtagaagagcaaacaccagtcagctctagacttttattaaaattaaatatgatagtgaagtattgagaattttgtttggatacacataaagtgaaaccttaattgtgcatatattatcccaacccatcatagtcataaacgtgaaattctgaaagtttaagt

SEQ ID NO: 14122 - DNA, 414 bp, Homo sapiens
gaatgcagaaaaaaaactactttgctaataattatattctcatttcatcactcatcatcacttcactcatacatcacttattttcttggaatatggtggaactcacatattttaaaaatgaattaattgaatgaatgattttatctgtataaaaattttgtcatctttcaccaatgagaaatccacttcctagtaaccttcagctgtttatgtgaattcggtgtactttgaatatagaatgcctgaaacgcatctcacagttcaaatgttctgcagtgcaggtcacctgtgatttttaaccaacacaactgaaaaggaaaatcatgctattagcacatatggactgcaggttaataagaagtcactacaaactgccaagcaattaagcaggaaggttagagataggcaaaatat

SEQ ID NO: 14123 - DNA, 247 bp, Homo sapiens
ggaatcttatcagtctgtatgttcctataatattcatcaagaaaatgggcaataaacaagatatatacagtaggtgagatgtttttgttggcttttctcttttgtaactctccttgtcatgcaggagggtgccctgaaatattgagtcttttattttctggaaagtgctcaattttcttgactactccatttggggatcagaaatttcttttcatttcagagggttttcaaatgccacataacttct

SEQ ID NO: 14124 - DNA, 376 bp, Homo sapiens
acatttactaagtttgtctcatttgatcttcacaattctgtgaaaaaggtaggacagatagtgtcactcctacttttaaagataagaagtttgggcttcaaagaaattcagtgacttgccctgagataaatagctagttatgtctgctatcttttgcattagttttcattctcctatatcaaagagtttctatgcagaaagacttctatatgatttacttataatttctaaaatataaaattcaaattgttgaatttccggcttttctgcatttaccagaaaagtatgccatttaaaaaaatagaccattgaaaaaacatggaatgcttcatgaatttgtgtgtcattcttatgcaggggccatgttaatcttccc

SEQ ID NO: 14125 - DNA, 1266 bp, Homo sapiens
  misc_feature (552)..(552): n is a, c, g, or t
  misc_feature (574)..(574): n is a, c, g, or t
tattttttttttcttttaagtagagatggggtttctccatgttggttagactggtctcaaactcctgatctcaggtgatccacctgcctcagcctcccgaagtgctgggattacaggcatgagccaccacgcctggctgtttcagaaacttaaatgtgagttcccattgtctttaaattcatgtccaagctccctggagtaccaagcttccaaaattagacccaaagtaatcttgttaggcatgactccaaataagcatgctgtatagaaactcttcatttcagacaagatactttactcctaatcacccacacaccccttagagcctccttccttcagccttggatttacgtaaggtcgctctttgcctccttttacctccatctactgaaactgaacctgttttccaaggcccaaatcaaagtctgaaattttcccatcacctgatatggaagttatttataaaattaataatgatgattaaaaacaatagctaccattctttgggcatttactctgtgccagccagggtaaaatcacattctagaaaanatggaagaatcaatgagcccangtacgtaaagggctgagcccagaccctggggcatgtggagggtgcccaacaaaaattggctgaattgtcaccaattgtgccattgaaatgtcacagtgacatttgctagcagtcaaaatgccatatcttgtccacctgaaagaggatgagcactgaggaagtggtttgggagaggaagccaaccaattccttccagcattgcctggcacgactttctgagccttaggcaaataaaaatatctttgttccaaattacatctatcgtctggtggtattgcttgtcttttacatttctattatgtgtgtctcttatgtatcccttcacttccctgttctggcaccaaaatgcaaaactcagacagcattaggaaaaagagaagttcttccaatgtgatccatagtacacagtcatgtgggagactcaagagaaagctccttcctggtgggcagaggtgctccctaaattctcattccctttgagatcaacagcaaagtttccccctaatgctgaatttgttcttgctgtttctcaaaccaaaatgcaatttaagagagggttattacataggaatgttaaatacatggctttcatgctaaatctgtgacaatctttccccacattccagtgccgggaaattagcaatttaaatctctctttgaactgtattgtggattcactcctcagagcttct

SEQ ID NO: 14126 - DNA, 412 bp, Homo sapiens
aacacatgtagtagtgtcatttgaccctagtcttggggctcaaagatggcttccttgaagaagtgactatggagctgacttgaacaatgaatagcagttaagtggatgaagtgagaaccaggcagaggaaagagcattcataagagtcctgtcacgggagaaagtgtgggtgtttttgaggaactaagaccattgcggttgtatggccaagaagtgcctggagaagtagtgactagactagaaaaaagcctgtgggccaaattaaagattttgatttttatgctaaaaatcctgggaggggccgggcacagtggctcactttgggaggctgaggcaggcagattgcttgagcccaggagttcaagaccagcctgagcaccatagtgagaccccatctctacaaaaaaatgag

SEQ ID NO: 14127 - DNA, 290 bp, Homo sapiens
cctttcaaggactcaccttattaggacagtcaaagcaggataaacccagcctaaagtcaactaattgaggcccttagttatatctgctaaatcccttcacagcagcatctacactagagttgcttgaataactgggggaaagtgaatgaccgggaggtggctgttgggggccatcaaagaatcagcccagcaagggttggatcttccttttgtgtttaatttggacacagttggaaattgaagttcaagtaaagtgatcattgtgaatggtaataaaatgcatcctcttc

SEQ ID NO: 14128 - DNA, 560 bp, Homo sapiens
gatttaacccaggaaaaaactttccagtgggccacagaaatggagcagattctgctcggatagagactgcttctgaggttcatctgtgtcttcagcagaatcccccaggctggtggacgcaggagggagcgaggaggcaggagtccccacggacatggctgcacagcctggggccacagggcttccaagagggagccagtctgcagcagaaaagcccagagggcagcttccgcacacacacaagcacagcccccacccccgacactgcagacagggcctcttccggaaggcgctcccccaagctcatgtcccacagcctgggcttgttggaggccatctggcctgcagatgctggtgagcctccatggtgtctgtccccactgtggcagggacaaagtccccaagaggaagagaggacctgactgctcttcagagcttgacacacagcacccccagccagaagctgacctcccacttgtttgaggcagtgttcaaggggctgtccacagcaagagagatgggactgggctccatctccaaagaggcctccctgagccagc

SEQ ID NO: 14129 - DNA, 327 bp, Homo sapiens
aggtatgcttcaagaaaataaagcatctaccatagttgattttccaggtgatagaacagcattgaaagcttttaggcaacagaatcatataatgagaccctcttgaatataacaaacattttttcaagcatagtatagtaaactaaaattaacactcatggagttttccatgtgtcagataatatattaagcattttacatggataattaaatgtatgtaggtaaagaaggcttaaactgcttttaaagttagtttcattattaaaaaaactagtattcattattaaaaaacaggaatctttgattgcatgtctgaaaatgtgtagc

SEQ ID NO: 14130 - DNA, 454 bp, Homo sapiens
gaaatagattactagctggctggagagagaggttatcaataaaaacaatgttatatgctggtgtagttttctttttccttttcttgcaaatatgttaaaaattgtacatcaggaatataaaccattcagctttctttgacaatttgactcaactggaacaaatagggttgagaatgatccagagaaaagtaaaacaaattggctatttatggagccagttactaatataaatggaaatgcttttagaacaggctctttccagaaatctcccagactgactgaaatagagcagaataaaaacagaaaattactttagaaggtcatttgcatattagatgctaccatttgttagttgctttgagtttgtgaagttcctaagtcaagtactttgcagattcaaactgataggaaaggggagaaatgtaatggaaagttggagcacgtaagaaaatcc

SEQ ID NO: 14131 - DNA, 982 bp, Homo sapiens
tagggtctgggtctcattttttgtagagctggtcttgaactcctggtccctttttttttagagctggtcttgaactcctcctgcctcagcctcccaaaatgccaggattagctgtgtgagccatgcttataccactgggcgtgatggtgttgtttttattgatcacaatgtgcttcaaggtaaatactacttcagcatgatacccattttttaaagcttaaaaataaatatggcaaaataatatatttttagatatatctatatttatacctacacctgccctctctatacatagatatatatgtagactataaagaaaagcacagggattatggacataaccttcagaagagtggtcatctctgtgatgaagcaaggggactggatcagagaagaaattccagcagtcctgtagcttccacaggactagaaatatttcattctgcatgaagtgatgggtgtatggatgttatttaattgttatgcttcataacttagattcacatcccactttgagaatatctcctatagaaacaaaggacttgtatttaagaatgtgtaagaagagtcaccacggagctgacacggaggctggtggcacctgggcgcaacgccgtatgccaactagcctaccgcgtggatcacggagctcactgacgagaatgtcaagttcatcatatatatatatgtagatgtgacttaatatttcaatgagaaacactgaaataaaaaaaaaagaaaccaaaaagcatttccaccatccatcagttgctaagtagccatgtgccccacctaatgtaatctaatttatcatgtaattttggtttaagctggacattaagacttgcaaagaaatggcttttgcctaagattaatagtaactactaatattctttttcttcaatctgcaaaggtaatgttaatgaaacttgcatgttaaaattctgtaattataagtaaagtgttttactaagtaccttaa

SEQ ID NO: 14132 - DNA, 410 bp, Homo sapiens
tgattctctcacagtctggaggctaaatgtcaaaatcaaggtgtcagcacaacatgctctcactgagaccgttaggagaatccttccttgcctcttcctaccttccgatagtggctggaagtccttggtcttcctctccttatagataaatcactccaattatttcttctgttgtcatgtagccatctgtcttcgtgtggtgttctcatatcttataaggacaccgatcatattggattaaggcccattcctatttccaagtaaggtgacattaaaagatactgggggttagggcttcaacacatgaatttgggaaagggggtatgcacaattcaacccataacaccaactgtaataaattctatattgttgtaaaatatctctttggtagcaaagttagtatatgccaa

SEQ ID NO: 14133 - DNA, 795 bp, Homo sapiens
tctaggcaggtgagccgtgcatggggcccagcgacagttgccgattgtgatttattagtggaggaaaatttggaattggactttaccgttgggatttacttgcatttgaaagcaatgcagttagcagtccatctttcaacactgaatgtattttctctgcttttatatctttctgatgaattaagcacttatgtgaggtgagggattgaaaacactagcagcctaatctctcagtagatctgcttgccagataacagctgtatggaaaaacacggggaccaattttacattgtttctccaccaattcataccagccgtgaactgtgatgctccccccaattctacaatgggcagataatgagagttccttgccctccagttctccaagccgtttcgaagaagacctgctaattgaattcagttgtttgcagttttaaatgttcatgctttccacaaaacaagaatatattaaactcatttcatctgtcatccaagaagaattggagcctgcatttttattaccaactgacttgtgtgttcatctttatcccagattttttttgaaatgtttacaatgtaattaaaaacaatcaagtcaaatgatgtatttgaattgttccctttgggagaagataaaggagaaaatatagctacaattgcttcatttttgctgagtatttctgccttctcaacagaaatacatcatgtatctgctcacctagagcgttttgtaatgtcactggtgatttaacaattacaaaatattgtaattaaatgttcaaatgctcaaaaaag

SEQ ID NO: 14134 - DNA, 914 bp, Homo sapiens
aggcacatgctgccaggggggaactgaactcagggaatggggcccccagctcccattggggtcggcgaacctggtgccaccccttagacaaagtcccagtctcccagaggcttttaccagctggccccattccttctgctgctgggtataataaggtcctctcaacgctgaagtgcctgtgaaacacagcccagaggagttctcattggtcctatgggctttgtcttcctctctgccccacccagataatcgctgctgcccctccactcccaagatgcagctgtgattctccatccccacacatccctcatcaatggttgactgcaaagaagtgagaagccaagcttagattcatgctcatgcctgaacaccctgagagcctggtgctggagggctgggtatccccttggcctgccaccagcacctgcacccacaccaggctggagccacgctctgcgcacagaaggtggccttgatttctcaggcacagctgacctcagagatactggtcctgactctgccaggtctcttatccctagtcttgttgccccagttccttctggattcaaggcgatgttgcctcaaaacaaggaccaggtgctgccacagacctcagtgctccctgggcgccccacttggggcttctcacaacttgtggactcctctcctcacaacctacagcctctctctccccatcagggcctccctccctctcaaccaccgttctcttccactcagtcccgtcgtccctcctcccctccaccagcatccccctctcctggcttccaattcggctcttgtgactcaaattctgactttgctccaatccctattctccctctctcccaagttcccctactttctttcaccagaactacctctctctccccgtccacgtgcatcctctccctcca

SEQ ID NO: 14135 - DNA, 515 bp, Homo sapiens
acacaaaaacctttctcattctgtgctataactagttagcatttaattgggtggatgtggtataactagtgccttgttgatattgatgcatatttacatggttttgctgttataaacaatggtcccttgctattataaatcacactgctataagtaaccttgcatctaaattacttcaaatgtgtaactatatgggtaggataatttctagaagtggaattgtgaaccaaagttttaggtgcatttgtaattttgatttataaccaatcttttcactgatctacttctctgcctctaatttctactaggtgtttgtttgtttgtttgtttgttttgagacagggtcttgctctgtcacccaggctggaggacagtggtgcaatcacggctcactgcagcctcaacctgccacctcagcctcctgaatagttggggtgtgtggcaggtgtataccaccacttccaggtttttttgttgttgttgtttaatagagatgaggtcttgctatattgccc

SEQ ID NO: 14136 - DNA, 417 bp, Homo sapiens
cagctgtaccggcccgaaatttgggatcttgctattataaatcacactgctataagtaaccttgcatctaaattacttcaaatgtgtaactatatgggtaggataatttctagaagtggaattgtgaaccaaagttttaggtgcatttgtaattttgatttataaccaatcttttcactgatctacttctctgcctctaatttctactaggtgtttgtttgtttgtttgtttgttttgagacagggtcttgctctgtcacccaggctggaggacagtggtgcaatcacggctcactgcagcctcaacctgccacctcagcctcctgaatagttggggtgtgtggcaggtgtataccaccacttccaggtttttttgttgttgttgtttaatagagatgaggtcttgctatattgccc

SEQ ID NO: 14137 - DNA, 330 bp, Homo sapiens
ctgataagaaaaaatacaaagctgcttaatttaaaatgaattccaattaaacagagtgaacaagtttaaatgcaaactcatatctctgcaaaagggaactgtagaaggagctgaatattttcagttaattagtatgcttttctgtttcttgagaaattatatgtggatgacttacaggtgtatcaaatgaaataaatgtgctttctaaaagataatgtcaatgaagggaacatttggactgaagaatagtttcaaattataagacacatgcagaggcacatacttagcctttgcttcctgcagcagatgaccactttctaataaaagtcc

SEQ ID NO: 14138 - DNA, 403 bp, Homo sapiens
ttaaattaaaaattgtggcaacttaaaattagattacagactgattcttccaaagtcacccagacattaggaagggtactattattctttttaagaagggactattgtgagagatggtttatagagaaaaatagattaaattctgcatttagttaactttaattttgtgttatatcttgtgggtcatagtcactgacaaagagagatggtataaaaaacaaccacaagctaatagataataactcttactatgtgacagccacagcactacattccctacatacacaatctcattcaaatcttccaatgacgattttgagtgggtacttttattgttcccataacttgaccaagttcacacaaatcaaaagtggcagatcctaggcttaaactaagatcagcc

SEQ ID NO: 14139 - DNA, 248 bp, Homo sapiens
  misc_feature (238)..(238): n is a, c, g, or t
aaaataagttataatcgacaatagggcataagaaaagaatgttgtaaaacattttctaagaattgctaaagcgtttaaatatcctcttggtaggatccgtgatagatcaaaagttgtaacacgtactgcttaggagaagagaagcagaaagatcagaagcggtggaggtgctgcaattcttagaaaatgttttacaacattcttttcttatgccctattccgagattataacttattntgtcgacgcg

SEQ ID NO: 14140 - DNA, 411 bp, Homo sapiens
cagccagttaaaagctatttttaaaggtattgtgtgcacactgttgtaatttaactcaactaaaaacgttaagttgtgctgaaagaaataagctgaaagaaattaaatactagtcttttttgtttgtttgtttgtttgtttgctgagacagagtttcactctgtcgcccaggctggagtgcagtggcatgatctccgctcactgcaacctccacctccctggttcaagagattcccagcctctcgagtagctgggattacaggcaaccaccacctcgcctggctaatttttgtctttttagtagaggcagggtttcaccatgttggccaggctggtcttgaactcctaacttcaaatgatccacccactttggcctcgcaaattgccgagattacaggcatgagccgctgg

SEQ ID NO: 14141 - DNA, 222 bp, Homo sapiens
cactagctcatgtacttacctgtttcatgacttgggagaagtttttaacctcttggaacctccagtttgtaaaatggaattaaaagtattgcctacctcataaagtaggaaattaatacatggaaaatacaacagtgcctgacatgtagtaagggctaaattgatattagctgacaaccaccacatagtattgaatttttctgcttatatatctgcctaacc

SEQ ID NO: 14142 - DNA, 720 bp, Homo sapiens
agtttccaacattttattttttcacgtgtcttgccatagacctctttgggttttatcctatttggggtcctcacagcttcttaagcatataggtttatgtctcttgccaactctgggaagcttttagccatttacttctttatgttttcaggcttgtcctcttcctcttccccttccagacatagatgacaacatgaaagtgagaccttttgaggtagtttcacaggtgcctgaggttctattcactttctccccgagtctattttttccctgctaagattgtgtaatttctactttttcattggcagtggatggatttccttgctctgcaccatccattctgctgttgagcctatgtgccagactttttattttggtggttgtatttttccacttctaatacttcatttgggttctcccttaagtcttgtatttatttgctaagactttcctacttgtccatttatttcaagtgtgctcataattactcgctaaatcattttcatcaggcttgcttgctttaaaatgtttgtcagacaatcccagcgcttctctcattttattgccagtgtgtgcttgctgcctattttcattcagtatgagattttcctggttcttggtatgatgaatgattttcaatggaaacttggacttttgggtattatgttatcagactgtcgattttattgaaaccttctgttttaactaccaaaaaaaaag

SEQ ID NO: 14143 - DNA, 331 bp, Homo sapiens
acaaaactgagttggagtatactttcaactattataaaaacagaaataccggccaggcacggtggttcacacctgtaatcccagcactttaggaggccgaggcaggcggatcacgaggtcaggagttcaagaccagcctggccaatatggtgaaaccccgtctctactaaaaatacaaaaaaattagctgggcgtggtggtgcatgcctgtagtcccagctactcgggaggctgaggcagaagaatcgcttgaacccaggaggtagaggttgcagtgagctgagatttgtgccactgactccatcctgggtgacagagcaagactctggcc

SEQ ID NO: 14144 - DNA, 384 bp, Homo sapiens
gccacaggatgctacagtgggagcctgaatgagtgctgttcatcacatccttttgtgtcaacgcttgagttctttaggaacttcttgagtggctgtttgtcactgtgttggtctgaccgtggatggttctgctgcgcccccatacacagccacttatggtgctccctcccctctccttcaactgctggcccagcacctctgtcctcatcgtctcatctcttaccctgtcagtttttccccgtctctggcattctcttctagccatagcccaggtcctctgtccacagcctttcttgccattgctggcctttggcacttggccagcattaactcctgaggtgacatggttctgtttattccaccgggagagtaacaatgacaagg

SEQ ID NO: 14145 - DNA, 530 bp, Homo sapiens
gaaaaattgatcctgcatttctgcatgacaacacttgtgttggtgctcaccaggctacccaccactcctcattgtcttctcctgggcatgctttcttccttatggaatctgcctagtctcccaatgagcccggtaatagcccagtacacgtaggctaaccttgttattccaaaaatccctctagggtagttcccaaagttgtaaacttctaaaaagtttcaacattgatatggagttccaaaaaagtcaaggacaaatctgtatggctccttggaatatccatttttgcatacatttatctaggaaggcttatgaagcctcttctactacaagaatctcctgatgaacaagaaagtaagaaggaattacaaggttatctgcatttgtgaattactcatagttgtgaaaaactacaaaagaactatagggaatgattgttctaaacctattcacccttcaatttaataactcatagagaattaagatattaattcattcaatgacaaatatctattcaacactcattgtga

SEQ ID NO: 14146 - DNA, 333 bp, Homo sapiens
atactttaggttttcctctcatctcaataaacagctatttattgaacatcttctgtttacaagagctttgctagatgctgtagggagggcaggggtgagcagaatatttatctgttctcaaagagttgaccattgggtaagagacaaagtcagtgaaaggtaccatttgcaatcggataatagaacagagatatcaatgaagagagtcagaattacccaaatcacttttaaaaatccacagatgcccagactccgctctagacctactggatccaactctgataaaagtcaccaatagacttggtgggggggaaaaatgaggtaaaaaaaaaa

SEQ ID NO: 14147 - DNA, 972 bp, Homo sapiens
tcaaaagcttggaaccttacaacaaaaagctgggaacagacacctggtattatgccaaaagatgcttcctgtccttgttagaaaacatgtcaaaacacacaatcatgcttcgtgatagtgttattcaagaatgtgtccagtttctagaacactgtgaacttcatggcagaaacatacctgctgttattgaacaacccctggaagaagaaagaatgcatgttggaaagaatacagtcacatatgagtctaggcagttaaaagctttgatttatgagattataggatggaatatatagtaatagctgatagtggcatttatcaaatggctttgttatgtaaatttgcatcgctttatttaccctttggcatctttatatttgttacatgttgaactttgtacacttatgcattataaaaaaaaaagtagctaaaacttttgctgttaaatttcccagaaagtgacatattctaagaacttttaccccaggagttatgaaaaattccaaacttatgaggaatgtttatatcagaagttgtaatacgtttgtttcctttcctctgttatcttttgtgctttgacgtatcttgaggggtctttgcacaaggattacatcattcagggaccaagcactatctcagtaatagttaagagtagtctttaaataatcatttcagggattgtgtgagagtagtctcacaatttacactcattaatttgtaatgcatactttttatatagactttaggatattttggcagtgtttattcatatggatataattctttacctaaccaaaattccttaggttataagtggttttaacgtgcaaaagtcagtaaaaaattttgttgccttaacaaaattatggtgctataatgtagagacaatgaacgattatcaaagaacaaatttccctggttttcttttgttccctttaataatttaaatatatgaacaagatacactgttac

SEQ ID NO: 14148 - DNA, 429 bp, Homo sapiens
aattttgttttgctttgtcctatgtttcttcaaatgctggccatttccctttttcccccccaaatattgacttaaccacagtgtcttttgtgatgttttttccttatactcattcattatcttatgcttttagttcattcacccacttttaagatttgtttgttttaaatttggaagaaattttttcttttttattaattttattgagttgtaaaaagtcaataaagaggctgggtgtggtgtttcacatctgtaatcccagcactttgggaggctgagtggggaggatcgcttgagcccagaggtttcagaccagcataggcaacatagtgagaccttgtctctactaaagacggaaaaatcagctaggcacagtggcatgtgcctgtagtcccagctactttctgtcttcaaaaaaaaaaagaaaga

SEQ ID NO: 14149 - DNA, 501 bp, Homo sapiens
ccacagagctgctgcctccactcttcagcttgtgggctggacctacaacttggggcaaagtcagcctcccctctgagggctttgtaggcatggagcaggacagaggccttgcccaggccttccctgaaccaccctggtcctgtgtctgcactgtagattggcctggggaaactgaaggcccagaaatgggacttctctatggaaaccaagcttgggcccccagccttgtggctcctgagtccctggctagtagacttccctactctcaccttctgccctctcgccatgcctaatattaaatttgccctggtttctctacctacactttagaattctgccctgtgagctgccctagaggtgtcctcagccagaagggcatgctcagtcctcacccatcatgccggtcaatgggagcctcccacatcatcccacacttgagatggccaatagtcctgcctgatgagtgtcaccagctactagggccagacttaaatcagaagc

SEQ ID NO: 14150 - DNA, 343 bp, Homo sapiens
tggaagaagatattaaaggggaagggtgttctgaaatctaagacgtatttttttggataagctaaatccagattttaaatcatataaacctggagatctggccaggtgtggtgattcatgcctgtaatcccagcactttgggaggctgaggcagaagaatcgcttgaacctgggaggcggaggctgcagtgagcctagatcgtgccattgcaccccagcctgggcaacaagagccaaactccatctcaaaaaataataataataaaaataaagcaaaccaaaccaaacaaaaaaacctggagagctttacttgctttaccaaaagatcacctcagatttcttc

SEQ ID NO: 14151 - DNA, 437 bp, Homo sapiens
gctgcttgatcttgtttgatattcttcagcactctactttttataacgggtcaatagcagacgggcggtaactgatctccttatttcagagctgaaaacacaaggcactttgcgttgggtgcagttctattctgttatgctactcccgtttgtcagtaggtaaaaacttttcccattccccagaaggcagtacttctatgaatagttgctttagacaagcattcattgttcaaagggtttgattcctcactgagcaaaagctacagcattataaagatgccagttgaaatttttttaagcttgaattttttaaagctagaaaggaaccctcactgttggggaagtcatgaaagaaaaccccttttcacaagccctggaacaagtggattaagagagtaagagtaaaagtgcaaagactgggaacctggctttattcc

SEQ ID NO: 14152 - DNA, 367 bp, Homo sapiens
aaaataaatctgtcttaaatgaacatcaggagacatctaaacagtgtgagcaaaaaattgccatagagaatgaatggaaaccagctgatatattcagtactctgggggaaagggaatgtgatagaagttcgttggaagcaaaaaaagcccagtggaggaaagagctagatgaacaggttgctttaaagaagaaagaaaaagaagtttctgaaaaatggaatgatccttggaaaaaatctgaaagtgataaaataatatgggaaaaacatcaaattcttgaccaatctagggtaagacatcttaattgcaatttttaaaatactaagcagtgttcatattatagaatttatttttaaagcttattaaa

SEQ ID NO: 14153 - DNA, 1833 bp, Homo sapiens
aaaataaatctgtcttaaatgaacatcaggagacatctaaacagtgtgagcaaaaaattgccatagagaatgaatggaaaccagctgatatattcagtactctgggggaaagggaatgtgatagaagttcgttggaagcaaaaaaagcccagtggaggaaagagctagatgaacaggttgctttaaagaagaaagaaaaagaagtttctgaaaaatggaatgatccttggaaaaaatctgaaagtgataaaataatatgggaaaaacatcaaattcttgaccaatctaggctcttcaagcattctatcacagtctcgtagccaggttatggtggtccaagctgatggggcattcacaacttagagctagtcagactttagaggaaacagtactgctggagcaccctttcagtgctgtgaaacaagaactgcagagaaaatggattgaagagttgaataagcaaatagaagatgaccgtcaaagaaaaatagaggaaaaaattatatattcaaagggtgaggaacatgacagatgggcaatgcactttgattcattaaagagttatcctggttctcaatctcagctgttctctcagtcaacacacaaacaacctgagtacttctgtgtctctcctgacactcaggagctggctgatgtcagcagtgtttgtacacctacaaccggaagccaggttgaaccttcagaggaggagcatatagcaaaacctattaaggatgtggttatggcaaacagtaagaaaacaaactttctccgttctatgactgctctcttggacccagctcagattgaggaacgagacagacgacgacaaaaacaattagagcatcagaaagccatcactgcccaggtagaagagaagcgcaggaagaaacaactggaggaagagcaaagaaagaaggaagaacaagaagaggagcttcgcttagcacaggaacgtgaagagatgcagaaacagtatgaagaagacatacttaagcaaaaacaaaaggaagaaatcatgactctcaagacaaatgagctattccagacaatgcagcgagcacaggaactggcacagagactaaaacaagaacaaagaatccgagaattggcgcaaaagggacatgacacttctagactgattaaaaatcttggtgttgatacaatacaaatggaatataatgcatctaacatttcaaattcaagacatgattctgatgaaatcagtggtaaaatgaatacatatatgaattctacgactttcctaagaaggatactggtgtgcaaacagatgacttaaatataggaatattcaccaatgcagaatcacattgtggatcattaatggagagggacatcacaaattgttcatctcctgagatttcggcagaacttattggacagtttagcaccaagaaaaacaagcaagaactaactcaggataaaggagccagcttagaaaaagaaaacaatcggtgtaatgaccagtgtaatcagttcacaagaatagagaaacaaacaaaacacatgaagaaatatcctaaaaggcctgattggaatataaataagccacctaaaaggtatattccagcatcagaaaagtaccctaaacagcttcaaaagcagagagaagaaaaaaaagtaaggaggcagatggaattgcttcatttggtagaaaaaaataatcctgggcacctctctcaaaacagaggcatttcaccagaaatttttcattcatctcatcaagaaacggagtcaaagttgaggtggcatctagtcaaaaaggaagaagagcctctgaatattcattcattcagcaaggaaaggtaagta

SEQ ID NO: 14154 - DNA, 1741 bp, Homo sapiens
aaaataaatctgtcttaaatgaacatcaggagacatctaaacagtgtgagcaaaaaattgccatagagaatgaatggaaaccagctgatatattcagtactctgggggaaagggaatgtgatagaagttcgttggaagcaaaaaaagcccagtggaggaaagagctagatgaacaggttgctttaaagaagaaagaaaaagaagtttctgaaaaatggaatgatccttggaaaaaatctgaaagtgataaaataatatgggaaaaacatcaaattcttgaccaatctagggaaacagtactgctggagcaccctttcagtgctgtgaaacaagaactgcagagaaaatggattgaagagttgaataagcaaatagaagatgaccgtcaaagaaaaatagaggaaaaaattatatattcaaagggtgaggaacatgacagatgggcaatgcactttgattcattaaagagttatcctggttctcaatctcagctgttctctcagtcaacacacaaacaacctgagtacttctgtgtctctcctgacactcaggagctggctgatgtcagcagtgtttgtacacctacaaccggaagccaggttgaaccttcagaggaggagcatatagcaaaacctattaaggatgtggttatggcaaacagtaagaaaacaaactttctccgttctatgactgctctcttggacccagctcagattgaggaacgagacagacgacgacaaaaacaattagagcatcagaaagccatcactgcccaggtagaagagaagcgcaggaagaaacaactggaggaagagcaaagaaagaaggaagaacaagaagaggagcttcgcttagcacaggaacgtgaagagatgcagaaacagtatgaagaagacatacttaagcaaaaacaaaaggaagaaatcatgactctcaagacaaatgagctattccagacaatgcagcgagcacaggaactggcacagagactaaaacaagaacaaagaatccgagaattggcgcaaaagggacatgacacttctagactgattaaaaatcttggtgttgatacaatacaaatggaatataatgcatctaacatttcaaattcaagacatgattctgatgaaatcagtggtaaaatgaatacatatatgaattctacgactttcctaagaaggatactggtgtgcaaacagatgacttaaatataggaatattcaccaatgcagaatcacattgtggatcattaatggagagggacatcacaaattgttcatctcctgagatttcggcagaacttattggacagtttagcaccaagaaaaacaagcaagaactaactcaggataaaggagccagcttagaaaaagaaaacaatcggtgtaatgaccagtgtaatcagttcacaagaatagagaaacaaacaaaacacatgaagaaatatcctaaaaggcctgattggaatataaataagccacctaaaaggtatattccagcatcagaaaagtaccctaaacagcttcaaaagcagagagaagaaaaaaaagtaaggaggcagatggaattgcttcatttggtagaaaaaaataatcctgggcacctctctcaaaacagaggcatttcaccagaaatttttcattcatctcatcaagaaacggagtcaaagttgaggtggcatctagtcaaaaaggaagaagagcctctgaatattcattcattcagcaaggaaaggtaagta

SEQ ID NO: 14155 - DNA, 1387 bp, Homo sapiens
tgagcagtgctttcatgtggtctccaggtaacgccctgttagtcttgagacccacaagagtcaaggggctgtttgatggttaggattgtaggagtccttgatgggcatgtggattgctggggattgctcactttccttttcctccaattaggcagcctctgtagactcctagctaatcctgtcaagacaggctgctttgctttcttccttgcttttgatgcttcctgtcatgttgaattccactgttctctgttagatctacgtgaagtatgattgtctactcattattttggttcccctctgtggaagaggtgagcactgaatgtatctagtcagccatcttgaattccctcctgcttagatttttatttttgacaatgatttacgtgattgcttatgactagaaagccatcactgcccaggtagaagagaagcgcaggaagaaacaactggaggaagagcaaagaaagaaggaagaacaagaagaggagcttcgcttagcacaggaacgtgaagagatgcagaaacagtatgaagaagacatacttaagcaaaaacaaaaggaagaaatcatgactctcaagacaaatgagctattccagacaatgcagcgagcacaggaactggcacagagactaaaacaagaacaaagaatccgagaattggcgcaaaagggacatgacacttctagactgattaaaaatcttggtgttgatacaatacaaatggaatataatgcatctaacatttcaaattcaagacatgattctgatgaaatcagtggtaaaatgaatacatatatgaattctacgactttcctaagaaggatactggtgtgcaaacagatgacttaaatataggaatattcaccaatgcagaatcacattgtggatcattaatggagagggacatcacaaattgttcatctcctgagatttcggcagaacttattggacagtttagcaccaagaaaaacaagcaagaactaactcaggataaaggagccagcttagaaaaagaaaacaatcggtgtaatgaccagtgtaatcagttcacaagaatagagaaacaaacaaaacacatgaagaaatatcctaaaaggcctgattggaatataaataagccacctaaaaggtatattccagcatcagaaaagtaccctaaacagcttcaaaagcagagagaagaaaaaaaagtaaggaggcagatggaattgcttcatttggtagaaaaaaataatcctgggcacctctctcaaaacagaggcatttcaccagaaatttttcattcatctcatcaagaaacggagtcaaagttgaggtggcatctagtcaaaaaggaagaagagcctctgaatattcattcattcagcaaggaaaggtaagta

SEQ ID NO: 14156 - DNA, 1779 bp, Homo sapiens
aaaataaatctgtcttaaatgaacatcaggagacatctaaacagtgtgagcaaaaaattgccatagagaatgaatggaaaccagctgatatattcagtactctgggggaaagggaatgtgatagaagttcgttggaagcaaaaaaagcccagtggaggaaagagctagatgaacaggttgctttaaagaagaaagaaaaagaagtttctgaaaaatggaatgatccttggaaaaaatctgaaagtgataaaataatatgggaaaaacatcaaattcttgaccaatctaggctcttcaagcattctatcacagtctcgtagccaggttatggtggtccaagctgatggggcattcacaacttagagctagtcagactttagaggaaacagtactgctggagcaccctttcagtgctgtgaaacaagaactgcagagaaaatggattgaagagttgaataagcaaatagaagatgaccgtcaaagaaaaatagaggaaaaaattatatattcaaagggtgaggaacatgacagatgggcaatgcactttgattcattaaagagttatcctggttctcaatctcagctgttctctcagtcaacacacaaacaacctgagtacttctgtgtctctcctgacactcaggagctggctgatgtcagcagtgtttgtacacctacaaccggaagccaggttgaaccttcagaggaggagcatatagcaaaacctattaaggatgtggttatggcaaacagtaagaaaacaaactttctccgttctatgactgctctcttggacccagctcagattgaggaacgagacagacgacgacaaaaacaattagagcatcagaaagccatcactgcccaggtagaagagaagcgcaggaagaaacaactggaggaagagcaaagaaagaaggaagaacaagaagaggagcttcgcttagcacaggaacgtgaagagatgcagaaacagtatgaagaagacatacttaagcaaaaacaaaaggaagaaatcatgactctcaagacaaatgagctattccagacaatgcagcgagcacaggaactggcacagagactaaaacaagaacaaagaatccgagaattggcgcaaaagggacatgacacttctagactgattaaaaatcttggtgttgatacaatacaaatggaatataatgcatctaacatttcaaattcaagacatgattctgatgaaatcagtggtaaaatgatgacttaaatataggaatattcaccaatgcagaatcacattgtggatcattaatggagagggacatcacaaattgttcatctcctgagatttcggcagaacttattggacagtttagcaccaagaaaaacaagcaagaactaactcaggataaaggagccagcttagaaaaagaaaacaatcggtgtaatgaccagtgtaatcagttcacaagaatagagaaacaaacaaaacacatgaagaaatatcctaaaaggcctgattggaatataaataagccacctaaaaggtatattccagcatcagaaaagtaccctaaacagcttcaaaagcagagagaagaaaaaaaagtaaggaggcagatggaattgcttcatttggtagaaaaaaataatcctgggcacctctctcaaaacagaggcatttcaccagaaatttttcattcatctcatcaagaaacggagtcaaagttgaggtggcatctagtcaaaaaggaagaagagcctctgaatattcattcattcagcaaggaaaggtaagta

SEQ ID NO: 14157 - DNA, 1277 bp, Homo sapiens
aaaataaatctgtcttaaatgaacatcaggagacatctaaacagtgtgagcaaaaaattgccatagagaatgaatggaaaccagctgatatattcagtactctgggggaaagggaatgtgatagaagttcgttggaagcaaaaaaagcccagtggaggaaagagctagatgaacaggttgctttaaagaagaaagaaaaagaagtttctgaaaaatggaatgatccttggaaaaaatctgaaagtgataaaataatatgggaaaaacatcaaattcttgaccaatctaggctcttcaagcattctatcacagtctcgtagccaggttatggtggtccaagctgatggggcattcacaacttagagctagtcagactttagaggaaacagtactgctggagcaccctttcagtgctgtgaaacaagaactgcagagaaaatggattgaagagttgaataagcaaatagaagatgaccgtcaaagaaaaatagaggaaaaaattatatattcaaagggtgaggaacatgacagatgggcaatgcactttgattcattaaagagttatcctggttctcaatctcagctgttctctcagtcaacacacaaacaacctgagtacttctgtgtctctcctgacactcaggagctggctgatgtcagcagtgtttgtacacctacaaccggaagccaggttgaaccttcagaggaggagcatatagcaaaacctattaaggatgtggttatggcaaacagtaagaaaacaaactttctccgttctatgactgctctcttggacccagctcagattgaggaacgagacagacgacgacaaaaacaattagagcatcaggtattgcattgttaaacattgttctttaccttaataagtaacagtcatggtgaacatatacctaagtaaatggaaatttaaattctgatgtaaactttacagcataggtcctgtccagttgtgtcacgaatccaatccctaccacaactggcattgtaatattagaattagcttatcaaatgctacagccacctgccttccagtacagaaggtctttaatatattaagttgtatatgtgaatttgtgttgtcttagggtagtactggtttttttttttttcatcaatttatttctcctgagttgctgtttaagatgagaattcattactttgaatagggattgaactagaattatgagtaagaaatgtaatgcataatggccgggcacggtggctcacgcctgtaatcccagcactttgggaggctg

SEQ ID NO: 14158 - DNA, 482 bp, Homo sapiens
atttttcattcatctcatcaagaaacggagtcaaagttgaggtggcatctagtcaaaaaggtaaagctcttccatcttagatgatgtgttgacgtttctggattcaaaacacagtttctcatacgtatgctttggtaaggctgttctgatctgtttcagtttacattagggatcagcaaactatatcccatgggcaaatccaggctgctgcctgtttttggaaagttttatacgaacatagtcaactcattcttttatgaattgtctgtggctgacttcacacaccagactagcaacagaaacaatatggcccacaaagctgaaaaggtttccttatgcttatcgagtcctttacacttacacaacttctgtagatggatgctgtgtattcaaatacccctttaaaacccttgtttatagtccacatagacagaggtttgggagattaggaactcccaaggattagttttgactctggaaaa

SEQ ID NO: 14159 - DNA, 558 bp, Homo sapiens
cttctgacctcaagcgatcctcccaccttggcctcctgagtagctgggattgtaggtgtgagccactgggcctggctcatatggtattttaaaacagtgttatttttaatttaattatgaccttaactggtctctatttacattctgtgagttgtctcgttatgtcgttaggtgaatgtagaggctccctttagagtcttataaaggagctgtgcaatttttgaaatgaatacaaaactctgccactatgtgtaagtgtttagttatcaaatatacacatatgccaagtgtgtcttgtgtagtgcttttgtgatttttaaattttatctgtggttaattttgggtaaagaaacagtgtcactgtttttctatttatttttacacttctgctagctcttcaagcattctatcacagtctcgtagccaggttatggtggtccaagctgatggggcattcacaacttagagctagtcagactttagaggtaagtcctaagtgtcagtactttggatatttaaaccttttagtatttgacctctaacctattttccttgaag

SEQ ID NO: 14160 - DNA, 1839 bp, Homo sapiens
gcggtggcaagagtagcggtgacggcggcggcggcggcggcggcagcattatgcgtgattactgacaggcaccagctgctgccgccacagccgtctcaaacgcactatgtggactctccgatctagaggcagattcctgactaatcccagagggctggcccagcctgtgctccccgggctgctaggaagcgatgaccactcttgttagcccaagttgaagaaagccgggctgtgcctgggagccgagagaggcggtaatatttagaagctgcacaggagaggaacatgaactgacgagtaaacatgtatggaaattattctcacttcatgaagtttcccgcaggctatggaggctcccctggccacactggctctacatccatgagcccatcagcagccttgtccacagggaagccaatggacagccaccccagctacacagataccccagtgagtgccccacggactctgagtgcagtggggacccccctcaatgccctgggctctccatatcgagtcatcacctctgccatgggcccaccctcaggagcacttgcagcgcctccaggaatcaacttggttgccccacccagctctcagctaaatgtggtcaacagtgtcagcagttcagaggacatcaagcccttaccagggcttcccgggattggaaacatgaactacccatccaccagccccggatctctggttaaacacatctgtgccatctgtggagacagatcctcaggaaagcactacggggtatacagttgtgaaggctgcaaagggttcttcaagaggacgataaggaaggacctcatctacacgtgtcgggataataaagactgcctcattgacaagcgtcagcgcaaccgctgccagtactgtcgctatcagaagtgccttgtcatgggcatgaagagggaagctgtgcaagaagaaagacagaggagccgagagcgagctgagagtgaggcagaatgtgctaccagtggtcatgaagacatgcctgtggagaggattctagaagctgaacttgctgttgaaccaaagacagaatcctatggtgacatgaatatggagaactcgacaaatgaccctgttaccaacatatgtcatgctgctgacaagcagcttttcaccctcgttgaatgggccaagcgtattccccacttctctgacctcaccttggaggaccaggtcattttgcttcgggcagggtggaatgaattgctgattgcctctttctcccaccgctcagtttccgtgcaggatggcatccttctggccacgggtttacatgtccaccggagcagtgcccacagtgctggggtcggctccatctttgacagagtcctaactgagctggtttccaaaatgaaagacatgcagatggacaagtcggaactgggatgcctgcgagccattgtactctttaacccagatgccaagggcctgtccaacccctctgaggtggagactctgcgagagaaggtttatgccacccttgaggcctacaccaagcagaagtatccggaacagccaggcaggtttgccaagctgctgctgcgcctcccagctctgcgttccattggcttgaaatgcctggagcacctcttcttcttcaagctcatcggggacacccccattgacaccttcctcatggagatgttggagaccccgctgcagatcacctgagccccaccagccacagcctccccacccaggatgacccctgggcaggtgtgtgtggacccccaccctgcactttcctccacctcccaccctgacccccttcctgtccccaaaatgtgatgcttataataaagaaaacctttctac

SEQ ID NO: 14161 - DNA, 626 bp, Homo sapiens
gcggtggcaagagtagcggtgacggcggcggcggcggcggcggcagcattatgcgtgattactgacaggcaccagctgctgccgccacagccgtctcaaacgcactatgtggactctccgatctagaggcagattcctgactaatcccagagggctggcccagcctgtgctccccgggctgctaggaagcgatgaccactcttgttagcccaagttgaagaaagccgggctgtgcctgggagccgagagaggcggtaatatttagaagctgcacaggagaggaacatgaactgacgagtaaacatgtatggaaattattctcacttcatgaagtttcccgcaggctatggagggtgttcttcccctgctctccaacttctgctctccacatcgctagggctgtgaaaacagatactgtgagccctgaaccctccaggaggctgcttccccatgacactagtgaccagtaaaatgaaaaggaggagcaaaggagattttgagtcacagaaatgaaacccaggcaaccagcctagaagaaacactccaagatattcattaagtgctttgtttcccgttcctctgacatcttgtaaatgctttttggattaaagatgataacaggctta

SEQ ID NO: 14162 - DNA, 2036 bp, Homo sapiens
gcggtggcaagagtagcggtgacggcggcggcggcggcggcggcagcattatgcgtgattactgacaggcaccagctgctgccgccacagccgtctcaaacgcactatgtggactctccgatctagaggcagattcctgactaatcccagagggctggcccagcctgtgctccccgggctgctaggaagcgatgaccactcttgttagcccaagttgaagaaagccgggctgtgcctgggagccgagagaggcggtaatatttagaagctgcacaggagaggaacatgaactgacgagtaaacatgtatggaaattattctcacttcatgaagtttcccgcaggctatggaggctcccctggccacactggctctacatccatgagcccatcagcagccttgtccacagggaagccaatggacagccaccccagctacacagataccccagtgagtgccccacggactctgagtgcagtggggacccccctcaatgccctgggctctccatatcgagtcatcacctctgccatgggcccaccctcaggagcacttgcagcgcctccaggaatcaacttggttgccccacccagctctcagctaaatgtggtcaacagtgtcagcagttcagaggacatcaagcccttaccagggcttcccgggattggaaacatgaactacccatccaccagccccggatctctggttaaacacatctgtgccatctgtggagacagatcctcaggaaagcactacggggtatacagttgtgaaggctgcaaagggttcttcaagaggacgataaggaaggacctcatctacacgtgtcgggataataaagactgcctcattgacaagcgtcagcgcaaccgctgccagtactgtcgctatcagaagtgccttgtcatgggcatgaagagggaagctgtgcaagaagaaagacagaggagccgagagcgagctgagagtgaggcagaatgtgctaccagtggtcatgaagacatgcctgtggagaggattctagaagctgaacttgctgttgaaccaaagacagaatcctatggtgacatgaatatggagaactcgacaaatgaccctgttaccaacatatgtcatgctgctgacaagcagcttttcaccctcgttgaatgggccaagcgtattccccacttctctgacctcaccttggaggaccaggtcattttgcttcgggcagggtggaatgaattgctgattgcctctttctcccaccgctcagtttccgtgcaggatggcatccttctggccacgggtttacatgtccaccggagcagtgcccacagtgctggggtcggctccatctttgacagagtcctaactgagctggtttccaaaatgaaagacatgcagatggacaagtcggaactgggatgcctgcgagccattgtactctttaacccagatgccaagggcctgtccaacccctctgaggtggagactctgcgagagaaggtttatgccacccttgaggcctacaccaagcagaagtatccggaacagccaggcaggtttgccaagctgctgctgcgcctcccagctctgcgttccattggcttgaaatgcctggagcacctcttcttcttcaagctcatcggggacacccccattgacaccttcctcatggagatgttggagaccccgctgcagatcacctgagccccaccagccacagcctccccacccaggatgacccctgggcaggtgtgtgtggacccccaccctgcactttcctccacctcccaccctgacccccttcctgtccccaaaatgtgatgcttataataaagaaaacctttctacacatgagacttttataggtggacttttgtatagatgttaaaggtaatacgctttgctgtctacagggctgggagactttctggaagttcttgggaaaactaatcaagcctctgtacatacaattggtttaaattattttttcacttgccctggaaagcaaacaaatgagtaataaaataatatgtgtgaaattggca

SEQ ID NO: 14163 - DNA, 1658 bp, Homo sapiens
ccctgagcagtgttctgggcttgggctccggaaccacactgcagcaatgctttgctcggttaacgagatgacactggaaaaaaggccttggtgttagctacagtgagctggactctggatcgtctgggcagattattcctatgcatcctgccttcctcacccaggactggtctgagagggattcatgatggaagcatgttcattctgtgacctggttctcgcctaaatgtggtcaacagtgtcagcagttcagaggacatcaagcccttaccagggcttcccgggattggaaacatgaactacccatccaccagccccggatctctggttaaacacatctgtgccatctgtggagacagatcctcaggaaagcactacggggtatacagttgtgaaggctgcaaagggttcttcaagaggacgataaggaaggacctcatctacacgtgtcgggataataaagactgcctcattgacaagcgtcagcgcaaccgctgccagtactgtcgctatcagaagtgccttgtcatgggcatgaagagggaagctgtgcaagaagaaagacagaggagccgagagcgagctgagagtgaggcagaatgtgctaccagtggtcatgaagacatgcctgtggagaggattctagaagctgaacttgctgttgaaccaaagacagaatcctatggtgacatgaatatggagaactcgacaaatgaccctgttaccaacatatgtcatgctgctgacaagcagcttttcaccctcgttgaatgggccaagcgtattccccacttctctgacctcaccttggaggaccaggtcattttgcttcgggcagggtggaatgaattgctgattgcctctttctcccaccgctcagtttccgtgcaggatggcatccttctggccacgggtttacatgtccaccggagcagtgcccacagtgctggggtcggctccatctttgacagagtcctaactgagctggtttccaaaatgaaagacatgcagatggacaagtcggaactgggatgcctgcgagccattgtactctttaacccagatgccaagggcctgtccaacccctctgaggtggagactctgcgagagaaggtttatgccacccttgaggcctacaccaagcagaagtatccggaacagccaggcaggtttgccaagctgctgctgcgcctcccagctctgcgttccattggcttgaaatgcctggagcacctcttcttcttcaagctcatcggggacacccccattgacaccttcctcatggagatgttggagaccccgctgcagatcacctgagccccaccagccacagcctccccacccaggatgacccctgggcaggtgtgtgtggacccccaccctgcactttcctccacctcccaccctgacccccttcctgtccccaaaatgtgatgcttataataaagaaaacctttctacacatgagacttttataggtggacttttgtatagatgttaaaggtaatacgctttgctgtctacagggctgggagactttctggaagttcttgggaaaactaatcaagcctctgtacatacaattggtttaaattattttttcacttgccctggaaagcaaacaaatgagtaataaaataatatgtgtgaaattggca

SEQ ID NO: 14164 - DNA, 523 bp, Homo sapiens
ccttagccacttggcactatgcaaagtgctttacatatgaggatgaaataatttaataaataaacacaaccgtggaggtagtgagtatggttctccatgtgcagatgaagagactgagggtcagagtgacagtgtgatttgcccatggctacatagcttggagtggccaggccaggctcatcccagagccctgttcctaaccactctgttcagttgcactcacgtgccagaaatgtcttgtgtatttctacctcacttatcaggaaccatcagaaaatccagtatagaacacgttctgtgaaggagaacgtaaagcctctgtgctcaaagaactttgagggtgtttgtggaggtgtggacagcctccaggagtgtcccagccatcacagatcacatccgacaccaggctgttaggccggtgcccagaccacacatccatggcagagctaacggggagaggcttccgatcgagtcctgtgtttatttttatgcttctgcagagcattctcacaccagtcaccac

SEQ ID NO: 14165 - DNA, 857 bp, Homo sapiens
atttgcccacctccttctgatcattttattttcttggcctgctctggcaggcattcaacaaacatttgttgtgtgctgtgtgccagtcactttctaggcacgtgagacagcagtggataaaacaaagatccctgtcctcttggggttttacgttctgctaggttgacacccagaatagattataaacacagtaagcaaattgtaccttagaagttgatcagtgctcttcaaaaggcgaggaatagagcccgatctggggatctggaatgatggcagtgcaggtaggaatttttaaatcggaaaggcttcatggagatgactttgaagcaagcacctggaagaagtgagagaatgaggcacgtggatgtgggccagcagcattccaggcaaagggaaccacagcaaatgcaaaacccctgaggctggattgtgcccgtttcactcaaacagctagaaagagcgctagtatggtggcagtgagtcaggggaagaagaggaagagatgaggtcagagaagtgatgagcctgttctatgccaaggcgaggacttttatctttgtcaaatatttccactcccatcatggcccgggaaatctcactaatgtaaaccttactgaaaatcctaactgctgtgatcaaggctgccataaagggaagcccggaagaggcggggaggctgccttggaacagggtagtgtaaggatgtgccagaaggcctgctggaggttgcagccctttgagctggacttggggatagtgtggttttccaggcagaaggaagtgaaggattaggtcggcctggtagtacttggcacacaacatgcgcccaataaataaaatggaaataaaaccgcgga

SEQ ID NO: 14166 - DNA, 369 bp, Homo sapiens
ttatagccactacacacagtaaagtgagaagattatacatcttctctcaatggaggatgaataaactattagtagtttattgagtacattcctttttgtgtatacctgggatgtatacacacaaaaaaggaagaatgataggaaacatgtaaagtatattagaaataactatgttttattttgtgatcatggagaaatatgggttcactttaatattgaattgaaaaaataaaaatgtgattagaaatttttgtatttaatgagtcattagatatgattataaatttttcaaaaagcattatacagttctccaatgttatataccaggcagcactgtgagtgttctcaaaggcattgctcagtctccac

SEQ ID NO: 14167 - DNA, 398 bp, Homo sapiens
gaaaatggatcaccatagactattcagtagtagtgttactatgccgaattccaaaaaatcagtgatccaaaatcacttaaaagactatcacccaagttatatgttacagccaaattactgcccaataccacctgctcctgaggaaggctcctttgccaacagcacagaccaggagccaaccaggccccagcacgctggaggagacgttcgtgcagcccgctgctatttgagaaaagcactgacgagctgacagggcaagccaaggacctggaggccactgtgagggagcctgcagccagcggagatgtgcagggtccaggatgctctttgagacgaggccgctggaccgcctgggctcccgccctccctgcaggagcagagcccttggaactgcgcta

SEQ ID NO: 14168 - DNA, 200 bp, Homo sapiens
tgatccctgtcaaagctaaagtggcctggtcagtgagaacccctgtgaggagctcagaggaggaagcccttaagatctccagaggcatgagttctgaaagacagtgtggcctgtatatgctgaggggactagtaacagaagagaggaagtaagaacaggcacggcacgctctgctgaaagtagactgcggccaggctttt

SEQ ID NO: 14169 - DNA, 390 bp, Homo sapiens
attaattgaaaaacagtaggttttaatctttccctctgcttctttgatagtgttgaagattagagcaggttatggagataataccaaaaagctctattaggtaatatagtacagttttccttctatatccacagatccactcaaccactgatcaaaaatatttggaaaaataacaatgaaaataacaatgcaacaataaaaatagaaataagaaacaatacagtataacaactatttatatagtatttacattgcatgaggtattgtaaataactagagattatttaaagcaggggtatccaatcttttagcttccctggcccacattgaaagaagaattgtctttggccacaaataaaatatactaacactaatgatagttgatgagct

SEQ ID NO: 14170 - DNA, 683 bp, Homo sapiens
tgataaccttgggtttgaatcatggtactaccacttagtagtttggtaatttggtgcatgttaaccaccctgacttccactcctctccaaagcctcagagatctcatagggttgtttgagggttcaatgaaatatatgtaacatgcttattgggatgtctggttgataagttcctcgtacaaagtggctgttattgttaccacttttgttgttgttcattcattctttcaacaaatatttattggcttcctgcaacgagctaaatctgtctagtcactgggtatacaacactaaacaaaacagacaaaagtgcttaccctatgaaatattctagttgttaagagaaagaaaataataaatgaactctgcagtgtgtcctatagcattaaatcttggagagaggctaggcacagtggctcatacctgtaatcctggcactttgggaggctgaggaaggaggatcacttgcgttcaggagtttgagaccagtctgggcaacatagtgagaccccatatctttaaaaaaaaaaaaagcctgctgtgggcgagcgtgtgtagtccatttgctcaggaggctgaggcgggaggatcatttgagcccaccaggttgacactgcagtgaaccatggttgtgccactgcactccagcctggatgacagagtgattgagactctgtctttta

SEQ ID NO: 14171 - DNA, 1478 bp, Homo sapiens
aaagctacctcactagcttttgtgaaagtcaggctggaaagtgcttccagccacagaaataggctgtgggtgtaaatattaaccttggccatcaaataagtaggcatagagtgtgactcgccctctcttggtcttccctgaaacagcagggtcaagaactcctggtctgtgttagccacgtggcttacaaaaacaatgacacagaagagggaaaggtgggactagccaagtggaaggccagccgtttatctctcagtgtcctgtgtcttatatcctgagcagagcaaggtgcaagaccctggactgggcatccagcagaaacttccgagaaacttgactgtgaggaaggatgcttgcctagcaattggtcggatgaagggctccatttgatacttccttcactgtggaaggaagaaatttgtaaaaattatttccagaatatgcacacattaaaggtttataaacctgacctttctttagtagaagacagtaagagaatactgttggctctgggaactaaccatttgagctgtgggacccagggaatctctcttgtaagcatcatctttagtgggtgactcctggtggccctcccagctctggtggtgctgtggggacctgccttggagatgccttggtactagtaccttttttgtaccaggccatgagcctagggcacagggcctctggcctgccagatttcaggaaggcagctgtgttgtgtgaaccgatacagcctgccagcacttctgtcccgagtgactgtcgttgtcatcgttagcatgttgcctgaaaagccttggggtcttgggcgctgacactgaagctttttttttcccttctggctctgtgatgtccagcattacccagaacgccatggaggaccagagcgccacggccgggactcccgcgatggctgggggggctatggctctgacaagaggatgagcgagggccgggggctgcctcctccccccaggggcagacgtgactggggggaccatggccgaagagaggatgaccggtcatggcagggcacggccgacgggggcatgatggacagggatcacaagaggtggcaaggtggcgagagaagcatgtccggtcactccgggcctggccacatgatgaaccgaggaggaatgtcagggcgcggcagctttgccccaggcggggcctcccggggccaccccatcccacacggtggcatgcagggcgggtttggaggccagagccgggggagcaggcccagcgatgcccgcttcactcgccgctactgagtacttggaatcctgtgtcctgtctcgtggcaacaaggctatgttctgttaggagttaccttaaactgtgtaaaaatatttttttttaatctgctgccatattgtagctcaatacaatgtgaatttgtttttcgttttggggttttttttttttgtaataaatgtgtttccgttcacataccctttaaaaaaaaatca

SEQ ID NO: 14172 - DNA, 865 bp, Homo sapiens
  misc_feature (809)..(809): n is a, c, g, or t
  misc_feature (843)..(843): n is a, c, g, or t
  misc_feature (858)..(858): n is a, c, g, or t
agaagcgaggcgcgctggggcgactggagcggttccctcgcaggcggcgccattttgtgctaggagcctgataaaaccggcccggttctgtggaaagtgggcggcggagccagggtccctggaatggcggagactctgtcaggcctaggtgattctggagcggcgggcgcggcggctctgagctccgcctcgtcagagaccgggacgcggcgcctcagcgacctgcgagtgatcgatctgcgggcggagctgaggaaacggaatgtggactcgagcggcaacaagagcgttttgatggagcggctgaagaaggcaattgaagatgaaggtggtaatcctgacgaaattgaaattacctccgagggaaacaagaaaacatcaaagaggtctagcaaagggcgcaaaccagaagaagagggtgtggaagataacgggctggaggaaaactctggggatggacaggaggatgttgagaccagtctggagaacttgcaggacatcgacatcatggatatcagtgtgttggatgaagcagaaattgataatggaagcgttgcagattgtgtcgaagacgatgatgctgataacctccaggagtccctgtcggatagtagagagctagtcgagggggaaatgaaagagcttccggagcagcttcaggaacatgctatagaggacaaagaaactataaacaatttagatacttcatcatctgacttcactatattacaggaaattgaagaacccttcccttggagccccgaaaaatgaggaaaattcttcgacatttttggggggggaaaccttgnaaaatcttgagccccgttaaaaagaaagaaaagnttcccaacttggaancaagccc

SEQ ID NO: 14173 - DNA, 1006 bp, Homo sapiens
aaagctacctcactagcttttgtgaaagtcaggctggaaagtgcttccagccacagaaataggctgtgggtgtaaatattaaccttggccatcaaataagtaggcatagagtgtgactcgccctctcttggtcttccctgaaacagcagggtcaagaactcctggtctgtgttagccacgtggcttacaaaaacaatgacacagaagagggaaaggtgggactagccaagtggaaggccagccgtttatctctcagtgtcctgtgtcttatatcctgagcagagcaaggtgcaagaccctggactgggcatccagcagaaacttccgagaaacttgactgtgaggaaggatgcttgcctagcaattggtcggatgaagggctccatttgatacttccttcactgtggaaggaagaaatttgtaaaaattatttccagaatatgcacacattaaaggtttataaacctgacctttctttagtagaagacagtaagagaatactgttggctctgggaactaaccatttgagctgtgggacccagggaatctctcttgtaagcatcatctttagtgggtgactcctggtggccctcccagctctggtggtgctgtggggacctgccttggagatgccttggtactagtaccttttttgtaccaggccatgagcctagggcacagggcctctggcctgccagatttcaggaaggcagctgtgttgtgtgaaccgatacagcctgccagcacttctgtcccgagtgactgtcgttgtcatcgttagcatgttgcctgaaaagccttggggtcttgggcgctgacactgaagctttttttttcccttctggctctgtgatgtccagcattacccagaacgccatggaggaccagagcgccacggccgggactcccgcgatggctggggggtatgtctaaaaagataacaggccggggttccccccccagttggtcccaccaagaccgaccccccccccaaagggccaatcgt

SEQ ID NO: 14174 - DNA, 1911 bp, Homo sapiens
agaactaaatttcgggtaggtatgcaacctcagcacgaattttatggttttgagtttgtttcctccatgctgcttccttgtggagtgacattgtcttttgtctctagttctcccgaagatgactcggatacaaaaaggctttccaaagaggaaaagggtcgcagcagttgtggtagaaatttctgggttagtggactctcttctacaaccagagctacagatttgaagaatcttttcagcaaatatgggaaggtggtgggcgccaaggttgtgacaaatgcccggagtcctggagctcgctgttacggttttgtcacgatgtccacagcagaagaggccacaaaatgcattaaccacctgcacaagacggagctccacggaaagatgatctccgtggagaaagccaaaaatgaacctgtgggaaagaaaacctctgacaaaagagacagtgacgggaaaaaggagaagtcgagcaacagtgacagatctacaaaccttaagagggatgataaatgtgacagaaaagatgatgctaagaagggtgacgacggaagtggagaaaagagtaaggaccaagatgatcagaaacctggcccctcagagcgatctcgagccacaaagtcaggaagtcgagggaccgaacggactgtagtaatggataaatccaaaggggtgcctgtgattagtgtaaaaacgtccgggtccaaagagagagcttccaaaagccaggatcgcaaatcagccagcagagagaagcggtccgtcgtgtcctttgataaggtcaaggagcctcggaagtcaagagactcagagtcccatagcagggtgcgtgaacgcagtgaacgcgaacaacgcatgcaggcgcagtgggagcgcgaggagcgtgagcggctggagattgcccgagagaggctggccttccagcgccagcggctggagcgggagcgcatggagcgggaacggctggagcgcgaacgcatgcacgtggagcacgagcgcaggcgcgagcaggagcgcatccaccgtgagcgcgaggagctgaggcgccagcaggaactgcgctatgagcaggagcggcggcccgcggtgcggcggccctacgacctggaccggcgagatgatgcctattggccggaagccaagcgggccgccctggatgagcgctaccattctgactttaaccgccaggaccgcttccacgactttgaccacagggaccgcggccgctaccccgaccactcggtggacaggagagaaggttcaaggtcaatgatgggagaacgagaaggacagcattacccagaacgccatggaggaccagagcgccacggccgggactcccgcgatggctgggggggctatggctctgacaagaggatgagcgagggccgggggctgcctcctccccccaggggcagacgtgactggggggaccatggccgaagagaggatgaccggtcatggcagggcacggccgacgggggcatgatggacagggatcacaagaggtggcaaggtggcgagagaagcatgtccggtcactccgggcctggccacatgatgaaccgaggaggaatgtcagggcgcggcagctttgccccaggcggggcctcccggggccaccccatcccacacggtggcatgcagggcgggtttggaggccagagccgggggagcaggcccagcgatgcccgcttcactcgccgctactgagtacttggaatcctgtgtcctgtctcgtggcaacaaggctatgttctgttaggagttaccttaaactgtgtaaaaatatttttttttaatctgctgccatattgtagctcaatacaatgtgaatttgtttttcgttttggggttttttttttttgtaataaatgtgtttccgttcacataccctttaaaaaaaaatca

SEQ ID NO: 14175 - DNA, 1335 bp, Homo sapiens
tggatcgagctcggtcgcctcgcgacgtgttatccattactacagatcagaagtcgagggaccgaacggactgtagtaatggataaatccaaaggggtgcctgtgattagtgtaaaaacgtccgggtccaaagagagagcttccaaaagccaggatcgcaaatcagccagcagagagaagcggtccgtcgtgtcctttgataaggtcaaggagcctcggaagtcaagagactcagagtcccatagcagggtgcgtgaacgcagtgaacgcgaacaacgcatgcaggcgcagtgggagcgcgaggagcgtgagcggctggagattgcccgagagaggctggccttccagcgccagcggctggagcgggagcgcatggagcgggaacggctggagcgcgaacgcatgcacgtggagcacgagcgcaggcgcgagcaggagcgcatccaccgtgagcgcgaggagctgaggcgccagcaggaactgcgctatgagcaggagcggcggcccgcggtgcggcggccctacgacctggaccggcgagatgatgcctattggccggaagccaagcgggccgccctggatgagcgctaccattctgactttaaccgccaggaccgcttccacgactttgaccacagggaccgcggccgctaccccgaccactcggtggacaggagagaaggttcaaggtcaatgatgggagaacgagaaggacagcattacccagaacgccatggaggaccagagcgccacggccgggactcccgcgatggctgggggggctatggctctgacaagaggatgagcgagggccgggggctgcctcctccccccaggggcagacgtgactggggggaccatggccgaagagaggatgaccggtcatggcagggcacggccgacgggggcatgatggacagggatcacaagaggtggcaaggtggcgagagaagcatgtccggtcactccgggcctggccacatgatgaaccgaggaggaatgtcagggcgcggcagctttgccccaggcggggcctcccggggccaccccatcccacacggtggcatgcagggcgggtttggaggccagagccgggggagcaggcccagcgatgcccgcttcactcgccgctactgagtacttggaatcctgtgtcctgtctcgtggcaacaaggctatgttctgttaggagttaccttaaactgtgtaaaaatatttttttttaatctgctgccatattgtagctcaatacaatgtgaatttgtttttcgttttggggttttttttttttgtaataaatgtgtttccgttcacataccctttaaaaaaaaatca

SEQ ID NO: 14176 - DNA, 1808 bp, Homo sapiens
agaagcgaggcgcgctggggcgactggagcggttccctcgcaggcggcgccattttgtgctaggagcctgataaaaccggcccggttctgtggaaagtgggcggcggagccagggtccctggaatggcggagactctgtcaggcctaggtgattctggagcggcgggcgcggcggctctgagctccgcctcgtcagagaccgggacgcggcgcctcagcgacctgcgagtgatcgatctgcgggcggagctgaggaaacggaatgtggactcgagcggcaacaagagcgttttgatggagcggctgaagaaggcaattgaagatgaaggtggtaatcctgacgaaattgaaattacctccgagggaaacaagaaaacatcaaagaggtctagcaaagggcgcaaaccagaagaagagggtgtggaagataacgggctggaggaaaactctggggatggacaggaggatgttgagaccagtctggagaacttgcaggacatcgacatcatggatatcagtgtgttggatgaagcagaaattgataatggaagcgttgcagattgtgtcgaagacgatgatgctgataacctccaggagtccctgtcggatagtagagagctagtcgagggggaaatgaaagagcttccggagcagcttcaggaacatgctatagaggacaaagaaactataaacaatttagatacttcatcatctgacttcactatattacaggaaattgaagagccatccctggagccagaaaatgagaaaatactcgacattttgggggaaacttgtaaatctgagccagtaaaagaagaaagttccggctggagcgggagcgcatggagcgggaacggctggagcgcgaacgcatgcacgtggagcacgagcgcaggcgcgagcaggagcgcatccaccgtgagcgcgaggagctgaggcgccagcaggaactgcgctatgagcaggagcggcggcccgcggtgcggcggccctacgacctggaccggcgagatgatgcctattggccggaagccaagcgggccgccctggatgagcgctaccattctgactttaaccgccaggaccgcttccacgactttgaccacagggaccgcggccgctaccccgaccactcggtggacaggagagaaggttcaaggtcaatgatgggagaacgagaaggacagcattacccagaacgccatggaggaccagagcgccacggccgggactcccgcgatggctgggggggctatggctctgacaagaggatgagcgagggccgggggctgcctcctccccccaggggcagacgtgactggggggaccatggccgaagagaggatgaccggtcatggcagggcacggccgacgggggcatgatggacagggatcacaagaggtggcaaggtggcgagagaagcatgtccggtcactccgggcctggccacatgatgaaccgaggaggaatgtcagggcgcggcagctttgccccaggcggggcctcccggggccaccccatcccacacggtggcatgcagggcgggtttggaggccagagccgggggagcaggcccagcgatgcccgcttcactcgccgctactgagtacttggaatcctgtgtcctgtctcgtggcaacaaggctatgttctgttaggagttaccttaaactgtgtaaaaatatttttttttaatctgctgccatattgtagctcaatacaatgtgaatttgtttttcgttttggggttttttttttttgtaataaatgtgtttccgttcacataccctttaaaaaaaaatca

SEQ ID NO: 14177 - DNA, 1132 bp, Homo sapiens
aaaaaaaaaaaaaaaaaaaaaaaaaaagcctcgtgccgaattcagggtgcgtgaacgcagtgaacgcgaacaacgcatgcaggcgcagtgggagcgcgaggagcgtgagcggctggagattgcccgagagaggctggccttccagcgccagcggctggagcgggagcgcatggagcgggaacggctggagcgcgaacgcatgcacgtggagcacgagcgcaggcgcgagcaggagcgcatccaccgtgagcgcgaggagctgaggcgccagcaggaactgcgctatgagcaggagcggcggcccgcggtgcggcggccctacgacctggaccggcgagatgatgcctattggccggaagccaagcgggccgccctggatgagcgctaccattctgactttaaccgccaggaccgcttccacgactttgaccacagggaccgcggccgctaccccgaccactcggtggacaggagagaaggttcaaggtcaatgatgggagaacgagaaggacagcattacccagaacgccatggaggaccagagcgccacggccgggactcccgcgatggctgggggggctatggctctgacaagaggatgagcgagggccgggggctgcctcctccccccaggggcagacgtgactggggggaccatggccgaagagaggatgaccggtcatggcagggcacggccgacgggggcatgatggacagggatcacaagaggtggcaaggtggcgagagaagcatgtccggtcactccgggcctggccacatgatgaaccgaggaggaatgtcagggcgcggcagctttgccccaggcggggcctcccggggccaccccatcccacacggtggcatgcagggcgggtttggaggccagagccgggggagcaggcccagcgatgcccgcttcactcgccgctactgagtacttggaatcctgtgtcctgtctcgtggcaacaaggctatgttctgttaggagttaccttaaactgtgtaaaaatatttttttttaatctgctgccatattgtagctcaatacaatgtgaatttgtttttcgttttggggttttttttttttgtaataaatgtgtttccgttcacataccctttaaaaaaaaatca

SEQ ID NO: 14178 - DNA, 1759 bp, Homo sapiens
aattaggctaggtacgaggctggttgtaattcggccgagggtggacagtgggcggcggagccagggtccctggaatggcggagactctgtcaggcctaggtgattctggagcggcgggcgcggcggctctgagctccgcctcgtcagagaccgggacgcggcgcctcagcgacctgcgagtgatcgatctgcgggcggagctgaggaaacggaatgtggactcgagcggcaacaagagcgttttgatggagcggctgaagaaggcaattgaagatgaaggtggtaatcctgacgaaattgaaattacctccgagggaaacaagaaaacatcaaagaggtctagcaaagggcgcaaaccagaagaagagggtgtggaagataacgggctggaggaaaactctggggatggacaggaggatgttgagaccagtctggagaacttgcaggacatcgacatcatggatatcagtgtgttggatgaagcagaaattgataatggaagcgttgcagattgtgtcgaagacgatgatgctgataacctccaggagtccctgtcggatagtagagagctagtcgagggggaaatgaaagagcttccggagcagcttcaggaacatgctatagaggacaaagaaactataaacaatttagatacttcatcatctgacttcactatattacaggaaattgaagagccatccctggagccagaaaatgagaaaatactcgacattttgggggaaacttgtaaatctgagccagtaaaagaagaaagttccggctggagcgggagcgcatggagcgggaacggctggagcgcgaacgcatgcacgtggagcacgagcgcaggcgcgagcaggagcgcatccaccgtgagcgcgaggagctgaggcgccagcaggaactgcgctatgagcaggagcggcggcccgcggtgcggcggccctacgacctggaccggcgagatgatgcctattggccggaagccaagcgggccgccctggatgagcgctaccattctgactttaaccgccaggaccgcttccacgactttgaccacagggaccgcggccgctaccccgaccactcggtggacaggagagaaggttcaaggtcaatgatgggagaacgagaaggacagcattacccagaacgccatggaggaccagagcgccacggccgggactcccgcgatggctgggggggctatggctctgacaagaggatgagcgagggccgggggctgcctcctccccccaggggcagacgtgactggggggaccatggccgaagagaggatgaccggtcatggcagggcacggccgacgggggcatgatggacagggatcacaagaggtggcaaggtggcgagagaagcatgtccggtcactccgggcctggccacatgatgaaccgaggaggaatgtcagggcgcggcagctttgccccaggcggggcctcccggggccaccccatcccacacggtggcatgcagggcgggtttggaggccagagccgggggagcaggcccagcgatgcccgcttcactcgccgctactgagtacttggaatcctgtgtcctgtctcgtggcaacaaggctatgttctgttaggagttaccttaaactgtgtaaaaatatttttttttaatctgctgccatattgtagctcaatacaatgtgaatttgtttttcgttttggggttttttttttttgtaataaatgtgtttccgttcacataccctttaaaaaaaaatca

SEQ ID NO: 14179 - DNA, 1365 bp, Homo sapiens
caggatccttacactgctcatcaaatagcgacacagtgacagatctacaaaccttaagagggatgataaatgtgacagaaaagatgatgctaagaagggtgacgacggaagtggagaaaagagtaaggaccaagatgatcagaaacctggcccctcagagcgatctcgagccacaaagtcaggaagtcgagggaccgaacggactgtagtaatggataaatccaaaggggtgcctgtgattagtgtaaaaacgtccgggtccaaagagagagcttccaaaagccaggatcgcaaatcagccagcagagagaagcggtccgtcgtgtcctttgataaggtcaaggagcctcggaagtcaagagactcagagtcccatagcagggtgcgtgaacgcagtgaacgcgaacaacgcatgcaggcgcagtgggagcgcgaggagcgtgagcggctggagattgcccgagagaggctggccttccagcgccagcggctggagcgggagcgcatggagcgggaacggctggagcgcgaacgcatgcacgtggagcacgagcgcaggcgcgagcaggagcgcatccaccgtgagcgcgaggagctgaggcgccagcaggaactcgctaccattctgactttaaccgccaggaccgcttccacgactttgaccacagggaccgcggccgctaccccgaccactcggtggacaggagagaaggttcaaggtcaatgatgggagaacgagaaggacagcattacccagaacgccatggaggaccagagcgccacggccgggactcccgcgatggctgggggggctatggctctgacaagaggatgagcgagggccgggggctgcctcctccccccaggggcagacgtgactggggggaccatggccgaagagaggatgaccggtcatggcagggcacggccgacgggggcatgatggacagggatcacaagaggtggcaaggtggcgagagaagcatgtccggtcactccgggcctggccacatgatgaaccgaggaggaatgtcagggcgcggcagctttgccccaggcggggcctcccggggccaccccatcccacacggtggcatgcagggcgggtttggaggccagagccgggggagcaggcccagcgatgcccgcttcactcgccgctactgagtacttggaatcctgtgtcctgtctcgtggcaacaaggctatgttctgttaggagttaccttaaactgtgtaaaaatatttttttttaatctgctgccatattgtagctcaatacaatgtgaatttgtttttcgttttggggttttttttttttgtaataaatgtgtttccgttcacataccctttaaaaaaaaatca

SEQ ID NO: 14180 - DNA, 688 bp, Homo sapiens
agaagcgaggcgcgctggggcgactggagcggttccctcgcaggcggcgccattttgtgctaggagcctgataaaaccggcccggttctgtggaaagtgggcggcggagccagggtccctggaatggcggagactctgtcaggcctaggtgattctggagcggcgggcgcggcggctctgagctccgcctcgtcagagaccgggacgcggcgcctcagcgacctgcgagtgatcgatctgcgggcggagctgaggaaacggaatgtggactcgagcggcaacaagagcgttttgatggagcggctgaagaaggcaattgaagatgaaggtggtaatcctgacgaaattgaaattacctccgagggaaacaagaaaacatcaaagaggtctagcaaagggcgcaaaccagaagaagagggtgtggaagataacgggctggaggaaaactttgcaagtataatgaatgtagcagagcctttagtttttgttcaaggcttaataaccgttagctagaccatagaggacagaaactttactaatgtactgaatgtggcaaggtcttaaggtaaaatctgagaccaggatttttcaaagaattcttgctggtgagaaacctatacaaatgtaatgaatgtggcagggtcttctggcactattctcacattgtactatattgcaaaaatcacgt

SEQ ID NO: 14181 - DNA, 473 bp, Homo sapiens
caggcatggggtactgtggaggctgctgccactcaggaggggagggcattaggaaggggccctgcctgcaggcaacactcagggaagctgtgcaggctgggatgggccggggagcaggaggacttcgcagtcaaaccaatgtgaatttgttcctaggcgcggcagctttgccccaggcggggcctcccggggccaccccatcccacacggtggcatgcagggcgggtttggaggccagagccgggggagcaggcccagcgatgcccgcttcactcgccgctactgagtacttggaatcctgtgtcctgtctcgtggcaacaaggctatgttctgttaggagttaccttaaactgtgtaaaaatatttttttttaatctgctgccatattgtagctcaatacaatgtgaatttgtttttcgttttggggttttttttttttgtaataaatgtgtttccgttcacatacccttta

SEQ ID NO: 14182 - DNA, 3075 bp, Homo sapiens
agaagcgaggcgcgctggggcgactggagcggttccctcgcaggcggcgccattttgtgctaggagcctgataaaaccggcccggttctgtggaaagtgggcggcggagccagggtccctggaatggcggagactctgtcaggcctaggtgattctggagcggcgggcgcggcggctctgagctccgcctcgtcagagaccgggacgcggcgcctcagcgacctgcgagtgatcgatctgcgggcggagctgaggaaacggaatgtggactcgagcggcaacaagagcgttttgatggagcggctgaagaaggcaattgaagatgaaggtggtaatcctgacgaaattgaaattacctccgagggaaacaagaaaacatcaaagaggtctagcaaagggcgcaaaccagaagaagagggtgtggaagataacgggctggaggaaaactctggggatggacaggaggatgttgagaccagtctggagaacttgcaggacatcgacatcatggatatcagtgtgttggatgaagcagaaattgataatggaagcgttgcagattgtgtcgaagacgatgatgctgataacctccaggagtccctgtcggatagtagagagctagtcgagggggaaatgaaagagcttccggagcagcttcaggaacatgctatagaggacaaagaaactataaacaatttagatacttcatcatctgacttcactatattacaggaaattgaagagccatccctggagccagaaaatgagaaaatactcgacattttgggggaaacttgtaaatctgagccagtaaaagaagaaagttccgagctggagcagccatttgcacaggacacaagtagcgtggggccagacagaaagcttgcggaggaagaggacctatttgacagcgcccatccggaagagggtgatttagatttggccagcgagtcaacagcacacgctcagtcgagcaaggcagacagcctgttagcggtagtgaaaagggagcccgcggagcagccaggcgatggcgagaggacggactgtgagcctgtagggctagagccggcagttgagcagagtagtgcggcctccgagctcgcggaggcctctagcgaggagctcgcagaagcacccacggaagccccaagcccagaagccagagatagcaaagaagacgggaggaagtttgattttgacgcttgtaatgaagtccctccggctcctaaagagtcctcaaccagtgagggcgctgatcagaaaatgagttctcccgaagatgactcggatacaaaaaggctttccaaagaggaaaagggtcgcagcagttgtggtagaaatttctgggttagtggactctcttctacaaccagagctacagatttgaagaatcttttcagcaaatatgggaaggtggtgggcgccaaggttgtgacaaatgcccggagtcctggagctcgctgttacggttttgtcacgatgtccacagcagaagaggccacaaaatgcattaaccacctgcacaagacggagctccacggaaagatgatctccgtggagaaagccaaaaatgaacctgtgggaaagaaaacctctgacaaaagagacagtgacgggaaaaaggagaagtcgagcaacagtgacagatctacaaaccttaagagggatgataaatgtgacagaaaagatgatgctaagaagggtgacgacggaagtggagaaaagagtaaggaccaagatgatcagaaacctggcccctcagagcgatctcgagccacaaagtcaggaagtcgagggaccgaacggactgtagtaatggataaatccaaaggggtgcctgtgattagtgtaaaaacgtccgggtccaaagagagagcttccaaaagccaggatcgcaaatcagccagcagagagaagcggtccgtcgtgtcctttgataaggtcaaggagcctcggaagtcaagagactcagagtcccatagcagggtgcgtgaacgcagtgaacgcgaacaacgcatgcaggcgcagtgggagcgcgaggagcgtgagcggctggagattgcccgagagaggctggccttccagcgccagcggctggagcgggagcgcatggagcgggaacggctggagcgcgaacgcatgcacgtggagcacgagcgcaggcgcgagcaggagcgcatccaccgtgagcgcgaggagctgaggcgccagcaggaactgcgctatgagcaggagcggcggcccgcggtgcggcggccctacgacctggaccggcgagatgatgcctattggccggaagccaagcgggccgccctggatgagcgctaccattctgactttaaccgccaggaccgcttccacgactttgaccacagggaccgcggccgctaccccgaccactcggtggacaggagagaaggttcaaggtcaatgatgggagaacgagaaggacagcattacccagaacgccatggaggaccagagcgccacggccgggactcccgcgatggctgggggggctatggctctgacaagaggatgagcgagggccgggggctgcctcctccccccaggggcagacgtgactggggggaccatggccgaagagaggatgaccggtcatggcagggcacggccgacgggggcatgatggacagggatcacaagaggtggcaaggtggcgagagaagcatgtccggtcactccgggcctggccacatgatgaaccgaggaggaatgtcagggcgcggcagctttgccccaggcggggcctcccggggccaccccatcccacacggtggcatgcagggcgggtttggaggccagagccgggggagcaggcccagcgatgcccgcttcactcgccgctactgagtacttggaatcctgtgtcctgtctcgtggcaacaaggctatgttctgttaggagttaccttaaactgtgtaaaaatatttttttttaatctgctgccatattgtagctcaatacaatgtgaatttgtttttcgttttggggttttttttttttgtaataaatgtgtttccgttcacataccctttaaaaaaaaatca

SEQ ID NO: 14183 - DNA, 3080 bp, Homo sapiens
agaagcgaggcgcgctggggcgactggagcggttccctcgcaggcggcgccattttgtgctaggagcctgataaaaccggcccggttctgtggaaagtgggcggcggagccagggtccctggaatggcggagactctgtcaggcctaggtgattctggagcggcgggcgcggcggctctgagctccgcctcgtcagagaccgggacgcggcgcctcagcgacctgcgagtgatcgatctgcgggcggagctgaggaaacggaatgtggactcgagcggcaacaagagcgttttgatggagcggctgaagaaggcaattgaagatgaaggtggtaatcctgacgaaattgaaattacctccgagggaaacaagaaaacatcaaagaggtctagcaaagggcgcaaaccagaagaagagggtgtggaagataacgggctggaggaaaactctggggatggacaggaggatgttgagaccagtctggagaacttgcaggacatcgacatcatggatatcagtgtgttggatgaagcagaaattgataatggaagcgttgcagattgtgtcgaagacgatgatgctgataacctccaggagtccctgtcggatagtagagagctagtcgagggggaaatgaaagagcttccggagcagcttcaggaacatgctatagaggacaaagaaactataaacaatttagatacttcatcatctgacttcactatattacaggaaattgaagagccatccctggagccagaaaatgagaaaatactcgacattttgggggaaacttgtaaatctgagccagtaaaagaagaaagttccgagctggagcagccatttgcacaggacacaagtagcgtggggccagacagaaagcttgcggaggaagaggacctatttgacagcgcccatccggaagagggtgatttagatttggccagcgagtcaacagcacacgctcagtcgagcaaggcagacagcctgttagcggtagtgaaaagggagcccgcggagcagccaggcgatggcgagaggacggactgtgagcctgtagggctagagccggcagttgagcagagtagtgcggcctccgagctcgcggaggcctctagcgaggagctcgcagaagcacccacggaagccccaagcccagaagccagagatagcaaagaagacgggaggaagtttgattttgacgcttgtaatgaagtccctccggctcctaaagagtcctcaaccagtgagggcgctgatcagaaaatgagttctcccgaagatgactcggatacaaaaaggctttccaaagaggaaaagggtcgcagcagttgtggtagaaatttctgggttagtggactctcttctacaaccagagctacagatttgaagaatcttttcagcaaatatgggaaggtggtgggcgccaaggttgtgacaaatgcccggagtcctggagctcgctgttacggttttgtcacgatgtccacagcagaagaggccacaaaatgcattaaccacctgcacaagacggagctccacggaaagatgatctccgtggagaaagccaaaaatgaacctgtgggaaagaaaacctctgacaaaagagacagtgacgggaaaaaggagaagtcgagcaacagtgacagatctacaaaccttaagagggatgataaatgtgacagaaaagatgatgctaagaagggtgacgacggaagtggagaaaagagtaaggaccaagatgatcagaaacctggcccctcagagcgatctcgagccacaaagtcaggaagtcgagggaccgaacggactgtagtaatggataaatccaaaggggtgcctgtgattagtgtaaaaacgtccgggtccaaagagagagcttccaaaagccaggatcgcaaatcagccagcagagagaagcggtccgtcgtgtcctttgataaggtcaaggagcctcggaagtcaagagactcagagtcccatagcagggtgcgtgaacgcagtgaacgcgaacaacgcatgcaggcgcagtgggagcgcgaggagcgtgagcggctggagattgcccgagagaggctggccttccagcgccagcggctggagcgggagcgcatggagcgggaacggctggagcgcgaacgcatgcacgtggagcacgagcgcaggcgcgagcaggagcgcatccaccgtgagcgcgaggagctgaggcgccagcaggaactgcgctatgagcaggagcggcggcccgcggtgcggcggccctacgacctggaccggcgagatgatgcctattggccggaagccaagcgggccgccctggatgagcgctaccattctgactttaaccgccaggaccgcttccacgactttgaccacagggaccgcggccgctaccccgaccactcggtggacaggagagaaggttcaaggtcaatgatgggagaacgagaaggacagcattacccagaacgccatggaggaccagagcgccacggccgggactcccgcgatggctgggggggctatggctctgacaagaggatgagcgagggccgggggctgcctcctccccccaggggcagacgtgactggggggaccatggccgaagagaggatgaccggtcatggcagggcacggccgacgggggcatgatggacagggatcacaagaggtggcaaggtggcgagagaagcatgtccggtcactccgggcctggccacatgatgaaccgaggaggaatgtcagggcgcggcagctttgccccaggcggggcctcccggggccaccccatcccacacggtggcatgcagggcgggtttggaggccagagccgggggagcaggcccagcgatgcccgcttcactcgccgctactgagtacttggaatcctgtgtcctgtctcgtggcaacaaggctatgttctgttaggagttaccttaaactgtgtaaaaatatttttttttaatctgctgccatattgtagctcaatacaatgtgaatttgtttttcgttttggggataaccccaacaaaactttccaatgtccccgaagagatccgggtgttgggcgataacatca

SEQ ID NO: 14184 - DNA, 2972 bp, Homo sapiens
agaagcgaggcgcgctggggcgactggagcggttccctcgcaggcggcgccattttgtgctaggagcctgataaaaccggcccggttctgtggaaagtgggcggcggagccagggtccctggaatggcggagactctgtcaggcctaggtgattctggagcggcgggcgcggcggctctgagctccgcctcgtcagagaccgggacgcggcgcctcagcgacctgcgagtgatcgatctgcgggcggagctgaggaaacggaatgtggactcgagcggcaacaagagcgttttgatggagcggctgaagaaggcaattgaagatgaaggtggtaatcctgacgaaattgaaattacctccgagggaaacaagaaaacatcaaagaggtctagcaaagggcgcaaaccagaagaagagggtgtggaagataacgggctggaggaaaactctggggatggacaggaggatgttgagaccagtctggagaacttgcaggacatcgacatcatggatatcagtgtgttggatgaagcagaaattgataatggaagcgttgcagattgtgtcgaagacgatgatgctgataacctccaggagtccctgtcggatagtagagagctagtcgagggggaaatgaaagagcttccggagcagcttcaggaacatgctatagaggacaaagaaactataaacaatttagatacttcatcatctgacttcactatattacaggaaattgaagagccatccctggagccagaaaatgagaaaatactcgacattttgggggaaacttgtaaatctgagccagtaaaagaagaaagttccgagctggagcagccatttgcacaggacacaagtagcgtggggccagacagaaagcttgcggaggaagaggacctatttgacagcgcccatccggaagagggtgatttagatttggccagcgagtcaacagcacacgctcagtcgagcaaggcagacagcctgttagcggtagtgaaaagggagcccgcggagcagccaggcgatggcgagaggacggactgtgagcctgtagggctagagccggcagttgagcagagtagtgcggcctccgagctcgcggaggcctctagcgaggagctcgcagaagcacccacggaagccccaagcccagaagccagagatagcaaagaagacgggaggaagtttgattttgacgcttgtaatgaagtccctccggctcctaaagagtcctcaaccagtgagggcgctgatcagaaaatgagttctcccgaagatgactcggatacaaaaaggctttccaaagaggaaaagggtcgcagcagttgtggtagaaatttctgggttagtggactctcttctacaaccagagctacagatttgaagaatcttttcagcaaatatgggaaggtggtgggcgccaaggttgtgacaaatgcccggagtcctggagctcgctgttacggttttgtcacgatgtccacagcagaagaggccacaaaatgcattaaccacctgcacaagacggagctccacggaaagatgatctccgtggagaaagccaaaaatgaacctgtgggaaagaaaacctctgacaaaagagacagtgacgggaaaaaggagaagtcgagcaacagtgacagatctacaaaccttaagagggatgataaatgtgacagaaaagatgatgctaagaagggtgacgacggaagtggagaaaagagtaaggaccaagatgatcagaaacctggcccctcagagcgatctcgagccacaaagtcaggaagtcgagggaccgaacggactgtagtaatggataaatccaaaggggtgcctgtgattagtgtaaaaacgtccgggtccaaagagagagcttccaaaagccaggatcgcaaatcagccagcagagagaagcggtccgtcgtgtcctttgataaggtcaaggagcctcggaagtcaagagactcagagtcccatagcagggtgcgtgaacgcagtgaacgcgaacaacgcatgcaggcgcagtgggagcgcgaggagcgtgagcggctggagattgcccgagagaggctggccttccagcgccagcggctggagcgggagcgcatggagcgggaacggctggagcgcgaacgcatgcacgtggagcacgagcgcaggcgcgagcaggagcgcatccaccgtgagcgcgaggagctgaggcgccagcaggaactcgctaccattctgactttaaccgccaggaccgcttccacgactttgaccacagggaccgcggccgctaccccgaccactcggtggacaggagagaaggttcaaggtcaatgatgggagaacgagaaggacagcattacccagaacgccatggaggaccagagcgccacggccgggactcccgcgatggctgggggggctatggctctgacaagaggatgagcgagggccgggggctgcctcctccccccaggggcagacgtgactggggggaccatggccgaagagaggatgaccggtcatggcagggcacggccgacgggggcatgatggacagggatcacaagaggtggcaaggtggcgagagaagcatgtccggtcactccgggcctggccacatgatgaaccgaggaggaatgtcagggcgcggcagctttgccccaggcggggcctcccggggccaccccatcccacacggtggcatgcagggcgggtttggaggccagagccgggggagcaggcccagcgatgcccgcttcactcgccgctactgagtacttggaatcctgtgtcctgtctcgtggcaacaaggctatgttctgttaggagttaccttaaactgtgtaaaaatatttttttttaatctgctgccatattgtagctcaatacaatgtgaatttgtttttcgttttggggttttttttttttgtaataaatgtgtttccgttcacataccctttaaaaaaaaatca

SEQ ID NO: 14185 - DNA, 1402 bp, Homo sapiens
ccaccgcgcccggcctgttgcttatttttgactggctgtttcctgaaatcacttgtcaagctccaggaaatgttggagaaaggaggcccagttctgatcacacacacacagcctgggcctcactcctgagatcttcctgggctgctcctgtgggcccgagaagccttcttcccgctggagtgtacggttctgcagaccacgtagtggacgcacagccctggagtctgtgcgacccagcgtcttacttaaagtcagccctgggacctggctgggggtgtctaggtccccttctgcagctctactgttgtgcagcagggtgcgtgaacgcagtgaacgcgaacaacgcatgcaggcgcagtgggagcgcgaggagcgtgagcggctggagattgcccgagagaggctggccttccagcgccagcggctggagcgggagcgcatggagcgggaacggctggagcgcgaacgcatgcacgtggagcacgagcgcaggcgcgagcaggagcgcatccaccgtgagcgcgaggagctgaggcgccagcaggaactgcgctatgagcaggagcggcggcccgcggtgcggcggccctacgacctggaccggcgagatgatgcctattggccggaagccaagcgggccgccctggatgagcgctaccattctgactttaaccgccaggaccgcttccacgactttgaccacagggaccgcggccgctaccccgaccactcggtggacaggagagaaggttcaaggtcaatgatgggagaacgagaaggacagcattacccagaacgccatggaggaccagagcgccacggccgggactcccgcgatggctgggggggctatggctctgacaagaggatgagcgagggccgggggctgcctcctccccccaggggcagacgtgactggggggaccatggccgaagagaggatgaccggtcatggcagggcacggccgacgggggcatgatggacagggatcacaagaggtggcaaggtggcgagagaagcatgtccggtcactccgggcctggccacatgatgaaccgaggaggaatgtcagggcgcggcagctttgccccaggcggggcctcccggggccaccccatcccacacggtggcatgcagggcgggtttggaggccagagccgggggagcaggcccagcgatgcccgcttcactcgccgctactgagtacttggaatcctgtgtcctgtctcgtggcaacaaggctatgttctgttaggagttaccttaaactgtgtaaaaatatttttttttaatctgctgccatattgtagctcaatacaatgtgaatttgtttttcgttttggggttttttttttttgtaataaatgtgtttccgttcacataccctttaaaaaaaaatca

SEQ ID NO: 14186 - DNA, 2848 bp, Homo sapiens
agaagcgaggcgcgctggggcgactggagcggttccctcgcaggcggcgccattttgtgctaggagcctgataaaaccggcccggttctgtggaaagtgggcggcggagccagggtccctggaatggcggagactctgtcaggcctaggtgattctggagcggcgggcgcggcggctctgagctccgcctcgtcagagaccgggacgcggcgcctcagcgacctgcgagtgatcgatctgcgggcggagctgaggaaacggaatgtggactcgagcggcaacaagagcgttttgatggagcggctgaagaaggcaattgaagatgaaggtggtaatcctgacgaaattgaaattacctccgagggaaacaagaaaacatcaaagaggtctagcaaagggcgcaaaccagaagaagagggtgtggaagataacgggctggaggaaaactctggggatggacaggaggatgttgagaccagtctggagaacttgcaggacatcgacatcatggatatcagtgtgttggatgaagcagaaattgataatggaagcgttgcagattgtgtcgaagacgatgatgctgataacctccaggagtccctgtcggatagtagagagctagtcgagggggaaatgaaagagcttccggagcagcttcaggaacatgctatagaggacaaagaaactataaacaatttagatacttcatcatctgacttcactatattacaggaaattgaagagccatccctggagccagaaaatgagaaaatactcgacattttgggggaaacttgtaaatctgagccagtaaaagaagaaagttccgagctggagcagccatttgcacaggacacaagtagcgtggggccagacagaaagcttgcggaggaagaggacctatttgacagcgcccatccggaagagggtgatttagatttggccagcgagtcaacagcacacgctcagtcgagcaaggcagacagcctgttagcggtagtgaaaagggagcccgcggagcagccaggcgatggcgagaggacggactgtgagcctgtagggctagagccggcagttgagcagagtagtgcggcctccgagctcgcggaggcctctagcgaggagctcgcagaagcacccacggaagccccaagcccagaagccagagatagcaaagaagacgggaggaagtttgattttgacgcttgtaatgaagtccctccggctcctaaagagtcctcaaccagtgagggcgctgatcagaaaatgagttctcccgaagatgactcggatacaaaaaggctttccaaagaggaaaagggtcgcagcagttgtggtagaaatttctgggttagtggactctcttctacaaccagagctacagatttgaagaatcttttcagcaaatatgggaaggtggtgggcgccaaggttgtgacaaatgcccggagtcctggagctcgctgttacggttttgtcacgatgtccacagcagaagaggccacaaaatgcattaaccacctgcacaagacggagctccacggaaagatgatctccgtggagaaagccaaaaatgaacctgtgggaaagaaaacctctgacaaaagagacagtgacgggaaaaaggagaagtcgagcaacagtgacagatctacaaaccttaagagggatgataaatgtgacagaaaagatgatgctaagaagggtgacgacggaagtggagaaaagagtaaggaccaagatgatcagaaacctggcccctcagagcgatctcgagccacaaagtcaggaagtcgagggaccgaacggactgtagtaatggataaatccaaaggggtgcctgtgattagtgtaaaaacgtccgggtccaaagagagagcttccaaaagccaggatcgcaaatcagccagcagagagaagcggtccgtcgtgtcctttgataaggtcaaggagcctcggaagtcaagagactcagagtcccatagcagggtgcgtgaacgcagtgaacgcgaacaacgcatgcaggcgcagtgggagcgcgaggagcgtgagcggctggagattgcccgagagaggctggccttccagcgccagcggctggagcgggagcgcatggagcgggaacggctggagcgcgaacgcatgcacgtggagcacgagcgcaggcgcgagcaggagcgcatccaccgtgagcgcgaggagctgaggcgccagcaggaactgcgctatgagcaggagcggcggcccgcggtgcggcggccctacgacctggaccggcgagatgatgcctattggccggaagccaagcgggccgccctggatgagcgctaccattctgactttaaccgccaggaccgcttccacgactttgaccacagggaccgcggccgctaccccgaccactcggtggacaggagagaaggttcaaggtcaatgatgggagaacgagaaggacagcattacccagaacgccatggaggaccagagcgccacggccgggactcccgcgatggctgggggggctatggctctgacaagaggatgagcgagggccgggggctgcctcctccccccaggggcagacgtgactggggggaccatggccgaagagaggatgaccggtcatggcagggcacggccgacgggggcatgatggacagggatcacaagaggtggcaaggtggcgagtgtggccatgactggccgagtgactaaggaggggtaatcactgaacaggccaagcgttttggttacacacaggtttctgttgtggtaacactggatgagaatgaaattgagcaaggaagcttccgtgctccttacatgtgactaaaacaccaagtcagcc

SEQ ID NO: 14187 - DNA, 185 bp, Homo sapiens
gctcccacaaaggtgatagatacatttggggtgggggatccctctatctctgtctcatgtcccctcacaggcgagatgatgcctattggccggaagccaagcgggccgccctggatgagcgctaccattctgactttaaccgccaggaccgcttccacgactttgaccacagggaccgcggccgc

SEQ ID NO: 14188 - DNA, 347 bp, Homo sapiens
gcggtccatatgccttgatttattcaaatagctactatctggaaactcactcccaacctttgggccactgtggtgaagaggcagctgtcccagtggggtactgagcacccacctcctcccttcccttgaatgtgttgaaagtggactctggccaaacgaggaaagatgtctcagaaaaacaccaccacaccagggagattagaagaagagaagggcatttgcctcccatccctgacccccttgactggggctgattattatgggatgacaccatgtgtacaggttgtaggtctttcacagagaacccatcatttggagctacagacttttccctttctaggttactt

SEQ ID NO: 14189 - DNA, 371 bp, Homo sapiens
ttgaggctgtagttggccatgactatgccactgcactttacactgggcaacagaaccagactctgtctctaaaaaaaaaaaattacaccctatagagacaacattaagacacagaaagaattggtgggaagctggatacaacggtgagcactgaaatcagcagaacataaatctattgattcaaacacatctgaactaaaattataatcagctacaatttaagcatgtgtgtgatgcaaatagatgagaatcataaaaaatgaaggtataaagaaacatctttcacttgggaaaagagaaaatgcaactgtttagactttgttttaaagggaaacgttcagtgtgcctgtgaacaacttaaagacaatcaa

SEQ ID NO: 14190 - DNA, 339 bp, Homo sapiens
aacagacgcgtgcctgttatttttgcagtgatttctgatctgcatactgaagagtctgtacttatgcattcataggtaacacaccatggtgactgaaatttgaatcctgggtgactagtgttgttatctaatggtaactgaaatcagtgcacaccagaaccctgcaaagcaaggactggctctacagcattcccttaaaaaacattttttttaaaagtgtcctggacaggcacagtagctcatgtctaaaaacccagcactttgggaggctaaggcgggaggacttcttgaagccagaagttcaagaccagcctgggcataatgagacccccgtcacta

SEQ ID NO: 14191 - DNA, 195 bp, Homo sapiens
aggaggctcaacttctcggtgacctttttttgcttcacaacaagccaattatagttgaatcattttctctcttagctagttgttactacaaactttataagaaaaacaactagacaccttctagttttaattaataccaactcctttagagttagagactttttaaaaagaatcattgagcatattttctttttt

SEQ ID NO: 14192 - DNA, 221 bp, Homo sapiens
taagtagtggtaaacctactattggttgaatcgtgggtgtcccactaagcgtgacaccgttgttccctcatggccacataagaaatagcctcccaagttcctgggacacctcatgcacttctccctggcttattcccacttccctctagaagccaacagtcttctgaattgcgggtcagccattcgctggcttttgtcggtttcccacctttgtctggatc

SEQ ID NO: 14193 - DNA, 464 bp, Homo sapiens
acgatcttcagtgggcaccgctgcagacacatgcattccacaaaccctgcagatccgctgatcggaggcattgattcctcaaagcacatggccctgaaattatacctaaaaacgcaaattccccgggcccctaccccagacgcactgaaacagaagccgtgagggaggggcccgcagcttgtcagtcatcgcgaggtgattctgttgcactcttgactttcagaaccactcaggagattacacactttggaaaaaaaaagaattgtttttctgataggactttcttaaatagcagaccctatgagtctgtttacatttgaatttataaggattcaggttatatatatcacttcaaaaatatctattatggaaaaataggaattttttaaaaataaaattattctcaagaccagcctggccaacatggtgaaacctcatctctataaaaatacgaaaaaaaaaaa

SEQ ID NO: 14194 - DNA, 467 bp, Homo sapiens
agttacctttttctgtattgcatttctaagacagagatgactcagacatcaaaatatatatgaaaggtttgtgtatcaggctttggaacaaggatggttgaggatttcagccctgcattctgtatattgaaacaaaaactccaagcagagactcttccatatcccctggcaaccactgttatgctgtcattataaattagtttgcttcttctagagttttatataaatgaatgtgtatacatcccccgcccccacacacacacatgtagtttctgtcactcagcataattaatttgggatttatccatgttattgtgtatatcaatatatcattactttttaattactgagtaatatttcactgtttggatctacaacaatttgtttactaccatccaaatgatgatagacatttgaattgtttctgtttcttaggtattataaataaagctgctttgatcatttgc

SEQ ID NO: 14195 - DNA, 204 bp, Homo sapiens
ttaatgtacaaggttctatacaaatgcaagggaattaatgtataacatatatgtggggctaagtctctaaaacaacataataaaagttgtttttattttagtcaatcatttaggtattgtgtctacctgatagcatgtaacaagattgaacacttgtgtaggtcgtatgtgcctttaatctgaggttggcctcagtgacaatca

SEQ ID NO: 14196 - DNA, 246 bp, Homo sapiens
taacagcttcggatctcatatcccaaaaatgcctttgaagacaggatgatgttggcagtcttgctgtgtcatttctgaagtttactccaaaaaatgaaattctccagtgacaggcatgcttaagtgcagctgtggatactgcatgttttgataaagatgaaatttattaaaaagcaaaagaacctccactaaacacccctcttcccattgacgctgggaggggtaaagaaggcttcttgggtttaa

SEQ ID NO: 14197 - DNA, 552 bp, Homo sapiens
gacgaggtttcaccgtgttagccaggatggtctcaatctcctgacctcgtgatccacccgcctcggccttccaaagtgctgggattacaggcgtgagccaccgcgcccggccactatttttctaaatcttactttttctggcttgatttgaagccaccttgctaagctactgtattgtattatactaatcataggtagctctttttttaagatgataaagtggttcctgagtattgctacaatcccagtttcccataagaaactctacaaaacttaagacttttagctttgccaggtctctctctctctgaagctgtaatttttagaaggaacgattgcttgaatgattaatcacactcttagttacaccagtaaggccataattaactgttggcgcctctagcaaaaagtgcaagtggctaatggtctcaaccaataattcttcccctttttcatctatttatagggaacgatttgaggctgaagatttgactatttatttcaataaagcacattcatttgtgcttgtctcagtgtcatacataatggttt

SEQ ID NO: 14198 - DNA, 408 bp, Homo sapiens
aagcttgcactgaactgtttccttctcagctctgcaccctagccatccagttctgccccaccggagataggcagaatttcctgtctcttctatatctgttcagaagtattctggaagataacagtgaagagatagagatgtaggtgtagatgtagttatattgtatttttacttatttttcataattaatgtcagtcaccctttcagacctttcagacactaaccttctgaacactaacctcttgaatattaactaacatatattagaggaggaaggatgtctgtcagatgatcaaaatgtctcgaagcaaaatgagcattttgattggtgacagtgtgatgttataacaggcagtaaaagtaggataagtagaggtcttaaggcagacagtaacagatcacattcag

SEQ ID NO: 14199 - DNA, 1686 bp, Homo sapiens
tctaagaagatagatactcctcatagaacttatcacaatgaaaactgatcatttgtgtgattatatatgtattcctcctctttaagtctaaaaactctattgggatatggaacctatctcaatatgcatcatcttaaccaaggcatctaactgtactgcctgtcatgtagtaggtactaacaaatgtttattgaatccatgaatgaatgaatctttaatgtttcagtttaaaaatacatattaaacgtataacatatacaaagcacaatttgaaggcactgggattacaaaatataataagataatccctacttgtgtgggaagttccctgaattctgatgggactaggatgggacacttccagttatgtcaggctgctgaagccatagcctgccctgccaacaggcaccatgaaagagctgagcctcagcagccatgttaggtatcatgtgactctgtgccttgaccacatttgaatggactgaggtgaaagagtatgaaagcaggaactggcggcatcctatcatctgagctttagcaagaagatgtggaccctgacaaatcagattcctgtgcttgggtatttaaataaaaatactaaatgactgaattagaagtgtaaagagaagttgcaaagatactgtagtggtttgaatggtggccccccaaaagacatccacccagtacctgtgaatgtgacctaatttgaaaaatgtctttgtactggtaattaagtgaaagatttaaagatgagatcatcctgaattaagtgggtggtcataaatccaatgagcgtgtctttatgcaatagacagaaaggtagaggacacacaggagaggttcatgtgaatgaaggcacagacagacagtgcacatatgtagccacaaaccaacggaggcctggagcaaccagaggctggaagaaggaaggaaggatcctcccctggagacttcagagggagtgtggtcctgccgacaccttgatttttgaacttctggctttcagaactgtcagagaatatgtttctgtttctttcaggccccacactttgttacggagccttaggaaactaatataaatacctagaaagaagaaatatataggagtaaaagtcatgaacggcagcttgcaaccactgatgttacattgaacaaggaactgaataaacaaaaagctttgcagtagggaaataacacagtctggaggaaaatactgagccagtcagtggtaaaagacacatagaattggatcatagagagcagccacgtcacttctctggttaagttctggtgtaaagatacacagattcctgctcttgataatcctgctgctttggaagaagcttttatttcctgcttatccattaagaagtcaggcatgtttggggtttatatttgtttaatcttacaggaaacttcccatcatttccctaaggctgaaacattttgtaaagaattgtaaatagaaaattgcaatataaaacagaaagtagtaaacaagtccagcatgccaatgaactaatggactccaaacaggaacacttggtctggctagaaatttcatgaaaagcttcctggatgaattcattaaattatccctggcatatcttgaaagtggagtgggtacttttcaactgactaataagagatgaaaggacaagaaagaaaaattttcaaaaaaaaaaa

SEQ ID NO: 14200 - DNA, 900 bp, Homo sapiens
acatgtcttcctatttttactactagatttttagcaactagagatagggaagtttctaataccactttatctgccagcatgccctacatgtactccacagaacaggaatcaaaactactttctgtgttccatttaggggaatgtttagagacaggccaattctagtacttacatgaaagttctctgaaaactgtgaaatattaagcagttgtaaggcagtagtagaagtggtaatagcagctgcagcagtaacataagcataaaacatgtttcctacttcagggatcacatggaatataaaatatatacacaaataactttaccatgacacagactatattaaatgctataagtacaaagaggaggcccaaatagccaagaatttaaaaaaaaaaagcaacttcagtaataatcagaaaaatacaacttaaaatgagattactataacacagattatcactgccagaaaggcttaaaatgggacttagaggataggaaggcctttaacaggcagacatggtgaggctgggcattctaaacatacaggaccaggtaagcagactcagaagcaggaacaaacatagtgagcatgcaggtgtgttgagtccaggttggctggaatataatctatctgaacgcaagagagaagcccgaactaagaagactgaagaggccagatcacagatctcgtaagccaaactaagaagtttggtctttactcaggacacaatggagaacgactaaaaatcaaagttgtgttttcagatgattaacctgggttttaattatttaggattatgccagaactttgggaaaagcttgaaggagggaaacatcagttatgatagttaagacaacttaaaagtttgacaaggtctaagaaaggaaaatggcagccag

SEQ ID NO: 14201 - DNA, 205 bp, Homo sapiens
acacttttattagatatataaaacctatgtaatgatcatattttctgagattattactctagattcatgggcagtaatagataaatgataccaggagtggggtggtggcaggaggacctggagagtaggggttgggtggcaggtgtatgtggttaacaaaggtcaagatatagaaatctgtgggtacagagtgaacagagagggt

SEQ ID NO: 14202 - DNA, 263 bp, Homo sapiens
atccaaaagggtattttatttgccttcagaccctacttttacttcattgccacttaactaaaaagtaattcctaaaatttgtgatttgtccatattaattgaggagccagcccagatatgggtagagatcaccttatgatttattgtttaactttttaagtttgttgtactgcccagaacccccccatgtaaattaataataataatgaaaaataacagcagtattgttttctgtttttaaataaacataccagtatggaaaa

SEQ ID NO: 14203 - DNA, 546 bp, Homo sapiens
atatagtagaggaaatacaaccattatgacccaataatgctcttctctgaagaaagccaaatttggggacagagctaaaaaaatgtaaactcagcctcaataccttgggttagagatagaaatgtccctctgttcacacaaaaattaactgacctagatatggcaatgcaacattagacttttgaatttctctctttgccaacctttgttaaatatttcatcagtgttgacacccactgtgtgtcaggaaagagaccatatgctattggaaaggcaaagataaatgaagacatgttttccgcccttggggtagctggagtagaggaacgggaatcggctttttaatccaacattcctcgggtccagtccaagtgccaccagtgactggctgagtggtgagtgccttgtcctccttaaactccaagatctcatctctaaaatgaaaaaaataataacagtccattaggttttataaaaattaaaccagatactctctaaatgagctggcaaatagtaagctctcaaaaaaaggtaaccatcctcatt

SEQ ID NO: 14204 - DNA, 349 bp, Homo sapiens
agagcttttatattcattgccctaaattgtctaattaattcgtgggtgctaaagtacctgggctgagattttagagttcagtggaatccataagcacagaataccccagctccagattacttaaaaaaaaaaaaactactcacttgatatcccttgttccacaccttaacataaaccccaatcccttacaatttagctgccctatatctccttacctcgggactttactctttgcaaagtcatagctaactaacctgatcaattctattctttcaaactagaagtctcaggattgcctgtgctttccccccattctttcctgtcacatctaatcactagactctcttga

SEQ ID NO: 14205 - DNA, 542 bp, Homo sapiens
agcagtgagagcatgtaccgtgtaatgtgtaaaggggagggagaatgtgaggtgctgggaagcaccgggcccttcgggggacgggaagaatttgggtgtggccagagcacagtgccccatgagtggagaggtccagattgtctatttttcttttcttttttttcccccaatgatcctagaaattctcccaagagaggtccagattttttgacaaggctgaagggcggcccctgagacctgactctacctgtctgcctggcctttcctcagtccagtgcgtgcacggccccctcctcgctctcacgcatcatctgtgtgctccttccctgccagacaagaacccctggagggcagggaccagttcagagccatccctgtctccccagtgccagcacagagcttggcctgagtaggttttggggactgggcttggtggctcacacctgtaatcccaacattttgggaggctggggcaggaggatcacctgagcccaggagttcaagaccaacctgtacaacatactgagacccggtctctacat

SEQ ID NO: 14206 - DNA, 1157 bp, Homo sapiens
ctccgcgcgcgactacgctcataaaaggaaaaaaagcgtgtgcggttctcgacgtgccgccaatcttcgaacgcaggtctgtgatcatccgcagactccgaaaaagggttcgaggaacgcgcctgctcccctcgtcgcagtttccagcccgacgagcttgttttgtcccggactcggtgcccctgtagacaatggccctcgtgtctgccgattcccgcattgcagaacttctcacagagctccatcagctgatcaaacaaacccaggaagagcgttcgcggagcgaacacaacttagtgaacatccagaagacccatgagcggatgcagacagagaacaagatttctccctattaccggacaaagctgcgtggcctctacacaaccgccaaggccgatgcagaggctgagtgcaacatccttcggaaagctctggacaagatcgcggaaatcaagtctctgttggaagagaggcggattgcggccaagattgccggtctctacaatgactcggagccaccccggaagaccatgcgcagaggggtgctgatgaccctgctgcagcagtcggccatgaccctgcccctgtggatcgggaagcctggtgacaagcccccacccctctgtggggccatccctgcctcaggagactacgtggccagacctggagacaaggtggctgcccgggtgaaggccgtggatggggacgagcagtggatcctggccgaggtggtcagttacagccatgccaccaacaagtatgaggtagatgacatcgatgaagaaggcaaagagagacacaccctgagccggcgccgtgtcatcccgctgccccagtggaaggccaacccggagacggaccctgaggccttgttccagaaggagcagctcgtgctggccctgtatccccagactacctgcttctaccgcgccctgatccatgcgcccccacagcggccccaggatgactactcggtcctgtttgaagacacctcctatgcagatggctattcccctcccctcaatgtggctcagagatacgtggtggcttgtaaggaacccaagaaaaagtgatgccgcctggcagactcgccatcccccaacgacacagggcaggacagcagaggacgtgctgggattaaacacattccccctcta

SEQ ID NO: 14207 - DNA, 945 bp, Homo sapiens
ctccgcgcgcgactacgctcataaaaggaaaaaaagcgtgtgcggttctcgacgtgccgccaatcttcgaacgcaggtctgtgatcatccgcagactccgaaaaagggttcgaggaacgcgcctgctcccctcgtcgcagtttccagcccgacgagcttgttttgtcccggactcggtgcccctgtagacaatggccctcgtgtctgccgattcccgcattgcagaacttctcacagagctccatcagctgatcaaacaaacccaggaagagcgttcgcggagcgaacacaacttagtgaacatccagaagacccatgagcggatgcagacagagaacaagatttctccctattaccggacaaagctgcgtggcctctacacaaccgccaaggccgatgcagaggctgagtgcaagttggagtgcaatgacgcgatctcggttcactgcaacctctgcctcccaggttcaagcgattctcttgcctcagcctcccaacatccttcggaaagctctggacaagatcgcggaaatcaagtctctgttggaagagaggcggattgcggccaagattgccggtctctacaatgactcggagccaccccggaagaccatgcgcagaggggtgctgatgaccctgctgcagcagtcggccatgaccctgcccctgtggatcgggaagcctggtgacaagccccaccctcttgtggggggcttcctggcttcacgagactacgtggcagaactgggacagtggttgccggggtgaaaggcgggttgggagcagccggggtcccgggcgagggggagtaaggcatgcccaacagttggggcgacgcactctgcaaggcgaaggagacacgtgtgggggcgggttacgcgcgccacagaggacccgagagagctaggtttcaaaaaggactgcggcgctctccaaacgcgttcg

SEQ ID NO: 14208 - DNA, 757 bp, Homo sapiens
ctccgcgcgcgactacgctcataaaaggaaaaaaagcgtgtgcggttctcgacgtgccgccaatcttcgaacgcaggtctgtgatcatccgcagactccgaaaaagggttcgaggaacgcgcctgctcccctcgtcgcagtttccagcccgacgagcttgttttgtcccggactcggtgcccctgtagacaatggccctcgtgtctgccgattcccgcattgcagaacttctcacagagctccatcagctgatcaaacaaacccaggaagagcgttcgcggagcgaacacaacttagtgaacatccagaagacccatgagcggatgcagacagagaacaagagtgagtagctgggctcaggagagaaaggggatgagatggggctagggtgagtatggccaagactgtgaccgaggtggtcattgtattcaaaatagatttgcatgtatctgcatattccaaaatgcagcaggagggacagctttccgttaatctgggtgacctgaagaactaaaatccctctactctgaggattcgaaaggcagtgaaatgaggctgtatctagggaagcttgcccttagagcacacaagcgccccagttagctggtgttttctagaaaggagcttccttcccaggcggcccctgcatctgccctgaggccctcaggtggtgagatcctggggctggggctttcttactctgggtaactctgagaattgtgttttcctgggtcctgacaaatattttctgtgagtg

SEQ ID NO: 14209 - DNA, 711 bp, Homo sapiens
tgagaaaagagctctgtagcagcagggactgggccaagacttcttgaccccagagtgaaggatgttaggagtggctgagagtccacggcccagagcctcctgtggtctaggctgggggaagggggtgcctgtcctggcctgggggtctctgagcagcccctcctgtctgcctgccccacagccccaggatgactactcggtcctgtttgaagacacctcctatgcagatggctattcccctcccctcaatgtggctcagagatacgtggtggcttgtaaggaacccaagaaaaagtgatgccgcctggcagactcgccatcccccaacgacacagggcaggacagcagaggacgtgctgggattaaacacattccccctctaaaaaaaaaaaaaaaaaaaaaaaaaaaaaaaaaaaaaaaacaaaaaaaaaaaaaaaaaaaaaaaaaaaaaaagagaagacaacacgaaaaagaaaccacacacacaaagaaaagaagacaagcagagaagagaacgagaagagaagaaagaagaagacgaaacgaaaagaggaggccacgcagagaaaacaaacgagagagggagcagagagaaggagaaaggaaagagagggagcgcgcacgcgagaacaagaaacagagagcagaaagaaagagcgaaaacaaataaaagaaaaagaaaagagcggagggaaagaaagaaaataaaga

SEQ ID NO: 14210 - DNA, 224 bp, Homo sapiens
ggtcttagctgagaaggagcatcccacccggcaaggtgtggcccctcttccccacatccccaacaggtactgcgcccctggctgcatccagccttttcctccttttgtctgcaggtatgaggtagatgacatcgatgaagaaggcaaagagtgagtgtccaggccagggcagggcatggagcctgggggcagcctaacagctgagaaggagcatccccacccgg

SEQ ID NO: 14211 - DNA, 1471 bp, Homo sapiens
ctccgcgcgcgactacgctcataaaaggaaaaaaagcgtgtgcggttctcgacgtgccgccaatcttcgaacgcaggtctgtgatcatccgcagactccgaaaaagggttcgaggaacgcgcctgctcccctcgtcgcagtttccagcccgacgagcttgttttgtcccggactcggtgcccctgtagacaatggccctcgtgtctgccgattcccgcattgcagaacttctcacagagctccatcagctgatcaaacaaacccaggaagagcgttcgcggagcgaacacaacttagtgaacatccagaagacccatgagcggatgcagacagagaacaagatttctccctattaccggacaaagctgcgtggcctctacacaaccgccaaggccgatgcagaggctgagtgcaacatccttcggaaagctctggacaagatcgcggaaatcaagtctctgttggaagagaggcggattgcggccaagattgccggtctctacaatgactcggagccaccccggaagaccatgcgcagaggggtgctgatgaccctgctgcagcagtcggccatgaccctgcccctgtggatcgggaagcctggtgacaagcccccacccctctgtggggccatccctgcctcaggagactacgtggccagacctggagacaaggtggctgcccgggtgaaggccgtggatggggacgagcagtggatcctggccgaggtggtcagttacagccatgccaccaacaagtatgaggtagatgacatcgatgaagaaggcaaagagagacacaccctgagccggcgccgtgtcatcccgctgccccagtggaaggccaacccggagacggaccctgaggccttgttccagaaggagcagctcgtgctggccctgtatccccagactacctgcttctaccgcgccctgatccatgcgcccccacagcggccccaggatgactactcggtcctgtttgaagacacctcctatgcagatggctattcccctcccctcaatgtggctcagagatacgtggtggcttgtaaggaacccaagaaaaagtgatgccgcctggcagactcgccatcccccaacgacacagggcaggacagcagaggacgtgctgggattaaacacattccccctctaaaaccaacacactaagacaacagaacccgcagccacacatcacaggacagtcaccacctgacacaacgcaccccgctcgaacgccgccttctgagcacacgccccctacgtctagctcagcatctcgacgaaagaacgttatgagttcatgaacgaaagactggcgggccggtatgattattctctcctcggcggcggcgcctcattattaacctacacgaagttatcgtagaagttgctctcctagcggggtcattatctaatacacggccggtgtggtttgtcacgcctgcgtgatccacaccgccccctat

SEQ ID NO: 14212 - DNA, 1227 bp, Homo sapiens
ctccgcgcgcgactacgctcataaaaggaaaaaaagcgtgtgcggttctcgacgtgccgccaatcttcgaacgcaggtctgtgatcatccgcagactccgaaaaagggttcgaggaacgcgcctgctcccctcgtcgcagtttccagcccgacgagcttgttttgtcccggactcggtgcccctgtagacaatggccctcgtgtctgccgattcccgcattgcagaacttctcacagagctccatcagctgatcaaacaaacccaggaagagcgttcgcggagcgaacacaacttagtgaacatccagaagacccatgagcggatgcagacagagaacaagatttctccctattaccggacaaagctgcgtggcctctacacaaccgccaaggccgatgcagaggctgagtgcaacatccttcggaaagctctggacaagatcgcggaaatcaagtctctgttggaagagaggcggattgcggccaagattgccggtctctacaatgactcggagccaccccggaagaccatgcgcagaggggtgctgatgaccctgctgcagcagtcggccatgaccctgcccctgtggatcgggaagcctggtgacaagtgagggcagcagctgcgagggaggggctggtgcccaggggctgggactgaccctttgttccactcacaggcccccacccctctgtggggccatccctgcctcaggagactacgtggccagacctggagacaaggtggctgcccgggtgaaggccgtggatggggacgagcagtggatcctggccgaggtggtcagttacagccatgccaccaacaagtatgaggtagatgacatcgatgaagaaggcaaagagagacacaccctgagccggcgccgtgtcatcccgctgccccagtggaaggccaacccggagacggaccctgaggccttgttccagaaggagcagctcgtgctggccctgtatccccagactacctgcttctaccgcgccctgatccatgcgcccccacagcggccccaggatgactactcggtcctgtttgaagacacctcctatgcagatggctattcccctcccctcaatgtggctcagagatacgtggtggcttgtaaggaacccaagaaaaagtgatgccgcctggcagactcgccatcccccaacgacacagggcaggacagcagaggacgtgctgggattaaacacattccccctcta

SEQ ID NO: 14213 - DNA, 1052 bp, Homo sapiens
ctccgcgcgcgactacgctcataaaaggaaaaaaagcgtgtgcggttctcgacgtgccgccaatcttcgaacgcaggtctgtgatcatccgcagactccgaaaaagggttcgaggaacgcgcctgctcccctcgtcgcagtttccagcccgacgagcttgttttgtcccggactcggtgcccctgtagacaatggccctcgtgtctgccgattcccgcattgcagaacttctcacagagctccatcagctgatcaaacaaacccaggaagagcgttcgcggagcgaacacaacttagtgaacatccagaagacccatgagcggatgcagacagagaacaagatttctccctattaccggacaaagctgcgtggcctctacacaaccgccaaggccgatgcagaggctgagtgcaacatccttcggaaagctctggacaagatcgcggaaatcaagtctctgttggaagagaggcggattgcggccaagattgccggtctctacaatgactcggagccaccccggaagaccatgcgcagaggggtgctgatgaccctgctgcagcagtcggccatgaccctgcccctgtggatcgggaagcctggtgacaagcccccacccctctgtggggccatccctgcctcaggagactacgtggccagacctggagacaaggtggctgcccgggtgaaggccgtggatggggacgagcagtggatcctggccgaggtggtcagttacagccatgccaccaacaatgaggccttgttccagaaggagcagctcgtgctggccctgtatccccagactacctgcttctaccgcgccctgatccatgcgcccccacagcggccccaggatgactactcggtcctgtttgaagacacctcctatgcagatggctattcccctcccctcaatgtggctcagagatacgtggtggcttgtaaggaacccaagaaaaagtgatgccgcctggcagactcgccatcccccaacgacacagggcaggacagcagaggacgtgctgggattaaacacattccccctcta

SEQ ID NO: 14214 - DNA, 458 bp, Homo sapiens
ctccgcgcgcgactacgctcataaaaggaaaaaaagcgtgtgcggttctcgacgtgccgccaatcttcgaacgcaggtctgtgatcatccgcagactccgaaaaagggttcgaggaacgcgcctgctcccctcgtcgcagtttccagcccgacgagcttgttttgtcccggactcggtgcccctgtagacaatggccctcgtgtctgccgattcccgcattgcagaacttctcacagagctccatcagctgatcaaacaaacccaggtaaaaagtcaccaccctccattcccagatgggaacatgggctttgatgctgagccgtgaagtgggggtggcatttgtgttcagagagattggactcgcaggaaccaaaatgacgtaataaaagtgaaaggaggggaatttggtgtatggctaccacctgtggaagtagagatcactctagagtcacgtagc

SEQ ID NO: 14215 - DNA, 431 bp, Homo sapiens
cgctttcaagttttatttatttatttatttattgcattttgttttaaatagagtctggggaaatgggagaaaacgctgaaaacgcacaagcactttggttggttaaattagggttccgccaagagccggagcggtgtgccaagtgaaaactacatttcccacggggcagcgggtcacgtcacagaggaacgactacgcatgcgtgcaaggtcctccgcgcgcgactacgctcataaaaggaaaaaaagcgtgtgcggttctcgacgtgccgccaatcttcgaacgcaggtctgtgatcatccgcagactccgaaaaagggttcgaggaacgcgcctgctcccctcgtcgcagtttccagcccgacgagcttgttttgtcccggactcggtaggtggcgacgggccgtggcctgagacctccggcgaaacgc

SEQ ID NO: 14216 - DNA, 516 bp, Homo sapiens
  misc_feature (4)..(4): n is a, c, g, or t
  misc_feature (27)..(27): n is a, c, g, or t
  misc_feature (45)..(45): n is a, c, g, or t
  misc_feature (60)..(60): n is a, c, g, or t
cccnagcagccagcaaagaaacccccngcccccccaggacccagncccccccggaccccntgggggggccaagggccctttaaaaggggcattccaggcccagccttcagagtgacctgctcccaatgcagcatgtgtccttcccccaaaatagagtatcattattttaaaatacttggtatgaaaaaatttgatgggattcaaatcccattcacattttgcccaaggatttttaatagtacattcatcaacaaaaagtaagctgtactatatcctttaaatataatttcagctgttgtataatttaaaatggctgtaaaaatgacttaaatgtttatatcctacttgtgcagatagtatttctgattgatgtcatctatcaagaatttcaagagattatctcttttttgtcttgaatcgtgggtagtcatttaagtatacaatctgatttcaaaaaagttatggctacagaaacaagcttaagtttctcaataaagttgtttggaaaatatttta

SEQ ID NO: 14217 - DNA, 461 bp, Homo sapiens
catgatcacacttgtattttgaagtaaaataccctgatcaagtaatttaccaagaagctactttttgtgacacagctccgtctccctgacccgcggttcccagacttcacccattacacccagtctattccccattctggaaagggagaggtatcagcctcttagggggcagagattagcaaattgaaaaatagcagtgaaccagatggaaggctctcgatctttagaggttattaatcagtgtttgttcgttcaatttttaaccagtcaccttgctgttaagagcagaacataattggctggaatgtaatgtagggaatttttccctgttggatccctagcacctagaaaagttcctagcacctattaggtgttaataaatgattgttgaatgaatcagtgattacaagtacttttaagaattttgaaaataaaggaaccattggaaatacaaaaaaaaa

SEQ ID NO: 14218 - DNA, 361 bp, Homo sapiens
caactaggatatcccctatgggacctaccccttttgggatgggtggcactatgattatttactagaactgaggcaaacctggagttaataggctatctagtaccaaaaaggagtcagtaacctaacgggaaagaagaaaatcaacaggtaaaatataaagaatctctagggagccatatccaatgaaaaacaaaaccagccagacagagaatagtggaatgtataatcattcgatgcaaagacagacacacatccataagcaacaacagcaaacggggagccatggcatcccacaaatggacaaagcaaggaaccagtgactgatcctaacaggaagacgatatgtgaactctctgaccaa

SEQ ID NO: 14219 - DNA, 468 bp, Homo sapiens
gcaagtttaaagtctctagtccaggaatggaggtgggggtatgggcacctggcagtgcccacagcaagccttgactgtgtggcctggagatggggcctgagcttcagggtcactgaggcacctctgggatccaggccacctggagccccggacctcccagactccactcacccattccctctccccgcacggcactcacaccaggggcggcctggagcccggatcgcagggcggggccaggccactgcctgccttcctcctccctcccggctggcctgcccccttgcctgcctgcatgcaggcttccagcagagccagcttcttcagagccaggtggatcctgtttcggtcctgcctaggtgtgtgaccctgggcgaatctacctctctcagcttctgcttcccactttatgaaaatgggactgatgtcacagggttgttatgagattaaaagatatgaagaaccggg

SEQ ID NO: 14220 - DNA, 182 bp, Homo sapiens
actagaatgcaaaacacgtgtttttgtaaaacgaatattaatggcataactcgtgctttattattttagctgatttgtatcaatgtatcaacattccaaagaaaatagggagcatatgttggttaataatttttgttatgactattgacatgtaattcacatgacataaactttaccatttt

SEQ ID NO: 14221 - DNA, 244 bp, Homo sapiens
gaaaaatgccaactaaacatgaaactattgatcaatacttatatacctttaatttttcctatttgaaaagccaaccacttaacacattactcatagcacctaagacagtgccttgcatagtgtagtcatctattattattgtttaattagaatattaaaccctaccctttaactcagcagtccccaaccttttttgcatcagggaccatttttgtggaagacaatttttccatgggggaagaag

SEQ ID NO: 14222 - DNA, 3992 bp, Homo sapiens
  misc_feature (110)..(110): n is a, c, g, or t
gtcactgagaagatggatgtgctgggcaccgtgggaagctgtggggcccccaacttccggcaggtgcagggtgggctcactgtgttcggcatgggacagcccagcctctnagggttcaggcgggtcctccagaaactccagaaggacggacatagggagtgtgtcatcttctgtgtgcgggaggaacctgtgcttttcctgcgtgcagatgaggactttgtgtcctacacacctcgagacaagcagaaccttcatgagaacctccagggccttggacccggggtccgggtggagagcctggagctggccatccggaaagagatccacgactttgcccagctgagcgagaacacataccatgtgtaccataacaccgaggacctgtggggggagccccatgctgtggccatccatggtgaggacgacttgcatgtgacggaggaggtgtacaagcggcccctcttcctgcagcccacctacaggtaccaccgcctgcccctgcccgagcaagggagtcccctggaggcccagttggacgcctttgtcagtgttctccgggagacccccagcctgctgcagctccgtgatgcccacgggcctcccccagccctcgtcttcagctgccagatgggcgtgggcaggaccaacctgggcatggtcctgggcaccctcatcctgcttcaccgcagtgggaccacctcccagccagaggctgcccccacgcaggccaagcccctgcctatggagcagttccaggtgatccagagctttctccgcatggtgccccagggaaggaggatggtggaagaggtggtggacagagccatcactgcctgtgccgagttgcatgacctgaaagaagtggtcttggaaaaccagaagaagttagaaggtatccgaccggagagcccagcccagggaagcggcagccgacacagcgtctggcagagggcgctgtggagcctggagcgatacttctacctgatcctgtttaactactaccttcatgagcagtacccgctggcctttgccctcagtttcagccgctggctgtgtgcccaccctgagctgtaccgcctgcccgtgacgctgagctcagcaggccctgtggctccgagggacctcatcgccaggggctccctacgggaggacgatctggtctccccggacgcgctcagcactgtcagagagatggatgtggccaacttccggcgggtgccccgcatgcccatctacggcacggcccagcccagcgccaaggccctggggagcatcctggcctacctgacggacgccaagaggaggctgcggaaggttgtctgggtgagccttcgggaggaggccgtgttggagtgtgacgggcacacctacagcctgcggtggcctgggccccctgtggctcctgaccagctggagaccctggaggcccagctgaaggcccatctaagcgagcctcccccaggcaaggagggccccctgacctacaggttccagacctgccttaccatgcaggaggtcttcagccagcaccgcagggcctgtcctggcctcacctaccaccgcatccccatgccggacttctgtgccccccgagaggaggactttgaccagctgctggaggccctgcgggccgccctctccaaggacccaggcactggcttcgtgttcagctgcctcagcggccagggccgtaccacaactgcgatggtggtggctgtcctggccttctggcacatccaaggcttccccgaggtgggtgaggaggagctcgtgagtgtgcctgatgccaagttcactaagggtgaatttcaggtagtaatgaaggtggtgcagctgctacccgatgggcaccgtgtgaagaaggaggtggacgcagcgctggacactgtcagcgagaccatgacgcccatgcactaccacctgcgggagatcatcatctgcacctaccgccaggcgaaggcagcgaaagaggcgcaggaaatgcggaggctgcagctgcggagcctgcagtacttggagcgctatgtctgcctgattctcttcaacgcgtacctccacctggagaaggccgactcctggcagaggcccttcagcacctggatgcaggaggtggcatcgaaggctggcatctacgagatccttaacgagctgggcttccccgagctggagagcggggaggaccagcccttctccaggctgcgctaccggtggcaggagcagagctgcagcctcgagccctctgcccccgaggacttgctgtagggggccttactccctgtccccccacccacagggccccacgcaggcctggggtgtctgaggtgctcttggctgggagcggccctgaggggtgctggccttgaaatgattcccccacttcctggagagactgagcggagttgggagcctttttagaaagaactttttataggacagggagacagcacagccatcccttgcaaaccaccaaggtgtgtggctgacctccagggaggagcactcactggagtgctcacaaggtgcacactgctgtgtgtaccttgcagacaggccggcgttcagcctccaaggggctcactcccccagttgccaaacactgtggatctctctgtcctcttctcccctctctcagattggcctggcagcccctggcacagagcagacccggccactggtagctccccacttccttactcctgctgctctgccattgccgctccccttcttgctgcccaagcactgccctcgggcgtctggcagcctgaggtgggtggaggggacagtgttctggatagatctattatgtgaaaggcagcttcacccagttttctggactctcatgcccccatctccgacctgggagacttcaggaatgacaacctacccagcctggtggggctggcaggatggtggaggtttctcaaggagctggagacttcagggagcccctctcatggggaggaaagagcttccagggggcgaacgcagcacagaggaagaggcctgctccacttgtctgggaacctgggcaggaggcacagaggaagccaaggcctggagctgcaggtcccccggcatctctctctgtcccggcagcccaggatggcctggtgcccccacctgctgcagcaggagccccaaggagtgctagctgagggtggttgctggggtggtcctcatggacagtgaggtgtgcaagggtgcactgagggtggtgggaggggatcacctgggttccaggccatccttgctgagcatctttgagcctgccttccggtgggagcagaaaaggccagaccctgctgagttagaggctgctgggatccactgtttccacacagcgggaaggctgctgggaacaggtggcagagaagtgccatgtttgcgttgagccttgcagctcttccagctggggactggtgcttgctgaaacccaggagctgaacagtgaggaggctgtccaccttgcttggctcactgggaccaggaaagcctgtctttggttaggctcgtgtacttctgcaggaaaaaaaaaaaaggatgtgtcattggtcatgatatttgaaaaggggaggaggccgaagttgttcccatttatccagtattggaaaatatttgacccccttggctgaattcttttgcagaactactgtgtgtctgttcactaccttttcaggtttattgtttttatttttgcatgaattaagacgttttaatttctttgcagacaaggtctagatgcggagtcagagatgggactgaatggggagggatcctttgtgttctcatggttggctctgactttcagctgtgttgggaccactggctgatcacatcacctctctgcctcagtttccccatctgtaaaatgggagaataatacttgcctacctacctcacaggggtgttgtgaggattcatttgtgatttttttttttttttttgtacagagcttttaagcattaaaaacagctaaatgtgaaaaaaaatgg

SEQ ID NO: 14223 - DNA, 2432 bp, Homo sapiens
acacgggaccgtaggcagagacactagtgaatgggcgtcatggtctcgctgacagtgtccagcgcgcggcgtccacctccttgcatcacacggagcgcatcgggtagcagctgcctcagcggccagggccgtaccacaactgcgatggtggtggctgtcctggccttctggcacatccaaggcttccccgaggtgggtgaggaggagctcgtgagtgtgcctgatgccaagttcactaagggtgaatttcaggtagtaatgaaggtggtgcagctgctacccgatgggcaccgtgtgaagaaggaggtggacgcagcgctggacactgtcagcgagaccatgacgcccatgcactaccacctgcgggagatcatcatctgcacctaccgccaggcgaaggcagcgaaagaggcgcaggaaatgcggaggctgcagctgcggagcctgcagtacttggagcgctatgtctgcctgattctcttcaacgcgtacctccacctggagaaggccgactcctggcagaggcccttcagcacctggatgcaggaggtggcatcgaaggctggcatctacgagatccttaacgagctgggcttccccgagctggagagcggggaggaccagcccttctccaggctgcgctaccggtggcaggagcagagctgcagcctcgagccctctgcccccgaggacttgctgtagggggccttactccctgtccccccacccacagggccccacgcaggcctggggtgtctgaggtgctcttggctgggagcggccctgaggggtgctggccttgaaatgattcccccacttcctggagagactgagcggagttgggagcctttttagaaagaactttttataggacagggagacagcacagccatcccttgcaaaccaccaaggtgtgtggctgacctccagggaggagcactcactggagtgctcacaaggtgcacactgctgtgtgtaccttgcagacaggccggcgttcagcctccaaggggctcactcccccagttgccaaacactgtggatctctctgtcctcttctcccctctctcagattggcctggcagcccctggcacagagcagacccggccactggtagctccccacttccttactcctgctgctctgccattgccgctccccttcttgctgcccaagcactgccctcgggcgtctggcagcctgaggtgggtggaggggacagtgttctggatagatctattatgtgaaaggcagcttcacccagttttctggactctcatgcccccatctccgacctgggagacttcaggaatgacaacctacccagcctggtggggctggcaggatggtggaggtttctcaaggagctggagacttcagggagcccctctcatggggaggaaagagcttccagggggcgaacgcagcacagaggaagaggcctgctccacttgtctgggaacctgggcaggaggcacagaggaagccaaggcctggagctgcaggtcccccggcatctctctctgtcccggcagcccaggatggcctggtgcccccacctgctgcagcaggagccccaaggagtgctagctgagggtggttgctggggtggtcctcatggacagtgaggtgtgcaagggtgcactgagggtggtgggaggggatcacctgggttccaggccatccttgctgagcatctttgagcctgccttccggtgggagcagaaaaggccagaccctgctgagttagaggctgctgggatccactgtttccacacagcgggaaggctgctgggaacaggtggcagagaagtgccatgtttgcgttgagccttgcagctcttccagctggggactggtgcttgctgaaacccaggagctgaacagtgaggaggctgtccaccttgcttggctcactgggaccaggaaagcctgtctttggttaggctcgtgtacttctgcaggaaaaaaaaaaaaggatgtgtcattggtcatgatatttgaaaaggggaggaggccgaagttgttcccatttatccagtattggaaaatatttgacccccttggctgaattcttttgcagaactactgtgtgtctgttcactaccttttcaggtttattgtttttatttttgcatgaattaagacgttttaatttctttgcagacaaggtctagatgcggagtcagagatgggactgaatggggagggatcctttgtgttctcatggttggctctgactttcagctgtgttgggaccactggctgatcacatcacctctctgcctcagtttccccatctgtaaaatgggagaataatacttgcctacctacctcacaggggtgttgtgaggattcatttgtgatttttttttttttttttgtacagagcttttaagcattaaaaacagctaaatgtgaaaaaaaatgg

SEQ ID NO: 14224 - DNA, 2113 bp, Homo sapiens
  misc_feature (110)..(110): n is a, c, g, or t
gtcactgagaagatggatgtgctgggcaccgtgggaagctgtggggcccccaacttccggcaggtgcagggtgggctcactgtgttcggcatgggacagcccagcctctnagggttcaggcgggtcctccagaaactccagaaggacggacatagggagtgtgtcatcttctgtgtgcgggaggaacctgtgcttttcctgcgtgcagatgaggactttgtgtcctacacacctcgagacaagcagaaccttcatgagaacctccagggccttggacccggggtccgggtggagagcctggagctggccatccggaaagagatccacgactttgcccagctgagcgagaacacataccatgtgtaccataacaccgaggacctgtggggggagccccatgctgtggccatccatggtgaggacgacttgcatgtgacggaggaggtgtacaagcggcccctcttcctgcagcccacctacaggtaccaccgcctgcccctgcccgagcaagggagtcccctggaggcccagttggacgcctttgtcagtgttctccgggagacccccagcctgctgcagctccgtgatgcccacgggcctcccccagccctcgtcttcagctgccagatgggcgtgggcaggaccaacctgggcatggtcctgggcaccctcatcctgcttcaccgcagtgggaccacctcccagccagaggctgcccccacgcaggccaagcccctgcctatggagcagttccaggtgatccagagctttctccgcatggtgccccagggaaggaggatggtggaagaggtggtggacagagccatcactgcctgtgccgagttgcatgacctgaaagaagtggtcttggaaaaccagaagaagttagaaggtatccgaccggagagcccagcccagggaagcggcagccgacacagcgtctggcagagggcgctgtggagcctggagcgatacttctacctgatcctgtttaactactaccttcatgagcagtacccgctggcctttgccctcagtttcagccgctggctgtgtgcccaccctgagctgtaccgcctgcccgtgacgctgagctcagcaggccctgtggctccgagggacctcatcgccaggggctccctacgggaggacgatctggtctccccggacgcgctcagcactgtcagagagatggatgtggccaacttccggcgggtgccccgcatgcccatctacggcacggcccagcccagcgccaaggccctggggagcatcctggcctacctgacggacgccaagaggaggctgcggaaggttgtctgggtgagccttcgggaggaggccgtgttggagtgtgacgggcacacctacagcctgcggtggcctgggccccctgtggctcctgaccagctggagaccctggaggcccagctgaaggcccatctaagcgagcctcccccaggcaaggagggccccctgacctacaggttccagacctgccttaccatgcaggaggtcttcagccagcaccgcagggcctgtcctggcctcacctaccaccgcatccccatgccggacttctgtgccccccgagaggaggtgagggtgctgctcaggctgaggcctctggggagggacaggaggcctccctgtctcccctctggtctgggctctgggagaatgaaacgaccccagcttctctacggggcccgggaatggtctcacgaggttttccgatttggcccaagtggtttattcacattccttccaagctttgtgtgtgtgtacgtgtgtttattatgtgttatagggtatatgtgtgtgtattgttataggtgtgtgtgtattggagtgtgtattctgttacgtatgtgcatatgtgttataagatgtgtgtacatgtgtttattatgttgtagggtgtatgtgtgtgtattgtgttatgggtgtgtgttataggtgtgtgtgtgttatcggggtgtgtgtgtattctgttacaggtgcctgtaatcccagctactcgggaggctgaggcgggagaatttcttgaacctaagaggcagaggttgcagtgagccgagatctcaccactacactccagactgggtgacag

SEQ ID NO: 14225 - DNA, 2015 bp, Homo sapiens
  misc_feature (110)..(110): n is a, c, g, or t
gtcactgagaagatggatgtgctgggcaccgtgggaagctgtggggcccccaacttccggcaggtgcagggtgggctcactgtgttcggcatgggacagcccagcctctnagggttcaggcgggtcctccagaaactccagaaggacggacatagggagtgtgtcatcttctgtgtgcgggaggaacctgtgcttttcctgcgtgcagatgaggactttgtgtcctacacacctcgagacaagcagaaccttcatgagaacctccagggccttggacccggggtccgggtggagagcctggagctggccatccggaaagagatccacgactttgcccagctgagcgagaacacataccatgtgtaccataacaccgaggacctgtggggggagccccatgctgtggccatccatggtgaggacgacttgcatgtgacggaggaggtgtacaagcggcccctcttcctgcagcccacctacaggtaccaccgcctgcccctgcccgagcaagggagtcccctggaggcccagttggacgcctttgtcagtgttctccgggagacccccagcctgctgcagctccgtgatgcccacgggcctcccccagccctcgtcttcagctgccagatgggcgtgggcaggaccaacctgggcatggtcctgggcaccctcatcctgcttcaccgcagtgggaccacctcccagccagaggctgcccccacgcaggccaagcccctgcctatggagcagttccaggtgatccagagctttctccgcatggtgccccagggaaggaggatggtggaagaggtggatagatctattatgtgaaaggcagcttcacccagttttctggactctcatgcccccatctccgacctgggagacttcaggaatgacaacctacccagcctggtggggctggcaggatggtggaggtttctcaaggagctggagacttcagggagcccctctcatggggaggaaagagcttccagggggcgaacgcagcacagaggaagaggcctgctccacttgtctgggaacctgggcaggaggcacagaggaagccaaggcctggagctgcaggtcccccggcatctctctctgtcccggcagcccaggatggcctggtgcccccacctgctgcagcaggagccccaaggagtgctagctgagggtggttgctggggtggtcctcatggacagtgaggtgtgcaagggtgcactgagggtggtgggaggggatcacctgggttccaggccatccttgctgagcatctttgagcctgccttccggtgggagcagaaaaggccagaccctgctgagttagaggctgctgggatccactgtttccacacagcgggaaggctgctgggaacaggtggcagagaagtgccatgtttgcgttgagccttgcagctcttccagctggggactggtgcttgctgaaacccaggagctgaacagtgaggaggctgtccaccttgcttggctcactgggaccaggaaagcctgtctttggttaggctcgtgtacttctgcaggaaaaaaaaaaaaggatgtgtcattggtcatgatatttgaaaaggggaggaggccgaagttgttcccatttatccagtattggaaaatatttgacccccttggctgaattcttttgcagaactactgtgtgtctgttcactaccttttcaggtttattgtttttatttttgcatgaattaagacgttttaatttctttgcagacaaggtctagatgcggagtcagagatgggactgaatggggagggatcctttgtgttctcatggttggctctgactttcagctgtgttgggaccactggctgatcacatcacctctctgcctcagtttccccatctgtaaaatgggagaataatacttgcctacctacctcacaggggtgttgtgaggattcatttgtgatttttttttttttttttgtacagagcttttaagcattaaaaacagctaaatgtgaaaaaaaatgg

SEQ ID NO: 14226 - DNA, 401 bp, Homo sapiens
gcccagtgtgtgcctggcctccctcgctgctatctgtgtggagcactcactgtctgcccagtactttctgtatgtgtagagtcctccttgagacagtcctgtgaggtagagtcttttccttgctatgaggaaactgacgctcagagaagttaacagaagtcaaggtgcaaacttgttcaggtcaccaagttcacaggccacagactcatcttcagaactcagtggccttagtggcaccctccctcccctgaaacactgctcctgcctctgctctcctcccaggtggcatcgaaggctggcatctacgagatccttaacgagctgggcttccccgagctggagagcggggaggaccagcccttctccaggctgcgctaccggtggcaggagcagagctgcag

SEQ ID NO: 14227 - DNA, 2427 bp, Homo sapiens
accgtcagcgtgcgtgtgacgtcacctgcgcgcccgcctaaactcttcctagggttctttctagagtacggcagcaagttgtcagattccctagttgaatttgctttggacatcagtgtgaagcagaactgatatgccacttgaattaataaaggaagtcaatggggtgcctgaagttcagccgctgagtaaattacataaagtagatttcggatccctacagccaggttacaattatagcaagaaatatattcagggaaaactttcacttatctcttctttaacttatcgtggaaataaaacagctgttttgcagattggactacaaggacaccattgcagtggctagatttattgtttttttagcttcttcatctacaagcagagatggtaaaccttgcatatttttgaaagcatttgaagacctcaaatcaactgtttatgtttatgtcaaatctttaagagatttttctacagaatcaatgtctttggttccagcaacaaattatatatatacacccctgaatcaacttaagggtggtacaattgtcaatgtctatggtgttgtgaagttctttaagcccccatatctaagcaaaggaactgattattgctcagttgtaactattgtggaccagacaaatgtaaaactaacttgcctgctctttagtggaaactatgaagcccttccaataatttataaaaatggagatattgttcgctttcacaggctgaagattcaagtatataaaaaggagactcagggtatcaccagctctggctttgcatctttgacgtttgagggaactttgggagcccctatcatacctcgcacttcaagcaagtattttaacttcactactgaggaccacaaaatggtagaagccttacgtgtttgggcatctactcatatgtcaccgtcttggacattactaaaattgtgtgatgttcagccaatgcagtattttgacctgacttgtcagctcttgggcaaagcagaagtggacggagcatcatttcttctaaaggtatgggatggcaccaggacaccatttccatcttggagagtcttaatacaagaccttgttcttgaaggtgatttaagtcacatccatcggctacaaaatctgacaatagacattttagtctacgataaccatgttcatgtggcaagatctctgaaggttggaagctttcttagaatctatagccttcataccaaacttcaatcaatgaattcagagaatcagacaatgttaagtttagagtttcatcttcatggaggtaccagttacggtcggggaatcagggtcttgccagaaagtaactctgatgtggatcaactgaaaaaggatttagaatctgcaaatttgacagccaatcagcattcagatgttatctgtcaatcagaacctgacgacagctttccaagctctggatcagtatcattatacgaggtagaaagatgtcaacagctatctgctacaatacttacagatcatcagtatttggagaggacaccactatgtgccattttgaaacaaaaagctcctcaacaataccgcatccgagcaaaattgaggtcatataagcccagaagactatttcagtctgttaaacttcattgccctaaatgtcatttgctgcaagaagttccacatgagggcgatttggatataatttttcaggatggtgcaactaaaaccccagatgtcaagctacaaaatacatcattatatgattcaaaaatctggaccactaaaaatcaaaaaggacgaaaagtagcagttcattttgtgaaaaataatggtattctcccgctttcaaatgaatgtctacttttgatagaaggaggtacactcagtgaaatttgcaaactctcgaacaagtttaatagtgtaattcctgtgagatctggccacgaagacctggaacttttggacctttcagcaccatttcttatacaaggaacaatacatcactatggatgtaaacagtgttctagtttgagatccatacaaaatctaaattccctggttgataaaacatcgtggattccttcttctgtggcagaagcactgggtattgtacccctccaatatgtgtttgttatgacctttacacttgatgatggaacaggagtactagaagcctatctcatggattctgacaaattcttccagattccagcatcagaagttctgatggatgatgaccttcagaaaagtgtggatatgatcatggatatgttttgtcctccaggaataaaaattgatgcatatccgtggttggaatgcttcatcaagtcatacaatgtcacaaatggaacagataatcaaatttgctatcagatttttgacaccacagttgcagaagatgtaatctaatattgccatccaatttagcatacataaaatgttgccactc

SEQ ID NO: 14228 - DNA, 733 bp, Homo sapiens
tcccggttaattgtaacgcagtcggtctttttaccaccagtttgaacttaagttcaagtgcttttttattacccccggtaccagcactgggtattgtacccctccaatatgtgtttgttatgacctttacacttgatgatggaacaggagtactagaagcctatctcatggattctgacaaattcttccagattccagcatcagaagttctgatggatgatgaccttcagaaaagtgtggatatgatcatggatatgttttgtcctccaggaataaaaattgatgcatatccgtggttggaatgcttcatcaagtcatacaatgtcacaaatggaacagataatcaaatttgctatcagatttttgacaccacagttgcagaagatgtaatctaatattgccatccaatttagcatacataaaatgttgccactcaccttccctgtttgagcttcttttcctgacctgagttttgtatcagcaatgttgatgatgttagcatgggtatgggattagaaaatgtccttaccttaaatctcttggcttttactgggtgcaaggaagccctcaatctagaagagtagaggtccaaaggtgccatatgttcacactgtgagcctgcaagatctccacgttaacaaaggaaaactcttcctatgaatcttcatgatgataggccatgtctcttcttatttttgttttaaataaacatccaccttatcatgaattcttt

SEQ ID NO: 14229 - DNA, 3970 bp, Homo sapiens
accgtcagcgtgcgtgtgacgtcacctgcgcgcccgcctaaactcttcctagggttctttctagagtacggcagcaagttgtcagattccctagttgaatttgctttggacatcagtgtgaagcagaactgatatgccacttgaattaataaaggaagtcaatggggtgcctgaagttcagccgctgagtaaattacataaagtagatttcggatccctacagccaggttacaattatagcaagaaatatattcagggaaaactttcacttatctcttctttaacttatcgtggaaataaaacagctgttttgcagattggactacaaggacaccattgcagtggctagatttattgtttttttagcttcttcatctacaagcagagatggtaaaccttgcatatttttgaaagcatttgaagacctcaaatcaactgtttatgtttatgtcaaatctttaagagatttttctacagaatcaatgtctttggttccagcaacaaattatatatatacacccctgaatcaacttaagggtggtacaattgtcaatgtctatggtgttgtgaagttctttaagcccccatatctaagcaaaggaactgattattgctcagttgtaactattgtggaccagacaaatgtaaaactaacttgcctgctctttagtggaaactatgaagcccttccaataatttataaaaatggagatattgttcgctttcacaggctgaagattcaagtatataaaaaggagactcagggtatcaccagctctggctttgcatctttgacgtttgagggaactttgggagcccctatcatacctcgcacttcaagcaagtattttaacttcactactgaggaccacaaaatggtagaagccttacgtgtttgggcatctactcatatgtcaccgtcttggacattactaaaattgtgtgatgttcagccaatgcagtattttgacctgacttgtcagctcttgggcaaagcagaagtggacggagcatcatttcttctaaaggtatgggatggcaccaggacaccatttccatcttggagagtcttaatacaagaccttgttcttgaaggtgatttaagtcacatccatcggctacaaaatctgacaatagacattttagtctacgataaccatgttcatgtggcaagatctctgaaggttggaagctttcttagaatctatagccttcataccaaacttcaatcaatgaattcagagaatcagacaatgttaagtttagagtttcatcttcatggaggtaccagttacggtcggggaatcagggtcttgccagaaagtaactctgatgtggatcaactgaaaaaggatttagaatctgcaaatttgacagccaatcagcattcagatgttatctgtcaatcagaacctgacgacagctttccaagctctggatcagtatcattatacgaggtagaaagatgtcaacagctatctgctacaatacttacagatcatcagtatttggagaggacaccactatgtgccattttgaaacaaaaagctcctcaacaataccgcatccgagcaaaattgaggtcatataagcccagaagactatttcagtctgttaaacttcattgccctaaatgtcatttgctgcaagaagttccacatgagggcgatttggatataatttttcaggatggtgcaactaaaaccccagatgtcaagctacaaaatacatcattatatgattcaaaaatctggaccactaaaaatcaaaaaggacgaaaagtagcagttcattttgtgaaaaataatggtattctcccgctttcaaatgaatgtctacttttgatagaaggaggtacactcagtgaaatttgcaaactctcgaacaagtttaatagtgtaattcctgtgagatctggccacgaagacctggaacttttggacctttcagcaccatttcttatacaaggaacaatacatcactatggatgtaaacagtgttctagtttgagatccatacaaaatctaaattccctggttgataaaacatcgtggattccttcttctgtggcagaagcactgggtattgtacccctccaatatgtgtttgttatgacctttacacttgatgatggaacaggagtactagaagcctatctcatggattctgacaaattcttccagattccagcatcagaagttctgatggatgatgaccttcagaaaagtgtggatatgatcatggatatgttttgtcctccaggaataaaaattgatgcatatccgtggttggaatgcttcatcaagtcatacaatgtcacaaatggaacagataatcaaatttgctatcagatttttgacaccacagttgcagaagatgtaatctaatattgccatccaatttagcatacataaaatgttgccactcaccttccctgtttgagcttcttttcctgacctgagttttgtatcagcaatgttgatgatgttagcatgggtatgggattagaaaatgtccttaccttaaatctcttggcttttactgggtgcaaggtaaataatggctatggattttgttttgctttctgttttgcttttgtacaaagagacctgcttaaacaagtactgctgagataagtgtctgatcaagctacagtgtactttaagtagaaatggcaaagttgctttgttggggtgctgatactgatgattttaggataaattcatttctttaaacttgtaatacatggttttattgcttgtttctctccaggatagtagagatttctctatttcacctcaacctaataaaagtggtcagatttataatgttaatgacttaatattatccttttctaatagtctcatgtaaaatatgccgctattacaacttacaactaattgaatgagatgttaacttagtaaaatagtttgatttttacctgacagtgtttgtcaaatttaaaatcatgaatattcaattttatacaaacatttatatatatatatatagatttgtgtatgttatttgccaaagacagatataaattacctggtttaatattagtgaagaataaataagtgcacacatttcaactgtttcatttatttgccctaagttgagctgaaaaatgatatgaggcaaagaatcgaaataggtgtggcaatgcagcagatgtttagggctgtctacatcccaggtactgtgctaagcactaaacatgtatttgatcctcacagcaacctatttttccgataagaaatctgaggcttgattgataagctgacttgactaagttcacacagtttgtaaaagctagagtctgtgccttaattcacataatctctattcagagcctgtactgttaaccactcaaggattctggaacagaagctaacagttttctgcaacgagtctttgacttaaacatctgaaataacattggaaatagattataagaggagtcagtgtgtttttctatagtttcaaaatacttttaacatcttattgtcaaaaagattggataactgactttctttgctcataataactctaaattctagttcctgagtacattaacacatcttctttacctaactaccaatgtcccccatcatcgacttatcagcttgtttgagacaatgagaaagactgattttattttcaagaatatagactcttggttcaaaacattttcaggaaaaatattttaaaaccctacagttgaacaggtgtgtttccgtgttgatgatgtgctcaggatacaaaggtgaaataaacattttttctgccttcaggaagccctcaatctagaagagtagaggtccaaaggtgccatatgttcacactgtgagcctgcaagatctccacgttaacaaaggaaaactcttcctatgaatcttcatgatgataggccatgtctcttcttatttttgttttaaataaacatccaccttatcatgaattcttt

SEQ ID NO: 14230 - DNA, 4306 bp, Homo sapiens
accgtcagcgtgcgtgtgacgtcacctgcgcgcccgcctaaactcttcctagggttctttctagagtacgggtgagtgaaatttgtaaggtttggtgtgttcatttgagtgggtgccagacgtaacgggcccgggattgaattagtttagatcaaaatttgatgtaattatcgcagagaaacgctttcttacgagtgtttatctcgagcctgctgtgttcagcatctttcttggtgttttgggagaagcagacaggagttaagtccaagtccccgccctcacagagctcaggtggcttgggggaaggttggtgcgcaaacattaaaattagatatcgacactagtgagtgtccccgtcaagaggtctgtgaaataaggttgagcctacgatgcagaagttaatctcacagcaagttgtcagattccctagttgaatttgctttggacatcagtgtgaagcagaactgatatgccacttgaattaataaaggaagtcaatggggtgcctgaagttcagccgctgagtaaattacataaagtagatttcggatccctacagccaggttacaattatagcaagaaatatattcagggaaaactttcacttatctcttctttaacttatcgtggaaataaaacagctgttttgcagattggactacaaggacaccattgcagtggctagatttattgtttttttagcttcttcatctacaagcagagatggtaaaccttgcatatttttgaaagcatttgaagacctcaaatcaactgtttatgtttatgtcaaatctttaagagatttttctacagaatcaatgtctttggttccagcaacaaattatatatatacacccctgaatcaacttaagggtggtacaattgtcaatgtctatggtgttgtgaagttctttaagcccccatatctaagcaaaggaactgattattgctcagttgtaactattgtggaccagacaaatgtaaaactaacttgcctgctctttagtggaaactatgaagcccttccaataatttataaaaatggagatattgttcgctttcacaggctgaagattcaagtatataaaaaggagactcagggtatcaccagctctggctttgcatctttgacgtttgagggaactttgggagcccctatcatacctcgcacttcaagcaagtattttaacttcactactgaggaccacaaaatggtagaagccttacgtgtttgggcatctactcatatgtcaccgtcttggacattactaaaattgtgtgatgttcagccaatgcagtattttgacctgacttgtcagctcttgggcaaagcagaagtggacggagcatcatttcttctaaaggtatgggatggcaccaggacaccatttccatcttggagagtcttaatacaagaccttgttcttgaaggtgatttaagtcacatccatcggctacaaaatctgacaatagacattttagtctacgataaccatgttcatgtggcaagatctctgaaggttggaagctttcttagaatctatagccttcataccaaacttcaatcaatgaattcagagaatcagacaatgttaagtttagagtttcatcttcatggaggtaccagttacggtcggggaatcagggtcttgccagaaagtaactctgatgtggatcaactgaaaaaggatttagaatctgcaaatttgacagccaatcagcattcagatgttatctgtcaatcagaacctgacgacagctttccaagctctggatcagtatcattatacgaggtagaaagatgtcaacagctatctgctacaatacttacagatcatcagtatttggagaggacaccactatgtgccattttgaaacaaaaagctcctcaacaataccgcatccgagcaaaattgaggtcatataagcccagaagactatttcagtctgttaaacttcattgccctaaatgtcatttgctgcaagaagttccacatgagggcgatttggatataatttttcaggatggtgcaactaaaaccccagatgtcaagctacaaaatacatcattatatgattcaaaaatctggaccactaaaaatcaaaaaggacgaaaagtagcagttcattttgtgaaaaataatggtattctcccgctttcaaatgaatgtctacttttgatagaaggaggtacactcagtgaaatttgcaaactctcgaacaagtttaatagtgtaattcctgtgagatctggccacgaagacctggaacttttggacctttcagcaccatttcttatacaaggaacaatacatcactatggatgtaaacagtgttctagtttgagatccatacaaaatctaaattccctggttgataaaacatcgtggattccttcttctgtggcagaagcactgggtattgtacccctccaatatgtgtttgttatgacctttacacttgatgatggaacaggagtactagaagcctatctcatggattctgacaaattcttccagattccagcatcagaagttctgatggatgatgaccttcagaaaagtgtggatatgatcatggatatgttttgtcctccaggaataaaaattgatgcatatccgtggttggaatgcttcatcaagtcatacaatgtcacaaatggaacagataatcaaatttgctatcagatttttgacaccacagttgcagaagatgtaatctaatattgccatccaatttagcatacataaaatgttgccactcaccttccctgtttgagcttcttttcctgacctgagttttgtatcagcaatgttgatgatgttagcatgggtatgggattagaaaatgtccttaccttaaatctcttggcttttactgggtgcaaggtaaataatggctatggattttgttttgctttctgttttgcttttgtacaaagagacctgcttaaacaagtactgctgagataagtgtctgatcaagctacagtgtactttaagtagaaatggcaaagttgctttgttggggtgctgatactgatgattttaggataaattcatttctttaaacttgtaatacatggttttattgcttgtttctctccaggatagtagagatttctctatttcacctcaacctaataaaagtggtcagatttataatgttaatgacttaatattatccttttctaatagtctcatgtaaaatatgccgctattacaacttacaactaattgaatgagatgttaacttagtaaaatagtttgatttttacctgacagtgtttgtcaaatttaaaatcatgaatattcaattttatacaaacatttatatatatatatatagatttgtgtatgttatttgccaaagacagatataaattacctggtttaatattagtgaagaataaataagtgcacacatttcaactgtttcatttatttgccctaagttgagctgaaaaatgatatgaggcaaagaatcgaaataggtgtggcaatgcagcagatgtttagggctgtctacatcccaggtactgtgctaagcactaaacatgtatttgatcctcacagcaacctatttttccgataagaaatctgaggcttgattgataagctgacttgactaagttcacacagtttgtaaaagctagagtctgtgccttaattcacataatctctattcagagcctgtactgttaaccactcaaggattctggaacagaagctaacagttttctgcaacgagtctttgacttaaacatctgaaataacattggaaatagattataagaggagtcagtgtgtttttctatagtttcaaaatacttttaacatcttattgtcaaaaagattggataactgactttctttgctcataataactctaaattctagttcctgagtacattaacacatcttctttacctaactaccaatgtcccccatcatcgacttatcagcttgtttgagacaatgagaaagactgattttattttcaagaatatagactcttggttcaaaacattttcaggaaaaatattttaaaaccctacagttgaacaggtgtgtttccgtgttgatgatgtgctcaggatacaaaggtgaaataaacattttttctgccttcaggaagccctcaatctagaagagtagaggtccaaaggtgccatatgttcacactgtgagcctgcaagatctccacgttaacaaaggaaaactcttcctatgaatcttcatgatgataggccatgtctcttcttatttttgttttaaataaacatccaccttatcatgaattcttt

SEQ ID NO: 14231 - DNA, 4205 bp, Homo sapiens
accgtcagcgtgcgtgtgacgtcacctgcgcgcccgcctaaactcttcctagggttctttctagagtacgggtgagtgaaatttgtaaggtttggtgtgttcatttgagtgggtgccagacgtaacgggcccgggattgaattagtttagatcaaaatttgatgtaattatcgcagagaaacgctttcttacgagtgtttatctcgagcctgctgtgttcagcatctttcttggtgttttgggagaagcagacaggagttaagtccaagtccccgccctcacagagctcaggtggcttgggggaagcagcaagttgtcagattccctagttgaatttgctttggacatcagtgtgaagcagaactgatatgccacttgaattaataaaggaagtcaatggggtgcctgaagttcagccgctgagtaaattacataaagtagatttcggatccctacagccaggttacaattatagcaagaaatatattcagggaaaactttcacttatctcttctttaacttatcgtggaaataaaacagctgttttgcagattggactacaaggacaccattgcagtggctagatttattgtttttttagcttcttcatctacaagcagagatggtaaaccttgcatatttttgaaagcatttgaagacctcaaatcaactgtttatgtttatgtcaaatctttaagagatttttctacagaatcaatgtctttggttccagcaacaaattatatatatacacccctgaatcaacttaagggtggtacaattgtcaatgtctatggtgttgtgaagttctttaagcccccatatctaagcaaaggaactgattattgctcagttgtaactattgtggaccagacaaatgtaaaactaacttgcctgctctttagtggaaactatgaagcccttccaataatttataaaaatggagatattgttcgctttcacaggctgaagattcaagtatataaaaaggagactcagggtatcaccagctctggctttgcatctttgacgtttgagggaactttgggagcccctatcatacctcgcacttcaagcaagtattttaacttcactactgaggaccacaaaatggtagaagccttacgtgtttgggcatctactcatatgtcaccgtcttggacattactaaaattgtgtgatgttcagccaatgcagtattttgacctgacttgtcagctcttgggcaaagcagaagtggacggagcatcatttcttctaaaggtatgggatggcaccaggacaccatttccatcttggagagtcttaatacaagaccttgttcttgaaggtgatttaagtcacatccatcggctacaaaatctgacaatagacattttagtctacgataaccatgttcatgtggcaagatctctgaaggttggaagctttcttagaatctatagccttcataccaaacttcaatcaatgaattcagagaatcagacaatgttaagtttagagtttcatcttcatggaggtaccagttacggtcggggaatcagggtcttgccagaaagtaactctgatgtggatcaactgaaaaaggatttagaatctgcaaatttgacagccaatcagcattcagatgttatctgtcaatcagaacctgacgacagctttccaagctctggatcagtatcattatacgaggtagaaagatgtcaacagctatctgctacaatacttacagatcatcagtatttggagaggacaccactatgtgccattttgaaacaaaaagctcctcaacaataccgcatccgagcaaaattgaggtcatataagcccagaagactatttcagtctgttaaacttcattgccctaaatgtcatttgctgcaagaagttccacatgagggcgatttggatataatttttcaggatggtgcaactaaaaccccagatgtcaagctacaaaatacatcattatatgattcaaaaatctggaccactaaaaatcaaaaaggacgaaaagtagcagttcattttgtgaaaaataatggtattctcccgctttcaaatgaatgtctacttttgatagaaggaggtacactcagtgaaatttgcaaactctcgaacaagtttaatagtgtaattcctgtgagatctggccacgaagacctggaacttttggacctttcagcaccatttcttatacaaggaacaatacatcactatggatgtaaacagtgttctagtttgagatccatacaaaatctaaattccctggttgataaaacatcgtggattccttcttctgtggcagaagcactgggtattgtacccctccaatatgtgtttgttatgacctttacacttgatgatggaacaggagtactagaagcctatctcatggattctgacaaattcttccagattccagcatcagaagttctgatggatgatgaccttcagaaaagtgtggatatgatcatggatatgttttgtcctccaggaataaaaattgatgcatatccgtggttggaatgcttcatcaagtcatacaatgtcacaaatggaacagataatcaaatttgctatcagatttttgacaccacagttgcagaagatgtaatctaatattgccatccaatttagcatacataaaatgttgccactcaccttccctgtttgagcttcttttcctgacctgagttttgtatcagcaatgttgatgatgttagcatgggtatgggattagaaaatgtccttaccttaaatctcttggcttttactgggtgcaaggtaaataatggctatggattttgttttgctttctgttttgcttttgtacaaagagacctgcttaaacaagtactgctgagataagtgtctgatcaagctacagtgtactttaagtagaaatggcaaagttgctttgttggggtgctgatactgatgattttaggataaattcatttctttaaacttgtaatacatggttttattgcttgtttctctccaggatagtagagatttctctatttcacctcaacctaataaaagtggtcagatttataatgttaatgacttaatattatccttttctaatagtctcatgtaaaatatgccgctattacaacttacaactaattgaatgagatgttaacttagtaaaatagtttgatttttacctgacagtgtttgtcaaatttaaaatcatgaatattcaattttatacaaacatttatatatatatatatagatttgtgtatgttatttgccaaagacagatataaattacctggtttaatattagtgaagaataaataagtgcacacatttcaactgtttcatttatttgccctaagttgagctgaaaaatgatatgaggcaaagaatcgaaataggtgtggcaatgcagcagatgtttagggctgtctacatcccaggtactgtgctaagcactaaacatgtatttgatcctcacagcaacctatttttccgataagaaatctgaggcttgattgataagctgacttgactaagttcacacagtttgtaaaagctagagtctgtgccttaattcacataatctctattcagagcctgtactgttaaccactcaaggattctggaacagaagctaacagttttctgcaacgagtctttgacttaaacatctgaaataacattggaaatagattataagaggagtcagtgtgtttttctatagtttcaaaatacttttaacatcttattgtcaaaaagattggataactgactttctttgctcataataactctaaattctagttcctgagtacattaacacatcttctttacctaactaccaatgtcccccatcatcgacttatcagcttgtttgagacaatgagaaagactgattttattttcaagaatatagactcttggttcaaaacattttcaggaaaaatattttaaaaccctacagttgaacaggtgtgtttccgtgttgatgatgtgctcaggatacaaaggtgaaataaacattttttctgccttcaggaagccctcaatctagaagagtagaggtccaaaggtgccatatgttcacactgtgagcctgcaagatctccacgttaacaaaggaaaactcttcctatgaatcttcatgatgataggccatgtctcttcttatttttgttttaaataaacatccaccttatcatgaattcttt

SEQ ID NO: 14232 - DNA, 3608 bp, Homo sapiens
accgtcagcgtgcgtgtgacgtcacctgcgcgcccgcctaaactcttcctagggttctttctagagtacggcagcaagttgtcagattccctagttgaatttgctttggacatcagtgtgaagcagaactgatatgccacttgaattaataaaggaagtcaatggggtgcctgaagttcagccgctgagtaaattacataaagtagatttcggatccctacagccaggttacaattatagcaagaaatatattcagggaaaactttcacttatctcttctttaacttatcgtggaaataaaacagctgttttgcagattggactacaaggacaccattgcagtggctagatttattgtttttttagcttcttcatctacaagcagagatggtaaaccttgcatatttttgaaagcatttgaagacctcaaatcaactgtttatgtttatgtcaaatctttaagagatttttctacagaatcaatgtctttggttccagcaacaaattatatatatacacccctgaatcaacttaagggtggtacaattgtcaatgtctatggtgttgtgaagttctttaagcccccatatctaagcaaaggaactgattattgctcagttgtaactattgtggaccagacaaatgtaaaactaacttgcctgctctttagtggaaactatgaagcccttccaataatttataaaaatggagatattgttcgctttcacaggctgaagattcaagtatataaaaaggagactcagggtatcaccagctctggctttgcatctttgacgtttgagggaactttgggagcccctatcatacctcgcacttcaagcaagtattttaacttcactactgaggaccacaaaatggtagaagccttacgtgtttgggcatctactcatatgtcaccgtcttggacattactaaaattgtgtgatgttcagccaatgcagtattttgacctgacttgtcagctcttgggcaaagcagaagtggacggagcatcatttcttctaaaggtatgggatggcaccaggacaccatttccatcttggagagtcttaatacaagaccttgttcttgaaggtgatttaagtcacatccatcggctacaaaatctgacaatagacattttagtctacgataaccatgttcatgtggcaagatctctgaaggttggaagctttcttagaatctatagccttcataccaaacttcaatcaatgaattcagagaatcagacaatgttaagtttagagtttcatcttcatggaggtaccagttacggtcggggaatcagggtcttgccagaaagtaactctgatgtggatcaactgaaaaaggatttagaatctgcaaatttgacagccaatcagcattcagatgttatctgtcaatcagaacctgacgacagctttccaagctctggatcagtatcattatacgaggtagaaagatgtcaacagctatctgctacaatacttacagatcatcagtatttggagaggacaccactatgtgccattttgaaacaaaaagctcctcaacaataccgcatccgagcaaaattgaggtcatataagcccagaagactatttcagtctgttaaacttcattgccctaaatgtcatttgctgcaagaagttccacatgagggcgatttggatataatttttcaggatggtgcaactaaaaccccagatgtcaagctacaaaatacatcattatatgattcaaaaatctggaccactaaaaatcaaaaaggacgaaaagtagcagttcattttgtgaaaaataatggtattctcccgctttcaaatgaatgtctacttttgatagaaggaggtacactcagtgaaatttgcaaactctcgaacaagtttaatagtgtaattcctgtgagatctggccacgaagacctggaacttttggacctttcagcaccatttcttatacaaggaacaatacatcactatggatgtaaacagtgttctagtttgagatccatacaaaatctaaattccctggttgataaaacatcgtggattccttcttctgtggcagaagcactgggtattgtacccctccaatatgtgtttgttatgacctttacacttgatgatggaacaggagtactagaagcctatctcatggattctgacaaattcttccagattccagcatcagaagttctgatggatgatgaccttcagaaaagtgtggatatgatcatggatatgttttgtcctccaggaataaaaattgatgcatatccgtggttggaatgcttcatcaagtcatacaatgtcacaaatggaacagataatcaaatttgctatcagatttttgacaccacagttgcagaagatgtaatctaatattgccatccaatttagcatacataaaatgttgccactcaccttccctgtttgagcttcttttcctgacctgagttttgtatcagcaatgttgatgatgttagcatgggtatgggattagaaaatgtccttaccttaaatctcttggcttttactgggtgcaaggtaaataatggctatggattttgttttgctttctgttttgcttttgtacaaagagacctgcttaaacaagtactgctgagataagtgtctgatcaagctacagtgtactttaagtagaaatggcaaagttgctttgttggggtgctgatactgatgattttaggataaattcatttctttaaacttgtaatacatggttttattgcttgtttctctccaggatagtagagatttctctatttcacctcaacctaataaaagtggtcagatttataatgttaatgacttaatattatccttttctaatagtctcatgtaaaatatgccgctattacaacttacaactaattgaatgagatgttaacttagtaaaatagtttgatttttacctgacagtgtttgtcaaatttaaaatcatgaatattcaattttatacaaacatttatatatatatatatagatttgtgtatgttatttgccaaagacagatataaattacctggtttaatattagtgaagaataaataagtgcacacattaaaaaaaaaaaaaaaaaaaaaaaaaaaaaaaaaaaaaaaaaaaaaaaaaaaaaaaaaaaaaaaaaaaaaaaaaaaaaaaaaaaaacgaagacacaaaaacaacaaaaaaaaacacaatagaacacaacacagaaccaacaaccaacaaaaaaaaaaacaaacacaagaaaggaggcgaggcaaaccagccacatccaaaacccacgcccgcgcggacagcacttaaccacaaaaaccaacgaacccagaacataacaataacacaacacgcagcctaccaacaacaaacgtgatgaacaccaatcacctaccaaccgacgcccaactcgcgcccacgatcaaaacaaaaacaataggaataagacataaacaacaaccagatagccagacgagtagtatcccaagaacgaaacacaaaccaatctagaggtgtgaaagaaactagagaaacgccaaaccaccacaagaaaccatacatccacgtacaatcacacaaacgggtacgtcgaagtaatac

SEQ ID NO: 14233 - DNA, 2833 bp, Homo sapiens
accgtcagcgtgcgtgtgacgtcacctgcgcgcccgcctaaactcttcctagggttctttctagagtacggcagcaagttgtcagattccctagttgaatttgctttggacatcagtgtgaagcagaactgatatgccacttgaattaataaaggaagtcaatggggtgcctgaagttcagccgctgagtaaattacataaagtagatttcggatccctacagccaggttacaattatagcaagaaatatattcagggaaaactttcacttatctcttctttaacttatcgtggaaataaaacagctgttttgcagattggactacaaggacaccattgcagtggctagatttattgtttttttagcttcttcatctacaagcagagatggtaaaccttgcatatttttgaaagcatttgaagacctcaaatcaactgtttatgtttatgtcaaatctttaagagatttttctacagaatcaatgtctttggttccagcaacaaattatatatatacacccctgaatcaacttaagggtggtacaattgtcaatgtctatggtgttgtgaagttctttaagcccccatatctaagcaaaggaactgattattgctcagttgtaactattgtggaccagacaaatgtaaaactaacttgcctgctctttagtggaaactatgaagcccttccaataatttataaaaatggagatattgttcgctttcacaggctgaagattcaagtatataaaaaggagactcagggtatcaccagctctggctttgcatctttgacgtttgagggaactttgggagcccctatcatacctcgcacttcaagcaagtattttaacttcactactgaggaccacaaaatggtagaagccttacgtgtttgggcatctactcatatgtcaccgtcttggacattactaaaattgtgtgatgttcagccaatgcagtattttgacctgacttgtcagctcttgggcaaagcagaagtggacggagcatcatttcttctaaaggtatgggatggcaccaggacaccatttccatcttggagagtcttaatacaagaccttgttcttgaaggtgatttaagtcacatccatcggctacaaaatctgacaatagacattttagtctacgataaccatgttcatgtggcaagatctctgaaggttggaagctttcttagaatctatagccttcataccaaacttcaatcaatgaattcagagaatcagacaatgttaagtttagagtttcatcttcatggaggtaccagttacggtcggggaatcagggtcttgccagaaagtaactctgatgtggatcaactgaaaaaggatttagaatctgcaaatttgacagccaatcagcattcagatgttatctgtcaatcagaacctgacgacagctttccaagctctggatcagtatcattatacgaggtagaaagatgtcaacagctatctgctacaatacttacagatcatcagtatttggagaggacaccactatgtgccattttgaaacaaaaagctcctcaacaataccgcatccgagcaaaattgaggtcatataagcccagaagactatttcagtctgttaaacttcattgccctaaatgtcatttgctgcaagaagttccacatgagggcgatttggatataatttttcaggatggtgcaactaaaaccccagatgtcaagctacaaaatacatcattatatgattcaaaaatctggaccactaaaaatcaaaaaggacgaaaagtagcagttcattttgtgaaaaataatggtattctcccgctttcaaatgaatgtctacttttgatagaaggaggtacactcagtgaaatttgcaaactctcgaacaagtttaatagtgtaattcctgtgagatctggccacgaagacctggaacttttggacctttcagcaccatttcttatacaaggaacaatacatcactatggatgtaaacagtgttctagtttgagatccatacaaaatctaaattccctggttgataaaacatcgtggattccttcttctgtggcagaagcactgggtattgtacccctccaatatgtgtttgttatgacctttacacttgatgatggaacaggagtactagaagcctatctcatggattctgacaaattcttccagattccagcatcagaagttctgatggatgatgaccttcagaaaagtgtggatatgatcatggatatgttttgtcctccaggaataaaaattgatgcatatccgtggttggaatgcttcatcaagtcatacaatgtcacaaatggaacagataatcaaatttgctatcagatttttgacaccacagttgcagaagatgtaatctaatattgccatccaatttagcatacataaaatgttgccactcaccttccctgtttgagcttcttttcctgacctgagttttgtatcagcaatgttgatgatgttagcatgggtatgggattagaaaatgtccttaccttaaatctcttggcttttactgggtgcaaggtaaataatggctatggattttgttttgctttctgttttgcttttgtacaaagagacctgcttaaacaagtactgctgagataagtgtctgatcaagctacagtgtactttaagtagaaatggcaaagttgctttgttggggtgctgatactgatgattttaggataaattcatttctttaaacttgtaatacatggttttattgcttgtttctctccaggatagtagagatttctctatttcacctcaacctaataaaagtggtcagatttataatgtta

SEQ ID NO: 14234 - DNA, 3916 bp, Homo sapiens
accgtcagcgtgcgtgtgacgtcacctgcgcgcccgcctaaactcttcctagggttctttctagagtacggcagcaagttgtcagattccctagttgaatttgctttggacatcagtgtgaagcagaactgatatgccacttgaattaataaaggaagtcaatggggtgcctgaagttcagccgctgagtaaattacataaagtagatttcggatccctacagccaggttacaattatagcaagaaatatattcagggaaaactttcacttatctcttctttaacttatcgtggaaataaaacagctgttttgcagattggactacaaggacaccattgcagtggctagatttattgtttttttagcttcttcatctacaagcagagatggtaaaccttgcatatttttgaaagcatttgaagacctcaaatcaactgtttatgtttatgtcaaatctttaagagatttttctacagaatcaatgtctttggttccagcaacaaattatatatatacacccctgaatcaacttaagggtggtacaattgtcaatgtctatggtgttgtgaagttctttaagcccccatatctaagcaaaggaactgattattgctcagttgtaactattgtggaccagacaaatgtaaaactaacttgcctgctctttagtggaaactatgaagcccttccaataatttataaaaatggagatattgttcgctttcacaggctgaagattcaagtatataaaaaggagactcagggtatcaccagctctggctttgcatctttgacgtttgagggaactttgggagcccctatcatacctcgcacttcaagcaagtattttaacttcactactgaggaccacaaaatggtagaagccttacgtgtttgggcatctactcatatgtcaccgtcttggacattactaaaattgtgtgatgttcagccaatgcagtattttgacctgacttgtcagctcttgggcaaagcagaagtggacggagcatcatttcttctaaaggtatgggatggcaccaggacaccatttccatcttggagagtcttaatacaagaccttgttcttgaaggtgatttaagtcacatccatcggctacaaaatctgacaatagacattttagtctacgataaccatgttcatgtggcaagatctctgaaggttggaagctttcttagaatctatagccttcataccaaacttcaatcaatgaattcagagaatcagacaatgttaagtttagagtttcatcttcatggaggtaccagttacggtcggggaatcagggtcttgccagaaagtaactctgatgtggatcaactgaaaaaggatttagaatctgcaaatttgacagccaatcagcattcagatgttatctgtcaatcagaacctgacgacagctttccaagctctggatcagtatcattatacgaggtagaaagatgtcaacagctatctgctacaatacttacagatcatcagtatttggagaggacaccactatgtgccattttgaaacaaaaagctcctcaacaataccgcatccgagcaaaattgaggtcatataagcccagaagactatttcagtctgttaaacttcattgccctaaatgtcatttgctgcaagaagttccacatgagggcgatttggatataatttttcaggatggtgcaactaaaaccccagatgtcaagctacaaaatacatcattatatgattcaaaaatctggaccactaaaaatcaaaaaggacgaaaagtagcagttcattttgtgaaaaataatggtattctcccgctttcaaatgaatgtctacttttgatagaaggaggtacactcagtgaaatttgcaaactctcgaacaagtttaatagtgtaattcctgtgagatctggccacgaagacctggaacttttggacctttcagcaccatttcttatacaaggaacaatacatcactatggatgtaaacagtgttctagtttgagatccatacaaaatctaaattccctggttgataaaacatcgtggattccttcttctgtggcagaagcactgggtattgtacccctccaatatgtgtttgttatgacctttacacttgatgatggaacaggagtactagaagcctatctcatggattctgacaaattcttccagattccagcatcagaagttctgatggatgatgaccttcagaaaagtgtggatatgatcatggatatgttttgtcctccaggaataaaaattgatgcatatccgtggttggaatgcttcatcaagtcatacaatgtcacaaatggaacagataatcaaatttgctatcagatttttgacaccacagttgcagaagatgtaatctaatattgccatccaatttagcatacataaaatgttgccactcaccttccctgtttgagcttcttttcctgacctgagttttgtatcagcaatgttgatgatgttagcatgggtatgggattagaaaatgtccttaccttaaatctcttggcttttactgggtgcaaggtaaataatggctatggattttgttttgctttctgttttgcttttgtacaaagagacctgcttaaacaagtactgctgagataagtgtctgatcaagctacagtgtactttaagtagaaatggcaaagttgctttgttggggtgctgatactgatgattttaggataaattcatttctttaaacttgtaatacatggttttattgcttgtttctctccaggatagtagagatttctctatttcacctcaacctaataaaagtggtcagatttataatgttaatgacttaatattatccttttctaatagtctcatgtaaaatatgccgctattacaacttacaactaattgaatgagatgttaacttagtaaaatagtttgatttttacctgacagtgtttgtcaaatttgtgtatgttatttgccaaagacagatataaattacctggtttaatattagtgaagaataaataagtgcacacatttcaactgtttcatttatttgccctaagttgagctgaaaaatgatatgaggcaaagaatcgaaataggtgtggcaatgcagcagatgtttagggctgtctacatcccaggtactgtgctaagcactaaacatgtatttgatcctcacagcaacctatttttccgataagaaatctgaggcttgattgataagctgacttgactaagttcacacagtttgtaaaagctagagtctgtgccttaattcacataatctctattcagagcctgtactgttaaccactcaaggattctggaacagaagctaacagttttctgcaacgagtctttgacttaaacatctgaaataacattggaaatagattataagaggagtcagtgtgtttttctatagtttcaaaatacttttaacatcttattgtcaaaaagattggataactgactttctttgctcataataactctaaattctagttcctgagtacattaacacatcttctttacctaactaccaatgtcccccatcatcgacttatcagcttgtttgagacaatgagaaagactgattttattttcaagaatatagactcttggttcaaaacattttcaggaaaaatattttaaaaccctacagttgaacaggtgtgtttccgtgttgatgatgtgctcaggatacaaaggtgaaataaacattttttctgccttcaggaagccctcaatctagaagagtagaggtccaaaggtgccatatgttcacactgtgagcctgcaagatctccacgttaacaaaggaaaactcttcctatgaatcttcatgatgataggccatgtctcttcttatttttgttttaaataaacatccaccttatcatgaattcttt

SEQ ID NO: 14235 - DNA, 4085 bp, Homo sapiens
  misc_feature (572)..(572): n is a, c, g, or t
accgtcagcgtgcgtgtgacgtcacctgcgcgcccgcctaaactcttcctagggttctttctagagtacggcagcaagttgtcagattccctagttgaatttgctttggacatcagtgtgaagcagaactgatatgccacttgaattaataaaggaagtcaatggggtgcctgaagttcagccgctgagtaaattacataaagtagatttcggatccctacagccaggttacaattatagcaagaaatatattcagggaaaactttcacttatctcttctttaacttatcgtggaaataaaacagctgttttgcagattggactacaaggacaccattgcagtggctagatttattgtttttttagcttcttcatctacaagcagagatggtaaaccttgcatatttttgaaagcatttgaagacctcaaatcaactgtttatgtttatgtcaaatctttaagagatttttctacagaatcaatgtctttggtatgctccttgatttacaatgaagttacatccagtgtacccatcataagtcaaaaattttataaatacaaaatgcattanattgcctaatagacccattctaaagtcagaagatgttccagcaacaaattatatatatacacccctgaatcaacttaagggtggtacaattgtcaatgtctatggtgttgtgaagttctttaagcccccatatctaagcaaaggaactgattattgctcagttgtaactattgtggaccagacaaatgtaaaactaacttgcctgctctttagtggaaactatgaagcccttccaataatttataaaaatggagatattgttcgctttcacaggctgaagattcaagtatataaaaaggagactcagggtatcaccagctctggctttgcatctttgacgtttgagggaactttgggagcccctatcatacctcgcacttcaagcaagtattttaacttcactactgaggaccacaaaatggtagaagccttacgtgtttgggcatctactcatatgtcaccgtcttggacattactaaaattgtgtgatgttcagccaatgcagtattttgacctgacttgtcagctcttgggcaaagcagaagtggacggagcatcatttcttctaaaggtatgggatggcaccaggacaccatttccatcttggagagtcttaatacaagaccttgttcttgaaggtgatttaagtcacatccatcggctacaaaatctgacaatagacattttagtctacgataaccatgttcatgtggcaagatctctgaaggttggaagctttcttagaatctatagccttcataccaaacttcaatcaatgaattcagagaatcagacaatgttaagtttagagtttcatcttcatggaggtaccagttacggtcggggaatcagggtcttgccagaaagtaactctgatgtggatcaactgaaaaaggatttagaatctgcaaatttgacagccaatcagcattcagatgttatctgtcaatcagaacctgacgacagctttccaagctctggatcagtatcattatacgaggtagaaagatgtcaacagctatctgctacaatacttacagatcatcagtatttggagaggacaccactatgtgccattttgaaacaaaaagctcctcaacaataccgcatccgagcaaaattgaggtcatataagcccagaagactatttcagtctgttaaacttcattgccctaaatgtcatttgctgcaagaagttccacatgagggcgatttggatataatttttcaggatggtgcaactaaaaccccagatgtcaagctacaaaatacatcattatatgattcaaaaatctggaccactaaaaatcaaaaaggacgaaaagtagcagttcattttgtgaaaaataatggtattctcccgctttcaaatgaatgtctacttttgatagaaggaggtacactcagtgaaatttgcaaactctcgaacaagtttaatagtgtaattcctgtgagatctggccacgaagacctggaacttttggacctttcagcaccatttcttatacaaggaacaatacatcactatggatgtaaacagtgttctagtttgagatccatacaaaatctaaattccctggttgataaaacatcgtggattccttcttctgtggcagaagcactgggtattgtacccctccaatatgtgtttgttatgacctttacacttgatgatggaacaggagtactagaagcctatctcatggattctgacaaattcttccagattccagcatcagaagttctgatggatgatgaccttcagaaaagtgtggatatgatcatggatatgttttgtcctccaggaataaaaattgatgcatatccgtggttggaatgcttcatcaagtcatacaatgtcacaaatggaacagataatcaaatttgctatcagatttttgacaccacagttgcagaagatgtaatctaatattgccatccaatttagcatacataaaatgttgccactcaccttccctgtttgagcttcttttcctgacctgagttttgtatcagcaatgttgatgatgttagcatgggtatgggattagaaaatgtccttaccttaaatctcttggcttttactgggtgcaaggtaaataatggctatggattttgttttgctttctgttttgcttttgtacaaagagacctgcttaaacaagtactgctgagataagtgtctgatcaagctacagtgtactttaagtagaaatggcaaagttgctttgttggggtgctgatactgatgattttaggataaattcatttctttaaacttgtaatacatggttttattgcttgtttctctccaggatagtagagatttctctatttcacctcaacctaataaaagtggtcagatttataatgttaatgacttaatattatccttttctaatagtctcatgtaaaatatgccgctattacaacttacaactaattgaatgagatgttaacttagtaaaatagtttgatttttacctgacagtgtttgtcaaatttaaaatcatgaatattcaattttatacaaacatttatatatatatatatagatttgtgtatgttatttgccaaagacagatataaattacctggtttaatattagtgaagaataaataagtgcacacatttcaactgtttcatttatttgccctaagttgagctgaaaaatgatatgaggcaaagaatcgaaataggtgtggcaatgcagcagatgtttagggctgtctacatcccaggtactgtgctaagcactaaacatgtatttgatcctcacagcaacctatttttccgataagaaatctgaggcttgattgataagctgacttgactaagttcacacagtttgtaaaagctagagtctgtgccttaattcacataatctctattcagagcctgtactgttaaccactcaaggattctggaacagaagctaacagttttctgcaacgagtctttgacttaaacatctgaaataacattggaaatagattataagaggagtcagtgtgtttttctatagtttcaaaatacttttaacatcttattgtcaaaaagattggataactgactttctttgctcataataactctaaattctagttcctgagtacattaacacatcttctttacctaactaccaatgtcccccatcatcgacttatcagcttgtttgagacaatgagaaagactgattttattttcaagaatatagactcttggttcaaaacattttcaggaaaaatattttaaaaccctacagttgaacaggtgtgtttccgtgttgatgatgtgctcaggatacaaaggtgaaataaacattttttctgccttcaggaagccctcaatctagaagagtagaggtccaaaggtgccatatgttcacactgtgagcctgcaagatctccacgttaacaaaggaaaactcttcctatgaatcttcatgatgataggccatgtctcttcttatttttgttttaaataaacatccaccttatcatgaattcttt

SEQ ID NO: 14236 - DNA, 3811 bp, Homo sapiens
gtccgctatcgtcgaccaggcgtcgtcttactagaggaccggccagcaagttgtcagattccctagttgaatttgctttggacatcagtgtgaagcagaactgatatgccacttgaattaataaaggaagtcaatggggtgcctgaagttcagccgctgagtaaattacataaagtagatttcggatccctacagccaggttacaattatagcaagaaatatattcagggaaaactttcacttatctcttctttaacttatcgtggaaataaaacagctgttttgcagattggactacaaggacaccattgcagtggctagatttattgtttttttagcttcttcatctacaagcagagatggtaaaccttgcatatttttgaaagcatttgaagacctcaaatcaactgtttatgtttatgtcaaatctttaagagatttttctacagaatcaatgtctttggttccagcaacaaattatatatatacacccctgaatcaacttaagggtggtacaattgtcaatgtctatggtgttgtgaagttctttaagcccccatatctaagcaaaggaactgattcaagtatataaaaaggagactcagggtatcaccagctctggctttgcatctttgacgtttgagggaactttgggagcccctatcatacctcgcacttcaagcaagtattttaacttcactactgaggaccacaaaatggtagaagccttacgtgtttgggcatctactcatatgtcaccgtcttggacattactaaaattgtgtgatgttcagccaatgcagtattttgacctgacttgtcagctcttgggcaaagcagaagtggacggagcatcatttcttctaaaggtatgggatggcaccaggacaccatttccatcttggagagtcttaatacaagaccttgttcttgaaggtgatttaagtcacatccatcggctacaaaatctgacaatagacattttagtctacgataaccatgttcatgtggcaagatctctgaaggttggaagctttcttagaatctatagccttcataccaaacttcaatcaatgaattcagagaatcagacaatgttaagtttagagtttcatcttcatggaggtaccagttacggtcggggaatcagggtcttgccagaaagtaactctgatgtggatcaactgaaaaaggatttagaatctgcaaatttgacagccaatcagcattcagatgttatctgtcaatcagaacctgacgacagctttccaagctctggatcagtatcattatacgaggtagaaagatgtcaacagctatctgctacaatacttacagatcatcagtatttggagaggacaccactatgtgccattttgaaacaaaaagctcctcaacaataccgcatccgagcaaaattgaggtcatataagcccagaagactatttcagtctgttaaacttcattgccctaaatgtcatttgctgcaagaagttccacatgagggcgatttggatataatttttcaggatggtgcaactaaaaccccagatgtcaagctacaaaatacatcattatatgattcaaaaatctggaccactaaaaatcaaaaaggacgaaaagtagcagttcattttgtgaaaaataatggtattctcccgctttcaaatgaatgtctacttttgatagaaggaggtacactcagtgaaatttgcaaactctcgaacaagtttaatagtgtaattcctgtgagatctggccacgaagacctggaacttttggacctttcagcaccatttcttatacaaggaacaatacatcactatggatgtaaacagtgttctagtttgagatccatacaaaatctaaattccctggttgataaaacatcgtggattccttcttctgtggcagaagcactgggtattgtacccctccaatatgtgtttgttatgacctttacacttgatgatggaacaggagtactagaagcctatctcatggattctgacaaattcttccagattccagcatcagaagttctgatggatgatgaccttcagaaaagtgtggatatgatcatggatatgttttgtcctccaggaataaaaattgatgcatatccgtggttggaatgcttcatcaagtcatacaatgtcacaaatggaacagataatcaaatttgctatcagatttttgacaccacagttgcagaagatgtaatctaatattgccatccaatttagcatacataaaatgttgccactcaccttccctgtttgagcttcttttcctgacctgagttttgtatcagcaatgttgatgatgttagcatgggtatgggattagaaaatgtccttaccttaaatctcttggcttttactgggtgcaaggtaaataatggctatggattttgttttgctttctgttttgcttttgtacaaagagacctgcttaaacaagtactgctgagataagtgtctgatcaagctacagtgtactttaagtagaaatggcaaagttgctttgttggggtgctgatactgatgattttaggataaattcatttctttaaacttgtaatacatggttttattgcttgtttctctccaggatagtagagatttctctatttcacctcaacctaataaaagtggtcagatttataatgttaatgacttaatattatccttttctaatagtctcatgtaaaatatgccgctattacaacttacaactaattgaatgagatgttaacttagtaaaatagtttgatttttacctgacagtgtttgtcaaatttaaaatcatgaatattcaattttatacaaacatttatatatatatatatagatttgtgtatgttatttgccaaagacagatataaattacctggtttaatattagtgaagaataaataagtgcacacatttcaactgtttcatttatttgccctaagttgagctgaaaaatgatatgaggcaaagaatcgaaataggtgtggcaatgcagcagatgtttagggctgtctacatcccaggtactgtgctaagcactaaacatgtatttgatcctcacagcaacctatttttccgataagaaatctgaggcttgattgataagctgacttgactaagttcacacagtttgtaaaagctagagtctgtgccttaattcacataatctctattcagagcctgtactgttaaccactcaaggattctggaacagaagctaacagttttctgcaacgagtctttgacttaaacatctgaaataacattggaaatagattataagaggagtcagtgtgtttttctatagtttcaaaatacttttaacatcttattgtcaaaaagattggataactgactttctttgctcataataactctaaattctagttcctgagtacattaacacatcttctttacctaactaccaatgtcccccatcatcgacttatcagcttgtttgagacaatgagaaagactgattttattttcaagaatatagactcttggttcaaaacattttcaggaaaaatattttaaaaccctacagttgaacaggtgtgtttccgtgttgatgatgtgctcaggatacaaaggtgaaataaacattttttctgccttcaggaagccctcaatctagaagagtagaggtccaaaggtgccatatgttcacactgtgagcctgcaagatctccacgttaacaaaggaaaactcttcctatgaatcttcatgatgataggccatgtctcttcttatttttgttttaaataaacatccaccttatcatgaattcttt

SEQ ID NO: 14237 - DNA, 2551 bp, Homo sapiens
accgtcagcgtgcgtgtgacgtcacctgcgcgcccgcctaaactcttcctagggttctttctagagtacggcagcaagttgtcagattccctagttgaatttgctttggacatcagtgtgaagcagaactgatatgccacttgaattaataaaggaagtcaatggggtgcctgaagttcagccgctgagtaaattacataaagtagatttcggatccctacagccaggttacaattatagcaagaaatatattcagggaaaactttcacttatctcttctttaacttatcgtggaaataaaacagctgttttgcagattggactacaaggacaccattgcagtggctagatttattgtttttttagcttcttcatctacaagcagagatggtaaaccttgcatatttttgaaagcatttgaagacctcaaatcaactgtttatgtttatgtcaaatctttaagagatttttctacagaatcaatgtctttggttccagcaacaaattatatatatacacccctgaatcaacttaagggtggtacaattgtcaatgtctatggtgttgtgaagttctttaagcccccatatctaagcaaaggaactgattattgctcagttgtaactattgtggaccagacaaatgtaaaactaacttgcctgctctttagtggaaactatgaagcccttccaataatttataaaaatggagatattgttcgctttcacaggctgaagattcaagtatataaaaaggagactcagggtatcaccagctctggctttgcatctttgacgtttgagggaactttgggagcccctatcatacctcgcacttcaagcaagtattttaacttcactactgaggaccacaaaatggtagaagccttacgtgtttgggcatctactcatatgtcaccgtcttggacattactaaaattgtgtgatgttcagccaatgcagtattttgacctgacttgtcagctcttgggcaaagcagaagtggacggagcatcatttcttctaaaggtatgggatggcaccaggacaccatttccatcttggagagtcttaatacaagaccttgttcttgaaggtgatttaagtcacatccatcggctacaaaatctgacaatagacattttagtctacgataaccatgttcatgtggcaagatctctgaaggttggaagctttcttagaatctatagccttcataccaaacttcaatcaatgaattcagagaatcagacaatgttaagtttagagtttcatcttcatggaggtaccagttacggtcggggaatcagggtcttgccagaaagtaactctgatgtggatcaactgaaaaaggatttagaatctgcaaatttgacagccaatcagcattcagatgttatctgtcaatcagaacctgacgacagctttccaagctctggatcagtatcattatacgaggtagaaagatgtcaacagctatctgctacaatacttacagatcatcagtatttggagaggacaccactatgtgccattttgaaacaaaaagctcctcaacaataccgcatccgagcaaaattgaggtcatataagcccagaagactatttcagtctgttaaacttcattgccctaaatgtcatttgctgcaagaagttccacatgagggcgatttggatataatttttcaggatggtgcaactaaaaccccagatgtcaagctacaaaatacatcattatatgattcaaaaatctggaccactaaaaatcaaaaaggacgaaaagtagcagttcattttgtgaaaaataatggtattctcccgctttcaaatgaatgtctacttttgatagaaggaggtacactcagtgaaatttgcaaactctcgaacaagtttaatagtgtaattcctgtgagatctggccacgaagacctggaacttttggacctttcagcaccatttcttatacaaggaacaatacatcactatggatgtaaacagtgttctagtttgagatccatacaaaatctaaattccctggttgataaaacatcgtggattccttcttctgtggcagaagcactgggtattgtacccctccaatatgtgtttgttatgacctttacacttgatgatggaacaggagtactagaagcctatctcatggattctgacaaattcttccagattccagcatcagaagttctgatggatgatgaccttcagaaaagtgtggatatgatcatggatatgttttgtcctccaggaataaaaattgatgcatatccgtggttggaatgcttcatcaagtcatacaatgtcacaaatggaacagataatcaaatttgctatcagatttttgacaccacagttgcagaagatgaagccctcaatctagaagagtagaggtccaaaggtgccatatgttcacactgtgagcctgcaagatctccacgttaacaaaggaaaactcttcctatgaatcttcatgatgataggccatgtctcttcttatttttgttttaaataaacatccaccttatcatgaattcttt

SEQ ID NO: 14238 - DNA, 725 bp, Homo sapiens
taatttaattcagttgatctatttttcaatcctgatgccagtaccgtgttgtcttaaattactgtaagtttatagtaagtcttgaagtcatgtacatggttctccaactttgttattttttaaaatgttatttaatattctagattttctgcacttccacataagtgatagcatctgctttgcaatctctacaataaagcctctgctatttgtttgtttgttgttgttttgaggcagagtctcattctgttgcccaggctggagtgcaatggcacaatctcagctcactgcagcctccacctcctgggttcaagtgattctcatgcctcagcctgctgagtagctgggattacaggcatctgcaccacacttggctaatttttgtatttgtagtagagatggggtttcaccattttggccaggctggtctctaactcctgatctcaagtgatctgcccacctcagtcctccgaagtgttgggattataggcgtgagccactgtgcccaccccagcctctgctattttcgaaggattatgctgaatttacagattaatttggagagaattgatatcttaacaatattgagccttctaaatcatgaatgtggcatatctcaccatttatttatattttcttcagtttctctcagcaacgctccattgttttcagttctacaatgaagttgtaatggacttaatttttttgccttttcctttttatag

SEQ ID NO: 14239 - DNA, 548 bp, Homo sapiens
tttcattgccaataattttaggcaagaagttccacatgagggcgatttggatataatttttcaggatggtgcaactaaaaccccagatgtcaagctacaaaatacatcattatatgattcaaaaatctggaccactaaaaatcaaaaaggacgaaaagtagcagttcattttgtgaaaaataatggtattctcccgctttcaaatgaatgtctacttttgatagaaggtaagatatttaagtcactgttttgttagaatactccttttgcatatttttcctaattaattattgtttaatacattttacagacaacctagtacatataaagtaaaaatagtatttaaatttaacaaaattgaatatatatgttaactaggttcaaatatatataagcacacgttcataaatttatcttaattacatttgaaattgtacttcagactcaagtgttaacatttaactatattgttggattgcattttattttgtcaatgctaagctgattgtctagttaagtaataataaaagaggctgattgcttatgta

SEQ ID NO: 14240 - DNA, 224 bp, Homo sapiens
aaaagaactcccgtcccctgggtcagcttacccatcttgcgtaagtccagtgattaaatcaataatgtttccatagttgaggattgagtacggtttttctgtattcccaataacagggatttttaaacatcatatttcagtcttactatgtagccttgaagaataatgatgtatttattgaaatggaaagatgtttgagctataaagcgaaaaatcagattact

SEQ ID NO: 14241 - DNA, 477 bp, Homo sapiens
gtaaaacatgaaagttatttttgcttttcaacagataataaaataaatgatttgaaatcacttttaagaaaaaatattgattaatggaagaaatggtctttcttggatataaagatgtcatcattattttattttttgtctttaatgtgcaagttctaactttcttctttatgtatttgaaaataaaacttgtgtaagactaagaaaatatttaaaatatgcgggctaagtcatgactttcaattaaattatgtctgtgtttattggggggtaaattctcagtccttctgattcaaggaacagtgatttctcccaatattaaattctttctcttagttccactcctcatcttggaaatgtgccttccagtgccttgtaatgtaaaatagatatttttaaaacttctgaactacctcattagttttttccttcttttttctctgttattttttactctgattaaagtaaaacaaacca

SEQ ID NO: 14242 - DNA, 930 bp, Homo sapiens
caacttactggacatatatacagaaataagggtatgtcctttaaatttagcataaagggaaaacaaaagctttagcacaatgccatttaattactttaaagcgtatgcatgcatacatacaaacatattcaaggctacgtgtcaaatacaagaagggtacccattaagaagagggtaatcggagtgggtttagggataaagaagaaaaatatacatgttattatatttaatacagcaagcctttgacatatatattcttatactcacatatgatattcttactactacataaataaatatagaagctgactcaaaattgtaagtaacttatataaggttgcattatatataagagcagagctagtattcaactcatatgtctgactctaaagccaatattatttccattatgcaattataaaatgaaaagaaaaatcagtattatcccatgtcattgacatgtaataaatggcacatatttatgtacatgcatatacccatgaaaccgtctctccaattaagacaatgtatatattcattaccccaaaatgttttcttgtgctactttgtaatccctccctcttcttcctccctgtccatcccaccctcgtccccagaaaattcctaatctgtttttctatagacatttacatttttacactatagactgtttacattttttagaattttatataaatggaatcttactgtctgtactcatttcttgtcttgcacttttgctcgacataataatattaaaactcattcatgttgattgtgtatctgtagtttatgcctttatttactgagtagaattatgttatatggatggaccacagttggcttatctgctcatttgttgatgaacattttactatctcctggttttggctattacaaataaaggtatcatgaacattaatgtgcaag

SEQ ID NO: 14243 - DNA, 399 bp, Homo sapiens
atatgaatgcaagaagagaataatcatgactttatgtgaatattgagcacatagttcattttttgttgtaagttacttttaggaaatcttagtgttagagttgttcaataataatatactttatcaaacttcataggttagaatgcaatgaaaatttaccccgaatattaacttgattgccctttattctacaaatggcacacctaagaacctccctgtctatgtggattctaactgtggcccagttgtccaagacagaattataaaacggtcatttagaatataacaaaaattaataaaaatggaacattatattgatgcaatattttgctaatctatgcaatcagaataacattttttctaaaaaatacttttaagtaaaataaaaaccaatttcct

SEQ ID NO: 14244 - DNA, 293 bp, Homo sapiens
ttatttttctgttgaaccttcctgtaaattgtgttgatttttaaaagctcaggtactaagttatactgtaagtctggaaaatgtgaatcactcttgggaaacagatgtggggcaatggcagtttcatattggcttttaaattgtactgaataggttgttacttattcctctgcactaattgtaaaatagactgatataatgaaccagtttgaatcactaaacttgagctttaacctgggattatggtgagtaggtcattctgcctacaaaaattaaaagaagggtacttttaa

SEQ ID NO: 14245 - DNA, 693 bp, Homo sapiens
cagagggctccaaaccctgactgaatccaacccgtggctccagggcctgcctccttcattaccaagtgaggatccacaaagacatcggctgtctattttcttttcttttttttgagacagagtctcactctgtcagccaggctggagtgcagtggcgcgataccggctcacagcaacctttacctcctgtgttcaagtgattctcctgcctcagcctcccgagtagctgggattacaggtgcatgccaccatgcctggctaatttttgtatttttagtagagtcggggtttcaccatgttagccaggctggtctcgatctcctgacctcaagtgatccacctgcctcagcctcccaaaatgctggaattacaggcttgagccaccgcgcctggccctcagctgcccattttcatccagctgtaccctgcagcccggtttcctcagacgcagtaacactgtgtcaccagaaaggcctccttcctgtacagtggctgcactgatgaaggcctgccatccagtctgtgataggagccagtcagaggcgggaaggagcaccttaacttttccttctcttcaaggaattaggatgatccctttctacaacccgctcattgacagcatttccagtgagaagcccaaggaaagcctttacttcagagaccagagcaggaagcccagagcacgagctttgg

SEQ ID NO: 14246 - DNA, 507 bp, Homo sapiens
ggtctccctttgttgttcaggctcatcttgaactcctggtgtcaagcgatcctcccacctcgacctcccagggtgctgggattataggcatgagcccccacacctggacacaaaatacattatatactctaaagtataggattactttaagagaaggaaactaaaagtatgatggcttactttctaatccataacttcacagttttcccttcctgcagctttcacagaaaaaaccaggtgcctggtactgggtccttctctctgccaagcaggagtaaggcggcagagccaaccctgcatctgcagttagaagctctccatgacgacaggacgcagcttctcacccaactgtttgcagccttctcctttccacctactgattgactcctgagctgaagcctggtgttatcctgtttgcatgtagtttgccatgagttagaacagtgagtaaagctctgctttttaaagctgtgcagaaagattcaaaaacttctggaaaggctttct

SEQ ID NO: 14247 - DNA, 558 bp, Homo sapiens
caaacccagctcgctaaccggcgcgggcagagtacagctcccaggctcccgaagcttcccacatctggaggatgacgaccctcccctgaccacatctggagggcgtccagctgcgagccagcggggcacagctctcttctcctggcctggatccccacccccccaacccaggaagactgagaatcccatcatcgcgtgcacatctcatcccaggagggagagaggagctgccgagtagaaagcagactggctgcagggacagaagacaccaagggcaccctcccccacagctgcgcctggacctcctgcgagaagaggaagccttaggggtctttattgtaccctcaagaccccagagagaaacagaagtgctgaggggtcgcaggcaggtctcttaccctctctgggcctcgaatatttatccataggaggctgaaggtaactgcctcgcaactcattcatgagggtcaatagggacgacagtggcaagaggggttggcacactgcccagactgttccaaagccagggctggggctgccaaaaaggccacctgtgct

SEQ ID NO: 14248 - DNA, 453 bp, Homo sapiens
gacagatctatgtggtgcaaaaaggtggacggtggcagatctagaaatgtgctgcttagaatttcttcaaaagaactcactacaggaagcccagttgactggcagtcctagatgccacccctctggattcaccactacattagctgcaaggccccagggctgctccctgccttggacagcacagtgatgatatgagtgcaagcacaacacaaactcctctggctggcaactttggcctaaggactccccatcagcctggcccaaccttctgtaggactgcaccaacagtctgagattcctcttacccaatcctccttccttccatctcttaccacaggtgttaggtttatggaagtctgaaggctcttcctgcctactcctactccctccgctttgtcctacacaagtgagttcctccaataaatttcttgcatgtctaataccatctagtca

SEQ ID NO: 14249 - DNA, 389 bp, Homo sapiens
gccttggttctaggctcttgtgtctcacctggactgtggccatctctcttagtttgtgtttcagccttccaatctcgtctcctcaaatctgtcttccttcatactgttgccaaatttatctgtccaaagcatatatctgaacatgccaccctcctaaacttacaagtcttcaatgaagaaaactgcaaactttgcgaagattataaaaagattgaaatgaaagccaggagttttatgtgctctctatatgggaaaacaatatagtaatgggtttggttttttttccaggtttatttttaggtttatcacaatgcttatcaaattcccaaagcgatttttctgagaaaattggaaaaagtaattcacttataaattaaacacatgagaat

SEQ ID NO: 14250 - DNA, 341 bp, Homo sapiens
cttttaaaaatcatttcctaccagccctcaccatacttcatttcctggaacagtaaaggagttcacttcactcgcaaatgcattatgaaaaatgtttaatgattttaaaccaaagtaccagatgatatgtacaataatgcctcatttatctaggataagaatcctataataacagctctccagaacagggcagagaacctgaaaataatatggagttctgaaagcagtggccatgaaacctgttttaaaacctaatatcttttttaccagagatttttgctcaatatgcaattcattaatcttacccctaatataagtaatcagaatatctggggatgagg

SEQ ID NO: 14251 - DNA, 918 bp, Homo sapiens
gggggatacaatatggctgattaataggtacaaaaatacatctagatagaatgaataagatctaatttactggatatttaaaaataactaaaagagtggaatttgaatatgcctaatacaaagaaatgattatatgtgcttgaggtgatggataccccatttatcctgacttgatcattaaacattatatgcttgtatcaaaacatcactggtaccccataaaaataaacaaaatagttgtatacattacccataaaaacagaaaaaataaaaattaaaaaattgaatcttatactgattctccacctttaccttagcagagcctaaaaaatgatctgttatctggttattttgtcgtttactactcctagcacttatcatctgtagtttcctaatctccagcatgtaggtcttcaaattcataatacttttttctttattgttttagagataggttcttgccattgcccaagccggagtgcagtagtgctatcatagttcacctcaaactcctgggctcaagtgatcttcctgcctgagcctcccgagtagctgagactacaggtgtgtaccaccacacctggcaaatgttgtaatcccagcacttcgggagcccaaggtgggctgatcgcttaagctcaggggttggagaccagcctgggcctacatggcaaaccccgtctctttaaaaaattaaaaaattagccaggtgtggtgatgcacacctgtggtcctacctactcaggagagtgaggtatgaggattgtctgagcccaggctcacaactgccaggatgttgcagtgagctgactgtaccactacacccatggcagagtgaggcccggtctcaaacaaaactaaaccaaaaacaacaacaaaaatttttttttcaaagtatgctactttattattaactat

SEQ ID NO: 14252 - DNA, 3873 bp, Homo sapiens
cgccgggccgtgctcttgctccggcacgaggggcagcctcacgctcggctccagcggccaagagccggagaaagtcctgctggtgggcggccgcggggctgagggcgtccggcatcccggggccgctccggcccgggcggcgagagtgcccggcggtccatgcatccgccgccgcccgccgccgcgatggatttcagtcagaacagcctgttcggttacatggaggacctgcaggagctcaccatcatcgagaggccggtccgccggagcctcaagacaccggaagaaatagaaagattgacagtcgatgaagacctcagtgatattgaaagggctgtttatctgctcagtgctggtcaagatgtccaaggaacaagtgtgattgcaaatctcccatttttgatgcgacagaatcccactgagacgcttcggagagtgttgccaaaagtcagagaagccctgcatgttgcaggagtggaaatgcagttaacggctgcgatgtcatttctgaccattctgcaggacgaatcagtgtcaattcatgcatatacccactcattcctccaagtcattctcctgcatctggagcacagggacacaggtgtcagcaatgcatggctggaaactcttctgtctgttatagaagtattgccaaaagaaaccctacggcatgagattttgaatccacttgtttccaaggcacaactttcccaaacagtccagtctcgtttagttagttgtaaaattttaggaaaattgaccaacaaatttgatgcccacaccattaagcgagaaatacttcctctggtaaaatcactctgtcaagatgtagaatatgaagttcgatcttgtatgtgtcggcaattagaaaatatagcccagggcattgggacagaacttacaaaaagtgtggtgctccctgaattaatagaactttctagggatgaaggcagcagtgtacgacttgcagcttttgaaactttggttaatctgcttgatatatttgatacagatgacagaagtcaaactatacttcccttagtgaaatcattttgtgaaaaatctttcaaagcagatgaatcaattcttatttctttatctttccatttaggaaaactatgtcatggactatatggaattttcactccagatcagcacttgagatttttggaattttataagaaactttgtacattgggtttgcaacaagaaaatggacacaatgaaaaccagattccaccccaaatcctagagcaggagaagaaatatatttcagtacggaagaactgtgcttataactttccggccatgattgtttttgttgatcctaaaaacttccacatggaactctattctacattcttctgcctttgccatgaccctgaagtaccagtcagatacactattgctatttgcttttatgaagtatctaagcttctgaattctggagtatatttaatacataaagaactaataacattattacaagatgaatcactggaggtactagatgctcttatagatcatcttccagaaatcttggaacttatgtctactggtggagaaagcagtgttcaagaaaataagttatcttctctgcctgacttgattccagcactcacagctgctgaacagcgagctgcagcctctttaaaatggagaactcatgagaagctacttcagaaatatgcctgcctgccacatgtcatatcaagcgatcagatttattaccgtttcttacaaagaatgttcacaatcatgatgacaaataatgttttacctgtccaaaaggcggcttcacgaactctatgcatttttctgcgttataatcgtaaacaagaacagagacatgaggtcattcaaaaattaattgaacaattgggccaaggaaaaagttactggaatagacttcgatttttggatacctgtgaatttattatagagatattttcaaaatcatttttctgtaaatatttctttctacctgctattgaactgacacatgatccagtagcaaatgtgagaatgaaactttgctacctgttgcccaaagtgaaatctactctgaagattcctgctgataagcatctacttcagcagttagaaatgtgtgtgaggaaactcctgtgtcaagaaaaagataaagatgttctggctattgtaaaaagaactgtattagagttggacagaatggaaatgtctatggatgcttttcagaaaaagttttatgagaaagatttgttggatcaagagaaagaaagagaagaactacttcttttggaaatggaacaattagagaaagaaaagcaacagaatgatggaaggcccatgagtgataaaatgtttgaaaagaaacgtagagacactaagacaccaacgcaaagtctgcccaagaacatccccatttctgttcctggaccctcttctgtcaccccatcgacaagtaaagaaatcaagaaatccaaactgattcgaagccagtcttttaataatcaagcttttcatgcaaaatatggcaacttagagaaatgtgctagtaaaagttctacaacaggatatacaacttctgtctcagggttaggaaagacttctgtgctttcactagctgatgattcattccggactcgtaatgccagtagcgttccatcttccttttctcctaatactcccttaccgagtacttcccgtgggacaggtaactcagttgaccccaagagcagtggaagtaaagatacacaaccacggaaggctaccttaaaatccagaaaatccaatccttaaatcaactgcttgatgaaggaggcaaaacaaaggcagcaggagataatgtgattggtacacaaaagctaaagcagtggctggggctttgtttttaaattttgggtttttttttttgttgttgttaatgagcagaaagagagacataatgacagctgatgttaaacttttcatatttcaaattagattccctaggaggtataatatatatttcttgagtaataatgtggttacggaattccaatgttatagtgaagtgtaatgaaaaacatctctaggaatgtgctttaaccactgctgcaaaagagacaagtctgcatttatttgtgcaggaaaccagccatttaattgttctagagttttagcatttaaaaatcgtatgaaagtctacatcagctgaattgtcctagcttgataagcacttggagggggacttggaaggtgagaaagatactgcattttctcatgagtctccaagcccacttgaaaagtcacactgaaaggatgcaaatagccgtctgcgattttggcggccctccggattgtggtgacaatatgttgtacccggacattcccaaatttaaatttggcagtgaaaattccacaaagatttctggtaactttgagctataaataccttaaaaataatagattgatgattttctttatttcctagagaatttattttataaatactttgtttacattttagattgtacttgtctttatttaaaatgatgaatctagtctgaatcagctgttattccaagctatcatgcttaagctatgtcaacagcatttatttgtactaatgctaatatttccatcaaaatttgcctgtggaatatatacagttcttaattttaaactgtcagttcttgagatataccgtgtgaagctattgtcagcttctctatttcaaaatgcaatcagcatataactatattgatattagaagatatttgttttttaaaatatattgatgtatgataaagatgatctaatttgtgaatgcatatgtatgtgtggttactttttataatgtgaaataatgaataatgaatttactcaaaataaaacataggttaatgagat

SEQ ID NO: 14253 - DNA, 904 bp, Homo sapiens
cgccgggccgtgctcttgctccggcacgaggggcagcctcacgctcggctccagcggccaagagccggagaaagtcctgctggtgggcggccgcggggctgagggcgtccggcatcccggggccgctccggcccgggcggcgagagtgcccggcggtccatgcatccgccgccgcccgccgccgcgatggatttcagtcagaacagcctgttcggttacatggaggacctgcaggagctcaccatcatcgagaggccggtccgccggagcctcaagacaccggaagaaatagaaagattgacagtcgatgaagacctcagtgatattgaaagggctgtttatctgctcagtgctggtcaagatgtccaaggaacaagtgtgattgcaaatctcccatttttgatgcgacagaatcccactgagacgcttcggagagtgttgccaaaagtcagagtccatgaggatgcacacttatttatccagagagtatggatctcacatatgtttgtccagagggtgtgactctgtggaggagaacacttactgtggacagtcccagatgttgaagtcagcacaacaagagaaaaacccaaatcctgataagacttgaggatttttcgaaaattaaatgcaaaatagttggggcaaatgttgctgcgggagtcaagactaagtaatacagtaagaagatatgaagttggagagcttctcatgttcttcctttgtataaagtttgcatacgtacaaaacccaggactttaatgactttaagagggggcagaattgcatctcttggaagttaacagactcatgtgaactggaatgtacgttgtggccctcacaattgattttaatatttatttgcaaagtcctttctgtttctaaataaaagctgtgccttctg

SEQ ID NO: 14254 - DNA, 3966 bp, Homo sapiens
cgccgggccgtgctcttgctccggcacgaggggcagcctcacgctcggctccagcggccaagagccggagaaagtcctgctggtgggcggccgcggggctgagggcgtccggcatcccggggccgctccggcccgggcggcgagagtgcccggcggtccatgcatccgccgccgcccgccgccgcgatggatttcagtcagaacagcctgttcggttacatggaggacctgcaggagctcaccatcatcgagaggccggtccgccggagcctcaagacaccggaagaaatagaaagattgacagtcgatgaagacctcagtgatattgaaagggctgtttatctgctcagtgctggtcaagatgtccaaggaacaagtgtgattgcaaatctcccatttttgatgcgacagaatcccactgagacgcttcggagagtgttgccaaaagtcagagtccatgaggatgcacacttatttatccagagagtatggatctcacatatgtttgtccagagggtgtgactctgtggaggagaacacttactggaagccctgcatgttgcaggagtggaaatgcagttaacggctgcgatgtcatttctgaccattctgcaggacgaatcagtgtcaattcatgcatatacccactcattcctccaagtcattctcctgcatctggagcacagggacacaggtgtcagcaatgcatggctggaaactcttctgtctgttatagaagtattgccaaaagaaaccctacggcatgagattttgaatccacttgtttccaaggcacaactttcccaaacagtccagtctcgtttagttagttgtaaaattttaggaaaattgaccaacaaatttgatgcccacaccattaagcgagaaatacttcctctggtaaaatcactctgtcaagatgtagaatatgaagttcgatcttgtatgtgtcggcaattagaaaatatagcccagggcattgggacagaacttacaaaaagtgtggtgctccctgaattaatagaactttctagggatgaaggcagcagtgtacgacttgcagcttttgaaactttggttaatctgcttgatatatttgatacagatgacagaagtcaaactatacttcccttagtgaaatcattttgtgaaaaatctttcaaagcagatgaatcaattcttatttctttatctttccatttaggaaaactatgtcatggactatatggaattttcactccagatcagcacttgagatttttggaattttataagaaactttgtacattgggtttgcaacaagaaaatggacacaatgaaaaccagattccaccccaaatcctagagcaggagaagaaatatatttcagtacggaagaactgtgcttataactttccggccatgattgtttttgttgatcctaaaaacttccacatggaactctattctacattcttctgcctttgccatgaccctgaagtaccagtcagatacactattgctatttgcttttatgaagtatctaagcttctgaattctggagtatatttaatacataaagaactaataacattattacaagatgaatcactggaggtactagatgctcttatagatcatcttccagaaatcttggaacttatgtctactggtggagaaagcagtgttcaagaaaataagttatcttctctgcctgacttgattccagcactcacagctgctgaacagcgagctgcagcctctttaaaatggagaactcatgagaagctacttcagaaatatgcctgcctgccacatgtcatatcaagcgatcagatttattaccgtttcttacaaagaatgttcacaatcatgatgacaaataatgttttacctgtccaaaaggcggcttcacgaactctatgcatttttctgcgttataatcgtaaacaagaacagagacatgaggtcattcaaaaattaattgaacaattgggccaaggaaaaagttactggaatagacttcgatttttggatacctgtgaatttattatagagatattttcaaaatcatttttctgtaaatatttctttctacctgctattgaactgacacatgatccagtagcaaatgtgagaatgaaactttgctacctgttgcccaaagtgaaatctactctgaagattcctgctgataagcatctacttcagcagttagaaatgtgtgtgaggaaactcctgtgtcaagaaaaagataaagatgttctggctattgtaaaaagaactgtattagagttggacagaatggaaatgtctatggatgcttttcagaaaaagttttatgagaaagatttgttggatcaagagaaagaaagagaagaactacttcttttggaaatggaacaattagagaaagaaaagcaacagaatgatggaaggcccatgagtgataaaatgtttgaaaagaaacgtagagacactaagacaccaacgcaaagtctgcccaagaacatccccatttctgttcctggaccctcttctgtcaccccatcgacaagtaaagaaatcaagaaatccaaactgattcgaagccagtcttttaataatcaagcttttcatgcaaaatatggcaacttagagaaatgtgctagtaaaagttctacaacaggatatacaacttctgtctcagggttaggaaagacttctgtgctttcactagctgatgattcattccggactcgtaatgccagtagcgttccatcttccttttctcctaatactcccttaccgagtacttcccgtgggacaggtaactcagttgaccccaagagcagtggaagtaaagatacacaaccacggaaggctaccttaaaatccagaaaatccaatccttaaatcaactgcttgatgaaggaggcaaaacaaaggcagcaggagataatgtgattggtacacaaaagctaaagcagtggctggggctttgtttttaaattttgggtttttttttttgttgttgttaatgagcagaaagagagacataatgacagctgatgttaaacttttcatatttcaaattagattccctaggaggtataatatatatttcttgagtaataatgtggttacggaattccaatgttatagtgaagtgtaatgaaaaacatctctaggaatgtgctttaaccactgctgcaaaagagacaagtctgcatttatttgtgcaggaaaccagccatttaattgttctagagttttagcatttaaaaatcgtatgaaagtctacatcagctgaattgtcctagcttgataagcacttggagggggacttggaaggtgagaaagatactgcattttctcatgagtctccaagcccacttgaaaagtcacactgaaaggatgcaaatagccgtctgcgattttggcggccctccggattgtggtgacaatatgttgtacccggacattcccaaatttaaatttggcagtgaaaattccacaaagatttctggtaactttgagctataaataccttaaaaataatagattgatgattttctttatttcctagagaatttattttataaatactttgtttacattttagattgtacttgtctttatttaaaatgatgaatctagtctgaatcagctgttattccaagctatcatgcttaagctatgtcaacagcatttatttgtactaatgctaatatttccatcaaaatttgcctgtggaatatatacagttcttaattttaaactgtcagttcttgagatataccgtgtgaagctattgtcagcttctctatttcaaaatgcaatcagcatataactatattgatattagaagatatttgttttttaaaatatattgatgtatgataaagatgatctaatttgtgaatgcatatgtatgtgtggttactttttataatgtgaaataatgaataatgaatttactcaaaataaaacataggttaatgagat

SEQ ID NO: 14255 - DNA, 1578 bp, Homo sapiens
cgccgggccgtgctcttgctccggcacgaggggcagcctcacgctcggctccagcggccaagagccggagaaagtcctgctggtgggcggccgcggggctgagggcgtccggcatcccggggccgctccggcccgggcggcgagagtgcccggcggtccatgcatccgccgccgcccgccgccgcgatggatttcagtcagaacagcctgttcggttacatggaggacctgcaggagctcaccatcatcgagaggccggtccgccggagcctcaagacaccggaagaaatagaaagattgacagtcgatgaagacctcagtgatattgaaagggctgtttatctgctcagtgctggtcaagatgtccaaggaacaagtgtgattgcaaatctcccatttttgatgcgacagaatcccactgagacgcttcggagagtgttgccaaaagtcagagaagccctgcatgttgcaggagtggaaatgcagttaacggctgcgatgtcatttctgaccattctgcaggacgaatcagtgtcaattcatgcatatacccactcattcctccaagtcattctcctgcatctggagcacagggacacaggtgtcagcaatgcatggctggaaactcttctgtctgttatagaagtattgccaaaagaaaccctacggcatgagattttgaatccacttgtttccaaggcacaactttcccaaacagtccagtctcgtttagttagttgtaaaattttaggaaaattgaccaacaaatttgatgcccacaccattaagcgagaaatacttcctctggtaaaatcactctgtcaagatgtagaatatgaagttcgatcttgtatgtgtcggcaattagaaaatatagcccagggcattgggacagaacttacaaaaagtgtggtgctccctgaattaatagaactttctagggatgaaggcagcagtgtacgacttgcagcttttgaaactttggttaatctgcttgatatatttgatacagatgacagaagtcaaactatacttcccttagtgaaatcattttgtgaaaaatctttcaaagcagatgaatcaattcttatttctttatctttccatttaggaaaactatgtcatggactatatggaattttcactccagatcagcacttgagatttttggaattttataagaaactttgtacattgggtttgcaacaagaaaatggacacaatgaaaaccagattccaccccaaatcctagagcaggagaagaaatatatttcagtacggaagaactgtgcttataactttccggtaataaatatgtatttatatttactgaggatttttattataactttaaaatatgtgcatagatggcattcaaaatattgccatttttgacacttgctgcttgcattatgtctagcatacatagtatgtgcagagtaaatatttgtgaaatttatatctctacgtataaatcagaataatagacacatatttggatctttcaaatatgatttttagttaaattacaattcagagaacatgatttcaatttaagtgaaacgattataatattag

SEQ ID NO: 14256 - DNA, 308 bp, Homo sapiens
gttattatccaaatctctagatgaagaaatggtggcttagaaaatgtatttgatgcattaaaaataatgaaaattaatgctgaggagaaatgaagatagaaataaaatggacttgactaccaggctaagaggttgttattttattgaaaaactagtaaggtaaccattaaatgtattcattcaaaaaaatgcataatcagaactgcacttgaagaatatgcatctgttagcttcatccaggagtatgaataaagagatgagagattcttagtaagattttaaaaatttatggttaaaactgctttgaa

SEQ ID NO: 14257 - DNA, 201 bp, Homo sapiens
gttccctaaatagccttatcagtaattgtcctgatttcagggtgaatttgtttagaattctttaaaaaaccctcagtatctggctgttgtgtttttcctgaaggattaacagtgaataatgataatcactagggttcatcaaactctaagacttatatttttctgagtggtatgaatctttttctcattaaggtataattt

SEQ ID NO: 14258 - DNA, 319 bp, Homo sapiens
ttacccagggaccttccccatctcccatgtccttttttcttatggcccagacctggaagtcctcctaagtgcttcctctccctcagcctaaccgctctaccactatccagttgcaggtacactcttcctccttcacctcaccctttgatgccatctccactgctaccatcttgggtccaaccctcatgttatcttgcctgaaaaccgctaactttataactagtctctgttctatcaacatcctcttcctgactgtcatccacagatccactttctaaaatgccatcatgacgcttccatgcttataccactagctttt

SEQ ID NO: 14259 - DNA, 460 bp, Homo sapiens
ccattagctatcgtctcctccttgttttgttcccaaatgacagaataatgttaaagagtgagcagaaaggcagcagggcatagtgaatggaaggcatgcatcagctggaatcatgaatcttgcctggttcagcctcctgcaccaagctgcctaatctgagtctatctctttaaaaaatttctgataatgataatgactaccttatgtcagaaaattagataaaatgcacagacaaaatgctctctctcagtggaggggttataggtcattttgttgatgtttttgttttatttgaggtcattttaatttccttcttttgggttttcagtattttaaaaaattctttgattggcatgtattcattcatagattcagcattcagcaaatgtttatttactcctgttacaggctatagatgttaaacaggaaaaaataaaacacaatagaaaatattttgata

SEQ ID NO: 14260 - DNA, 421 bp, Homo sapiens
gctgggcggggccccggcggggagaagaggctctgtgcagccggggcggatcgcggggaagttcctctcagcgcctcaggtgtctgggcgtgtgcagctgtgttggcgcacacttgccgctacagcccttctgtcagccctttagcttcgatggggcgctggtggccgcctccccctaggttgtggatgagtcttggcctagggttcagggccctccggccgcgggaggatctcccgccaagcttgttgcttttccaagttagtgcctggcgtgtgtgtgggctgcataggggcacccctcgaggcccccttctcttctcccgcctggactgcgttcacgtttctaacatttctcagccccttctccccacatctggccttggcttacatagagtaagtttgctgtgagcacttgcctcga

SEQ ID NO: 14261 - DNA, 443 bp, Homo sapiens
aaaggcggacagagctgtgggccagcggctggcaaaaggccttggggcaaccagaactctccatcagggcattgcagcctttaagagaaggtgggaactgctgcatttgccccgccctggatctcagcccaggaaacccactgtcacagaacaacagtcttaggagctttcttatcgagacagtaggaagcttttaaacacatcagtggtgaacgccaggcgggtctctggaactttttcatcttggaaaactgaaactctctactcattgaacactgtacacttgattgagagcaaattgtatgtgtttttgccagcctcttcctgaaggcggacatttgtcttgatctgtattggaattctttatctatgtttaaattttgtatgagattgaattcatgtgtatgtgaactgaaatgaaattaaaatgtcaaactacaaaa

SEQ ID NO: 14262 - DNA, 535 bp, Homo sapiens
aactcagaggctcaccctgtggtgttttccctgctgggcctgatcttaggatagtaaaattgtttctcattgctcaaggaagcttctcgttttaccatcatatttactgttctgtggcacattttacaattaatcaacaaaattgttttggtgactttgtatctcttcataatttctgcttccttaaaacggagtgcatcttattttgtttctcagtttaaaaatgtctgtattttgcgtcaattttggcctgggctggcggcacactctctagacttcagcagcaccagcagctggaaacagcataggtgtgattcttcaaaagtgctgtcatcattgagtgaggagctgaggtccaggaagagcaggccaggctggagcaggtatcttgtagttttatcagtgcagccccaaggtagtgtcttggcctcagggaggccaccacggcctgcgttggacagccgaaacctggtttacgccctctcctgaatttgattgtgaagaaacatcagacaaaccccaatcgagagatatt

SEQ ID NO: 14263 - DNA, 401 bp, Homo sapiens
ggaggctggaagtcaaagatcaaggtgctggcagattctatgtcttgggagggcccacttcctcatttgcagacagccatcttttcaccgtgtccttccatggtggaaggcgtgatccagctctcttgggcctgttttataaggaaactaatcctgttcatgagatctttaccctcatgacctaattatctcccaaaggccccatctccaaacaccattacattagggattaaacctgaataatatgaattttgggaggacacaaacattcagaccacagcagctcttcttttattaagtcctccccttggtagtgtcattccctgtagggctacaaaggaataatccaatctggggacagtgtgaacatcaaaatcaattgaggacaacagtggattata

SEQ ID NO: 14264 - DNA, 1406 bp, Homo sapiens
agcgggggtaccgactctggggaccctcgccgaagagtcccaagggttccaaggccagagagaggtcctggtcttgattgctggcatgtttactcttccaagtacactgagatcaaatgcaaagacaaaccatcaaagaaaataactctaaaatctggacatgatatacaaagtgactgcctaaaggagctgaagagaggacataagtggatcgcctctgctgttgcatgttggcttggagaacagaagatgaggagccaaataagcaagtccttcagccccaggcttctagcacggggctgcatgtaggctatgcattctggggagtgaggagatcatgaatgctgaaaataaatgaaggaatccagaaaagcaagagtcaaagaaggcatctgcaggccaaatctctgatcaacccctgacccacatacacacaaaatacactcaaagcagctcagctaaagacaaagatctgcactcagagtagagctgcctccccagaaacagagctcgcagttcaggcccagcaagaaaattacctgcaaaacaaaggaaaaacaacactcatcagagaaaaagaacagaatctggaatcttcacaacctagcattcatcatatccaagattgaaacccaaattatgggacatatttaaaaaccaggaaaatggaacgtagtcttaagagaaaagtcaatcaaatctgacctggagatgaataatatattgaaacttaaaaggcaagggttttaatttttgttttcttgttttttttctgtttgtttgtttgtttttgtttttgttttttgagatggaatcttgctctgtcgcccaggctggagtgcagtggcgcaatcttggctcactgcagcctctgcctcctgggttcaaggaattctcctgtctcagccttccgagtagctgggactacaggcgcacgccaccacacccagctaatttttgtgtttttagtagagacagggtttcaccatattggtcaggctggtcttaaactcctgacctcaggtgatccacctgcctcggcctcccaaagtgctggcattacaggcatgagccaccgcacccagccttgttttctggggttttgttgagatgaggtctcactctgtcacacaggctggagtgtagtggtgcgatcccagctcactgcagctttaaactcctgggctcaagcaatccttttgcctcagctagcatgctcagttaatttttaaatattttttgtagacatggggtcttgctatgttgcctaggctggtcttaaactcctggcttcaagcaatccttccaccttggcctcccaaagtggtaggattataggtgtaagctctcctgcccagccggcaagggcttgaaagtgttatgttattttatagttttaggaggtt

SEQ ID NO: 14265 - DNA, 423 bp, Homo sapiens
agacccagaaagataataaataagtttatctgtcaggtttggcatgtggctgcagcagactcaaaaggtgattttgagtctgaaaaatgcatactactaatctacccccaacttcgtgtcctctacaagtgaggactgtagctccgtattggcacactttgcaaccctctatgtgttctgcagatggcagattttcctgggtctttcttgtcctttatgacagccaacatggacaaccaaacatgtgagtgaagacacctccagatgatttcagtcccagccaccaggtcaccattagcctttgagtcttgctagctgaggccccagacatcatagtgcagaagaaagctgtcttttctgtatcctctttgaattgttgacccatgggaagtgtaagcaaaataaagtgtttgttttctgcta

SEQ ID NO: 14266 - DNA, 399 bp, Homo sapiens
agtcttgtgagaatcaaataaggtgtttaagtaaagtgcctagtactttggcactcagtaaagaaatggtagctgctaccattattgtcattattattttaatactttttttaaagcctcccttttcagacacgcataacatttcagcctgaattgagaaattctatggcattttgcataatgctataaaatcctggttttactctttcaagcaagaatttctaatgtttatttttaaagtttgaatgagaaggtggtaggatataatagcatggccacctgaaaaaggtactggaaagtttgatcatcccttctcctcttgaagacccgcatttctgtctgtttacattttgaaaaggtctacaagggcccaactgtatacgccatgatgcttatgct

SEQ ID NO: 14267 - DNA, 286 bp, Homo sapiens
agacctactgatctagaagacggatctctctgagccataatttctgctcaaggcttgctaggggagatccttctaacttggctttatacacaagaagctagctcacaaaaatgtcggtattctagtagctatgcctttcattgaccagacctgagatttggcctctccatcacttcctctgcaggtgatgtagacatcatttctgctgacatctatgttgatgcagttctagagtcatctgtgtccctattatcctgaaaatgaaaattgatagcaaaggcagata

SEQ ID NO: 14268 - DNA, 244 bp, Homo sapiens
gtaaaacaaagaaacaaaaagaaaccagtccacagaaaccagagttgaggcatgtgactcagtgttgactctcaaggtgattaccctgtgaaactatgtactgttcttgcataacaatttttggaatcttttgctttgaaatgccttcagaatcagttcatgcagaatacacattatatacattataaataccaaaataccttattatatattttgcttaaacattgaattatctgttaaattt

SEQ ID NO: 14269 - DNA, 412 bp, Homo sapiens
gtgagaagtgatggaacagagtgccatgataagaaacggtataaaagtccttattttagttttggtggtcagggaaggtacgtttgaggatatgacattggagctgagactagaaaaatgagaaggagccaggggatagggaggaagaattctaagcacagctaattgtaagagcaatgtgaagtgaggagaaagtctgggcctgttccaaggatggatagaaagctaaaatagatgaagtttcctgaaaaaggaagattgaagcagaaaatgaggtaataaattattgccaacagtttatttcataaatttaactaaaatttcctggcatatttacagattacaagatgcccagtagattctgccagctttctattgcttaaaagtgaataaaaagacaaacacagcaatt

SEQ ID NO: 14270 - DNA, 549 bp, Homo sapiens
atcttacaggaagatatagtcactcttgaattatagtgtgagatacaaaactggtgtgaaaagtgaaatgaagagtctaaatgataaacttcctaaaaatctcaaaaatatcataaactattaataatggtttgttttataatttattttttgttttttttatggaatagtgtgttgtgtttcttaatagctacaacaagaatggccatccatccaatttcttttataatacaggttgagcatccctaattgagaaaaatcaaaattcaaaatgctccaaaactgaaagtttttgagcaccaacgtgactctcaaagggaatgctcatgagagcatttcagagttcagattttcagattaatgatactcaaccagtaagtataatgcacttattccaaaatctgaaaaaatttgaaatctgaaacacttctggtcttaagcgtttcaaataagggatactcaatctacagtattaaaaagaagaaaggaaaagtctcaattgctctactagtgcttaccattctttaaagaaaaatacctagttgtctt

SEQ ID NO: 14271 - DNA, 428 bp, Homo sapiens
ctttcaagaagaaattcaaaaatatgttggcctctgcctcaaatgagtgttggctgtgccatggtcccccctgtttttgaaaggaagctgaagtgagtggttagcttgggatatgtggtgtccttcctgttggcagttttccccttttcttttcccagtaagttggcaataaggaagcaaagaaagaggaaatgcctggtgttcctagttccattcttcttcaactaagttggttgcacaaaacaaatttaatttaaacaacatttttcacaatactaaacgacctacactttcaagtgttatcagagaacgttatgtttaggtttactctgagttgctatgattcatgaatataagaataaatacttcttgtgtttttataagaatatattttccattcattatcataatgttaacttttccatagt

SEQ ID NO: 14272 - DNA, 574 bp, Homo sapiens
gtttatgtatttactcagtattctgtagtaacaaacgtttgatacaccaagcaacatgaatgaatcttaattcacactgagcaaaagaaaccagacacacagcactgtaggatttcatgtatgtaaaaatagaagagagaaagctagtctatagtggctgaaagcagatcagtggttgccttgggctgggatggaggaggcagggcctgactgccaaggggcaccaaccaaccttctgtggtgaaggaactgttctgtttcttgattgtggaggtggttacacacgtgtagacattggtcaaaactcactggactgtgctttttaagtgtatgcattctattatatatcagttatgacttagttaatttttaaaagtagcagccttggaaattaattttaaaggtggagttccaatattaagtagctttcagaacaactctgctgatttttagatgatttatgtacatgagcaaagggttactttggaggcaggatggctcggctttgtgctagatgcctagacaatttagtctcaaatgtataatcttgtctgagttagctttgttttaccct

SEQ ID NO: 14273 - DNA, 687 bp, Homo sapiens
ggttgcttagactgcggcccacgtggaaggctcttagcaccctgcctggcccgaggagaaaaacaagcaaatcctagtgctgggcctggatggagcaggaaaaaccagtgtcctgcactctctagcttcaaacagagtccagcacagtgtggcacccacccaaggtttccatgcagtttgcatcaacactgaagacagccagatggagttcctggagattggtggcagtaaaccttttcggtcctactgggaaatgtacctatccaagggattgctgctgatctttgtggtggattcagcagatcacagccgattacctgaagccaagaaataccttcatcagctaattgcagcaaacccagtacttcctctggttgtgtttgcaaacaaacaggatcttgaagcagcctatcacattacagatatccatgaagctttggcattatctgaagtgggaaatgacaggaagatgttcttgtttggaacctacctgactaagaatggctcagagataccctccaccatgcaagatgccaaagacttgattgcacagctggctgcagatgtgcagtgaccaggactcagcccactgtgcggctcacgactgagatgtcatcagtgttgaatggcaggcttgaagccaaaggtttccacctcaaataaaaattaagccatttcctatttaaa

SEQ ID NO: 14274 - DNA, 765 bp, Homo sapiens
  misc_feature (9)..(9): n is a, c, g, or t
gcggccgcncccacttcagataatgacaaagcaagggaaggagacaaacaaagagaaggaacaatttaagggacaagaagagaaaggggagaacaaggacagcaccttgacaaggaccccgctcgagccgctggagaaaaacaagcaaatcctagtgctgggcctggatggagcaggaaaaaccagtgtcctgcactctctagcttcaaacagagtccagcacagtgtggcacccacccaaggtttccatgcagtttgcatcaacactgaagacagccagatggagttcctggagattggtggcagtaaaccttttcggtcctactgggaaatgtacctatccaagggattgctgctgatctttgtggtggattcagcagatcacagccgattacctgaagccaagaaataccttcatcagctaattgcagcaaacccagtacttcctctggttgtgtttgcaaacaaacaggatcttgaagcagcctatcacattacagatatccatgaagctttggcattatctgaagtgggaaatgacaggaagatgttcttgtttggaacctacctgactaagaatggctcagagataccctccaccatgcaagatgccaaagacttgattgcacagctggctgcagatgtgcagtgaccaggactcagcccactgtgcggctcacgactgagatgtcatcagtgttgaatggcaggcttgaagccaaaggtttccacctcaaataaaaattaagccatttcctatttaaa

SEQ ID NO: 14275 - DNA, 483 bp, Homo sapiens
gacaggtctgcactcatatttatacccacttttaactatatgcgaattaaggggcagtttatgcagaaatttctaggaaaagggtggcaactcttaagtcatcaggttgttgctgtggaaaggggcggtaacttctgggtgttgccatggcaatggtaaactgacatgacatattggtgggtatgtcttatagaaaatggcttccacccctgacctacctgttttagttagtcctcaatttggtcaggtgtctgagccctgcctcctacctctccaggacatgggcagtagcctggctgggcactttaaaaaggacagttgtatccaagcctttgatttttttctgtcaattttaacattttctgtctcagaaatatctatttcatctagattttcacatttttttcataaaattgttcatattttaatattttatctaggttgtctaaaacctgtttctcccttttaattctattctttctt

SEQ ID NO: 14276 - DNA, 797 bp, Homo sapiens
gaccaggtgtatgctgggagctagagagaagctgagttcacctcacagttctgcaggtagtcagaatatctgctgatagtgggggctagccatgttggcagtctgatcctctctactctgaacatgctgttctggagaattcatggcttccaaccctggtatatcttgccagcaaatgctatatgaatggttattccacaactaagctataggtcacccagaaacccccaggacagctgtcaggaggccaagactcagtataaggaggctacagggcagactactgggtttgacatgtaatgtggctcttatgctgacactggtaccccatgtttcttgccagaggctggagtaccattccctcatggaggttcttcacctagtgaccttcattgccatcttcatgggaatccccacacacccttactgcagttgggtttttatagcctccaggaccctgcctcccaccctgagctccagcattctgtcctgataatgtcatagccagttctggtcttcgtgttacttgagagggttgtagccagagaactagttgtgggtccccatcttgtacctttccttgagtaggtcaaagcctgctctcacacgagtctggggaagcccggcagcctggccttgcctctccaatgggaggggaaatgaggagggagtaggctgtctgaactgcttggtatgcctgacagtggactctctttctgctcactgaccctgagaaacagctttgtcctttatggctcctccttgactgtttcccgccctccaactgtcattatcct

SEQ ID NO: 14277 - DNA, 311 bp, Homo sapiens
gagactggagggtcgcatccggagctgggcccggggacgcccgctggtgggaagggtgcgcccgcgtcggaggccgcggctgaccctgctccggcgccgccaggtacggcatcagcccggacagcatcatcctgtacgggcagagcatcggcacggtgcccaccgtggacctggcctcgcgctacgagtgtgccgcggtggtgctgcactcgccgctcacctcgggcatgcgcgtcgccttccccgacaccaagacctactgcttcgacgccttccctaacatcgagaaggtgtccaagatcacgtcgccc

SEQ ID NO: 14278 - DNA, 253 bp, Homo sapiens
gcagaaagtgtgtggatagcgccacccaaaccagtcctactgttataaaagcaaatcaaagcactcactcctcctttttgctatgcctctgatttactttcattctttgtcctttttccccttttataccacacttttattcattcactacaattatattttttcattctcttctatgttctgtttttgaaaaaatttggtaacaatttctagagtgacctcatcaatttaaagtacaagctttccatattag

SEQ ID NO: 14279 - DNA, 297 bp, Homo sapiens
atcagatggaggcaagaaagcggcccttccactctgtccacaggaggtttatagccgtgttgtccaatagtcaccactagccacacatggctattgagaacttcaaatgtggctagtccaaactgagatgtgctgtgagtgtaaaatactcactggacttcataaacttagtatgaaaattaaaaatgtgctgggcgtggtggctcacgcctataatcctagcattttgggaggccaaggctgacagattgcctgagttcagaagttcaagaccagcctgagcaacatggtgaaatg

SEQ ID NO: 14280 - DNA, 531 bp, Homo sapiens
gaatgtgagaagtttgaatacaaatatccttcaaaacaggagttttaatctctacgctatattcccaaaacctaaatggagtgagaaaatgcatctttaatttttcttttatattagattaagtcagaaggcacgatttcactcttgactttgataattacagaaattgtagtttcaatattctttaaaaatacctaaaatcaggtttataactttcatttgccctagaaaatgaaggcaaacaaaccaccatgatattcatgctggaaatgagaaaaccaaggtcatagcaaggaagtaaaaccaaacagaatctctccccatcgaaaaataaccccgaaagctagaatgaaagatgacaaaattatgaccaaacacacaaaaaatacttcagtaatcataaatttgaaaagaaaaaatataaacgatgggaaagctagcttgggcccacatgcctaacacctcctctgccgcaccctcctttgcaattgagatgaccagcgacagcagaacctgggggttccaggtagg

SEQ ID NO: 14281 - DNA, 469 bp, Homo sapiens
cagtgtatcccagtactcaaatctgttgaccagagatgctacagcagtggtagttcttctccgcttggttgtctgatgatggtggtggtgatggtccacctttgaaatatgacttgactcattgctatctgtcctgccaccgccgatggaaacatcttctgcataggtgagaaactcccttcagtgaaagctatgggtaaattatttcagaaacttgctggcttgaagaaacaacatgaaaacagcagggaagttccttgcagtccactttgacatattgttaggaattacttctcattaggagcacctatgtggctctttattggtggtgttagtagtaaaagggagtaatgcactccacatgaatccttaaaaagagatttaaaaatcaacatggtattttttcagaataaaagtatttgcttttgctgattatgaaataatttgtggaaaaaaatagaaaagtata

SEQ ID NO: 14282 - DNA, 423 bp, Homo sapiens
tttttcttacaaaatatgttgagcattatatatttttgttgacaatttacaagacggaaaaattagggaagcaacaaaacttttcacaaaatatagtttgttggataacagcaaatttggatatttttaggaagagttggataatttccctcaattcgtgggatggctgttgtccacttttgcacatgttctgcctcctgtctgaggcattcacagctggctttggatttctgtgtctcctaaagcttctgtgaatctgaaaagtcatttctgaaactgtggtctgcggctgggagcagtggctcatgcctgtaatcctagcactttgggaggctgacacgggcagattgcttgagcccagaagttggagaccagcctggccagcatagtgagactatgtccctatttcataaaaacaaagaa

SEQ ID NO: 14283 - DNA, 352 bp, Homo sapiens
accaccatgcccggccgtcagtagtctcttttaaaaataacttaatcctctaagacacaagtgtagttttattgtaaaagattcaaacaatacaacaaaggaaaaacccctttgagcaccttctctcttttcccataatcccagtcctctcctcagaggtaaccactgatgtcagtttgctgtatggactaacagaaatagaccttgggcatatgttttgtgtttcgtttttattggtgttctgtgtaatggttttatgttggttatgtagcatcttgtaacttgcttttgtgcagttaatgattgtcctggcaatcttgccattatcaataaatcatttcttataattgct

SEQ ID NO: 14284 - DNA, 394 bp, Homo sapiens
cacaatttctgtcataactctcagctgactactttgcacaaatggagtagctgatcctaaagttcatgtggaaatgcaggagacttggattaacaaaaacagtcttgaactaggccgggtacagtgactcatgcctgtaatcccagcactttgggaggctgaggcaggaagatcacttggcctcaggagtttgaggccagcctgggtaacatagtgagacccctgtctctataaaaaatttaaaaattaggcaagcctcgtgacacccacctatagtcccagctactcaagaggctgaggtgggagggtagcttgagcccaggagtttgaggctgcagtaacctgtgattgtgccactgcactccagcctgggtgacagcaagactctgtctca

SEQ ID NO: 14285 - DNA, 925 bp, Homo sapiens
gtgccttttcccctgatgggaaagccttagcggttggcttgaacgatgggagtttcctggtggtaaatgctgacactgttgaagacatggtctctttccatcacagaaaagaaatgatctctgatattaagttttcaaaagatacgggaaaataccttgccgtggcatcccatgataactttgtggatatttacaacgtacttacaagcaaaagggttggcatctgtaaaggtgcttctagttatattacacacattgactgggactctagaggaaaattattgcaagtgaattcaggtgccagagaacaacttttttttgaagctccaagaggcaaacggcatataataagaccttcagagatcgagaagatagagtgggacacatggacctgtgtcctggggcccacctgtgagggaatctggccagcacatagcgatataactgacgtaaatgctgccagtcttaccaaagactgttcccttttagccaccggagatgattttggtttcgttaagcttttttcatatcctgtcaagggacagcacgcaagattcaagaagtatgtggggcacagtgcacatgtcactaacgtgaggtggctgcacaatgactctgtgctgctcacggtgggcggcgccgacacagccctgatgatctggaccagggagtttgtggggacccaggagagcaagctggtggacagcgaggagtcagacaccgacgtggaagaggatggaggctatgacagcgatgttgctagagaaaaggccattgactacaccaccaagatttatgctgtgagcatcagggaaatggaaggcaccaagccacaccagcagctgaaggaagtttccgtggaagaaagaccacccgttagccgagcagctccccagcctgagaaactgcagaagaacaatatcac

SEQ ID NO: 14286 - DNA, 418 bp, Homo sapiens
ctcccgcccctcatggtcaggcttctccttggttttgaaccaagcccctcttgtttcaagcccacatgttcttcctgctccccctgctcccaggagaaggttaagcagagggaggagggctgaccctgaccacggtgcctcaagcgtggggaggcccaacccagtgcctgtgaattcaggctgggtcccgtggcaggcggggagtgagagaggagggcaggactgaacagatccaagtggaggggcctttgaggcgggaggagagaggaggccggcactggcctagacaggccacaccgggaaggcagccttgcagcccttgttcaatgctgtgcttcctctggccgctctctcttccagaccacccgttagccgagcagctccccagcctgagaaactgcagaagaacaatatcacc

SEQ ID NO: 14287 - DNA, 444 bp, Homo sapiens
  misc_feature (407)..(407): n is a, c, g, or t
ctgccaggagctgcggccccgtccggcccgggctggcatgggttggaattggagcctatcccccaacccgaaggctaacagcatcatgtggttactaactgttcctcattcaccggttgatgcctcccagaaaaaaacgccgccagccttcccagaaagccccgctgctgttccaccaacaaccactggagggccccaaacacagctgtgcatctacacagcttcccatcactcacactcgacaggtgcccagcaagcccattgaccacagcaccatcacttcctgggtattcacctgatttttgatacagcagcagggaaggttttttcccagcctaccaggaaacaacaaaaccggggcgaggacatttcaagttcggaaaaccttaccaacttccaagtttttncacattttactttttgaggagttccgcaattttttca

SEQ ID NO: 14288 - DNA, 381 bp, Homo sapiens
agccttgaagtttatggtagaattggctggcagaggatcaggaagaactggggaatcatctgaattatttgctcccagcttttgtttcttctctacaggcatgggttggaattggagcctatcccccaacccgaaggctaacagcatcatgtggttactaactgttcctcattcaccggttgatgcctcccagaaaaaaacgccgccagccttcccagaaagccccgctgctgttccaccaacaaccactggagggccccaaacacagctgtgcatctacacagcttcccatcactcacactcgacaggtgcccagcaagcccattgaccacagcaccatcacttcctgggtaggcccatgggattactatttgacttttt

SEQ ID NO: 14289 - DNA, 372 bp, Homo sapiens
tgcagcgagtcacagaataacaaatgtatctcatgtgtgaaccctgaagacaaatgtaagttctcatgccgctatattttattgctgtgtaattttctttccggtttgaaatcatgcttggccaacatgtaatcatttcaatgagaatttccagggaggaaagttgtctgctaatctttacttaagacttttttgttttccttttattagctaagcaacattataggagctgaaattcctgacagcagctgtggcaattcagcctaagaatggctgagaactgtaacccaaagtacatccaattactatgggattaacactggatgtatttttaattgactttcttaatgtagaatgtgtacatccccactg

SEQ ID NO: 14290 - DNA, 357 bp, Homo sapiens
ctgattccttgactcttcaattgttcctgagcagagataagactgaatatatgccacttaagtaatttttgtccagagggaattgtttggtaactgttaacattgctcacaaatacatggtaccgatctctgcaggaggagtacacattcccactctgtggcaggtggttgtgaccatatgactggcactcagcagtgaaatgtgagtggaaacaactgcccttggtttttagtccctctaccaccatgtcagcaacgatacagagaagtgactcatcagcccagatcccggagcaaagatcatgtgcatgcagtggggcacaggaaaccaggatggacttgttgctaaaactgtta

SEQ ID NO: 14291 - DNA, 205 bp, Homo sapiens
taagatgagttgtgcgcggtgatggccgcctgtagtcgcggctactcgggaggctgagacgaggagaagatcacttgaggccccacaggtcgaggcttcggtcggccgtgacccactgtatcctgggcagtcaccggtcaaggagatatgccccttccccgtttgcttttcttttcttcccttctcttttcttctttttgcttct

SEQ ID NO: 14292 - DNA, 401 bp, Homo sapiens
agcatttgaaacagaaagtgcaattgtactcatgcacttaattttccaaggttcaactataccaactttattatacaaggtttgtacatttcaaaactttaaaatatttttccagttcaatgaaagggctattttcaagaccaagaaatagcaaaattttgtgatgaccttttgaaacaagtagacctatcagttaaaaggtcaatgatatccttttacttgcatttccatttataaaattggcaattcttccttaaacaattgtcagtataattgacatagtacatacatttattctttatctactagtcatcctctgagtgctgaggtgtaaaggaggaggctgttatttgggatcttgagctgaattcatagcattgatcttaattcagccgagtgat

SEQ ID NO: 14293 - DNA, 371 bp, Homo sapiens
cttgctctgtcgcccaggctggagtgcagtagtgcgatctctgctcactgcaagttccgcctcccgggttcatgccattctcctgcctcagcctcctgagttagctggactacaggtgcccgccaccacgcccggctaattttttgtatttttagtagagatggggtttcaccgtgttagccaggatggtctcgatctcctgacctcgtgatctgcccctctcggcctcccaaagtgctgggattacaggtgtgagccaccgtgcctggccacccagctgatttttaacaaaggttccaaagcaattcagtggagtgcctttataacagtggtgatgggcaaatgactttgacctaaacctcagacttaca

SEQ ID NO: 14294 - DNA, 491 bp, Homo sapiens
gtctacatgtattttaataattaatcatttttattttctgagaatttcattatctcagtgtctcttactccctcctcaagccattgcagtctgtgtttttggtccatcactgccctgggacatcattcagtaaggtcaccagtggcctctctgctgcttatcctgcaggctatttacagtaacatctcagtattccagaatcatttgaatataatgaccagtttctccttctgaaaacttcttttcttggctttccatgttaaaaatctttctttctttttttcttttaaaataattaccctttttggtctctatccatactttctcttcttctttgcatgctatttcatttcagtctgagggtttctcatcctccaagtcttcactcactatttccctggtgatctgattcacatatagccacctacatggagctgacaattgaactcattaccttctttcccaatactactttttccatggttactaat

SEQ ID NO: 14295 - DNA, 2056 bp, Homo sapiens
atatcacaaaacaggggtctgatgaaagtacaatagccatgttgattcaataaacccagatgcatattttttgaaaaccaatgtgttattgaaacaaatcaatggcagtgttaatccataagagttctgattttctataggaatatcactaatcaaaaaaatgcactcatgaataattggaagatagctcacaagcaagaggaattgacccttgaataattatctgattaataggtttcatagggcattcaaagttgcagactcagttaatgactacagttaagttgtctggactgaaaagtcatttcttttgtttagaacctttttgcaaccgtagaaagcatattaaaccattggttttgcaggatggatctgtcaaaccacaatatatacatttggatcagtgtatcctaggagacagttaataaaaatgtattaaaggaaatctttaatcaataaatgaacttagattctgagatttaatggcatacctctgatcaaaatggcatatttaaagaaatttaaagatttggagaattggaaaatatcgttagctgtaaaagtaatattatgacatatttatgtagcacttctattttcagaatagttcagtgtcattcattagcacaggcaggtcccaaccacaatggttcaacttaacggttttttcatgattctgtgaaagcttcataatttctacatgctttgaattttgaattttgttattttttggagggctagtgatacatggtccatgaaatattcaacactttattataaaatagggtttgtgttagacaatttgcccaactgtaggatgaggtatatgttctgagcacgtttaagtaggtttaagttagggtgggctgtgattttccatttaggtatctgaaatgcatttcagacttacaatgttttcaacctttgatttctttatctgtatgtaatcctattgttaaatcaaggagcattcatatttttcataaaaccggctacccaaggaaaaaaataattagctttatggatgatccatagagctttcagatgaagtgactaggataaaataaaagatgaaggtctgaggtttcttctgactccttcatatttctaaaaataatcatacaaactagaatactgctagtctcccaagtcctgttccttgtaattctcccactgttctcagtggccctaaccatctctataggttcctgacagggaagcagatcatttagttttaatttatgttcagtctcccacctccaccctggggcccaacttcccttgcaggccttgtgggtcctatggaaagttattcaccatgtaatctagcacagcatgttttgaagcatctttggaatgaaaaaaaagaagaatcaggctgttatttcctgaaattgttatgagagataacatgttgaaaggtaagaactcaggttgatattaatcatgtttttatcaatcttcattttaaagttgtttttgttctgtatattctaaattccttttattaattcctggcttgatcaagtgggctttggatccatatgatttttttttttttttttttttgagatgaaatctcgctcttgttgcccaggctggagtgcaatggagcgatcttggctcactgcaactctgcttcccaggttcaagtgattctccctgcctccgcctcccaagtagctgggattacaggtacctgccaccatgcccggctaatttttatatttttaatagagacggggtttcaccatgttggccaggctggtctcgaactcctgacctcaggcgatccacctgcctcagtctcctcccaaaatgctgggattacaggtgtgagccaccgtgcctggccagtgtgtttttttcctttaaatatatatggcattatacatccagcaaagtttactgtgttatactcattgcatcatttgtttaaaaaaaaaaaagaaacttgtagcaggagacatttaaaaatatatttaggagttccttttaataactaagttagagactctctttcagtaagttctatgactgtaccttaatgaatgca

SEQ ID NO: 14296 - DNA, 443 bp, Homo sapiens
atatatactttagtttacaactatgattctagagacattttaagtactctttgccatctaaaaagcatccttttttcagtagcatcttcccaaacagagctgcccatagctttaaaggaaacacataatcataaattaatgtaataattaaaaacagctgggtgtggtggctcacacctgtaatcccagactttagggggcaaagacaggaggattacatgagcccaagagttcaagaccagcttgggcaacataggggaactctgcttctacaaaaaattaaaaaaaaaaaaaattagctgggtgtgctggatcacctgagctcccagctattcaggaggctgaggtgggaggatcacttgagcttgggaggccaagggtgcagtgagctttgattgtgccactgtactccagcctggctgacaaagtgagaccctgtctca

SEQ ID NO: 14297 - DNA, 447 bp, Homo sapiens
attatttgttgccatctgaagttccaaagagccaagattggatgtacatatttttaaaaatatgtgctttggtgaaaagcaaagttttggaagggtagaaaactttcagtagccaccaaattgtgttattttaaaatgagcagggaaacctcacagggatgagaatacctaaactgacaattctcaggaggccctgtcaaaatgcccatcctgctaaaggtttgagttcatggccaaaggcattgtttttttataaatataattttaatggctataataatttctgtattgctccattgtttggtatgtaactattgtaattaatgttgtcataaacatatttgtgtgtaaaactgtattttcttaaaacattggggcattaaacatgcctatatatatatatatgtatatatataaacatgcccatatatatgtatgacttaaaaa

SEQ ID NO: 14298 - DNA, 558 bp, Homo sapiens
agtgtgcctcaaaataatatagtaagcaacctgatattactggttttatataatcttagtgcactatcttattcataattaaagttacaacggtgactatgtggaagtatcttggaggagaaagtgaatagatgaggtggggggacatttgagtaataactttgattttggatgtcttctctactatttttagattataatttaaataagttcatgtgtattatattatttcaccaaaaattttactttaagatatggagaatgctccatttttccccgtaagagtagcaataatttttaaaattgtcttttaaaattagattaaattacttaattccagagacctgtgttgttcttgtgtgacaacacagagtatgcaactttaagttactggccgtctaattaaaaagatgtttccaaagtatgaccagcattggaatttgttcagacccatatttataaacagtaactatgacaactcattcctcccaaccatgctcaacccctcatactttcccaactgtctgttttacaagatgacataagtagagggtttgg

SEQ ID NO: 14299 - DNA, 517 bp, Homo sapiens
gtcgtggcttgaactctcaagtactgagattacctgaggtcaggagttcttgaccagcctgtccaacatagcgaaaccccatatctactaaaaatacaaaaattagccgggcatggtgtgggggtcctgtaatcccagcattttgggatgctgaggcaagaagattgcttgagtccaggagtttgagaccagcctgggcaaaaccttgtctgtgaaaaaaaaaaaaaaaaattaactgggcatagtggtgtgcatctgtagtcacagctacttgggaggctgaggtaagagaattgcctaagcccagggagtttgagcctgaggtgagccaagatcaagccactgcactctccagcctgggcgacagagctagactccgtctcaaaaaataaataaaccagaggtggggccacttgggtgacatcccagccctctgcaggttttgtgggcaccctggagtccttgccccctgtgagggtcttggcctcagctgggatttacaggtagggcagccctc

SEQ ID NO: 14300 - DNA, 1004 bp, Homo sapiens
tttgcagttttactttctgctatatgttttctttaaattgaaaatatgggtcaggcttggtggctcactcctgtaatcccagcactttgggaggctaaggcgggtggatcacctggggtcaggaattcaagaccagcctggccaacctggtgaaactccgtctctacaaaaatacaaaaattagccagtcataatgaccggtgcctgtaatcccagccactcgggagtctgaggcaggagaatggcttgaacctgggaggcggaggttgcagtgagccaagattgcgccattgcactccagcctgggcgacagagcaagactccgtctgaaaataaagaaaagagaaaagaaaacaacatgacatttctataacttaaaaacaacaaattatatttgtatgggttctcttatacatattgatgttctctgcccagtgagaacacagggtgtgtggtagattgatgtcaaaaatatggttggatcagtcttatcaggcagaattggaagtttctgtgtcagaccatgggaaataccataggccattgagcagggaagctatggtgagagtgctgatagaaatgatttggcaagccgggtgcggtggcttcactcctgtaatcccagcattttgggatgctgaggcaagaagattgcttgagtccaggagtttgagaccagcctgggcaaaaccttgtctgtgaaaaaaaaaaaaaaaaattaactgggcatagtggtgtgcatctgtagtcacagctacttgggaggctgaggtaagagaattgcctaagcccagggagtttgagcctgaggtgagccaagatcaagccactgcactctccagcctgggcgacagagctagactccgtctcaaaaaataaataaaccagaggtggggccacttgggtgacatcccagccctctgcaggttttgtgggcaccctggagtccttgccccctgtgagggtcttggcctcagctgggatttacaggtagggcagccctc

SEQ ID NO: 14301 - DNA, 621 bp, Homo sapiens
gttcttcagacctccttgtctataattgccaaccagagatttgtataagtgttaactgctttgcagccttactacttcagtagcatttcatgaacagaagatttaattaattctgagaagttgggcttacattctggaagaggtgactatgcatcagttaaatgaattgaatttgaggagagaacaactattctgctttcctcatttcagaagccactgtcacttattctgtgacctatcgtaagactcttggccctcatttgtctctttattgtgtgcctctgagtgtaaaagtctaacctctactgcaaactccctgatttaaaggctgtgacatttttttcttaactctctattatcccatcttctttataatgtgacaaccaaaagaaatttgagtaagaagcctgccaactttgagataggccgttactgcttcatcatgctctaacatgacaggataggtttcttgaatatattcagtcatactcaggattcccattcctgagccctacttaagtagaatagcaacttcatgttttgttctctcttgaaagtatcacacaataaaaacaatgtaattttttttatactaatatcccttaggtagccttttattgg

SEQ ID NO: 14302 - DNA, 562 bp, Homo sapiens
acagtaacaacaaacagccattcagagtaaatagtaggtacaaaataaaatactccttattgtatacctagtataatacagaagttaagaacttggtttttcatatgttagtgtgtttaatatgtactctttagtaaacaggtactggtagcccttggcttttatatcattgacttttcaaataactggcacatggaatactatacgtgtcacctctgaaatgccatttatatactggattttgacttacgaacatcatttgatgaatgccttttttgggctgtttgtgttgctgtcttgccaagtaacccccacctgctacagaactgtgactttgccacttttggcaaaaatttcaaaaattatttggaaaattttattgctttttaccttattttaacaaaacaagtggaaaaaggggaaatgaaagcatctagttatgagaaagtttattatcttgatataaaattgagacaataatcattagatgtgctgaaagtgatgaatctttattggaagtgctgcatggagttaagctgatgaattgtgaaaaaaattgtga

SEQ ID NO: 14303 - DNA, 408 bp, Homo sapiens
gatgacttcaaactcaatatgactttccttccaggtcacttcctctcctttccctgcttttgttgctagaccgccattcccctaggcacctatgctcaacattccagagacattttaagtgcttctcttctctcactgttcctatccaccgtcctctttagtctttctacccctggatctgacatccatggtttctatccttgccccagctccagccctacctagatcatggtcagggcatagcaattgcctctggggactctctatccagtctttcatcatgagccatcctgcatatgaccaccaaatcaatcttcctaaatatcgcttgtgttatacaaactcttttcagcatgtattaagtccctgtcactaaaatgatttcttggaaaataaaaattaagacgt

SEQ ID NO: 14304 - DNA, 143 bp, Homo sapiens
tcctcaaagatgtacaagcatgagaaggcaaaaggagttactagaggccacacctgcttctctggatctcaagaactggagaaaatttcatccctggtcccattccttaacccactttaccctacccccaacctgttccccac

SEQ ID NO: 14305 - DNA, 336 bp, Homo sapiens
tctctatttattttatttagttgtagtcatatcttcttgttcttgtcattttaattcttgaggatgtgatgtgtgcttctgggaataatttggattggataatttgaacaagttcacctaggcaaggtaggaagagtatttataaacatgttaaatatacagctgagtccttaatgaaataaggagagtaagagaatcctcaacccaaattagaagtactaaacaagtgtgacattgctgttatcctggggtggggaggagctgaaaatgagtgcccaacccaggattatgcaacacaggaagacataatccatgatgaatgacagttatccgata

SEQ ID NO: 14306 - DNA, 381 bp, Homo sapiens
gatcatgtgaaccagctccagccatgtgagccctgtggatcggggacagctgaaggctggactcggtgctcccggtccctttgtgcagcacccactgggcctgactgatctcctcccacattgctggcttcctccaggtcatgggcacaggtaacagagaggcactgagtagcctcttcatatccagattggagcagccaacacggccgttttacacctcatttgcctgcggaaccctaaatataaagctaaacctgtgctgaggtgagcggtatatgggatggtgtcacggtcccatcccacctcagccttagaggtgacctccatcccagctggcctggtatgtgagttcaggttagagttccttgccaagccaggcag

SEQ ID NO: 14307 - DNA, 475 bp, Homo sapiens
cagtgaatgctggttccctttcttcctttagttcccttgttctcaatgttaggactgataggtgtaagtctctgttgtggctcagaaagaggagagcttattctctggggatattcacagtggagggtgacagccatacctcttggtccctgagactctgagctcctgtttgcattttactttatagtgaaaagagcgagagtcgcacctggctagaccagggcagaactcactctgggccctctcaaggtcatcctccttgggttggcaccacccagctagggtctctcccgtgagaccccaggaaccttggcaggactgcaagggtggaaggggcatttggctctgaactggggagactcctttttcactctctttgtggcccctaaggtagtgatgctgaaccgtacggtatctgatcttgtgctctgtaaaactgaggaagaaagtgtgatgaaatcaggtagaaaaaaat

SEQ ID NO: 14308 - DNA, 217 bp, Homo sapiens
ttttttttctatttctttcctggtgtctgggtacattctcaatacacgaagccattgatatataaagtgtattagatatggtatctagtaatgacaaaatatgccaattgtgaacaaaaatcctggacccacttagtgttattgacactagcctggcctaatagcaatactttcattttttcagcccattttatagaagaattctgagacactactg

SEQ ID NO: 14309 - DNA, 1419 bp, Homo sapiens
cgggaccagcagcagcgcagcggctacccagcgcctggcggactacagcccccctagccccgccctgagctttgcgcacaacggaaacaataacaataacggcaatgggtacacctacacagcggggggagaagcctcagtgccatcccccgacggctgccccgagctgcagcccacttttgacccggctcccgctcccccacctggggcaccacttatctgggcccagttcgagcggtccccgggaggcggacctgcagctccggtatcttcttcctgctcttcttctgcatcttcgtctgcttcttcctcctccgtggtcttccccgggggtggcgccagtgcgccctccaacgccaacctggggctactggtgcaccgccggctgcaccctggcaccagctgcccgcgcctgtctccacccttgcacatggccccgggggcgggagagcaccacctggctcgccgggtgcgcagcgacccgggtggaggaggcctggcctacgccgcttatgccaacgggctgggggcacagctgcctggcttgcagccgtcggacacgtcgggctcctcctcttcgtccagctcctcctccagctcttcatcctcttcctccgggcttcggcgtaaaggcagccgcgactgctccgtgtgcttcgagagcgaagtgattgccgcgctggtgccctgtggccacaacctcttctgcatggagtgcgccaatcgcatctgtgagaagagcgagcccgagtgcccggtctgccacaccgcggtcactcaggccatccgcatcttttcttaaaggcagcgggcgctgctagtgcgcaccgtgctgggggaagggggaacccctccccatcctctttccccagcgctcgcctgcctccctgggtgccccccctctcccttctccttcccggccccaccaacactctgagatccgagaggagcttggaaagctgtagtatccgctcatttttaaaatttaatttttaagtaaaggaatttgccaggatatctgcatcaagagtactgtagcctgggaaacctgaacacctgaaatgcatgctctataaataataggaacggcgacattctagtaatgatagtttttacactgtacttaataggaagcttccaaaagaagaaaaccccacaagttttccattttcttaaagtaggaaaaaatgaacagtaataattatgatgaagatgatagtagtgctatgggatgtgtggactgtttagtgtgttcccctttgtgggtgggttcctatgatacttattatagaacacagtggatcctttttgaatgttcgtggaagggccaggagttcctgtgaaaccaggatactgcagctttattaaagttaaagaaactgtaacatatctcttatatattaaaaacgtttaaaagtt

SEQ ID NO: 14310 - DNA, 2188 bp, Homo sapiens
cgggaccagcagcagcgcagcggctacccagcgcctggcggactacagcccccctagccccgccctgagctttgcgcacaacggaaacaataacaataacggcaatgggtacacctacacagcggggggagaagcctcagtgccatcccccgacggctgccccgagctgcagcccacttttgacccggctcccgctcccccacctggggcaccacttatctgggcccagttcgagcggtccccgggaggcggacctgcagctccggtatcttcttcctgctcttcttctgcatcttcgtctgcttcttcctcctccgtggtcttccccgggggtggcgccagtgcgccctccaacgccaacctggggctactggtgcaccgccggctgcaccctggcaccagctgcccgcgcctgtctccacccttgcacatggccccgggggcgggagagcaccacctggctcgccgggtgcgcagcgacccgggtggaggaggcctggcctacgccgcttatgccaacgggctgggggcacagctgcctggcttgcagccgtcggacacgtcgggctcctcctcttcgtccagctcctcctccagctcttcatcctcttcctccgggcttcggcgtaaaggcagccgcgactgctccgtgtgcttcgagagcgaagtgattgccgcgctggtgccctgtggccacaacctcttctgcatggagtgcgccaatcgcatctgtgagaagagcgagcccgagtgcccggtctgccacaccgcggtcactcaggccatccgcatcttttcttaaaggcagcgggcgctgctagtgcgcaccgtgctgggggaagggggaacccctccccatcctctttccccagcgctcgcctgcctccctgggtgccccccctctcccttctccttcccggccccaccaacactctgagatccgagaggagcttggaaagctgtagtatccgctcatttttaaaatttaatttttaagtaaaggaatttgccaggatatctgcatcaagagtactgtagcctgggaaacctgaacacctgaaatgcatgctctataaataataggaacggcgacattctagtaatgatagtttttacactgtacttaataggaagcttccaaaagaagaaaaccccacaagttttccattttcttaaagtaggaaaaaatgaacagtaataattatgatgaagatgatagtagtgctatgggatgtgtggactgtttagtgtgttcccctttgtgggtgggttcctatgatacttattatagaacacagtggatcctttttgaatgttcgtggaagggccaggagttcctgtgaaaccaggatactgcagctttattaaagttaaagaaactgtaacatatctcttatatattaaaaacgtttaaaagttttaaagagaaattgcattaatacagattgaagtattttattcttttttgacttgaaaaattatatttcatattgcaaagatgtttacaagtattttaatttaagttcagtgaacttttttgtagctgggttaaatctttttattttagtatggccttatggcaaagaacactgtattattttaataatcacacaattgtgacggaattacaaccataaaatgtgtaatgttttgaacagtattctgttgggatggagattttataggttcagacaaatcttctagatctgcttcacccagcatattttctattcagtgatataaagcatattttattctatattattacaaaaacggaaatgtataaacatgtcaaaaagaactgttgatgctttctaacatttgtataaatagaattcagtgcaagttacaaaaattctgttgcaccactctagttttagtatttctattttaatacatttgtttaccacttgtttatgtatatgtaggtgatgttacttgagcttaaatgtactttactgagcaaagtttaaaaaacaaagtatattttattttatgataaagggcctttaacctcatggtcaaatactaatattatatttgctgagacaagatttgaaattgtatcaagagttttatttttctgacatttaaagttctacataataaaggtaaaacttaagtaatggtgctacttcattttttaagtatttctatataaataaaatattgaagaaaatcttaaaaa

SEQ ID NO: 14311 - DNA, 1872 bp, Homo sapiens
tgctgggattacaggcatgagccaccgcgcccggcctagaagagttttaatgaaccttccacagtagtaaatgcagagaccactggtggaaattcccatgttggatagaaaagggcgtaagtccagtctaagtatctaaatgtgatatgcccttttgtcacagaagtgtaagacttaaagggaatattctgaccttcgtgtatgaatctgatccacccatcctgtcagctaggattataatttgaactgtcgtttcaggagcatgtgttaaatcatatgagtaaaaaaaaagtagacattgaaaagaagacttgggaataattgggcagatagaatgggttccatggatcattctagttgccactagaaaatgtgagctccttcttcatttaccatgttgataatccggtggtgactttttttttttttttgtaaattgtattagataccccacaggaatgtgacaataataggatagctttgggggctggtgatttgaaacagggactattaagtagattttcccccatcctctaggttcctgtagtctgtgctcagaacttggtttttggcccctattgtttttgcctattttgattttcagagatgatcacatggggacagttaacttttcttctgctgtgttgccttaatgctactagattgtgttgtgttgttggagttttctgacttcttccctataaaaagatactgagagctccataatgaaagaagttgttatactttctcagaatattctggaccactgaatgcacttctaatagagctttaatctaaagaagttagttcagtggttattaactgattttattacaggagaaaaaaactttaacaaaaaggcagggagaaaagtgtgaagggcatcaagcaaaatgacaggggcttcaaaaaacaaccaaagacaaaaccctatcttctgaagaccaaaggtccaactttacttactggctggcacagcttttctgaactccttgagtttagaatagagctcctagaataataaggcggccaaatttaaagatcagtcaatacagtagggacctgctattgatctctcaggcactgagtcttcacatccagtgtcaagcccagcccagcatatggggtgatatgagcagaaaacacacatcggtgtgtcttgatttctcgcagctgtgtaatgtggcatgagaagtatgttttggtgccacatatttctcaatctgatgcctttttgtctttttttttttttgccatttgcatcctatttcatagtgccaaaatgaatttttgtatcttgtcttgtctttgtccattataaactggaggatcacagttaagccttccatgaattcatagtttggaatcatttaccttaccattattttggatttttttcttattacagtgtcactacactgtattcatgtgggggaacaaacatgtaggtgcttgaacatgccccacagacacagttgtagccctagtatttgtgacggtcattattgacacagtgcagactttacagatggagcattatgctctcagaggactttaaaaatatgtatattaagcaattaactttctggagttggagttatcaaatcttgctgggaaattaacttccaagagctctgaattggatggaattccatctggcttcagagaacaatcagcctatatgaaacggagctttgaaatgtttttcttgtgcagaaatacgaactagaaagaaaagtgctgatctaatgctaagttttctctgtgtactgactcagttgccagaattataatgaaaactgtattttagtctaacaaatgtatagaattttttatgtaataaataaaattttataggaaagaaaaaaaaaa

SEQ ID NO: 14312 - DNA, 672 bp, Homo sapiens
ccggggatatgacataaacccacatcggtggtcttactacagctgtgtatgggccatttgcatcctatttcatagtgccaaaatgaatttttgtatcttgtcttgtctttgtccattataaactggaggatcacagttaagccttccatgaattcatagtttggaatcatttaccttaccattattttggatttttttcttattacagtgtcactacactgtattcatgtgggggaacaaacatgtaggtgcttgaacatgccccacagacacagttgtagccctagtatttgtgacggtcattattgacacagtgcagactttacagatggagcattatgctctcagaggactttaaaaatatgtatattaagcaattaactttctggagttggagttatcaaatcttgctgggaaattaacttccaagagctctgaattggatggaattccatctggcttcagagaacaatcagcctatatgaaacggagctttgaaatgtttttcttgtgcagaaatacgaactagaaagaaaagtgctgatctaatgctaagttttctctgtgtactgactcagttgccagaattataatgaaaactgtattttagtctaacaaatgtatagaattttttatgtaataaataaaattttataggaaagaaaaaaaaaa

SEQ ID NO: 14313 - DNA, 1939 bp, Homo sapiens
cacttgcggtcgggagttcgagaccagcctggccaacatagtgaaatcccgtctctaccaaaaaatacaaaaaaaaaaaaaaaatagccaggtgtggtggtgggttcctgtagtcccagctactcaggaggctgaggtgggagaattgtatgaacctgggaggcagaggttgcagtgaactgagatcacaccactgtactccagttgaggcgacagagtgagacccagtctcaaaaaaaaaaaaaagtgtgtgtgtgtgtatatatatgtatatatatatacacacacacacactttccaataccagtcggcattacccgccctttggtttcttttgctttggatttcagcccccatatcatttctggtaacagagcacagcaatagaatttctgggaagcagaccttgtgaatcgtgcctgtgtcttaattcacaaagggtaagtgaatgccgttgaaaggtgtttcatacacttaccccagaaatgagagcctgtctcatgcaggagtcgggaggcagcgatgtcagggaactgggactatgtctttatgactgtgatggtggtaaccaagtggggtggtcccctctggggagctgagtaagaacgcaaaggtttgggtcagtgattaggaagactataatatgactttgtgcatgcccgggagggctgccttgtagagaggatgtgagcagcttagtcgctcatctggccctgtgattcaggcttatggagcgttaagaataacagctgtcaaatggcctagacatggttaatgcaatttgttgctagtggaaatcctgaattgcttcctttctgtgatcactgctacttcttaagatgcttttgatgaatgtcatctgccttacaagttgacacctgataacttctccctgatgggtttccgaactggctgacttaaccaaaaagccagctcttgccatctatcttgcattaaaaggaattcctgaggctcctaaggggtcagctgccccactcctgacttttttatttttaatggtctataccttctgcaacatttttgtttatggccatttgaatagttggactttgactcctcacttgtgaataataggaatatattttgcagaatctaacataatacccttaaaattcatactggacaaccatcagtgtgatgtatagtatctggtgtaaacaaattttattcagcatattaaattattctgtgttttgcttttccttgatatgtaggaggtgcaccagtaccagtttttctcttgtggtggcttaaaacgctgattgccatttgcattgtctactgaaaagctgtggcagcgagtggtattattgaccatgtgttctcatgtctttttgcagatttaaaggttttattgtagtgtccatttaatatctgcatgtgtgtttaatctctgaataccatgtaattaaactgattaacttgtgatggtgatggtgattagcacacactaaaaacccaatgaagcaattgtctccctcttcttaactggaaatcacacttgtgaggtatggtatccattatcaacagtggattcatgattgacttcatattttgtgtatctggttataaattttgtatagcatttaatttggcacttaatataaatccatttgatttgaatagtgtgtgtgtgtacatggtgtgtgtgtgtgtgtgcactttagtttcgtgagccttgggaaactgattctacaaatatcttatatagagataaatgtatcaggcatttttttgcaaagcgatatatacattcctcttatttattaaatcactggctttggtgttatgtagagatatttgtagatctcagaacagaattaaaatattgtgaaaattacagcttaataaatgtttattgtaattttgttgtatggacttttaaaatatatctcatcacttctaaccaaaaaaatgt

SEQ ID NO: 14314 - DNA, 1842 bp, Homo sapiens
cacttgcggtcgggagttcgagaccagcctggccaacatagtgaaatcccgtctctaccaaaaaatacaaaaaaaaaaaaaaaatagccaggtgtggtggtgggttcctgtagtcccagctactcaggaggctgaggtgggagaattgtatgaacctgggaggcagaggttgcagtgaactgagatcacacacacactttccaataccagtcggcattacccgccctttggtttcttttgctttggatttcagcccccatatcatttctggtaacagagcacagcaatagaatttctgggaagcagaccttgtgaatcgtgcctgtgtcttaattcacaaagggtaagtgaatgccgttgaaaggtgtttcatacacttaccccagaaatgagagcctgtctcatgcaggagtcgggaggcagcgatgtcagggaactgggactatgtctttatgactgtgatggtggtaaccaagtggggtggtcccctctggggagctgagtaagaacgcaaaggtttgggtcagtgattaggaagactataatatgactttgtgcatgcccgggagggctgccttgtagagaggatgtgagcagcttagtcgctcatctggccctgtgattcaggcttatggagcgttaagaataacagctgtcaaatggcctagacatggttaatgcaatttgttgctagtggaaatcctgaattgcttcctttctgtgatcactgctacttcttaagatgcttttgatgaatgtcatctgccttacaagttgacacctgataacttctccctgatgggtttccgaactggctgacttaaccaaaaagccagctcttgccatctatcttgcattaaaaggaattcctgaggctcctaaggggtcagctgccccactcctgacttttttatttttaatggtctataccttctgcaacatttttgtttatggccatttgaatagttggactttgactcctcacttgtgaataataggaatatattttgcagaatctaacataatacccttaaaattcatactggacaaccatcagtgtgatgtatagtatctggtgtaaacaaattttattcagcatattaaattattctgtgttttgcttttccttgatatgtaggaggtgcaccagtaccagtttttctcttgtggtggcttaaaacgctgattgccatttgcattgtctactgaaaagctgtggcagcgagtggtattattgaccatgtgttctcatgtctttttgcagatttaaaggttttattgtagtgtccatttaatatctgcatgtgtgtttaatctctgaataccatgtaattaaactgattaacttgtgatggtgatggtgattagcacacactaaaaacccaatgaagcaattgtctccctcttcttaactggaaatcacacttgtgaggtatggtatccattatcaacagtggattcatgattgacttcatattttgtgtatctggttataaattttgtatagcatttaatttggcacttaatataaatccatttgatttgaatagtgtgtgtgtgtacatggtgtgtgtgtgtgtgtgcactttagtttcgtgagccttgggaaactgattctacaaatatcttatatagagataaatgtatcaggcatttttttgcaaagcgatatatacattcctcttatttattaaatcactggctttggtgttatgtagagatatttgtagatctcagaacagaattaaaatattgtgaaaattacagcttaataaatgtttattgtaattttgttgtatggacttttaaaatatatctcatcacttctaaccaaaaaaatgt

SEQ ID NO: 14315 - DNA, 1690 bp, Homo sapiens
aaactaaagtgcacacacacacacacaccatgtacacacacacactttccaataccagtcggcattacccgccctttggtttcttttgctttggatttcagcccccatatcatttctggtaacagagcacagcaatagaatttctgggaagcagaccttgtgaatcgtgcctgtgtcttaattcacaaagggtaagtgaatgccgttgaaaggtgtttcatacacttaccccagaaatgagagcctgtctcatgcaggagtcgggaggcagcgatgtcagggaactgggactatgtctttatgactgtgatggtggtaaccaagtggggtggtcccctctggggagctgagtaagaacgcaaaggtttgggtcagtgattaggaagactataatatgactttgtgcatgcccgggagggctgccttgtagagaggatgtgagcagcttagtcgctcatctggccctgtgattcaggcttatggagcgttaagaataacagctgtcaaatggcctagacatggttaatgcaatttgttgctagtggaaatcctgaattgcttcctttctgtgatcactgctacttcttaagatgcttttgatgaatgtcatctgccttacaagttgacacctgataacttctccctgatgggtttccgaactggctgacttaaccaaaaagccagctcttgccatctatcttgcattaaaaggaattcctgaggctcctaaggggtcagctgccccactcctgacttttttatttttaatggtctataccttctgcaacatttttgtttatggccatttgaatagttggactttgactcctcacttgtgaataataggaatatattttgcagaatctaacataatacccttaaaattcatactggacaaccatcagtgtgatgtatagtatctggtgtaaacaaattttattcagcatattaaattattctgtgttttgcttttccttgatatgtaggaggtgcaccagtaccagtttttctcttgtggtggcttaaaacgctgattgccatttgcattgtctactgaaaagctgtggcagcgagtggtattattgaccatgtgttctcatgtctttttgcagatttaaaggttttattgtagtgtccatttaatatctgcatgtgtgtttaatctctgaataccatgtaattaaactgattaacttgtgatggtgatggtgattagcacacactaaaaacccaatgaagcaattgtctccctcttcttaactggaaatcacacttgtgaggtatggtatccattatcaacagtggattcatgattgacttcatattttgtgtatctggttataaattttgtatagcatttaatttggcacttaatataaatccatttgatttgaatagtgtgtgtgtgtacatggtgtgtgtgtgtgtgtgcactttagtttcgtgagccttgggaaactgattctacaaatatcttatatagagataaatgtatcaggcatttttttgcaaagcgatatatacattcctcttatttattaaatcactggctttggtgttatgtagagatatttgtagatctcagaacagaattaaaatattgtgaaaattacagcttaataaatgtttattgtaattttgttgtatggacttttaaaatatatctcatcacttctaaccaaaaaaatgt

SEQ ID NO: 14316 - DNA, 492 bp, Homo sapiens
gtccagagctcccagcctgagagaggcctgctgggttgagcagggggcagcttgggactagttcttccacaggcctgccactatgactgcttgaggttagaccacagtctgacagggggaaaccctgtgcagtggctgggactgtgaggcagacaaggctcccgggaccccctttgtctaggacctaataatagcttaaaaactggcataggctgggcagcagtggctcacacctataatcctagcactttaggaggccaaggcaggaggttggcttgaggccaggagttcgagaccagcctgggcaacccaattctacaaaaaaaaaaaaaaaataataataattagccagacatggtggtgtgcgcctgtaagtcctagctactcaggaagctgaggcatgaggatcaggccaggaggctgaggctgcagtgagttatgatcactccatcccactctagcctgggtgacagagtaagtccctgtctcaaa

SEQ ID NO: 14317 - DNA, 368 bp, Homo sapiens
taccttacagggagcttaggcaaatttaaaactcatctttaaccaccatattgactgctcttttccatatatttatatttcctctttgtagccttgatgttttttattcttctcaatttaaaaaatgttattttttaactacctcatattccttatggaacaagacagaatattaatttttatactgccttctagtacaatatgataaaatcataattatagcaaatgtcatcattttttgtcatatgaatgtaatctatgattcagatgctgcttgttatagctttctcattgaggatctatggctcaggtctcgaggttttctttgtatccaagtcttaaactggaatcaattgaggacattcaag

SEQ ID NO: 14318 - DNA, 961 bp, Homo sapiens
aagagatgaggtctcactatattgcccaggctggtttcaaactcctgggttcaagtgatcttcccgcctctgcctcctgaagtgctaggattataggcgagagccactgtgcccagccattgtaatacagtcttttgtttgaaatgcaaatgttagtgggccaaaaggacagtgttattaatatccctattctatgaagatgtctgttctaaaactgttttagtgatgctctataacagaatcaactatatccattaatcccatggtgttgataaatgaactagtccagctcttcccagtggttaatagatgttaacagcactgtaaatccatttcggccctataatttctggagcaaacgtgtatttttgctgcttttcttataaggagatgctactaattgactatcagaagaacatgttttgaggtcctcctcaaaacattgatgggttggaatcagccatcaacagtgttgtaccagttcttgggtcttgatagacaatttggaaagagatttccttgtttacgaagtgaaggactaagaattaaattaatgaccttggcctcactggcaatcaattacaaatctctatatcagtaagagaattgtaaaattcagaagcagtttacattagactttggaatgaatgatgaactttccccattagagctgccatcatatgattggtggagattgtttaaagaatcattctatctcagcctcaaaaattaccacgggaagatggtatcagtatcactacttaacagatgaagaatctaatgctgtgtgcccatggacacacaaaattaagctgttgggacttgaacagctcaaattttcttgtttcagatcaccagctcttgagtaatagggaaatctggagatttgaaaagtacttgcactgtccacaacatggctaatccatatgtggatgatgcagaattgatttaattcactaac

SEQ ID NO: 14319 - DNA, 504 bp, Homo sapiens
gacaaaatccaacagccattcatgataaaaactctcataaaactaggaagagaaggagaacttcctcaacttgataaaaaatacctgcaaaatccctacagctaatgccatacttcatgctgagaaacttaagctttcccactgagatcaagaacaaggcacggatattccttctcaccactgcttttctcaatatcatatttgaagtcctggctaatgcaataaaagaagaaaatgaaataaaagatatatggattgatcaggaataaataaaagattgctcacagatgatatgattgtctgtgaaggaaatctgaaagaatcagcaaaaaataaaaataaaaataaaaaaaatcctggaactgagtgatgatagtaaggttgcatgatgcaagcttaatattcaaaagtcaattgctttcgtatatactagcaataaacagatggaatttaaaataaaaacacaatactatttacattcgcatgcaaggaaatgaaatactt

SEQ ID NO: 14320 - DNA, 303 bp, Homo sapiens
tgaagggacccctttatagattgagcatgatgtctgggttcaaagtctagttccttttcttgttggaatggtgactttgagcaagtaacttaacttctctggggctcactttcctcctctataaaatgggaataataatagtacttatcaagttattttgaagattaaataaaaagcactgataatactgtaaaacagtcaatacatttagctattatgtgttcatttattcatccactgatcaaattatattttaggtggatttttctgcatgctatggataataagagagagagggtggct

SEQ ID NO: 14321 - DNA, 444 bp, Homo sapiens
ttggctgtgtgtaatgagaccattgccccacccagggaaggatgtgtgcttctcagacgacagcagggcactttccctggtgtccctggtgcctctttgctggaatgctcccctgggtggaagccccgggctcacagggtgagaacccatatgctctgaatgtggaggtgaaagtgcgtcccattccaaagggtctgtaaggtgatgattcatccagccactccttcagcagacatttaatgagcatcatctgtatgccagacactgtgccaggtgctgggactacaaataagactagtttcttgacccactcagagattaggatttggaattaactgtgaaggacatgatggagatagaatgtgtttctgccagggcattgatttagaaaacctttttttgaatataactgtgcaccctgcatagaaattggagaaagaagaa

SEQ ID NO: 14322 - DNA, 779 bp, Homo sapiens
cagatgaaaagctgtcagaaaattatgccatcagaattcctgtaaacaagctcctgcttcacccctgccatgagcaaaagcttcatgcgtcctccccagaagccaagcagatgccggtaccatgttttctgttcagcctgcagaactgtgcatggaacagtggcacttttcttttgtcttgaagttgtagccattaaactgcactggccagtcaaatataggtcttgttaatgagacaagaaacacctgtgtttggcttgccatgaagaattatactggctgttttgacctctggaggaaggctgagccctttggcatcacatgtgtttgcagctcgtcaagctggctggatatcccacctctccatgccctatagctctgtctcggaacctgtgattgctgtgaattgtgtcatctgcacacagttcactaaccagttatgtatagactggttatgctacatttagtagtttgtgttttattctgacagttggaaagccacaagagagttttaagttggggagtaacaaataaatctataatttaatgggactaccatgcctgctttgtgacaaatggatcactagaaggcagaaattgtagtggggtgaccagtttgaaggatgttgaaatgactgcaaataaacaagtttcacaggttctttaaggaaaaaaaaaaaaagaaatagctgacaattctatgcccaatcaagttgtcattgagataaagttaacagaatgtttgttaatatataaaatgtttaaattaaatgttaaat

SEQ ID NO: 14323 - DNA, 456 bp, Homo sapiens
ttaagttgaaatacaagtcttcagctttggatatcttagttttgaagtctctgtgaggcatctagatagagttgtcaggcatttgaatatatgagcctggagctcaaagaaaagatttattatattttacaaagaagaaaagactgattagtatttacctggttaatctctccttgtcatgcatatctatgcttccatttcaattatgccaaggaagctttcttgtagtcccctgtctcaaccctaagactggcgtgattgactttcagtgctcgaataacagatgcaactaccctatcacagctctaactatcttgtaggccactttctgtttcttgtactacatcttgaacttcttacatggaagcactatttataggtcatgacctccccttttctgcacatagtaggtattgaataaatgtttgctgagtgaatggaaaaatgagcagatga

SEQ ID NO: 14324 - DNA, 362 bp, Homo sapiens
ttgatgaagctttccatttgccccagatactctcactctgcaaagcagggggccttggtttcccaccctaccaccttggtgggcgctctgaagacactgctgagaggctagggccacagaggagaaggtgctatctgggccttctgggactttgaggtgtggattccagcccaccttctgctcagtccacactgcccgtgatagctacatcaagggaccttcactggttcaggcccaaaatgaagtatcgtttctataacagataccttctagcgccatctttactcttctgagatgaaagtcatagcgaatataacctccttaagcacatactgaaaactaaatttaacaccctaacactc

SEQ ID NO: 14325 - DNA, 351 bp, Homo sapiens
gagagaaccacaagccaataaactgctggagatttctaggagctgatagcaggctctggacagcagccagcaataacttgggacctcagcccttcaactgtaaggagagttctgcaaacatcctgagtgcacttacagaaggatttacctccagttgagtttccagatgagaaccctgccctagtcagtcaacatgttgaagataccttttcagaggagcaagataagttgtgtccagactttttgacccacaaagactgtgagatagtaaatgttatttgatttaaaatgctaagattttggtaatgtgctacacagcaataaaaacccaataaaaattcttaaaaaaaa

SEQ ID NO: 14326 - DNA, 496 bp, Homo sapiens
cgggtgcctcaggaccctttgacatttcagtaccagaaatcaaatgtcgcttcagaagcccggccctccaaagatgtcacaatccaacctcccacacgcacaggagaacagcgcgtttggagggatgaagtaactcaccaaggtcacgcagtcctgcagagccaggatcccaacccaggaagtcctcagagccggccctcgccaccgactccctggaggtatgtccatttcactcaaatacccaacagattgagggtttaaatgtaatatgcccattttttgagacgtccgttctgttcagagtttgatatcttattttataaagtggaggtgatcgtggagccagtctcagggctgggtgttgtgggggcgtggatgaggtgaggcgggtgaacacggtatttgcgctcagtaattgctgggctgcctgtaactctaagcagagtcgaatgtcattctggaggggaaattaaagatgatctaagcagaaggcatt

SEQ ID NO: 14327 - DNA, 2680 bp, Homo sapiens
  misc_feature (1035)..(1036): n is a, c, g, or t
  misc_feature (1637)..(1637): n is a, c, g, or t
aaaaaagaatttatgcaaaggctgggtcagagtaatggacatgaattcgatttgccttgggtttgccttaccatttattgaaggcatactatgtactaggtacatacatgatcacatttgatgttcacaacagccctgacaagtgggcttcttacccctatttccaaaagagttcattgaagttctgagagcttaatccccgctttaggctacacagtagtagctggatttcctggcatcagaaccctcacctaggctgcctctgagcatggcttctgtgtcccagtctcaatttccatgaagtttcaggtcctcctgttcccccgcatttgtagtcactcttggtgactgggaacaaagggctagagcgtgagctgaaactgagacagggagtggcaggcaggcagtggggagagaaacttttctcacatccacccatgtgaagaagatggacaaaagggtggtctttctggagggaggcttccaagccactttcccaagactgctgatcttgggatgaatggcagggacctgattggggtaggggatgggtggtcacattgttttctgggctgtagactttatttcccttcctttgggaagagaagaggaagaggacagctcgggtgtgggtttgagccctggattaagactgcccgttgtccactaaaatctcttctttccttgctgcacgagggtagagagacacccagctggacactccatttcccagctgctcttgttgccaggtgtagacacaggggaatgtgaggcaagcatgtcctcaaagcctgatgacattgggtaaattctcctttgtgttctctctttcatgagctgggcagatgtgcctgagacaggtttgaccaggcaactgaaaagacatccctaagggaagacaaagcaaaggtatgaaaggaacacacgtccctgactgactaggaggaacagagctgcctgctgtctggaaccgcttcctcccagactaagtgagaaataaacttctgttttctataaactactgtgttttggggnntttgtgttatagcagttttgctgtcatcctttctaattcaccttctcacaccagatatttcaaattaaaaagattgtatcgggccaggtgcaatggcttgcgcctgtaatcccagcactgtgtggggctgaggcaggcagatcacttgaggccaggagttcgagaccagtctggccaacatggtgaaaccccatctctactaaaaaatacaaaaattagctggacacggtggcacactcctgtaatcccagctacttgggaggctgagacaggagaattgcttgaacccaggaggcggaggttgcagtgaactgacatcatgccactgtgcaccagtctgggctacaaaatgagattctgtctcaaaataaaaaaatgattacatcagatcacggaataactataataatatttattgggccagataagtatgcgaaggactctatgcacattatttagtgtaatctatgtgacaatcctctgagatatgtgttactattattccaatttacacacgaggaaacaggttcaaggaaggtaagttatgtgctgagggacacacaggagggggtggagctggatttcaagcccactgggtgtncagaactgagcctcttcaccatgggggcaaatccctcctgaggacggggctggaaaagccatggagatcatcttgtgctggacaagcctctcgccagtcaccacagggccctgagactcccattcctacctcaagaagctcagcagcctactactcatgttcatgttgggtcactgcatacggttttatttgaaggaaggaccccagagttaaaatcatttgaaaacccctgataaattcagtcccctccctctttttacaggtgaggcccggagacaagatatgacttgcttaaggtcacacacttagtttctctgtcaatctttctaaatcgaggacgagttctcttcccgctgtatcaggctgcctcaacaaacagggaagtacaaaaatagccaaatccaggaaggagggcagtggtctgtgtctcctccaattatttcatgggacagccaagcctatttccttgatttcccttgtgcccctcctgtcggatatctgctttgggacccatctcttttgggcttgcagagaggacgggctgcaccagttctctaccctcctcatcacccagatggtcaaacatgcaaagggaaaggagagctggggccagagctaaggcaggcaaagagactcctcgaccccctccagtctttccacatttatatttttggaatttcaggctccctcctccccctagacctttcctagtagcccaccagggagaagaagagggaaaactgccataaatttctcctatttatacaagatgacagagtttcttgtgccagaaaaaacacagaaagggagctgtcaagggagaagggacccagccctattccttctggggtcaatttatctttccgaatcatggcttgggggctaccctaacattgcctgtatgaaatgcaggctttgacttggggcagccaggccagacagcccctgagctttgcttctgatcacagttttcctgcttcatctcaactgccccccaccccttacgctgtctttttaaaaaacaactttcttgaggtataatt

SEQ ID NO: 14328 - DNA, 2076 bp, Homo sapiens
  misc_feature (431)..(432): n is a, c, g, or t
  misc_feature (1033)..(1033): n is a, c, g, or t
gccgcccgggatgagctaataatggaagcaatttgtaactttcagtagctctctaggcctgggtaccggagggagggaggcgggcagaggaggggagatgggcacccccagtctttccatcctcctcattcgtctaggggcacccgaatcccctattccttatttcccctatcactcaggcactggcagggtccttggcccactcctgttggccgccgcggctccaaagcgagctgggcagatgtgcctgagacaggtttgaccaggcaactgaaaagacatccctaagggaagacaaagcaaaggtatgaaaggaacacacgtccctgactgactaggaggaacagagctgcctgctgtctggaaccgcttcctcccagactaagtgagaaataaacttctgttttctataaactactgtgttttggggnntttgtgttatagcagttttgctgtcatcctttctaattcaccttctcacaccagatatttcaaattaaaaagattgtatcgggccaggtgcaatggcttgcgcctgtaatcccagcactgtgtggggctgaggcaggcagatcacttgaggccaggagttcgagaccagtctggccaacatggtgaaaccccatctctactaaaaaatacaaaaattagctggacacggtggcacactcctgtaatcccagctacttgggaggctgagacaggagaattgcttgaacccaggaggcggaggttgcagtgaactgacatcatgccactgtgcaccagtctgggctacaaaatgagattctgtctcaaaataaaaaaatgattacatcagatcacggaataactataataatatttattgggccagataagtatgcgaaggactctatgcacattatttagtgtaatctatgtgacaatcctctgagatatgtgttactattattccaatttacacacgaggaaacaggttcaaggaaggtaagttatgtgctgagggacacacaggagggggtggagctggatttcaagcccactgggtgtncagaactgagcctcttcaccatgggggcaaatccctcctgaggacggggctggaaaagccatggagatcatcttgtgctggacaagcctctcgccagtcaccacagggccctgagactcccattcctacctcaagaagctcagcagcctactactcatgttcatgttgggtcactgcatacggttttatttgaaggaaggaccccagagttaaaatcatttgaaaacccctgataaattcagtcccctccctctttttacaggtgaggcccggagacaagatatgacttgcttaaggtcacacacttagtttctctgtcaatctttctaaatcgaggacgagttctcttcccgctgtatcaggctgcctcaacaaacagggaagtacaaaaatagccaaatccaggaaggagggcagtggtctgtgtctcctccaattatttcatgggacagccaagcctatttccttgatttcccttgtgcccctcctgtcggatatctgctttgggacccatctcttttgggcttgcagagaggacgggctgcaccagttctctaccctcctcatcacccagatggtcaaacatgcaaagggaaaggagagctggggccagagctaaggcaggcaaagagactcctcgaccccctccagtctttccacatttatatttttggaatttcaggctccctcctccccctagacctttcctagtagcccaccagggagaagaagagggaaaactgccataaatttctcctatttatacaagatgacagagtttcttgtgccagaaaaaacacagaaagggagctgtcaagggagaagggacccagccctattccttctggggtcaatttatctttccgaatcatggcttgggggctaccctaacattgcctgtatgaaatgcaggctttgacttggggcagccaggccagacagcccctgagctttgcttctgatcacagttttcctgcttcatctcaactgccccccaccccttacgctgtctttttaaaaaacaactttcttgaggtataatt

SEQ ID NO: 14329 - DNA, 1586 bp, Homo sapiens
agccgctgagaggctctgcgtgtgcgtgtgcgcgggtgacgccgtgtgtgtgcgagtgtgtgtgtgtgtgcgcgcgcgcgtgtgagagagagaaagggagagagagagggggactctgtgtgagggaaagaaaacaatttctcctgctctgcagcttctgttcaggatcaatgtgactctaagaacaaatggatgaatgaatatccatatgaagagaaaaacaataaagaatatcaacacctttgagaacagaatgttaatgcttgatgggatgccggcagtcagagtcaaaacagagcttttggaatctgaacaagggtctccaaacgtccacaactatcccgatatggaagccgttcccctgttgctaaataatgtgaaaggggagcccccggaggactcgttatctgtagatcacttccaaacacaaactgagccagtggacttgtcaataaacaaagccaggacgtcccctactgccgtttcatcctccccagtttccatgacagcatctgcctcctcaccttcttcaacttcaacctcttcatcgtcttctagtcgtctagcctcatccccaactgttatcacatcagtatcttcagcgtcatcttcgtcaacagtattaactccagggccccttgtggcctctgcatctggtgttggaggccagcagtttttgcacattatccatcccgtaccgccttcaagtcccatgaatttacagtctaacaaactgagtcatgttcaccgcatccccgtggtggtacagtcggtgcctgttgtctacacagctgtaaggtcacctggaaatgtgaacaacactattgtcgtgccgcttttggaggatgggagaggccatggcaaagcacaaatggacccccgaggcctatctcccagacaaagtaaaagtgacagtgatgatgatgacctgccaaatgtgaccttagatagcgttaatgaaactggatctacggccctttccatagccagagcagtacaagagtaagtatcacattcacaggatgaattaagaattgccaaggtgttcaatggataatggaaactgcagcatctcctgtcccccagccatgtcattctagctgtgaactggcacgaatgtcagcagcttttcattcagctgaatgctctttgagagattagggcagagaatggagtgttttaatgagttggaaattcatgctttgatgagatataagacctatgtgcatcttttctaatacctcctgcacccttctcctgaactctgcaaaaaaaaaaaaattgttatttttgaatgtcactatttgattatcatcatcattattattacacaaagtcaagggaaatatggcaaagtattgttatcttgttttgataggaaattacagaatagctttttggaagatttaaatttggaaaataatatgttcatcctttgaaaagtagtactcatatgttatttttaaatgaatcttttctctctccttttacctggaccgcagggttagatttcagccctcgtttattgaaaatagctgcttttctatcagtcaaccttgtacctagaattgaacctaaatgattga

SEQ ID NO: 14330 - DNA, 1410 bp, Homo sapiens
agccgctgagaggctctgcgtgtgcgtgtgcgcgggtgacgccgtgtgtgtgcgagtgtgtgtgtgtgtgcgcgcgcgcgtgtgagagagagaaagggagagagagagggggactctgtgtgagggaaagaaaacaatttctcctgctctgcagcttctgttcaggatcaatgtgactctaagaacaaatggatgaatgaatatccatatgaagagaaaaacaataaagaatatcaacacctttgagaacagaatgttaatgcttgatgggatgccggcagtcagagtcaaaacagagcttttggaatctgaacaagggtctccaaacgtccacaactatcccgatatggaagccgttcccctgttgctaaataatgtgaaaggggagcccccggaggactcgttatctgtagatcacttccaaacacaaactgagccagtggacttgtcaataaacaaagccaggacgtcccctactgccgtttcatcctccccagtttccatgacagcatctgcctcctcaccttcttcaacttcaacctcttcatcgtcttctagtcgtctagcctcatccccaactgttatcacatcagtatcttcagcgtcatcttcgtcaacagtattaactccagggccccttgtggcctctgcatctggtgttggaggccagcagtttttgcacattatccatcccgtaccgccttcaagtcccatgaatttacagtctaacaaactgagtcatgttcaccgcatccccgtggtggtacagtcggtgcctgttgtctacacagctgtaaggtcacctggaaatgtgaacaacactattgtcgtgccgcttttggaggatgggagaggccatggcaaagcacaaatggacccccgaggcctatctcccagacaaagtaaaagtgacagtgatgatgatgacctgccaaatgtgaccttagatagcgttaatgaaactggatctacggccctttccatagccagagcagtacaagaggtacatccgtccccagtatcaagggtccggggcaatcgaatgaataatcaaaagtttccttgttcaatttcaccatttagtattgagagcacaagacgccagagacggtctgaatccccagactccaggaaaacggcgtatccacagatgtgattttgaggggatgcaacaaagtgttacacaaaaagttcttcacctggaaggctcaccggaggacacatacaggagagaaaccttacaagtgtacctgggaaggctgcacctggaagttcgctcgttcagatgaactgacgaggcattaccgcaaacatacgggagtgaagccattcaagtgcgcggactgtgatcgcagcttttcccggtcagatcatttggccctgcaccgccggaggcatatgttggtgtga

SEQ ID NO: 14331 - DNA, 1356 bp, Homo sapiens
agccgctgagaggctctgcgtgtgcgtgtgcgcgggtgacgccgtgtgtgtgcgagtgtgtgtgtgtgtgcgcgcgcgcgtgtgagagagagaaagggagagagagagggggactctgtgtgagggaaagaaaacaatttctcctgctctgcagcttctgttcaggatcaatgtgactctaagaacaaatggatgaatgaatatccatatgaagagaaaaacaataaagaatatcaacacctttgagaacagaatgttaatgcttgatgggatgccggcagtcagagtcgatatggaagccgttcccctgttgctaaataatgtgaaaggggagcccccggaggactcgttatctgtagatcacttccaaacacaaactgagccagtggacttgtcaataaacaaagccaggacgtcccctactgccgtttcatcctccccagtttccatgacagcatctgcctcctcaccttcttcaacttcaacctcttcatcgtcttctagtcgtctagcctcatccccaactgttatcacatcagtatcttcagcgtcatcttcgtcaacagtattaactccagggccccttgtggcctctgcatctggtgttggaggccagcagtttttgcacattatccatcccgtaccgccttcaagtcccatgaatttacagtctaacaaactgagtcatgttcaccgcatccccgtggtggtacagtcggtgcctgttgtctacacagctgtaaggtcacctggaaatgtgaacaacactattgtcgtgccgcttttggaggatgggagaggccatggcaaagcacaaatggacccccgaggcctatctcccagacaaagtaaaagtgacagtgatgatgatgacctgccaaatgtgaccttagatagcgttaatgaaactggatctacggccctttccatagccagagcagtacaagaggtacatccgtccccagtatcaagggtccggggcaatcgaatgaataatcaaaagtttccttgttcaatttcaccatttagtattgagagcacaagacgccagagacggtctgaatccccagactccaggaaaacggcgtatccacagatgtgattttgaggggatgcaacaaagtgttacacaaaaagttcttcacctggaaggctcaccggaggacacatacaggagagaaaccttacaagtgtacctgggaaggctgcacctggaagttcgctcgttcagatgaactgacgaggcattaccgcaaacatacgggagtgaagccattcaagtgcgcggactgtgatcgcagcttttcccggtcagatcatttggccctgcaccgccggaggcatatgttggtgtga

SEQ ID NO: 14332 - DNA, 1214 bp, Homo sapiens
tatggagtctccctctgttgcccaagctggagagcagtggcatgatcttggctcactgcagcctccacctcctgggttcaagcgattcttctgcctcaccttcctgagtagctcggattacagtctccaaacgtccacaactatcccgatatggaagccgttcccctgttgctaaataatgtgaaaggggagcccccggaggactcgttatctgtagatcacttccaaacacaaactgagccagtggacttgtcaataaacaaagccaggacgtcccctactgccgtttcatcctccccagtttccatgacagcatctgcctcctcaccttcttcaacttcaacctcttcatcgtcttctagtcgtctagcctcatccccaactgttatcacatcagtatcttcagcgtcatcttcgtcaacagtattaactccagggccccttgtggcctctgcatctggtgttggaggccagcagtttttgcacattatccatcccgtaccgccttcaagtcccatgaatttacagtctaacaaactgagtcatgttcaccgcatccccgtggtggtacagtcggtgcctgttgtctacacagctgtaaggtcacctggaaatgtgaacaacactattgtcgtgccgcttttggaggatgggagaggccatggcaaagcacaaatggacccccgaggcctatctcccagacaaagtaaaagtgacagtgatgatgatgacctgccaaatgtgaccttagatagcgttaatgaaactggatctacggccctttccatagccagagcagtacaagaggtacatccgtccccagtatcaagggtccggggcaatcgaatgaataatcaaaagtttccttgttcaatttcaccatttagtattgagagcacaagacgccagagacggtctgaatccccagactccaggaaaacggcgtatccacagatgtgattttgaggggatgcaacaaagtgttacacaaaaagttcttcacctggaaggctcaccggaggacacatacaggagagaaaccttacaagtgtacctgggaaggctgcacctggaagttcgctcgttcagatgaactgacgaggcattaccgcaaacatacgggagtgaagccattcaagtgcgcggactgtgatcgcagcttttcccggtcagatcatttggccctgcaccgccggaggcatatgttggtgtga

SEQ ID NO: 14333 - DNA, 351 bp, Homo sapiens
taatataaatgatgtggaaaactggagaaccaaagaagaacaccaagactatctaaaagtgttaaatttttcattagaaagaaaatgacttcatgacagttcttaagacaatgatagaacttggggaaatatgtattccttgatgtttctatgcatttgcaataataaacaatgaaaatatggttaaattttagaaagagataggcctgtggtattgtcacaagggtatacaaatactgagaatgactgctgaggcagtgctctccattggtggtgaccttcagaagagacctgtgtttccacatggcctagacacctggaaggcagagatcctaacattccatgacaccc

SEQ ID NO: 14334 - DNA, 394 bp, Homo sapiens
gtcagatttctacttaggcatcttatgttttcctttttttccattagtttttttcttaatcaaatttacatggtgagttcacggcagacacatctggctactgtgatttttccagctctgatgttctcactgcttttggaactttgtggtttatgcagcatagattagcctaaagtgcaccggcacatacacgcacaaacccagagacaaacaaacaaaaaaatacccatacactttttgggagatggtggaagtgaagtgttgggtgttgtgggtgttgtaggtgttgtaggattgttgtggtggaaagtttgtgtttatggaagaaaaggaacactggtgggcacaggacagggggaaaggtttctatttaaaaatgattttcttgattaaa

SEQ ID NO: 14335 - DNA, 720 bp, Homo sapiens
ggaagggcagcggggcgcaccaggccgaaggctcacgccacagggagggcagctaggacatggggggaagcgcgttaaaccagggagtcctggaaggggacgacgcccccggccagtccctgtacgagcggttaagtcagaggatgctggacatctcgggggaccggggcgtgctgaaggacgtcatccgagaaggagctggagacctagtggcgcctgatgcttcggtgctagatgcttcgtcttgggtaaactcctcgactcccaaggccccagcctccatctttacctcagagcctcctgaacctcctcctccagcctcaccttcctccagcctcaccactcctccctggacctgcagctccgcacccccgggggcctcagaactaccccttccagggcctcagaactacccctacggtttctcctgcgtaaccttctgcctaccttcctgagagtggttggtgacagcagccggggctagaaacctcgaggcgactgtgcttgagtcctctcttgctctttacatcccaaatcccatcaattgtcacgccttgtgccttccgcctctcaaatattcagaaagcagatgtatgctgggcacggtggtgactcaagcctataatcccagcacttcggaaggcggaggcaggaggatcgcttgaggccaggaattttagaccagccggggcaacatagtgaaaccccatctctacaaaa

SEQ ID NO: 14336 - DNA, 585 bp, Homo sapiens
tgacggcctcgccatgtgtcccatcatgccccacgcgctcccactgtgcgccccacctcgcacccgtgccccatcatgctctgcgtgctcgttaggtgccccatcatttcccgctcgctctcattacgtacccagcctccggcccctgtaagtgccccatcgtgctctctgtcgctccagttagatgccccatcctgccccgcgagctccaattacgtgccccacctaaccccccatgtccgtgccccatcatgccccgcacgctctggttacatgccccgcctggcgctcccgcacatgccccatcatgctcagcgcgctcccattacgtgccgccacctcgcgcccctgcaagtgcccaatgtgccctgtgtggtcccgttacgtgtcccatcatgttttgtgcgctccgattacgggccacacctggcaactcaccgtgcgacctctgtagttccagagctcgcgagggccagggccgttggcggcggttggaacgaaacgatgagtgcctcctcgtggccccagaatggaatgccgccgtcggtaggggtctgccgggcataaaggggccttcggaacccc

SEQ ID NO: 14337 - DNA, 1626 bp, Homo sapiens
tgacggcctcgccatgtgtcccatcatgccccacgcgctcccactgtgcgccccacctcgcacccgtgccccatcatgctctgcgtgctcgttaggtgccccatcatttcccgctcgctctcattacgtacccagcctccggcccctgtaagtgccccatcgtgctctctgtcgctccagttagatgccccatcctgccccgcgagctccaattacgtgccccacctaaccccccatgtccgtgccccatcatgccccgcacgctctggttacatgccccgcctggcgctcccgcacatgccccatcatgctcagcgcgctcccattacgtgccgccacctcgcgcccctgcaagtgcccaatgtgccctgtgtggtcccgttacgtgtcccatcatgttttgtgcgctccgattacgggccacacctggcaactcaccgtgcgacctctgtagttccagagctcgcgagggccagggccgttggcggcggttggaacgaaacgatgagtgcctcctcgtggccccagaatggaatgccgccgtcgtccctgtacgagcggttaagtcagaggatgctggacatctcgggggaccggggcgtgctgaaggacgtcatccgagaaggagctggagacctagtggcgcctgatgcttcggtgctagatattacattgtggggcatggagctgggccttctgagcatgcagagaggagagctggccaggtttctgttcaaaccgaactacgcctatggaacgctgggctcccctcccttgatccccccaaacaccactgtcctgttcaagattgagctgcttgacttcctagactgtgctgagtcagacaagttttgtgctctctcagctgtacgttgcagagcacaaatgtcagcactttatagagagacaaatgggttggtgtttttggtaattcttctagatggcctgccctgaggctgatcgtccgccactgcactccagcatgggcaacagagcaagactccatctcaaaaaaaaaaaaaaagccagctgggattttttttttgagacatgaccttgcactgttgcgcaggccggagagcagtgatgtgatcatagcccactgcagcctcaaactcctgggctcaagcgatcctccttcctcagcctcctgggtagctgggactacaggctggcaccacaacgcctggctaatttctatattttttgtagagatcatgttgccaggctggtctcaaatttctcggctcaagcaatcctcccaccttggctcttgaagtgccaggattacagaagtgagccgccacacccagccacagctgggattttgatagggattgtgttgaatctgtagatcacttctgaagtaatgaaattttaataatattaagtcttttaatccatgaacatgatttccttccatttatttaggtcttctttagtttctttcaatgatgtttatagtttctttttcttttggagatggagtcttgctctgtcacccaggctggagtgcagtggcatgatctcggctcactgtaacctctgcctctcggttcaaggctgcagtgggctatagtcgtgccacttcactccagtctgggcaacagagcaagatcctgttta

SEQ ID NO: 14338 - DNA, 709 bp, Homo sapiens
ggaagggcagcggggcgcaccaggccgaaggctcacgccacagggagggcagctaggacatggggggaagcgcgttaaaccagggagtcctggaaggggacgacgcccccggccagtccctgtacgagcggttaagtcagaggatgctggacatctcgggggaccggggcgtgctgaaggacgtcatccgagaaggagctggagacctagtggcgcctgatgcttcggtgctagatattacattgtggggcatggagctgggccttctgagcatgcagagaggagagctggccagagatcatgttgccaggctggtctcaaatttctcggctcaagcaatcctcccaccttggctcttgaagtgccaggattacagaagtgagccgccacacccagccacagctgggattttgatagggattgtgttgaatctgtagatcacttctgaagtaatgaaattttaataatattaagtcttttaatccatgaacatgatttccttccatttatttaggtcttctttagtttctttcaatgatgtttatagtttctttttcttttggagatggagtcttgctctgtcacccaggctggagtgcagtggcatgatctcggctcactgtaacctctgcctctcggttcaaggctgcagtgggctatagtcgtgccacttcactccagtctgggcaacagagcaagatcctgttta

SEQ ID NO: 14339 - DNA, 306 bp, Homo sapiens
ggggcatttgaactgagcccagaagtttgaataaaatttctatcactagaagctgggcacaggctcaggaggaagacattgcaggaagagggaactgtgtgagggagacatggaggccagagtactgctgacttagagggggaagaaactgatagcattaagcaggatactgagcaagcttcacccaccttctttgtcccttcttacagatattacattgtggggcatggagctgggccttctgagcatgcagagaggagagctggccaggtttctgttcaaaccgaactacgcctatggaacgct

SEQ ID NO: 14340 - DNA, 411 bp, Homo sapiens
tacataaatttagaattttcatacatacacgtaaaggtgtttggttttttaaaacagaaaaacgtaagcgcgttatctcccagtaatgtctttgcaggtaaattaaaataattacatatatatttatatttatatatatatattttttctaagagatggggttgttgcccaggctggtcttgaactcccgggctcaagtgatactcccacctcaggctcccaaagtgctgggactgtgggcatgaaccaccgggtccagcctacagaatcatttttaatggctgtatggatatcataatttgttcaaccagtccctaagttgttggacttttcaggtattgacagcttttcaggtctacaatcctagatgaatattcttatatgtaaatctgtacatgtccctgattattt

SEQ ID NO: 14341 - DNA, 1245 bp, Homo sapiens
gccatgcttacccttcagttgggcacctgtgtcctccttcccattggccttctggtcctacccaagtgtccagtccacgggtctcagtaacacctctttgcccagccctgtggtagcgttggctgcctcctttacctactcaagtaaccgctttaccactaatttattgttttgtgttttcatctataggatcttacctagccatatggcctgctgcctctgccaatttaaaaatagcattgaggctgtctgcaagacagtcaagctgcattgcaacactgcatgtctgactaacagcatacattgtcctgaagaagcatctgtagggaatccagaaggagcgttcatgaagatgttacaagcccgggaagcagcacatgagcactcagctgactattgagtcggaggcgccctcagacagcagtggcatcaacttgtcaggctttgggggtgatcagcttgaaattcagctaaccgagcagctacggtccctcatccccaacgaggatgtgagaaagttcatgtctcatgttatccggaccttgaaaatggaatgttcagaaacacatgtgcaagggagctgtgccaagctcatgttgcgaacaggcctcctgatgaagcttctcagcgagcagcaggaagcaaaggcattgaatgtagaatgggatacggaccaacaaaaaacaaattatattaatgagaacatggaacagaatgaacagaaagagcagaagtcaagtgagctcatgaaagaagttccaggagatgactataagaacaaactcatcttcgcaatatctgtgactgtaatactaataattttgattataattttttgtcttatagaggtgaattcacataaaagggcatcagaaaaatacaaagacaacccatcaatatcaggagcctgagcatgagttaaagcatgtggatggcctggagctatgtttttaaaattgttattaaatattggttttttacttaaatcaatgaaaactttctttactttgtggttgtgttcctcaaaatgagaatttttaacaataataaaaataaagcttgttagatcaacccacctattctaaccacttcttataaataaaatatcttgggggggggccggacccaattcgcctataggggggggttacaattactggcggggtttaaacggggtgattggaaaaacctggggtaccaaattaatgcttttggatccctttttcagtggggtatcgccccccc

SEQ ID NO: 14342 - DNA, 1531 bp, Homo sapiens
ggctatgatatgtgggagcagagaatggggtgggtgggtggagcacatgccagatgaggatctatcagcaatgggagggggcatcccgccctgctcctttagcatctccaccctgctcctctcagaggaccgcctttgattgcattcagctgcgatggtagcaagaacacgggcacactgaggatgaggagagtgggagccttgtgctctctctgcatatgaggcaggacagcacagggtatggagcagtctgcagagaggccagttcatcagctcatcagggaagcacttgtcttccaccttgggctttgactgagcactgggcaattggcccctggggatcaacggaataatcctaagcagagttactctatgtcacactatggaatgttccaagtaggtggccatgtcttttcctcctttcgttgttgccatttcataggtttaggtttgggtgtatgtttctcctctctgaatggcactcgaatgtttgctgactcttactctgtgtgactggggcatatagctatggactgagtatgaaagatgatcaaagatatttcatgatcaaagcagtctcttcttttctgacagctgaagaagcatctgtagggaatccagaaggagcgttcatgaagatgttacaagcccgggaagcagcacatgagcactcagctgactattgagtcggaggcgccctcagacagcagtggcatcaacttgtcaggctttgggggtgatcagcttgaaattcagctaaccgagcagctacggtccctcatccccaacgaggatgtgagaaagttcatgtctcatgttatccggaccttgaaaatggaatgttcagaaacacatgtgcaagggagctgtgccaagctcatgttgcgaacaggcctcctgatgaagcttctcagcgagcagcaggaagcaaaggcattgaatgtagaatgggatacggaccaacaaaaaacaaattatattaatgagaacatggaacagaatgaacagaaagagcagaagtcaagtgagctcatgaaagaagttccaggagatgactataagaacaaactcatcttcgcaatatctgtgactgtaatactaataattttgattataattttttgtcttatagaggtgaattcacataaaagggcatcagaaaaatacaaagacaacccatcaatatcaggagcctgagcatgagttaaagcatgtggatggcctggagctatgtttttaaaattgttattaaatattggttttttacttaaatcaatgaaaactttctttactttgtggttgtgttcctcaaaatgagaatttttaacaataataaaaataaagcttgttagatcaacccacctattctaaccacttcttataaataaaatatcttgggggggggccggacccaattcgcctataggggggggttacaattactggcggggtttaaacggggtgattggaaaaacctggggtaccaaattaatgcttttggatccctttttcagtggggtatcgccccccc

SEQ ID NO: 14343 - DNA, 1035 bp, Homo sapiens
ctggacctggagcttagcataactacagagcctactacagaggttaaaccgtctccaaccacggaggaaacctcagctcagcctccagacccggggcttgccataactccagaacccactacagagattggacattccacagccctggagaagactagagctcctcatccagaccaggttcagactctgcatcgaagcctgactgaagtcacaggtccacctacaaagttagaatcttcgcaggattcattggtgcagtctgaaactgcaccagaggaacagaaggcctccacaagcaccaacatatgtgagctctgcacctgcggagatgagactctgtcatgtgttggtctcagcccaaagcagaggctccgccaagtgcctgtgccagagcccgacacctacaatggcatcttcaccaccttaaatttccaaggaaactatatttcataccttgatggaaatgtatggaaagcatacagttggaccgagaaactaattctcagtgaaaattatttgactgaattacctaaggattcatttgaaggcctgctatacctccagtatttagatttatcctgcaataaaatacgatatattgaaagacaaacatttgaatcactaccatttttgcagtatataaatctgggctgcaatttaattacaaaactgagccttggaacatttcaggcctggcacggaatgcagtttttacacaacttaattctcaatcgcaatcctctgactactgtcgaagatccatatctctttgaactgccggcattaaaatatctagacatgggaacaacacacatcacacttacaacacttaagaacattctcacgatgactgttgaactggaaaaactgtaagttattttttcttagatttatttttacttagttggttttttaggtttgttttattattttcttaagtcaggtttattgagatttaattttcatataacattcaccctttataagtgtatagtttgatgagttttgacaaatgtatagttacataaccaccac

SEQ ID NO: 14344 - DNA, 742 bp, Homo sapiens
agtgacagagggtgatcctgtctctaagtaagtaaataaataaagtatatgggggggggtgtgttggttatatgcagacactgcaccattatacgtaaggtattgagcatccacagattctggtatggtgtgggggcgatatcctagaaccagtcctctgcaaggtagcaaggatgactgaactgtggaagaatcaaagcactgttaaacagcatacaattcctgtcttcaaaaaagttatctcatcgggtagatgagacttaaaatgaataaaaggaatgaatacacattggagatagtggttgttgtgatagataaccttaattgtgttttcttccaaaacaggtgaattcacataaaagggcatcagaaaaatacaaagacaacccatcaatatcaggagcctgagcatgagttaaagcatgtggatggcctggagctatgtttttaaaattgttattaaatattggttttttacttaaatcaatgaaaactttctttactttgtggttgtgttcctcaaaatgagaatttttaacaataataaaaataaagcttgttagatcaacccacctattctaaccacttcttataaataaaatatcttgggggggggccggacccaattcgcctataggggggggttacaattactggcggggtttaaacggggtgattggaaaaacctggggtaccaaattaatgcttttggatccctttttcagtggggtatcgccccccc

SEQ ID NO: 14345 - DNA, 620 bp, Homo sapiens
aatatctagacatgggaacaacacacatcacacttacaacacttaagaacattctcacgatgactgttgaactggaagaactaattctcagtgaaaattatttgactgaattacctaaggattcatttgaaggcctgctatacctccagtatttagatttatcctgcaataaaatacgatatattgaaagacaaacatttgaatcactaccatttttgcagtatataaatctgggctgcaatttaattacaaaactgagccttggaacatttcaggcctggcacggaatgcagtttttacacaacttaattctcaatcgcaatcctctgactactgtcgaagatccatatctctttgaactgccggcattaaaatatctagacatgggaacaacacacatcacacttacaacacttaagaacattctcacgatgactgttgaactggaaaaactgtaagttattttttcttagatttatttttacttagttggttttttaggtttgttttattattttcttaagtcaggtttattgagatttaattttcatataacattcaccctttataagtgtatagtttgatgagttttgacaaatgtatagttacataaccaccac

SEQ ID NO: 14346 - DNA, 468 bp, Homo sapiens
tgttgagtcaggtcccaccgagagccggcaaagagtctgactgtggggaccctgcccttttccagaaggtggaggtgcagaggagctcgtaaggatcacggcttctcaacctggccctgaacccactcacatcagcagctctctgcaaggccaactggacagacagctgtcaccaataaattaaaccttatttcttgccaggtgcagtggctcatgcctgtaatcccagcactttgggaggccaaagtgagaagatcacttgaggccagaagttcaagaacagcctaggcaatatagtaagaccctgcctttacagaaaattaggtgggagtggtggcatgtgcctgtggtcccagttactcaagaggctgaggcaggatgatttgttgagcttaggaggttgaggctgcagtgaactattgcaccactgcactccagcctggaggacaaagcaagaccttgtctcat

SEQ ID NO: 14347 - DNA, 719 bp, Homo sapiens
tcctaaaagtatgttccttagaactatacatagcaataaacatgttttctagctatagctctgtcttggtcatcctcattccctctctgatctttccccttgctttactaaataatttattaagcaatctttaattgtagtacaaaccacatctttgtcattctttggatgtagtgtcacaaaaatatcccagtccacatcagttacacccatagataagcttacagacagaggtaagaagggagcagtgagtggggtgcaagcattggcaatattgatgggcatcctctgtcctgtactgatgacctgaggttctggacattgggaattatagcacagactcaaaataaaacatttttttgccactgtgaaaaagtgtgttgattttgtaaattaatacaaattcttcaaagacatattcagaaaaaaattccatgatgtacatgtttaagtgaaggataactgtatgtccttacatagtgctgaaatatgtagaacattatagagctcatggatataaaatttgatgttgaacattatacagtcttcttaaatgcacatcttgctgtttaatgattgtgttaaaaattgctggccaggcacagtggctcacgcctgtaatcccagcacttggggaggctgaggcgggcggatcacgaggtcaggagatcgagaccatcctggttaacacgatgaaaccccgtctgtactaaaaatac

SEQ ID NO: 14348 - DNA, 221 bp, Homo sapiens
gatgatgtaccattaactaacttgactgaaaaaaaatttggaattgattaaagatgaattttgaaaatacagtatctctggctttattttgagtaaaagttaaaaaatcctgagctggctgggtgctcatgcctgtaaatcctagtacttttggagtccaaggtaggtggatggcttgagcccaggagttcaagaccagcctgggcaacatggcaaaaccc

SEQ ID NO: 14349 - DNA, 245 bp, Homo sapiens
ttattattatttattaacttttatacagcccagagtccccaagcctcacccgtctgcccagtctagtctggcatcaaaaatggcagctggcctggccagtcagtctccagagggacatgaggctttcctggggcaggaatgtaggggctcagggttcgctgctccaggccgggaggggaggttgcggcaagtcgagatcatgccactgccctccatcctggacaaccgagtgagaccctgtctca

SEQ ID NO: 14350 - DNA, 388 bp, Homo sapiens
aaagtctttttaacatgtcacaacaaagctccatgacaggcccctctggggcatctacgtggactcctcgagggcagggactgtgtttccagcacctttgtatccccatggctcagcgtggaactcatgtgactgaatgaactcaggctctctggggctcagcacctccgtcttcttagtgaacatcaaatacagcatatctgtggtataaaaagtgtccacaggaaacaaacaaatataggatatgtcctttgccttctccacagggctaccatggtgagagccacatgcgagatacacaggaaactttgacactgtccaattctgtccattgtggggtaagatgatcaaagaagtggaaatcctcttgcccattaaagcaagttaa

SEQ ID NO: 14351 - DNA, 370 bp, Homo sapiens
ggcatctgcccttggtccactgggtgctatcacccagctgccaaccttttcctgtccacccagccccttccttgcctgaacctatctgggtagacagtatggatattgcttattggtacaacaccctatcacacccaaagcaaggtacccaggctgtaactgggaggactgggatggaatgcatgtgagacaggcccctcccgagacagccatagtcccaagagacctgctttagttgaaactctgtccccatgggacctcattgggatgaaaggttctgacactgatgtatcatgaagcttgcacaatgtggtaaagttactaaaggccactgaatcgtgcagttgaaacgagtgaattttatgatatg

SEQ ID NO: 14352 - DNA, 372 bp, Homo sapiens
ccattataggtggcatggattggaactgagaattaatatgatgggtaatagtatcaggattcagtatctcagtaagttcgattaatgagctaaacatgattaaatttaataggaataaaagcaaaattcacacttaggtcctcagtctgctaccccagggcacatcaaatgatcaattaaataaacaaactagaatttagaggcagcactttgaaaaagcctcagtaacttcactcaggttcaacaatgtgatgtggtttataggctattatagttcatctgactttcacaataagtacgtgttaatggctatgaactgattacatccactaagtgattttttgctgttaaattttctctagtgcatggcct

SEQ ID NO: 14353 - DNA, 695 bp, Homo sapiens
gtggtgggcatcactgggtcctctcttggatagcatagtcctatgaccaaatgggtcagtcgttgatcaggcttcatgagaatatgatcgctgggagaaatatacagctaatttaacaacaaatgactgtcctaattctggagacctgggaagtattgatgagagtatagtgatcataagcagacattgggtgctttagcaaagccaatttgcctgcatcctctggaaggtaaagaagatctcctctctcttagaacttaatcaaactcttggcatccacagaaggctaggaggatgtaatgaatacttaccatttttgtggaagcccacaaccttttgaatggcctttctatactttagtgaacctccatgttatgaaccttacttcctcaagtctcttttgctgctaggaggcagacagtaacttcggtaattagaaacatctgcactcagcaacatgaagcacaagttgtgtgcagttgtccatatgctgtcatgagttttgccatatgtatcatctggctttcagaggacctttcatggttgtcacgttaagttcctgatacagaagtggcatcggtgctggtgttaatggctgcagtaaagtcaaattcctagattttagtgctctgtggtagcagagagaatggtggtagtttattttttctttcctttttttttaaaaaaaaaaaaaa

SEQ ID NO: 14354 - DNA, 403 bp, Homo sapiens
agcctatacttgaatctttaatgttcatcccaaaccctaaaggtagacattacccccattttatggaaaaggacactgaggctcagaaaggtgctgtgacccggccaaggcccccttgctagtgagtgcaaagccaggactcgaactgtcccccagcttctgtctcctcctgggccaggcttcccctgagctcctccctgcccccagccctggcctgcagctgcaagggttattttcatctctcctgtcattccagcaaaaccactgggccagtgagtcagtcttgtggttaagggaggaagggtactgttgggagcccgcaatggaagacgttttttcagcgggtggcccccgggcccttgccagtacccctgcaccgagagaagagccatgttcctctagg

SEQ ID NO: 14355 - DNA, 381 bp, Homo sapiens
caaacagtacttcaagacaggcctccctccccagctcaatcattgctgcacctaagcattcccacagagaagtcccccaggtagcctggctggtgggttaatgtcagagtggtgctggctctgaacgcagctgtgggagcactgctggtatcttaggatccggtggggtggagatttggagcccaggaagacccagcctgacctggtggtggtggcttcagaaagagctggagagggtagaggcccttgcctagggctcttactgcattgtatgtaagatgaaggccacagattggtgctgtcaagactgggaaggcctgtgggactcaggaccccagggtaagactgacctgcccctcctttcacctgagacagactggg

SEQ ID NO: 14356 - DNA, 3397 bp, Homo sapiens
  misc_feature (11)..(11): n is a, c, g, or t
ggctcgagcgnccgcccgggcagtaaaatgcctgcccgtgcagctcggagcgcgcagcccgtctctgaataagaagtgagtacaatggcgtgtttgtaaaaaaaagcttcaagtccgtctttttcaaaaaacattttgaatgctgcatgcctcatgcttcccagcgcctcgcgggagagacccggctatagagcaggagtggcggcacctgacttgctggatcctaaatctgccgctcagaactccaaaccgaggctctcgttttccacgaaacccacagtgcttgcttcccgggtggagagtgacacgaccattaatgttatgaaatggaagacggtctccacgatattcctggtggttgtcctctatctgatcatcggagccaccgtgttcaaagcattggagcagcctcatgagatttcacagaggaccaccattgtgatccagaagcaaacattcatatcccaacattcctgtgtcaattcgacggagctggatgaactcattcagcaaatagtggcagcaataaatgcagggattataccgttaggaaacacctccaatcaaatcagtcactgggatttgggaagttccttcttctttgctggcactgttattacaaccataggatttggaaacatctcaccacgcacagaaggcggcaaaatattctgtatcatctatgccttactgggaattcccctctttggttttctcttggctggagttggagatcagctaggcaccatatttggaaaaggaattgccaaagtggaagatacgtttattaagtggaatgttagtcagaccaagattcgcatcatctcaacaatcatatttatactatttggctgtgtactctttgtggctctgcctgcgatcatattcaaacacatagaaggctggagtgccctggacgccatttattttgtggttatcactctaacaactattggatttggtgactacgttgcaggtggatccgatattgaatatctggacttctataagcctgtcgtgtggttctggatccttgtagggcttgcttactttgctgctgtcctgagcatgattggagattggctccgagtgatatctaaaaagacaaaagaagaggtgggagagttcagagcacacgctgctgagtggacagccaacgtcacagccgaattcaaagaaaccaggaggcgactgagtgtggagatttatgacaagttccagcgggccacctccatcaagcggaagctctcggcagaactggctggaaaccacaatcaggagctgactccttgtaggaggaccctgtcagtgaaccacctgaccagcgagagggatgtcttgcctcccttactgaagactgagagtatctatctgaatggtttgacgccacactgtgctggtgaagagattgctgtgattgagaacatcaaatagccctctctttaaataaccttaggcatagccataggtgaggacttctctatgctctttatgactgttgctggtagcattttttaaattgtgcatgagctcaaagggggaacaaaatagatacacccatcatggtcatctatcatcaagagaatttggaattctgagccagcactttctttctgatgatgcttgttgaacggtccactttctttgatgagtggaatgacaagcaatgtctgatgcctttttgtgcccagactgttttcctctctctttccctaatgtgccataaggcctcagaatgaatgagaattgtttctggtaacaatgtagctttgagggatcagttcttaacttttcagggtctacctaactgagcctagatatggaccatttatggatgacaacaatttttttttttgtaaatgacaagaaattcttatgcagccttttacctaagaaattttctgtcagtgccttatcttatgaagaaacagaacctctctagctaatgtgtggtttctccttccctgcccccacccctaggctcacctctgcagtcttttaccccagttctcccatttgaataccataccttgctggaaacagtgtgtaaaatgactgaagtgatgatgcccgaagatgaaatagatgccaaattagatggacattgaagcaacactcagcgttgcctagcgttaaaggcactgcagagaaatgaggtgcagaggtggcccctctgagtatttatttgactcaggtaccagtggtacatatatacagtgtaattatgaccaggctggtaaaattggctgctcgcaaacaatccccttttttcctggcagtatttggaatttatcatttattaataactatacatttttaaaggcagaagaagaactatcatctatctatctatctatctatctatctatctatctatctatctatctatctaaatgacctgacagaagaaaactgttaaaaatggatattattggaggggatttaaaacagtgggtgtgaattatcattctgatggaaagaaaatagcaaaacaatgtgttacaagtatttgctaataaacagtatactgccagcttctaattgctttttgatgtatgaaaggcttatataattttcttttcgttgggtgacttttgccagatgagaggaggtggcacagtggtgagtgcagggcacagtcctagccttctgtgggtatacttttggagttgtgacttggctgtgagggcagaagttgaagttgggatcactgtgactttgcacatggaaaaatgcagattgcaggcataattcatctctgacattagagaaaaagctgttatagcacaatttaaattttgagagtttgctgtgtttttttttcacataaaagaggctgattattctttttagtttaattttatatcctgtaattctttggatggttccaagattcagaaaaaattcagtaaatgcaccccgtaaattgctaccctttcctttattttcatacttaagatctgctgtacattgtatatatatataatttttaaaatgcagaaagaaaataatttccctaaatataattgcaaactgatttcttttacttttttgtgtctgggggtgggagctgtatctgaataagtggcattcagattagggtcttgaaaaataaacccagaatctttaaaagaagcaaataaactaatagacgcttattttccaaaatttaaatttaagctagaaatgtaaatattcaattaatttgttaaaagtacttttataaagttaaaaaaaatccaaccaaaattttagaaagtcaggctcttttagaaagaaagctacacccatttcctcaaataactgttccgaaaatttatatggtggaatgcgccatgtataaactgtgaattgtattgacaaataaagtttgtaattaaagtcagcaaaaaaaaaa

SEQ ID NO: 14357 - DNA, 3338 bp, Homo sapiens
  misc_feature (11)..(11): n is a, c, g, or t
ggctcgagcgnccgcccgggcagtaaaatgcctgcccgtgcagctcggagcgcgcagcccgtctctgaataagaagtgagtacaatggcgtgtttgtaaaaaaaagcttcaagtccgtctttttcaaaaaacattttgaatgctgcatgcctcatgcttcccagcgcctcgcgggagagacccggctatagagcaggagtggcggcacctgacttgctggatcctaaatctgccgctcagaactccaaaccgaggctctcgttttccacgaaacccacagtgcttgcttcccgggtggagagtgacacgaccattaatgttatgaaatggaagacggtctccacgatattcctggtggttgtcctctatctgatcatcggagccaccgtgttcaaagcattggagcagcctcatgagatttcacagaggaccaccattgtgatccagaagcaaacattcatatcccaacattcctgtgtcaattcgacggagctggatgaactcattcagcaaatagtggcagcaataaatgcagggattataccgttaggaaacacctccaatcaaatcagtcactgggatttgggaagttccttcttctttgctggcactgttattacaaccataggatttggaaacatctcaccacgcacagaaggcggcaaaatattctgtatcatctatgccttactgggaattcccctctttggttttctcttggctggagttggagatcagctaggcaccatatttggaaaaggaattgccaaagtggaagatacgtttattaagtggaatgttagtcagaccaagattcgcatcatctcaacaatcatatttatactatttggctgtgtactctttgtggctctgcctgcgatcatattcaaacacatagaaggctggagtgccctggacgccatttattttgtggttatcactctaacaactattggatttggtgactacgttgcaggtggatccgatattgaatatctggacttctataagcctgtcgtgtggttctggatccttgtagggcttgcttactttgctgctgtcctgagcatgattggagattggctccgagtgatatctaaaaagacaaaagaagaggtgggagagttcagagcacacgctgctgagtggacagccaacgtcacagccgaattcaaagaaaccaggaggcgactgagtgtggagatttatgacaagttccagcgggccacctccatcaagcggaagctctcggcagaactggctggaaaccacaatcaggagctgactccttgtaggaggaccctgtcagtgaaccacctgaccagcgagagggatgtcttgcctcccttactgaagactgagagtatctatctgaatggtttgacgccacactgtgctggtgaagagattgctgtgattgagaacatcaaatagccctctctttaaataaccttaggcatagccataggtgaggacttctctatgctctttatgactgttgctggtagcattttttaaattgtgcatgagctcaaagggggaacaaaatagatacacccatcatggtcatctatcatcaagagaatttggaattctgagccagcactttctttctgatgatgcttgttgaacggtccactttctttgatgagtggaatgacaagcaatgtctgatgcctttttgtgcccagactgttttcctctctctttccctaatgtgccataaggcctcagaatgaatgagaattgtttctggtaacaatgtagctttgagggatcagttcttaacttttcagggtctacctaactgagcctagatatggaccatttatggatgacaacaatttttttttttgtaaatgacaagaaattcttatgcagccttttacctaagaaattttctgtcagtgccttatcttatgaagaaacagaacctctctagctaatgtgtggtttctccttccctgcccccacccctaggctcacctctgcagtcttttaccccagttctcccatttgaataccataccttgctggaaacagtgtgtaaaatgactgaagtgatgatgcccgaagatgaaatagatgccaaattagatggacattgaagcaacactcagcgttgcctagcgttaaaggcactgcagagaaatgaggtgcagaggtggcccctctgagtatttatttgactcaggtaccagtggtacatatatacagtgtaattatgaccaggctggtaaaattggctgctcgcaaacaatccccttttttcctggcagtatttggaatttatcatttattaataactatacatttttaaaggcagaagaagaactatcatctatctatctatctatctatctatctatctatctatctatctatctatctaaatgacctgacagaagaaaactgttaaaaatggatattattggaggggatttaaaacagtgggtgtgaattatcattctgatggaaagaaaatagcaaaacaatgtgttacaagtatttgctaataaacagtatactgccagcttctaattgctttttgatgtatgaaaggcttatataattttcttttcgttgggtgacttttgccagatgagaggaggtggcacagtggtgagtgcagggcacagtcctagccttctgtgggtatacttttggagttgtgacttggctgtgagggcagaagttgaagttgggatcactgtgactttgcacatggaaaaatgcagattgcaggcataattcatctctgacattagagaaaaagctgttatagcacaatttaaattttgagagtttgctgtgtttttttttcacataaaagaggctgattattctttttagtttaattttatatcctgtaattctttggatggttccaagattcagaatctgctgtacattgtatatatatataatttttaaaatgcagaaagaaaataatttccctaaatataattgcaaactgatttcttttacttttttgtgtctgggggtgggagctgtatctgaataagtggcattcagattagggtcttgaaaaataaacccagaatctttaaaagaagcaaataaactaatagacgcttattttccaaaatttaaatttaagctagaaatgtaaatattcaattaatttgttaaaagtacttttataaagttaaaaaaaatccaaccaaaattttagaaagtcaggctcttttagaaagaaagctacacccatttcctcaaataactgttccgaaaatttatatggtggaatgcgccatgtataaactgtgaattgtattgacaaataaagtttgtaattaaagtcagcaaaaaaaaaa

SEQ ID NO: 14358 - DNA, 3342 bp, Homo sapiens
  misc_feature (11)..(11): n is a, c, g, or t
ggctcgagcgnccgcccgggcagtaaaatgcctgcccgtgcagctcggagcgcgcagcccgtctctgaataagaagtgagtacaatggcgtgtttgtaaaaaaaagcttcaagtccgtctttttcaaaaaacattttgaatgctgcatgcctcatgcttcccagcgcctcgcgggagagacccggctatagagcaggagtggcggcacctgacttgctggatcctaaatctgccgctcagaactccaaaccgaggctctcgttttccacgaaacccacagtgcttgcttcccgggtggagagtgacacgaccattaatgttatgaaatggaagacggtctccacgatattcctggtggttgtcctctatctgatcatcggagccaccgtgttcaaagcattggagcagcctcatgagatttcacagaggaccaccattgtgatccagaagcaaacattcatatcccaacattcctgtgtcaattcgacggagctggatgaactcattcagcaaatagtggcagcaataaatgcagggattataccgttaggaaacacctccaatcaaatcagtcactgggatttgggaagttccttcttctttgctggcactgttattacaaccataggatttggaaacatctcaccacgcacagaaggcggcaaaatattctgtatcatctatgccttactgggaattcccctctttggttttctcttggctggagttggagatcagctaggcaccatatttggaaaaggaattgccaaagtggaagatacgtttattaagtggaatgttagtcagaccaagattcgcatcatctcaacaatcatatttatactatttggctgtgtactctttgtggctctgcctgcgatcatattcaaacacatagaaggctggagtgccctggacgccatttattttgtggttatcactctaacaactattggatttggtgactacgttgcaggtggatccgatattgaatatctggacttctataagcctgtcgtgtggttctggatccttgtagggcttgcttactttgctgctgtcctgagcatgattggagattggctccgagtgatatctaaaaagacaaaagaagaggtgggagagttcagagcacacgctgctgagtggacagccaacgtcacagccgaattcaaagaaaccaggaggcgactgagtgtggagatttatgacaagttccagcgggccacctccatcaagcggaagctctcggcagaactggctggaaaccacaatcaggagctgactccttgtaggaggaccctgtcagtgaaccacctgaccagcgagagggatgtcttgcctcccttactgaagactgagagtatctatctgaatggtttgacgccacactgtgctggtgaagagattgctgtgattgagaacatcaaatagccctctctttaaataaccttaggcatagccataggtgaggacttctctatgctctttatgactgttgctggtagcattttttaaattgtgcatgagctcaaagggggaacaaaatagatacacccatcatggtcatctatcatcaagagaatttggaattctgagccagcactttctttctgatgatgcttgttgaacggtccactttctttgatgagtggaatgacaagcaatgtctgatgcctttttgtgcccagactgttttcctctctctttccctaatgtgccataaggcctcagaatgaatgagaattgtttctggtaacaatgtagctttgagggatcagttcttaacttttcagggtctacctaactgagcctagatatggaccatttatggatgacaacaatttttttttttgtaaatgacaagaaattcttatgcagccttttacctaagaaattttctgtcagtgccttatcttatgaagaaacagaacctctctagctaatgtgtggtttctccttccctgcccccacccctaggctcacctctgcagtcttttaccccagttctcccatttgaataccataccttgctggaaacagtgtgtaaaatgactgaagtgatgatgcccgaagatgaaatagatgccaaattagatggacattgaagcaacactcagcgttgcctagcgttaaaggcactgcagagaaatgaggtgcagaggtggcccctctgagtatttatttgactcaggtaccagtggtacatatatacagtgtaattatgaccaggctggtaaaattggctgctcgcaaacaatccccttttttcctggcagtatttggaatttatcatttattaataactatacatttttaaaggcagaagaagaactatcatctatctatctatctatctatctatctatctatctatctatctatctatctaaatgacctgacagaagaaaactgttaaaaatggatattattggaggggatttaaaacagtgggtgtgaattatcattctgatggaaagaaaatagcaaaacaatgtgttacaagtatttgctaataaacagtatactgccagcttctaattgctttttgatgtatgaaaggcttatataattttcttttcgttgggtgacttttgccagatgagaggaggtggcacagtggtgagtgcagggcacagtcctagccttctgtgggtatacttttggagttgtgacttggctgtgagggcagaagttgaagttgggatcactgtgactttgcacatggaaaaatgcagattgcaggcataattcatctctgacattagagaaaaagctgttatagcacaatttaaattttgagagtttgctgtgtttttttttcacataaaagaggctgattattctttttagtttaattttatatcctgtaattctttggatggttccaagattcagaaaaaattcagtaaatgcaccccgtaaattgctaccctttcctttattttcatacttaagatctgctgtacattgtatatatatataatttttattttttgtgtctgggggtgggagctgtatctgaataagtggcattcagattagggtcttgaaaaataaacccagaatctttaaaagaagcaaataaactaatagacgcttattttccaaaatttaaatttaagctagaaatgtaaatattcaattaatttgttaaaagtacttttataaagttaaaaaaaatccaaccaaaattttagaaagtcaggctcttttagaaagaaagctacacccatttcctcaaataactgttccgaaaatttatatggtggaatgcgccatgtataaactgtgaattgtattgacaaataaagtttgtaattaaagtcagcaaaaaaaaaa

SEQ ID NO: 14359 - DNA, 1973 bp, Homo sapiens
  misc_feature (11)..(11): n is a, c, g, or t
ggctcgagcgnccgcccgggcagtaaaatgcctgcccgtgcagctcggagcgcgcagcccgtctctgaataagaagtgagtacaatggcgtgtttgtaaaaaaaagcttcaagtccgtctttttcaaaaaacattttgaatgctgcatgcctcatgcttcccagcgcctcgcgggagagacccggctatagagcaggagtggcggcacctgacttgctggatcctaaatctgccgctcagaactccaaaccgaggctctcgttttccacgaaacccacagtgcttgcttcccgggtggagagtgacacgaccattaatgttatgaaatggaagacggtctccacgatattcctggtggttgtcctctatctgatcatcggagccaccgtgttcaaagcattggagcagcctcatgagatttcacagaggaccaccattgtgatccagaagcaaacattcatatcccaacattcctgtgtcaattcgacggagctggatgaactcattcagcaaatagtggcagcaataaatgcagggattataccgttaggaaacacctccaatcaaatcagtcactgggatttgggaagttccttcttctttgctggcactgttattacaaccataggatttggaaacatctcaccacgcacagaaggcggcaaaatattctgtatcatctatgccttactgggaattcccctctttggttttctcttggctggagttggagatcagctaggcaccatatttggaaaaggaattgccaaagtggaagatacgtttattaagtggaatgttagtcagaccaagattcgcatcatctcaacaatcatatttatactatttggctgtgtactctttgtggctctgcctgcgatcatattcaaacacatagaaggctggagtgccctggacgccatttattttgtggttatcactctaacaactattggatttggtgactacgttgcaggtggatccgatattgaatatctggacttctataagcctgtcgtgtggttctggatccttgtagggcttgcttactttgctgctgtcctgagcatgattggagattggctccgagtgatatctaaaaagacaaaagaagaggtgggagagttcagagcacacgctgctgagtggacagccaacgtcacagccgaattcaaagaaaccaggaggcgactgagtgtggagatttatgacaagttccagcgggccacctccatcaagcggaagctctcggcagaactggctggaaaccacaatcaggagctgactccttgtaggaggaccctgtcagtgaaccacctgaccagcgagagggatgtcttgcctcccttactgaagactgagagtatctatctgaatggtttgacgccacactgtgctggtgaagagattgctgtgattgagaacatcaaatagccctctctttaaataaccttaggcatagccataggtgaggacttctctatgctctttatgactgttgctggtagcattttttaaattgtgcatgagctcaaagggggaacaaaatagatacacccatcatggtcatctatcatcaagagaatttggaattctgagccagcactttctttctgatgatgcttgttgaacggtccactttctttgatgagtggaatgacaagcaatgtctgatgcctttttgtgcccagactgttttcctctctcttcctaatagtggctcatttgcttgtgtgtgactcatggttgatacattatggggtctgattcagcaagggaagtttggtctgctgaaacagagaatgacacccaaggccacttcagtttctaggatactggcttgacgacaagcgtggctctgctgagaaaggaaaagctcaaaaggcgtctccatctttgggaagctgaaacgggtgtggagggaaaaagagcagcagggagcgcccttcagagcctgtgtgagatgaccatga

SEQ ID NO: 14360 - DNA, 319 bp, Homo sapiens
taatgtccgtaagttaatgcctagatttaatttagattttcatcacatagccactactcagaaaggctcagcttgtccatgatttcaacatttccttccatgaaggtctaaagagcaactcttaatacttaagcacagacagatcatacataaccaaaaaagaaggtcaagagtgcactcaataagctcttccgtcaggagcttccgatttgacagctcgtcaagttgacaagctgacacccgagcttcagagatcatctggaatgttgatgatatctgtgccctatttcaagccaagaactctaggccactagccagc

SEQ ID NO: 14361 - DNA, 527 bp, Homo sapiens
ataagagctgttttaaggaaactcagtgatctccaagataacacagaaaagcaattcagaaatgtatcagagaacctgaacagagaataaaataattttttaaaatcaaacagaaatcttggaactgagaaatatgtttgctgcactgaaatatccattagaggctctcaacagcagaatgtatcaagcagaagaaagaatcagtgagctccaagacaggctatttgtgaatacacagtcagaagagaacagagaaagaaaaagagcaaatattgactgaaagagatagaaaatatctcaaatgaccaaaactaagaattactgctgttcaggagggagttgagcaagagcaaggagtagaaagtatattcaacaaaataacagaaaactttccaaaatttaagaaagagatgaatatccagggacagggaaatcatagaacagcaaacagatttgacccaactaagactaccccaaagcatataataaactctcataggtcaaggagaaagaattataaaagcagc

SEQ ID NO: 14362 - DNA, 434 bp, Homo sapiens
taataatcatgagttacacattctgtttgctctagaaatcaagaaacagaatagtggatcatttaaggccagaaactatatccactacttgtatctcccttttgggatggttttctgatgtttttttcagtgtgtgtcatttgtataaccctggccggctgtcttgaaaatatatgtcactaatcatggtagggggtaggtgggtgagggggtcatctgattggttgtttacataaattagttgtagtgtctgttatcttcatatttaaataactgtatatgttagtataaaactccagtataaaatgggcagctggccaggtgctatggctcacatctgtaatcccagcactttgggaagctgaggcaggaggatcgtttgagctcaggagttcgagaccaacctaggcaacatgaggaaacctcatctttac

SEQ ID NO: 14363 - DNA, 180 bp, Homo sapiens
aaattctcgtaatatgccatatgttcacttacctctctgggatcctttgttcagcctccttttgtcctatgacctttctttcttattcaaattctagatctttactgattgcttcttattgcttcatggtcccttttctttcctttgcatcgtgtgtgtgtgtgtgtgtgtgtgtgtgtg

SEQ ID NO: 14364 - DNA, 137 bp, Homo sapiens
ataaacccatactcttttaaagtggtttctagggtttcggagtcagacctttgacttaactgactatgtctgttagccaaaatggataagaatggctttttaaaagaacatgttttacaggaccagaagttttgttg

SEQ ID NO: 14365 - DNA, 334 bp, Homo sapiens
agaccagattgaaataatctgggtcaggggatgaaaaccttagattaagatgaagacagagtgatttaaaaacctgaatttttaatgcagattacacttaaaaattgataaaatagaaaagggatatactaggagtgagctctcctgcatattgagaaattaaattgtgtagaaaatactgctttaggttttttcccagtcgtttcttagattaaatcagtgtatataaataaggtttttggaaagtctttttagcatgtacacatatttaaatttaaaactacttgtctttaaaaaaggattataacctgcaaacaagtttgtggttctatgt

SEQ ID NO: 14366 - DNA, 379 bp, Homo sapiens
aatgatatgcttcaaaatgttaaaaagaaatatcatttcttcagagaagacacacacaaatggaagaatatcccatgctcatggataggaagaatcaatatcattaaaatggccatactgcccaaagcaatttacagattcaatgctattcttatcaaactaccaactatattcttcacagaactagaaaaaactattttaaaattcatatggaaccaaaaaaagggcccagatagacaaagcaaccataagcaaaaataacaaagctggagtcatcatgttactcaacttcaaactatattacaaggttacagtaaccaaaacaggatggtactattacaaaaacaggcatatcaatcaatggaacagaatagagagc

SEQ ID NO: 14367 - DNA, 488 bp, Homo sapiens
aagacggagtctcgctctgttgcctaggctggagtgcagtggtgtgatctcggctcactgcaacctccgcctcccgggttcaagcgattctcctgcctcagcctcccaagtagctgggactacaggcatgcgccactacgccctgctaattttttgtatctttagtagagacggggtttcaccatgttagccaggatggtctcaatctcctgacctcatgatccacccgcctcagcctcccaaagtgctgggattacagacatgagccaccacacctggccgatgcttagtaattacaaagggaaaagtagccactttacagtacagagacctggttggactctctctgtcacccaggctggagtgcagtggtgcgatctcggctcactgcaacctctttcccgggttcaagcgattctcctgcgtcagcctcctgactagctgggattacaggcactggtggataccatcttaaccaatgatccaag

SEQ ID NO: 14368 - DNA, 429 bp, Homo sapiens
ctcttaaacgctatattgtattggcttgtttttcttacacttgccatggggttattttagaataaaatatgctatcgaatgaaatatgtgaatggactctgtaattgcattcatttgattccatcgtttaaaagctctctttttgttttgcttcctctgatgagggaagttccaaggtcatgtttattagaggcctttgaatagtttatgtaaatgagaatatcgtttaactgttctatgcaataccaataaccaatatggctattttagaccattttgttccacataactggtcttaaatagctgaaagttttctatgtaataaaccaattgcgtatgttctttaagttttgtcttaataaatcaatcactatatatttcggtcaaactcttactttgtgcttcgttcaataaaaattttctatagta

SEQ ID NO: 14369 - DNA, 416 bp, Homo sapiens
tggccccgtggaccttttaggccagatggttttttgttgtgggggctgtcccaggcctggtaggatgctgagcagcgcccctgacctctcccctcaccagccgagacagccacaactgtcaccggacattgacgaaagtcccgtagagagaaaggctcccccgcaggtgagaccactgtcctagacgattatcccggcaggtgagtttactgttacacattgcataggccgtgcaggtgatgccggagtcccgctttattcccgccttgggctgtttttgggagttctcaagccctgagttaagagctgcttacaaaactcagaggcaatcaatcacatatgttctagacccaaggccacctcagggcagaatcagcacctggaagcttccctgacgagactcgactctcaggaag

SEQ ID NO: 14370 - DNA, 3229 bp, Homo sapiens
ctcttgattacatgtatcaatttcaccagttatgacttctaaaaatttatatattttttaaaaacaagaccactattattaactaacttgaacaattgtatcatccaaaggccaaagatcatatggcagatcagggaagtcatgaagttgatttggtcttgacgtggaaaaccattaaacaacaaaagcaactgaacccatgtatgcacagaaacaatcaaacactagttcattttatagtgcccaggaaaatgttccttcttttaaaatggattttatttgaaagcgcagaaaatgaaaactagtgagatatatttttggtattataataggcaattggttgaggttcaagtttagtttcaggtaatattatcagggaagattccatgttttaaaatagtatttatggatcatgggtaggttaagaaagatgcattggcatatagtcttgatagttaagtccacgattatcattttagaatccaggctatgcttgctgctctttttatccacattttaaattacaattgcattttttacttgttcagtgcacactttgatgcaccacaagtgcattaattttgaatcgtgtgcaatatagaaatattttgagactcacaacattgaaacaaggtgacaccctagttgactttatcactaatgtgatttgaacattatttaaacaaatctagactgaacatgaaagaaaggagttttgggcagtgacatttttcacagaatgtatatctcaaaggtgaaagcagagtttttccagtgcaataaaaagaaacagaatatgcagattttgagctactcactctatagaggataacctaacacggctgaaaattgagctgggacattcagacgaaagtgacaatccatggacagaatagggaataacaggtgtgaagagaacaaacttatcactgaatgtttgcaagctggttaaggcatagccttgatggctctctagcaaactgtagaaacaatgtagctttgggtagtttcatgctttgcagaatttcttagactataaagtgacacagcctggaatataggttgataattcactataggtcttcaaaatacttatctttgaaaaccgcttctctgtttggtggggtacaatttgggggtcatttccttatgctctttcttaaatggagttttcattttgatgttagtttatgtataataggtaggatgcaaaaagatatgtaattgaaacaaaaaacattggactaaaatatcagtaattgaacatgtttatgtttgattattatttacactatggaaagatgcaattctagtactttgttaggaaactgcattaaagcagttctgccttgtataatctgtaagtacctattaagacaaaatacttctaaagatacttatgaaatgtatacacattttttcttgcacgttacaaagaaaatactcaattgcataacacggatgtttgacaaacttttttttttttaatgcatttctttctttcatgagacattgaaaccactgatagctcatttcaccctatcttaaacccttctcttgtctataaaactaatacgggtcacaccggaccttcggattaattggatccacattccccaatgatgtttgcaccccattcaagatagccatgccattgtcatttaactcgtgaacctctctttaaaactaaaatggatgtgaaagaataaaattcagtgtactgtaagtattcacagtaattctagtagaattagctgtcataacatgtttattatataatgagctggcatgacacagaaatatattttgtgtttgtatgacttttattttaaataggttaaatctggtgccactccatatatagagtgcttttgaaaaaaaatcaataaaagaaacaaaaaaaataaatgagtgaatgcaaaataagcaactgtgccttttatacctgttgttacggtaaaaaaacggttgttgggtttggacaatgaggggaaatgggctattcccaacttttttgatcctgtatatttgtccatgtttattttctgaacataataaataatatattaaaaatttgccttctgacaaactcagataaggaccagtcttaaatattgttatgtcataaagcaaagttaaggcattaatatgggctgcttaaatctgactagaagatgaaagcgtttattgtaagtgtaacacagagatactatcaggagtgaaatcagtccatttggcaaggtaaaatactgatttagagttttattctttatttcttttttgttgtgtttctttcagctatggtttcattttggttgtacagtatataaaccatatttgttttctgtacacaagactctcaagtgaattttgcatgcattatacattaggacacatttataaattaatgagtaactatataaatttatgtgtattaaaacgtctgtagcttcaatctaaaatctactgctctttctgaatctccagatatcatttctgtatggtttctgactggcctgctgcctgagtttcagaaaacaagggaggcattatttttatgggaggaggaactaagatggtactgaggatgtctgactgaaacactaccctaggaagctgtcttgtaggaaaatagaataaaacacacagaccagaagaaattgtcaagaatcaaacagccatccaaaaacagtcatgagaaatctaaagacctaaataatcttaggtatatgctctcagtgagaaataagaaaatgtgtccttaagcaaaaataaataaataaataaataaataaataaataataaaaagtgagcatgatcatgaatatagtaaatcttgtgagttgtgacctaggtgaaggtataatgataacatctggaggaagcatcatttgttcagctacctagggtttactttcagacttttcctacagtttaaagcacttgcgttcagtgtggtacgatctgtttgtaatgttaatcattgactattgttctgctacttggatgttgatagtgaagcagagaacaatttatcatcgtttattatgagtcactatgcacgcaactatgcttaacatggcgaaatgtattaaacactcgtccaactatttatgaaatactttgcataatttaatttgcttttgtacagttttatgtaaataaattgcttgtcatttttgtctctgcaaattaaaatataacatggtcaaatggttaaaaaaaaaa

SEQ ID NO: 14371 - DNA, 2411 bp, Homo sapiens
  misc_feature (2411)..(2411): n is a, c, g, or t
ctcttgattacatgtatcaatttcaccagttatgacttctaaaaatttatatattttttaaaaacaagaccactattattaactaacttgaacaattgtatcatccaaaggccaaagatcatatggcagatcagggaagtcatgaagttgatttggtcttgacgtggaaaaccattaaacaacaaaagcaactgaacccatgtatgcacagaaacaatcaaacactagttcattttatagtgcccaggaaaatgttccttcttttaaaatggattttatttgaaagcgcagaaaatgaaaactagtgagatatatttttggtattataataggcaattggttgaggttcaagtttagtttcaggtaatattatcagggaagattccatgttttaaaatagtatttatggatcatgggtaggttaagaaagatgcattggcatatagtcttgatagttaagtccacgattatcattttagaatccaggctatgcttgctgctctttttatccacattttaaattacaattgcattttttacttgttcagtgcacactttgatgcaccacaagtgcattaattttgaatcgtgtgcaatatagaaatattttgagactcacaacattgaaacaaggtgacaccctagttgactttatcactaatgtgatttgaacattatttaaacaaatctagactgaacatgaaagaaaggagttttgggcagtgacatttttcacagaatgtatatctcaaaggtgaaagcagagtttttccagtgcaataaaaagaaacagaatatgcagattttgagctactcactctatagaggataacctaacacggctgaaaattgagctgggacattcagacgaaagtgacaatccatggacagaatagggaataacaggtgtgaagagaacaaacttatcactgaatgtttgcaagctggttaaggcatagccttgatggctctctagcaaactgtagaaacaatgtagctttgggtagtttcatgctttgcagaatttcttagactataaagtgacacagcctggaatataggttgataattcactataggtcttcaaaatacttatctttgaaaaccgcttctctgtttggtggggtacaatttgggggtcatttccttatgctctttcttaaatggagttttcattttgatgttagtttatgtataataggtaggatgcaaaaagatatgtaattgaaacaaaaaacattggactaaaatatcagtaattgaacatgtttatgtttgattattatttacactatggaaagatgcaattctagtactttgttaggaaactgcattaaagcagttctgccttgtataatctgtaagtacctattaagacaaaatacttctaaagatacttatgaaatgtatacacattttttcttgcacgttacaaagaaaatactcaattgcataacacggatgtttgacaaacttttttttttttaatgcatttctttctttcatgagacattgaaaccactgatagctcatttcaccctatcttaaacccttctcttgtctataaaactaatacgggtcacaccggaccttcggattaattggatccacattccccaatgatgtttgcaccccattcaagatagccatgccattgtcatttaactcgtgaacctctctttaaaactaaaatggatgtgaaagaataaaattcagtgtactgtaagtattcacagtaattctagtagaattagctgtcataacatgtttattatataatgagctggcatgacacagaaatatattttgtgtttgtatgacttttattttaaataggttaaatctggtgccactccatatatagagtgcttttgaaaaaaaatcaataaaagaaacaaaaaaaataaatgagtgaatgcaaaataagcaactgtgccttttatacctgttgttacggtaaaaaaacggttgttgggtttggacaatgaggggaaatgggctattcccaacttttttgatcctgtatatttgtccatgtttattttctgaacataataaataatatattaaaaatttgccttctgacaaactcagataaggaccagtcttaaatattgttatgtcataaagcaaagttaaggcattaatatgggctgcttaaatctgactagaagatgaaagcgtttattgtaagtgtaacacagagatactatcaggagtgaaatcagtccatttggcaaggtaaaatactgatttagagttttattctttatttcttttttgttgtgtttctttcagctatggtttcattttggttgtacagtatataaaccatatttgttttctgtacacaagactctcaagtgaattttgcatgcattatacattaagctgatcctggccggccggcn

SEQ ID NO: 14372 - DNA, 692 bp, Homo sapiens
ctaatgctatccctcccccagtgcccagccccccgacaggccccggtgtgtgatgttccccaccctgtgtccaagtgattccattgttcagttcccacatatgattgagaacatgtggtgtttggttctcgctgtcctttttataaagccccagtgtctcgattatttttgctttgcagcaagtcttaaaatcaggtacacagtgtgggtcttccagctttattcttttatagaattgtttgagtatttaaggttctttgaccttccataaaaatgttagaatcagcttgtccatatctccaaaaaactcttgccaacattttggttggaattgatattaaattttagatcagactggggagcattgactgtatatgtagcatcttagcaatataaagttgccaacacatgaacatattatgtctctccaactacttaggtctttgattaagaaaaaaaaatcagcattttgtagttttcaacatacctttaataagttgtgttagatttaatcctatatacgtatgtgtttatttgggggggctattgtgaatggtctatatgtacacataagtgcatatgtatagatttcctttatttaaaattcccattgttaattggtttggggggttttttgtttgtttttgttttttgagacagggttttactctgtcactcaggctggagtgcag

SEQ ID NO: 14373 - DNA, 1048 bp, Homo sapiens
ggtgaaccagacagggagcagacgggaggatgcttcagaaatccaggcatctggggagtagttcccagtagactttggaatggagggtgatgcagagactaacgtgttggagtgtgcaaaccagagactagtaataagtgaaactgatggcgagatcttgacaccagggtgggacacccaggaccggatgggagttgagagtagaaccaacattcaggaactagggaatagaaaccagagggaggctggaggtgagaatctccctgaaacccaggcacatatgggagagaaccaagaacagttaagatgtaaaattgatgcagagacccaaacacctgagtgggagaaccaggataagaatggaagtgaggatgctgtggagacccagacatttgagaagaaggacaagaaagaggctggagaggaggatggggaagagatccaggctcaaggattggggaagcaaggccagactggagatgagaatggtgaggagacccagacaccacagtgggagaaacaagatcagatgaaaggtgatgcggatgtggaaattcagatggaagaggggagaaacaaggatcaggttggaggtcaggatgctgcacaaacccaatcatgtgggagggagaacgtgggagaagtaaaaaaagagaatagtgtagagacccaggccttggattggggaaaacaggaatgtgttggaaatgggaatgttacagagatccagacaccaaggtgggagaagcatgatcaaggtggaagtaagaaagctaagaagacccaagcatctgggggagagaaccagaaacaattaagtcatgaaattcaagtggggtggggaaataagggcctgagaagagatgaagatgctaaggaaacccagatagctaccaagaagaagctcagggagataagagaaggattgggtggtgatccaggcactatggtggggaaaccggagacaagtagcaagtgaaatttatagagaatttgagatactatgttgggagaatcagaactggattggaggtgaacatagagcaga

SEQ ID NO: 14374 - DNA, 2856 bp, Homo sapiens
aggctgagatccaggaacaattaaaaggtgaaactgatgtggagactcagagcaatgagccacttagagaagaggatggtacagacattcagtcactagggaggagagaggttaaaggtgaggatgataaagacacccaggaacttgggaggaaaaatcagggtcagttaggaaatgaatttagtggaaagattcacataccaaaggggaagaatcaggaacatattagaggcgaagatggtgcacatacccagatatctgagtcagggaactggggcaaattaacaagtcaaattgatggagaaatgcattcagcagaatggaagaaagatcagcagattggaggtgagaatggggcagaaattcagatacaagggaagagaaacctgagagaagttggaggtgaggacggtgtaaagacctgggcacctgggaaagaaacccagagtcagtttagaagtgatcttggtagaaagatccttttatcagagtggaagagccagaagcagatgggaagtgagaatggaacagaaattcaggctccagtggagagaaaccagagagaacctggaggtgaggacggtgtaaagactcagagacctaagagagagaacgaggaccagttagatagtgaaattggagggagccattcaccagggaggaggaactgggagctgattggaaaggatgttgcagaaaatcaggcatcagagaagagaaaccagagagaggttggaaacgaggacggtagaatgatctggaggcttaggggaaaaaactggaggcttagagcgaagaaacagactgttaaaaagtaaagataatggaaagacccgtttatcagagtggaagagaaacctgagagggaccacagctgatgatggtacagagacccaggctcctgcaggagatgaccagggacagttaagagttgaaattgatgaagagatccaggtacaagggcaaggaaataagaatgacggtggagttgaggatgttgcagaactccaggatataggaagccagagaaagtgcacagatgaggatgttggagagcctcgagcaccaaggggaggaaacaaggatctggtcagaggagaggatgctgtgagggacagtctccaagtcgactgttctgggagtgagaggcccacaggcaggaagcacagcctaccatggcctccagccttcactggctatggatgtgggacccgggaacaggaacaggcagtggctgtgaatggtttcatctctgccccctgtcctgagatgaatcctgtcccccactggggtgaagtcttcctgctggtgggtggggagggagagcatctggccagccagggcacaacccctgccagggatcatagagtggggatcagtccagcctcccagcaggcccaacctgaatcctggagaagacgacaaagggacaaaggggtggatccagagaaggcccccagcctgactcggcagtcccaaaaccctccgtctctgacagctcccttgggcatgccctctgcctgctcctgtctcccgtgtggcccagccccggaagctgccatcattctagcgggtcctcccaccgccctcactgtcctgcccaaggggacaggcctcaagaagagcaaacgactgctcctggagtccctcatgcggaggaggattgcacacctgaagtggggtcttccccggcggatcctggagtcctatttcctgtttaacttcttaggatcttgctcattgacccttgctggggcgaggctctctggactgaacacaggccaggagctccaagcccagcaggaaaggtattgtgaggcccaaggctccccaccaggccttaagtccccagagaggttccagagggttcagcgcccagacagaaaaagctcgaaacttcctatacaagccagagctctggagaggaacagaccgcacatgtcagagcccattaagcatttccatccagcctgaaaaggccaggagagtcaggccaccagggggcgccagagaaccacaggagatccaggaagcgcttgctaggaccaagctcccagctcccaggacccccaggccggcagcggagtccaggagctggtgtggcccacaaagggtcggagagcctcccagtgagaacagtaggggcaggaaaatgatcaggtcaagggtctcccagctggcagagagggctcccagcagagtgaggacttcattctctagggcagaccacgcccactggaggaaggaatgtacatcctgggaggcctctaagctccccagactcaaatgccagcagctcacatactggagaagaggaagcctggaatctacagggtgcagaggggctgggcagcagccttcctgccattctgcagaacctgtcagcttcaaagggaggctccactctgcggtggcaaagctgggcctgacccttctggccaagatgtcctggtccccacagctcgccaagcgcaagcacttggcccctaacctgagcctgagggaacctgattctactctgcctcccaaagtgggtgatcctcgtgcaggggaggacagcatcggagatcacactgcttcacagagggatcttcagctgcaaggtcactgctgtactggggccacccttcctaagacagagagtccccagggccaggaggcacctgggaacccaaatggggctccacagaatacacgagcctccaaaaagtttagtattatgaagcatctgaatttttttctcttccagaatggctttaaaaagtagactcaggcccagagtcctcaggacatatcagaaaagctttgagagtgtcctgatccctgcaaagcctctaataaattggtcatttgggc

SEQ ID NO: 14375 - DNA, 2951 bp, Homo sapiens
aggctgagatccaggaacaattaaaaggtgaaactgatgtggagactcagagcaatgagccacttagagaagaggatggtacagacattcagtcactagggaggagagaggttaaaggtgaggatgataaagacacccaggaacttgggaggaaaaatcagggtcagttaggaaatgaatttagtggaaagattcacataccaaaggggaagaatcaggaacatattagaggcgaagatggtgcacatacccagatatctgagtcagggaactggggcaaattaacaagtcaaattgatggagaaatgcattcagcagaatggaagaaagatcagcagattggaggtgagaatggggcagaaattcagatacaagggaagagaaacctgagagaagttggaggtgaggacggtgtaaagacctgggcacctgggaaagaaacccagagtcagtttagaagtgatcttggtagaaagatccttttatcagagtggaagagccagaagcagatgggaagtgagaatggaacagaaattcaggctccagtggagagaaaccagagagaacctggaggtgaggacggtgtaaagactcagagacctaagagagagaacgaggaccagttagatagtgaaattggagggagccattcaccagggaggaggaactgggagctgattggaaaggatgttgcagaaaatcaggcatcagagaagagaaaccagagagaggttggaaacgaggacggtagaatgatctggaggcttaggggaaaaaactggaggcttagagcgaagaaacagactgttaaaaagtaaagataatggaaagacccgtttatcagagtggaagagaaacctgagagggaccacagctgatgatggtacagagacccaggctcctgcaggagatgaccagggacagttaagagttgaaattgatgaagagatccaggtacaagggcaaggaaataagaatgacggtggagttgaggatgttgcagaactccaggatataggaagccagagaaagtgcacagatgaggatgttggagagcctcgagcaccaaggggaggaaacaaggatctggtcagaggagaggatgctgtgagggacagtctccaagtcgactgttctgggagtgagaggcccacaggcaggaagcacagcctaccatggcctccagccttcactggctatggatgtgggacccgggaacaggaacaggcagtggctgtgaatggtttcatctctgccccctgtcctgagatgaatcctgtcccccactggggtgaagtcttcctgctggtgggtggggagggagagcatctggccagccagggcacaacccctgccagggatcatagagtggggatcagtccagcctcccagcaggcccaacctgaatcctggagaagacgacaaagggacaaaggggtggatccagagaaggcccccagcctgactcggcagtcccaaaaccctccgtctctgacagctcccttgggcatgccctctgcctgctcctgtctcccgtgtggcccagccccggaagctgccatcattctagcgggtcctcccaccgccctcactgtcctgcccaaggggacaggcctcaagaagagcaaacgactgctcctggagtccctcatgcggaggaggattgcacacctgaagtggggtcttccccggcggatcctggagtcctatttcctgtttaacttcttaggatcttgctcattgacccttgctggggcgaggctctctggactgaacacaggccaggagctccaagcccagcaggaaaggtattgtgaggcccaaggctccccaccaggccttaagtccccagagaggttccagagggttcagcgcccagacagaaaaagctcgaaacttcctatacaagccagagctctggagaggaacagaccgcacatgtcagagcccattaagcatttccatccagcctgaaaaggccaggagagtcaggccaccagggggcgccagagaaccacaggagatccaggaagcgcttgctaggaccaagctcccagctcccaggacccccaggccggcagcggagtccaggagctggtgtggcccacaaagggtcggagagcctcccagtgagaacagtaggggcaggaaaatgatcaggtcaagggtctcccagctggcagagagggctcccagcagagtgaggacttcattctctagggcagaccacgcccactggaggaaggaatgtacatcctgggaggcctctaagctccccagactcaaatgccagcagctcacatactggagaagaggaagcctggaatctacagggtgcagaggggctgggcagcagccttcctgccattctgcagaacctgtcagcttcaaagggaggctccactctgcggtggcaaagctgggcctgacccttctggccaagatgtcctggtccccacagctcgccaagcgcaagcacttggcccctaacctgagcctgagggaacctgattctactctgcctcccaaagtgggtgatcctcgtgcaggggaggacagcatcggagatcacactgcttcacagagggatcttcagctgcaaggtcactgctgtactggggccacccttcctaagacagagagtccccagggccaggaggcacctgggaacccaaatggggctccacagaatacacgagcctccaaaaagtttagtattatgaagcatctgaatttttttctcttccagaatggctttaaaaagtagactcaggcccagagtcctcaggacatatcagaaaagctttgagagtgtcctgatccctgcaaagcctctaataaattggtcatttgggcaaaaaaacaccaaaacacactacaacaaaccaaccccaaacacaaaacaccacacccccaacacaagggggggcgcgccaacaaaaaccaccggg

SEQ ID NO: 14376 - DNA, 1046 bp, Homo sapiens
aggctgagatccaggaacaattaaaaggtgaaactgatgtggagactcagagcaatgagccacttagagaagaggatggtacagacattcagtcactagggaggagagaggttaaaggtgaggatgataaagacacccaggaacttgggaggaaaaatcagggtcagttaggaaatgaatttagtggaaagattcacataccaaaggggaagaatcaggaacatattagaggcgaagatggtgcacatacccagatatctgagtcagggaactggggcaaattaacaagtcaaattgatggagaaatgcattcagcagaatggaagaaagatcagcagattggaggtgagaatggggcagaaattcagatacaagggaagagaaacctgagagaagttggaggtgaggacggtgtaaagacctgggcacctgggaaagaaacccagagtcagtttagaagtgatcttggtagaaagatccttttatcagagtggaagagccagaagcagatgggaagtgagaatggaacagaaattcaggctccagtggagagaaaccagagagaacctggaggtgaggacggtgtaaagactcagagacctaagagagagaacgaggaccagttagatagtgaaattggagggagccattcaccagggaggaggaactgggagctgattggaaaggatgttgcagaaaatcaggcatcagagaagagaaaccagagagaggttggaaacgaggacggtagaatgatctggaggcttaggggaaaaaactggaggcttagagcgaagaaacagactgttaaaaagtaaagataatggaaagacccgtttatcagagtggaagaaccaggaacagggtggaggtgggaatgatgaagaaattcaaatacaggggaagcggacgatgactatgtagagactggtcaagcccctttacaggatttgagcccatccaaaaaaagagctgtccagcgactaggggatggagccaatgccgtgcgagcaaatcccttgtcgctagcgccgtacaagcaaggg

SEQ ID NO: 14377 - DNA, 720 bp, Homo sapiens
ggtgaaccagacagggagcagacgggaggatgcttcagaaatccaggcatctggggagtagttcccagtagactttggaatggagggtgatgcagagactaacgtgttggagtgtgcaaaccagagactagtaataagtgaaactgatggcgagatcttgacaccagggtgggacacccaggaccggatgggagttgagagtagaaccaacattcaggaactagggaatagaaaccagagggaggctggaggtgagaatctccctgaaacccaggcacatatgggagagaaccaagaacagttaagatgtaaaattgatgcagagctcgccaagcgcaagcacttggcccctaacctgagcctgagggaacctgattctactctgcctcccaaagtgggtgatcctcgtgcaggggaggacagcatcggagatcacactgcttcacagagggatcttcagctgcaaggtcactgctgtactggggccacccttcctaagacagagagtccccagggccaggaggcacctgggaacccaaatggggctccacagaatacacgagcctccaaaaagtttagtattatgaagcatctgaatttttttctcttccagaatggctttaaaaagtagactcaggcccagagtcctcaggacatatcagaaaagctttgagagtgtcctgatccctgcaaagcctctaataaattggtcatttgggc

SEQ ID NO: 14378 - DNA, 2691 bp, Homo sapiens
aggctgagatccaggaacaattaaaaggtgaaactgatgtggagactcagagcaatgagccacttagagaagaggatggtacagacattcagtcactagggaggagagaggttaaaggtgaggatgataaagacacccaggaacttgggaggaaaaatcagggtcagttaggaaatgaatttagtggaaagattcacataccaaaggggaagaatcaggaacatattagaggcgaagatggtgcacatacccagatatctgagtcagggaactggggcaaattaacaagtcaaattgatggagaaatgcattcagcagaatggaagaaagatcagcagattggaggtgagaatggggcagaaattcagatacaagggaagagaaacctgagagaagttggaggtgaggacggtgtaaagacctgggcacctgggaaagaaacccagagtcagtttagaagtgatcttggtagaaagatccttttatcagagtggaagagccagaagcagatgggaagtgagaatggaacagaaattcaggctccagtggagagaaaccagagagaacctggaggtgaggacggtgtaaagactcagagacctaagagagagaacgaggaccagttagatagtgaaattggagggagccattcaccagggaggaggaactgggagctgattggaaaggatgttgcagaaaatcaggcatcagagaagagaaaccagagagaggttggaaacgaggacggtagaatgatctggaggcttaggggaaaaaactggaggcttagagcgaagaaacagactgttaaaaagtaaagataatggaaagacccgtttatcagagtggaagagaaacctgagagggaccacagctgatgatggtacagagacccaggctcctgcaggagatgaccagggacagttaagagttgaaattgatgaagagatccaggtacaagggcaaggaaataagaatgacggtggagttgaggatgttgcagaactccaggatataggaagccagagaaagtgcacagatgaggatgttggagagcctcgagcaccaaggggaggaaacaaggatctggtcagaggagaggatgctgtgagggacagtctccaagtcgactgttctgggagtgagaggcccacaggcaggaagcacagcctaccatggcctccagccttcactggctatggatgtgggacccgggaacaggaacaggcagtggctgtgaatggtttcatctctgccccctgtcctgagatgaatcctgtcccccactggggtgaagtcttcctgctggtgggtggggagggagagcatctggccagccagggcacaacccctgccagggatcatagagtggggatcagtccagcctcccagcaggcccaacctgaatcctggagaagacgacaaagggacaaaggggtggatccagagaaggcccccagcctgactcggcagtcccaaaaccctccgtctctgacagctcccttgggcatgccctctgcctgctcctgtctcccgtgtggcccagccccggaagctgccatcattctagcgggtcctcccaccgccctcactgtcctgcccaaggggacaggcctcaagaagagcaaacgactgctcctggagtccctcatgcggaggaggattgcacacctgaagtggggtcttccccggcggatcctggagtcctatttcctgtttaacttcttaggatcttgctcattgacccttgctggggcgaggctctctggactgaacacaggccaggagctccaagcccagcaggaaaggtattgtgaggcccaaggctccccaccaggccttaagtccccagagaggttccagagggttcagcgcccagacagaaaaagctcgaaacttcctatacaagccagagctctggagaggaacagaccgcacatgtcagagcccattaagcatttccatccagcctgaaaaggccaggagagtcaggccaccagggggcgccagagaaccacaggagatccaggaagcgcttgctaggaccaagctcccagctcccaggacccccaggccggcagcggagtccaggagctggtgtggcccacaaagggtcggagagcctcccagtgagaacagtaggggcaggaaaatgatcaggtcaagggtctcccagctggcagagagggctcccagcagagtgaggacttcattctctagggcagaccacgcccactggaggaaggaatgtacatcctgggaggcctctaagctccccagactcaaatgccagcagctcgccaagcgcaagcacttggcccctaacctgagcctgagggaacctgattctactctgcctcccaaagtgggtgatcctcgtgcaggggaggacagcatcggagatcacactgcttcacagagggatcttcagctgcaaggtcactgctgtactggggccacccttcctaagacagagagtccccagggccaggaggcacctgggaacccaaatggggctccacagaatacacgagcctccaaaaagtttagtattatgaagcatctgaatttttttctcttccagaatggctttaaaaagtagactcaggcccagagtcctcaggacatatcagaaaagctttgagagtgtcctgatccctgcaaagcctctaataaattggtcatttgggc

SEQ ID NO: 14379 - DNA, 385 bp, Homo sapiens
ttgagaaagggtctcactctgtcacctaggctggaatgcagtggcgtgatcacgactcactgcagccttgacatccgtaggctcaagtgatcctcccatcccagcctcatgagtatctgagactacagacatgcgccaccatgcctagctaatttttttgtattttttggagacggggttttaccttgttgccccaagctggtttcgaactcctgggctcaagtgatatgcctgctcaagcctcccaaagtgttgggagtacaggcgggagccaccatgccctgcaacagacatatctttatttacatccagctctattagtgattgcatcctttgattggtagcagctttgagaaaattgtgaggcctacatttgggctgagaa

SEQ ID NO: 14380 - DNA, 432 bp, Homo sapiens
gctacctcacttccttttgctcctgcctattttctgagctggcactttaaacttcctggagattttatgagctactctagtttctttcaaccaatttcttttctacttgctatggactgaattttgtcatctctctactcctccattcatatgttgaagtcctaacccccagtgtgactatatctggaggtaggatctttggaagtaattaaggttaaatgaggtcataagagtgggaccctaatcagataagaccaagactttataggaagaggaagagagaaagagaaacctctctctttcatgtgaggatgcagcaagaaggcagctgtctgcaagccagggacctcaccagaaaccaaaccctgtcaagccttgattgtggactttccagccttcagaatgtgaaaaataaatttctgttatttaagc

SEQ ID NO: 14381 - DNA, 463 bp, Homo sapiens
agttgtctcagaatcatcctccgttgacatctccatctccaggacagctccacactaatctgtttcaaagacaaaatccagtctaatcagtttgatgtatgtttctgggaatagagccgaatgttgtagctgatggaatggagtctcataccattgattttgcagctggacaagtgccctgccatgttactgccactctttaaggcagaatagagcacattgtatcatttataggcctctcacagtgagaaatatgtggaactttggaaatcagaatctaaaactgcagtccaatggggtagccactattcacatgtgctattgagtacctaaaatgtggctagaccaagttgacatgtgctgaagggtgaaaaacaccaggagtgaagaattaacttgaaaaaaatgtaaactatctcaattttatattgattacaaattaaatgatgttttgaataaaaaa

SEQ ID NO: 14382 - DNA, 447 bp, Homo sapiens
agaaagaaagaaaaaagtaatgggaagtaatagtaaatgtggatccagaaagaaaaacaaaggttaagaaaatgatgtatgtgaaagaaaaaaagctctataatcagtgtgtttctctcacctaaaacaccatttactaactacttggttcagttgtaccctttaactctattttgtccttgacttatatcaacactcttcttttccaaactcctatagctctccatctggaatgattctatggggtggggggtcgggggaggagaaagggagacagcagaagaaagaaagagagagaaagatagagagagagagagagatgggtggagacttggcctctctcctagaggttcaaagttagaatatgccactaacactatctgcctttcaaactcccttctaggacatgctccatagtacttagatcttatatcaaatgacaaggtt

SEQ ID NO: 14383 - DNA, 796 bp, Homo sapiens
actggactggatccatgattggattggatctgataattaactgacttggattcagttaagaggctgcagatgtccaggatcaggcagaaactagcagaaatggtaatattacagtgggtgcagacttcagaaatttgcagagatttttgtgttctacattctttttcttgtacccttaggtagggaaaaatcattaactaaattgatgaaggggatctgaggaccaaatccaggattctagggaaatattggatccttagtatctgaagaacaccgtattctaccttctagctataaggtagaatgtataaatattaggcctcagaagaaataactacttacagaaatggcaaaatctttgtaacttaaaattacaatggaccgttcctaatgaacaacacagcacttaaaaatgaggggtcctgaattagtcttcaaggatgcctattgatgtgcagaagcttctaaaaacatttcaatatttttattgctttattaaaagacttcataaaaggcaaatagggccaggtgtggtggctcatgcctgtaatcccaacacgttgggagatcaaagcaggaagatcgcttgagcacagcagttcaagacaagcctatgcaacatagtgagatctcctctctacaaaaaattaaaaatcagctggatgtggtggtgtacacctgtagttccagctactcaggaggctgaggtgggaaattcacttgagcccaggaggtaaaggctgcaaatcagctgtgactgtgcctttgtgattacacagagggaaaccctgtcttt

SEQ ID NO: 14384 - DNA, 485 bp, Homo sapiens
gtgctggtgggacgtgggtctctgcagctgggctgggaggctgcacgtgggcctgatgggttcttactgagagcctgggctgactctgacagctcttgtggccaccagttaacttcaagaggactccaggagatggaaagaccaaatagtttggggggcagggcttgtgctaggaccaagttcatccatcactgctgtgggaacgtatggctcatgattcaccagtggtgtgcggcatgaaagctgggtaccttgctgggaggtcccttgttctttcctccttccagaagcttcccacctatcttcatccacattcgtccaataggttgtatttcacactctcagccgatggctttaggcacaagctttgtgtgggtcactctggttagagcattttacacaccctcatgtcaagaagatcaggtcagtgatatcttttcactccactctttagacaccacataatggaactgaaatcttattag

SEQ ID NO: 14385 - DNA, 483 bp, Homo sapiens
ccaggatgaaagttttaattttaaaatgcaaattgtacaagatatttaattgttgaaataacatacaagacattctggatgtagaatgttaagtctatattagaaaagaattttttttctatttttagccatagaaattttttccatatttgtttctttttcaaatgctattgtcatgagtagatatccatgtcttttttctgagatttctaattttaaaatgcattgctcatttaactattctaaattatcataggcacatcaaggccattgaaatgaaaaaataaatggtattaagccttaatcatttacaaagaagaatgctctcttaatctgctataatgaacatgtacatggaattaatgaatattcacacttcttccaaatgtatgtaaataagattttgataaattagacaaaaatatatgacattccataccatgtcattttataataagcccactacttttatacagtgctgta

SEQ ID NO: 14386 - DNA, 299 bp, Homo sapiens
caacactttagagtaacggaagcatgttaaagccattggaaaatttgaaggcaaaagtacatctttagtcagtgtgctgattgctcccttgagtagagcagaatttctcacctctgaaaatatatgaaagtgccatacatactgttctgaactcacagaataatatgaacaacttattaaaaacattcagtgaatgaaaagagtatttcttatcactgtttaatattttgagggagttaaagaagtataacgacatttactctcaaagaatttacagtctggttgaggattcaaggcat

SEQ ID NO: 14387 - DNA, 424 bp, Homo sapiens
acaagtaacacaatacacagtggaacagtattcagccttttaaaagaaggcaatcctctcactcactgtaacatgggtgaaccttgaagacattatgctaagtgaaataagtcaaccatgaaaagacaaatctgctaactctgcttgtatgaggtatctcacacagtccaactcttagacacataaagcagaatggtggatcccaggggctggggtggggaggaggcagttttgttcaatggctatggagtttccggtttgcaagatgagagggtcatggtgatatagatggtatgactgtactgtgtgcttacggaacggtgtctacgctataaatggataaagtggttgctgtataaaatggttgatggcaaattgtatacatatataacagtatctttttaaattaaaaaatgttaacaaa

SEQ ID NO: 14388 - DNA, 458 bp, Homo sapiens
caggtccccaaagaatttctgcaggctgggactcctgagtgaaatgaagaagtgggattcaacagagagaaatgtgaagtctgccagctagccctgagaagcaggcatgacaagagaggatgcccgtgttacagatgagaaaaacagaggccctgggaggaagcttgcctaatgccactcaggaggtagaggcaaagctgggaaaggccctgggtccccagactgcccctctggaactccacatgcagccacctggctgtcctgcccgggatgccatccgcaggctaggctggcgctcatgcccatgccctgctgtccactgacaccccgcagagcttaacaccccgctgagcctgccctgcagcccttgccaagtctgtccgagtggcctcagtcattggcaagtcacattgctgacatcgcaactgcataaaattaatttatttagttaagggagg

SEQ ID NO: 14389 - DNA, 393 bp, Homo sapiens
cactcttccttttaattttcttcttcaatttttgtggatatcttcatttgcttccatcttctgtaatgttttctttgtttctctgtgttatactttattattatttatttgcttatcatgctctagcctcattttaattggcttccaggggagactagagataaacatatgtgttcagactattatgcttaacctgaagtctgtaacatttttcaataaacacttttaaaattcagaacatttattcagtgcctactatatgtcaagctcttggctgagaagctgctccttgaatttttagtgtttacaatgattattgaaaatatatttcaggcttcattaaaccaagctccttatgtatttctgccaagtaataaatatattaagtaagtg

SEQ ID NO: 14390 - DNA, 189 bp, Homo sapiens
ctatacatattgatggatatatggatatcaataggaagatacattaactagactatagaacttgggtcatttttattttccttatagctttcattttattttccaagtttttctacaatgaatataaacttctataatcagaaggaaatgtcttctcacatatactccctcttttaaaaagggtccatg

SEQ ID NO: 14391 - DNA, 464 bp, Homo sapiens
aaccaatgcatactatttcattttacaaatataaattaatgtacctatcaatcctctattgatggtcatttgtttaccattttttgctgttgtaaatcttcagtgaggatctttatacagatattcttgtacatttatgagaatgcctgttgaatacattcccacaagagaaattattggatgaaatagtacatgcaatttttagttttcaaaatgccagactttctgaagagttgtgacaactaccaccagcaaggtctgaggcattctttttcacattcttactgacatccagttttgtcaaacttactttttgccaatcagatgggtaacaggtgttacctcattttaatttgcatttctttggataatgagagaaggaaaccgtctcttcttgtccatttatatttgtttttgtgaatctgcctagtcgggttctttgtccatatgtatattgcatttcc

SEQ ID NO: 14392 - DNA, 344 bp, Homo sapiens
gtatccaacctgaccttattcatagtcaggacagtgttgtgagttcaagaacagagagtagctgccaaaaataatgatcttttctgtgttctctgatcctgggaaggggtgagtggctctagtttccctctaacatcctcctctctctctctctctctgtgtacatgtgtgagtgtttgcttatgcaagaaaggaaggaagaggaccgagctggtgcaaagccagcttctctcagggtatctttcttccataccatctctacttcctcagaatccttgatctgccaaagagaaatccggaaaatgatgaaatggccatttcacttctatgtgttttgaatgcaa

SEQ ID NO: 14393 - DNA, 453 bp, Homo sapiens
gtaaaaactgggatcatcttttccttgaacgtgttgtagaatcccctggaaaaccttcgtggcctggttttattgtatgtgtgtattcggtatttattgttgcataaccagtaccccagatcttggtggtttaaaacaataaaatacattacgtcacagtttctgagggtcaagaatttgggagtagtttagttgagtggctgtggctcagggtctgtcatgaggttgccatcaaaatcttggctggggctctaatcatcatgactgcggctggaggatttgcttccgacatatcccgctcacgctgttggcagttccctggtggctcacggcaggcagccttgggtccttgccatatggaccccttgagtgtcctcatgacatggcagctggcttccccctttcgttcttcaaagaattgtggggtttttggcttttttttttataagatct

SEQ ID NO: 14394 - DNA, 488 bp, Homo sapiens
tgaagtcttagaattgagatgctttttaagggaagcttttgtcctgggaaaatgatacctctaatatttaagatgaggtagtatctaagtctattctaaacagttttttgttagaatgatttttctttgttgtaaaaagttgttaatcagccgcctattgtgggttgttaacatctcaaaagggtgtttaaaaataataaaccccaattgctcccaacaattaaccttgggaacaaaagtaaatgtgaatgcttcttaaccacctttctaagccctcagtgaagctggcagccatcagttaaataaaccattaagtttattagtttaagaatagaagtgtcaacttggacacagttttctaatttgctcctcatttacccaacaatcatttattcaaaggctgctctgcctagtagactttagataaatctacaaataaaagccagagactgatgggcagctggaactctaagggaatcatccaaatg

SEQ ID NO: 14395 - DNA, 515 bp, Homo sapiens
ttgctttagatttcacactcaggcagcgacacacagtagctaagagactagacttggtcagacagaatgggaatctggtaggttttaccacttactaacccacataacattgggaaagtaacattagctaattgttaattactaaggcactgttcaaagtgcttaacttgaatgaattcatttactcctcaaaagtccctatgagataggatcctataaatgaggtaactgaggtaaaaacagtaagtaatatactcaagatcacagagctggtaaaataaagaactgagaataaactcaggtagccctgttgctaaagcctatattcttaaccacttcattggtggtttttaaaaaatttaaatacaacccactccaagaagtaattttttaagggctgggtgtggtggctcacacatgtaatcccagcactttgggaggctggggtgggcagatcacctgaggtcaggagttcgagaccagcctgaccaacatggagaaatcccgtctctaca

SEQ ID NO: 14396 - DNA, 468 bp, Homo sapiens
gaagtcaaactgggggttagtattgggaagctgaaattcaccactctctagagttcttcagtgaagtaacacactttgaagagcactgactggtcaggccaggctcctgtgtagtaagatgaggggactcccaaatgactgctgattcactttccgtagaacagatgcaagacttcccctgggtttgctgagtctttatctagggttggtttttgttgtcttttatttttaaactctgcccaacgggctgttttgatctcagaagagtttgaaacaagtttcccaggcatgtatccccatttacagtgtgcccagattccgtcctagatcgctcacatatcaccctacctctccagcctgctttctctagcagcagaccccagcacttcccagtgcccatggggctttaccgcaactgccgccagctcttccctgcacccatcccctccatgccctcccttccctcgc

SEQ ID NO: 14397 - DNA, 484 bp, Homo sapiens
agataataagtgtgtgtggttttaaagcattaaatatgtggtaatttgttatgcagcattagaaaatacaagcagtttagagcctaccatggaaaatgcaatagcccatatgacatataaaacaaggtggagaagcatttacttgcttgaattcattttaggaaaagtacttgtttggggggaataaaagtagagagactttgttgaatgagccccagggctgcccccaaggctactgtacaaccaaaaagatgatggtgtttttttattaagagaaagatgtatgcttatgggtattccagagatcatcaagattttgagtgcttctccccctggcacatgctcccttgaagtttgcatctcactcttgctttgctctgatctgtatcacatagggaagatggctctttgaatctgcttcttgctggataccactaataggaggcactggaaggagattggagtggaagggtgataggggaat

SEQ ID NO: 14398 - DNA, 376 bp, Homo sapiens
aaagacagatttataagggaaaagcaaacaagtttattaatgcgtgccgcacaccacacaagaaaccccaaggaaaagtaactcaagggctgatcacagtggcttatgcctgtaatcccagcactttgggaggctgagttgggcagatcacttgaggccaggagtttgagaccagcccagccaacatggtgaaaccccatctctattaaaaatacaaaaattagctgggcttgatgatgcacacctgtaatcccaactcaggaggctgaggcagaaatattgcttgaacctgggaggcggaggttgcagtgaaccgagattgtgccactgcactccagcctgggtaacagagcaagactatgtctcaaaaaaaaaa

SEQ ID NO: 14399 - DNA, 333 bp, Homo sapiens
atgaaggaaattcacacatgaacctgagactcttccttgtcaatgaccattttaaaacccaggcagtcacaaaactttattatggaataaaggatgggtttggataacaagatgatgcttttaaaagaaaacaatttaatcttgatatttttctttatgatgagacagaaaattttattgttataaataccagtctacaggaccaatgttaatatttttagatttgttttatggtgaatagaagtgaaatataatatgtttagaaaaatattttatgtttttaaatattgggaaactttgcctttttaaaacaccattatttagaaagaaaat

SEQ ID NO: 14400 - DNA, 708 bp, Homo sapiens
actcattacctttgaaccaacctgggaggcagccttgtgactcacctcaatcctcaatcttctcagctagttcactttggcctggctcaggggctgacctagaatgatcctgtccagaaggaccctggatgttcttagagacacagactgctagggctggcagggacttttcatccaattcctctgtgacagaggaggaagtggaggtgcagaaggagaggtgagctgcctgtggtccttcagcttactaatggcagtgttaggactggacctgagggctcttccctccagtccggcgctatttattccatgacagtgcctctcaaactgtgttctcacaagcagctagtgctcaggcagctggactgaggccctgcctgccaaatcaaatattggaggtctttctccaatgtgcagaaaaaaaaattaattaatgggttaagtttccttagggttaaattatttttccattaatgcttcttaaaccattgtcacctgctaccaattgtctactagccaatgcatgcaggcaacaaaacaaaaggataagccacaagtaaataagaacaagaacaaccaaagccttggaaacacaccatcattcttaagttaaaggcttaaaaaaaaaatagaggaagactgctatgactgtggactttctattgcattcacataataaaatcatgcgacattgttttgaattcaaat

SEQ ID NO: 14401 - DNA, 401 bp, Homo sapiens
aaaactagacccagagagtcaactcaaatgattttttttactaataagtgaaccataccatatatctatagggatggattaatggtcacaagccttatttatcagatagcttatgtctgcaaatttaatttcctatgccaaagattctggaaataatgtgaacaaactgtaattgcctgtaacaaacacatttataagtaagttttaaaagtctttgtgttcacagtttagtagctcacagaccctgttgctgtttctcagaaaacatttaaaagaggaagtatacttaaatatccatgtgattttgaaaatgaaaatgattctataattacagacaggattagagtgttgcatgtgcccattacatctctccagcctccatgaagagtctcagtctgcac

SEQ ID NO: 14402 - DNA, 568 bp, Homo sapiens
gggctggtcactataacaattttctatctcgttgttgctgggttttctatagttcccatgcaatggacaccattcccaggaaggtagtggtttccaaactttagagagcaaaaatatcacctgatgggtaatatgaaaatgcaaattccagaaccctacctccagagagcctagggcaggcccaggaatcctcattttaaaaataggcatccttgattccagtgcagttggtctactcaccgctttctgagaaatacaacagtataattaatccagggcccctgctggtgagacaggtctagaaacaccctgttaaagaggcacagagtttcagtagttccatctggtgagcaaatctgacgcctgtgaaaggcaaattcatggcccaactgtgacaattaacttgttacaattgcttggaaatatctactccttttacttggttttgtcttgtctttgatttttaatgttgttgttttacctgtgtttaatactaaatatcagttcaaatcttgcttggaaacaggagggtagaaatttttattaaattttaaaaaaattgccaaaa

SEQ ID NO: 14403 - DNA, 447 bp, Homo sapiens
gggctggtcactataacaattttctatctcgttgttgctgggttttctatagttcccatgcaatggacaccattcccaggaaggtagtggtttccaaactttagagagcaaaaatatcacctgatgggtaatatgaaaatgcaaattccagaaccctacctccagagagcctagggcaggcccaggaatcctcattttaaaaataggcatccttgattccagtgcagttggtctactcaccgctttctgagaaatacaacagtataattaatccagggcccctgctggtgagacaggtctagaaacaccctgttaaagaggcacagagtttcagtagttccatctggtgagcaaatctgacgcctgtgaaaggcaaattcatggcccaactgtgacaattaacttgttacaattgcttggaatagctgtgtaggggtaccgagctcg

SEQ ID NO: 14404 - DNA, 427 bp, Homo sapiens
acagtactctttctccaaagctggccatgccccttctctatttgaacgtgtgagcttgtcctcgctaaaagaaccatcaaggtggaggaggtcaagggtctgagtgaaggtgatgggaggctgtcctggtgagaagcactaagataaacacacagccggccatccatgggtccaatcgtcacctccacagcagcagaaagtgccttcaggaaaactcagggcccacaggtatctgaggctgcagtgtggggaacaccacctctgtcccaggaggggcctttctccctccagaaccttctcagcactttcttacttcccacgcccctctggcaggaaggcaccatttgcccggtggctggcacaacacaaaactgttagacaaaaaggctaggggattaaatgtcaatgtttagataatcaatgtaaa

SEQ ID NO: 14405 - DNA, 152 bp, Homo sapiens
tatctcacaatcccagactataaagtgataatgaagtttatcatggtaatttaagtcacagagcactcccaactagcaaattcggctgggttcgttacttaattaatgatttttttttttttttttaagacagagtctcactgtgtcacctg

SEQ ID NO: 14406 - DNA, 967 bp, Homo sapiens
cgtctggctaatttttgtatttttagtagagacggggtttctccatgttggtcaggctggtctcaaactcccgacctcaggtgatccgcccgcctcggcctcccaaagtgctgaaattacaggtgtgagccactgcacccggccaaacttattgttttaatcccagcatttatgtttagaagaattaatttaaatatttcttactatttctctgtcgaatgtttactctcatcttatctcaatgaaagaagtattaaaagtcttatggccccaaaagaaacaagccaaactgtactgtcttaaaagtgattcattctgagcttgaaacgactctgtcagtgtttgacattgtcatttctagtggcatgtatcttaacattcttttcctgcttcaggaatgaaatcacttgtcctgctgagaaaataaggggaaaacaagatagaagtaaaaaacaacacacctgttgaactattttcataaagatggcgttttcactttcaaaagaaatgaaaaccagatggtctatgctaagaagtgaaggcattttgttgtcttcagaactgatcaacatggtcatgatcatcatcaaatttcttgtttccaaaggccactattgtagtacagtctccagcaggattttgtaccatgtgctgcctttggaataaagtattataatgtatcttgtcaccttcatcaacaccaccattaaatatgtaagttcctatatgtgactttttctgggcatatttgcatcaaaaatcacagtccttgcctccttgcttgcttttactccatgaaacgcttcatgaagcagagcatgattgtcaagtgaccagagggatggacatttgtaagtggaacgtgggtatacttcacacatggctattacttcatactacataacttagttttctcccaaatcaactggcagtccgttttatctatgatattcctggcttcgtataa

SEQ ID NO: 14407 - DNA, 122 bp, Homo sapiens
agatgtaattctaataagtagtagcagctgcttttaattaggacaggagatgtttaaggcagatttactgacagcatgaaacactgataaattattcatttatttgtttttgagacagggtc

SEQ ID NO: 14408 - DNA, 376 bp, Homo sapiens
atcttggctcactgcaacctccacctcctggcttcaagtgattctcctgcctcagcctcccaagtagctgggattacaggcatgtgccaccatgcctggctaatttttgttgttgttgttatgtgtaatctacatactgttttatggcaacaaatgtgaacatttaagccaaatttttaaagataataaaagtggaaaaaataaagtcaagataggattgactacttaaatatactaacaaccatggaataaaatgaaggggatgcacatatccctaaaaatgttaacaggcccagatggctttatgggtaagttctaccaaatttttattgaataaaaatgatactatataccctatgaactgtttcagacccga

SEQ ID NO: 14409 - DNA, 1553 bp, Homo sapiens
cccgcccagccccgccgccctcgcaataaggggcctgagcgcgcgggggagaagcgggagcgggagcgggagcgagctggcggcgccgtcgggcgccgggccgggccatggagctgtggccgtgtctggccgcggcgctgctgttgctgctgctgctggtgcagctgagccgcgcggccgagttctacgccaaggtcgccctgtactgcgcgctgtgcttcacggtgtccgccgtggcctcgctcgtctgcctgctgcgccacggcggccggacggtggagaacatgagcatcatcggctggttcgtgcgaagcttcaagtacttttacgggctccgcttcgaggtgcgggacccgcgcaggctgcaggaggcccgtccctgtgtcatcgtctccaaccaccagagcatcctggacatgatgggcctcatggaggtccttccggagcgctgcgtgcagatcgccaagcgggagctgctcttcctggggcccgtgggcctcatcatgtacctcgggggcgtcttcttcatcaaccggcagcgctctagcactgccatgacagtgatggccgacctgggcgagcgcatggtcagggagaacctcaaagtgtggatctatcccgagggtactcgcaacgacaatggggacctgctgccttttaagaagggcgccttctacctggcagtccaggcacaggtgcccatcgtccccgtggtgtactcttccttctcctccttctacaacaccaagaagaagttcttcacttcaggaacagtcacagtgcaggtgctggaagccatccccaccagcggcctcactgcggcggacgtccctgcgctcgtggacacctgccaccgggccatgaggaccaccttcctccacatctccaagaccccccaggagaacggggccactgcggggtctggcgtgcagccggcccagtagcccagaccacggcagggcatgacctggggagggcaggtggaagccgatggctggaggatgggcagaggggactcctcccggcttccaaataccactctgtccggctcccccagctctcactcagcccgggaagcaggaagccccttctgtcactggtctcagacacaggcccctggtgtcccctgcagggggctcagctggaccctccccgggctcgagggcagggactcgcgcccacggcacctctgggagctgggatgataaagatgaggcttgcggctgtggcccgctggtgggctgagccacaaggcccccgatggcccaggagcagatgggaggaccccgaggccagacgcacactgtccgagccctctgctcagccgcctgggacccaccagggtgcagctgggctccagggtccagcccacaagctgcatcagggtctctgggagaggaggggcctggagggccaggagtcccagactcacgcaccctgggccacagggagccgggaatcggggcctgctgctcctgctggcctggaagactctgtggggtcagcactgtactccgttgctgtttttttataaacacactcttggaagtggc

SEQ ID NO: 14410 - DNA, 2330 bp, Homo sapiens
cccgcccagccccgccgccctcgcaataaggggcctgagcgcgcgggggagaagcgggagcgggagcgggagcgagctggcggcgccgtcgggcgccgggccgggccatggagctgtggccgtgtctggccgcggcgctgctgttgctgctgctgctggtgcagctgagccgcgcggccgagttctacgccaaggtcgccctgtactgcgcgctgtgcttcacggtgtccgccgtggcctcgctcgtctgcctgctgcgccacggcggccggacggtggagaacatgagcatcatcggctggttcgtgcgaagcttcaagtacttttacgggctccgcttcgaggtgcgggacccgcgcaggctgcaggaggcccgtccctgtgtcatcgtctccaaccaccagagcatcctggacatgatgggcctcatggaggtccttccggagcgctgcgtgcagatcgccaagcgggagctgctcttcctggggcccgtgggcctcatcatgtacctcgggggcgtcttcttcatcaaccggcagcgctctagcactgccatgacagtgatggccgacctgggcgagcgcatggtcagggagaacctcaaagtgtggatctatcccgagggtactcgcaacgacaatggggacctgctgccttttaagaagggcgccttctacctggcagtccaggcacaggtgcccatcgtccccgtggtgtactcttccttctcctccttctacaacaccaagaagaagttcttcacttcaggaacagtcacagtgcaggtgctggaagccatccccaccagcggcctcactgcggcggacgtccctgcgctcgtggacacctgccaccgggccatgaggaccaccttcctccacatctccaagaccccccaggagaacggggccactgcggggtctggcgtgcagccggcccagtagcccagaccacggcagggcatgacctggggagggcaggtggaagccgatggctggaggatgggcagaggggactcctcccggcttccaaataccactctgtccggctcccccagctctcactcagcccgggaagcaggaagccccttctgtcactggtctcagacacaggcccctggtgtcccctgcagggggctcagctggaccctccccgggctcgagggcagggactcgcgcccacggcacctctgggagctgggatgataaagatgaggcttgcggctgtggcccgctggtgggctgagccacaaggcccccgatggcccaggagcagatgggaggaccccgaggccagacgcacactgtccgagccctctgctcagccgcctgggacccaccagggtgcagctgggctccagggtccagcccacaagctgcatcagggtctctgggagaggaggggcctggagggccaggagtcccagactcacgcaccctgggccacagggagccgggaatcggggcctgctgctcctgctggcctggaagactctgtggggtcagcactgtactccgttgctgtttttttataaacacactcttggaagtggcaaaaaaaaaaaaccaacaaacaaaaaaaaaaaaaacaaaacaaaaaaaaaaaaaaaaaagaaccaaaaaaacgcagaaacaaaaaaacagcaacaaaccacaccagaaacaaaaaacacaacggggcgcgcgcccccccccgtacatcctcctccgcccgcgggcgcgccgccccctgcgccgccctgcgctaccgccccgagttgtttcttggtacgacacagcgcgagcacgcgccacactagacaggaagtgaggcagctctatattcattatactatacgaaagacgacgagccgcgaccgcgcctcgatattatagatatcaacaacgccgatggtgacgctgggtgtaagaaatggagacgcagacagcggcgcgcggacgacagactcgtctggtgctacatgcgaacgagacagctcattctagacagcaggggcggtgcaagcacaaccaacagtagaggtggtggcgagcgagccagcacgcgctacgacgcagtgatagtgtaatgatagtacgcgagccgcggggtgcgggagagcgggcaacacaggaacgtgtcggtttgtcgccgtgtcgagtgcgggcgagttagtgacagcttggagcgcgtggacggagcggttccggcgcacgtgggccggtatttcgggtcggcgacgggaacgcgatcgacagaggacgcgagaaatgcgtcgttgtcacgcgcggcggcgtggtgaggtgttgtggtggccgatcggagtgacagcggcgggtggagggcgtagg

SEQ ID NO: 14411 - DNA, 1432 bp, Homo sapiens
cccgcccagccccgccgccctcgcaataaggggcctgagcgcgcgggggagaagcgggagcgggagcgggagcgagctggcggcgccgtcgggcgccgggccgggccatggagctgtggccgtgtctggccgcggcgctgctgttgctgctgctgctggtgcagctgagccgcgcggccgagttctacgccaaggtcgccctgtactgcgcgctgtgcttcacggtgtccgccgtggcctcgctcgtctgcctgctgcgccacggcggccggacggtggagaacatgagcatcatcggctggttcgtgcgaagcttcaagtacttttacgggctccgcttcgaggtgcgggacccgcgcaggctgcaggaggcccgtccctgtgtcatcgtctccaaccaccagagcatcctggacatgatgggcctcatggaggtccttccggagcgctgcgtgcagatcgccaagcgggagctgctcttcctggggcccgtgggcctcatcatgtacctcgggggcgtcttcttcatcaaccggcagcgctctagcactgccatgacagtgatggccgacctgggcgagcgcatggtcagggagaacctcaaagtgtggatctatcccgagggtactcgcaacgacaatggggacctgctgccttttaagaagggcgccttctacctggcagtccaggcacaggtgcccatcgtccccgtggtgtactcttccttctcctccttctacaacaccaagaagaagttcttcacttcaggaacagtcacagtgcaggtgctggaagccatccccaccagcggcctcactgcggcggacgtccctgcgctcgtggacacctgccaccgggccatgaggaccaccttcctccacatctccaagaccccccaggagaacggggccactgcggggtctggcgtgcagccggcccagtagcccagaccacggcagggcatgacctggggagggcaggtggaagccgatggctggaggatgggcagaggggactcctcccggcttccaaataccactctgtccggctcccccagctctcactcagcccgggaagcaggaagccccttctgtcactggtctcagacacaggcccctggtgtcccctgcagggggctcagctggaccctccccgggctcgagggcagggactcgcgcccacggcacctctgggagctgggatgataaagatgaggcttgcggctgtggcccgctggtgggctgagccacaaggcccccgatggcccaggagcagatgggaggaccccgaggccaggagtcccagactcacgcaccctgggccacagggagccgggaatcggggcctgctgctcctgctggcctggaagactctgtggggtcagcactgtactccgttgctgtttttttataaacacactcttggaagtggc

SEQ ID NO: 14412 - DNA, 1457 bp, Homo sapiens
cccgcccagccccgccgccctcgcaataaggggcctgagcgcgcgggggagaagcgggagcgggagcgggagcgagctggcggcgccgtcgggcgccgggccgggccatggagctgtggccgtgtctggccgcggcgctgctgttgctgctgctgctggtgcagctgagccgcgcggccgagttctacgccaaggtcgccctgtactgcgcgctgtgcttcacggtgtccgccgtggcctcgctcgtctgcctgctgcgccacggcggccggacggtggagaacatgagcatcatcggctggttcgtgcgaagcttcaagtacttttacgggctccgcttcgaggtgcgggacccgcgcaggctgcaggaggcccgtccctgtgtcatcgtctccaaccaccagagcatcctggacatgatgggcctcatggaggtccttccggagcgctgcgtgcagatcgccaagcgggagctgctcttcctggggcccgtgggcctcatcatgtacctcgggggcgtcttcttcatcaaccggcagcgctctagcactgccatgacagtgatggccgacctgggcgagcgcatggtcagggagaacgtgcccatcgtccccgtggtgtactcttccttctcctccttctacaacaccaagaagaagttcttcacttcaggaacagtcacagtgcaggtgctggaagccatccccaccagcggcctcactgcggcggacgtccctgcgctcgtggacacctgccaccgggccatgaggaccaccttcctccacatctccaagaccccccaggagaacggggccactgcggggtctggcgtgcagccggcccagtagcccagaccacggcagggcatgacctggggagggcaggtggaagccgatggctggaggatgggcagaggggactcctcccggcttccaaataccactctgtccggctcccccagctctcactcagcccgggaagcaggaagccccttctgtcactggtctcagacacaggcccctggtgtcccctgcagggggctcagctggaccctccccgggctcgagggcagggactcgcgcccacggcacctctgggagctgggatgataaagatgaggcttgcggctgtggcccgctggtgggctgagccacaaggcccccgatggcccaggagcagatgggaggaccccgaggccagacgcacactgtccgagccctctgctcagccgcctgggacccaccagggtgcagctgggctccagggtccagcccacaagctgcatcagggtctctgggagaggaggggcctggagggccaggagtcccagactcacgcaccctgggccacagggagccgggaatcggggcctgctgctcctgctggcctggaagactctgtggggtcagcactgtactccgttgctgtttttttataaacacactcttggaagtggc

SEQ ID NO: 14413 - DNA, 688 bp, Homo sapiens
ctcttcttctcaaacagccattcttccaaatctattttgggttcatttttctttgcataatccagggaatcataaatcatcccaaacccattgtcttgcccccacccaaatgagttctgaatcccaataccaagatgacatcccgtgtggtcttgtacatatttggctaatttttcccgaaattctgtcttaggcactgtcgccttcccggggtgaaggacatcaaagacccattgtttcctctgaagtatcggttggtcatgaactttctagtgcggatagttacggtgtcgttcatgatggcgatctatcttaaagatgaggcttgcggctgtggcccgctggtgggctgagccacaaggcccccgatggcccaggagcagatgggaggaccccgaggccagacgcacactgtccgagccctctgctcagccgcctgggacccaccagggtgcagctgggctccagggtccagcccacaagctgcatcagggtctctgggagaggaggggcctggagggccaggagtcccagactcacgcaccctgggccacagggagccgggaatcggggcctgctgctcctgctggcctggaagactctgtggggtcagcactgtactccgttgctgtttttttataaacacactcttggaagtggccaaaaaaaaacacaaaaaaagggcgcc

SEQ ID NO: 14414 - DNA, 179 bp, Homo sapiens
ctcagctggaccctccccgggctcgagggcagggactcgcgcccacggctcccccagctctcactcagcccgggaagcaggaagccccttctgtcactggtctgctggcctggaagactctgtggggtcagcactgtactccgttgctgtttttttataaacacactcttggaagtggc

SEQ ID NO: 14415 - DNA, 1704 bp, Homo sapiens
cccgcccagccccgccgccctcgcaataaggggcctgagcgcgcgggggagaagcgggagcgggagcgggagcgagctggcggcgccgtcgggcgccgggccgggccatggagctgtggccgtgtctggccgcggcgctgctgttgctgctgctgctggtgcagctgagccgcgcggccgagttctacgccaaggtcgccctgtactgcgcgctgtgcttcacggtgtccgccgtggcctcgctcgtctgcctgctgcgccacggcggccggacggtggagaacatgagcatcatcggctggttcgtgcgaagcttcaagtacttttacgggctccgcttcgaggtgcgggacccgcgcaggctgcaggaggcccgtccctgtgtcatcgtctccaaccaccagagcatcctggacatgatgggcctcatggaggtccttccggagcgctgcgtgcagatcgccaagcgggagctgctcttcctggggcccgtgggcctcatcatgtacctcgggggcgtcttcttcatcaaccggcagcgctctagcactgccatgacagtgatggccgacctgggcgagcgcatggtcagggagaacctcaaagtgtggatctatcccgagggtactcgcaacgacaatggggacctgctgccttttaagaagggcgccttctacctggcagtccaggcacaggtgcccatcgtccccgtggtgtactcttccttctcctccttctacaacaccaagaagaagttcttcacttcaggaacagtcacagtgcaggtgctggaagccatccccaccagcggcctcactgcggcggacgtccctgcgctcgtggacacctgccaccgggccatgaggaccaccttcctccacatctccaagaccccccaggagaacggggccactgcggggtctggcgtgcagccggcccagtagcccagaccacggcagggcatgacctggggagggcaggtggaagccgatggctggaggatgggcagaggggactcctcccggcttccaaataccactctgtccggctcccccagctctcactcagcccgggaagcaggaagccccttctgtcactggtctcagacacaggcccctggtgtcccctgcagggggctcagctggaccctccccgggctcgagggcagggactcgcgcccacggcacctctgggagctgggatgataaagatgaggcttgcggctgtggcccgctggtgggctgagccacaaggcccccgatggcccaggagcagatgggaggaccccgaggccagacgcacactgtccgagccctctgctcagccgcctgggacccaccagggtgcagctgggctccagggtccagcccacaagctgcatcagggtctctgggagaggaggggcctggagggccaggagtcccagactcacgcaccctgggccacagggagccgggaatcggggcctgctgctcctgctggcctggaagactctgtggggtcagcactgtactccgttgctgtttttttataaacacactcttggaagtggcctggggagctgtggtcactcacagggcgggcaggtgaccagggcggtggaggcgacgctgtgtcttcccagctgccctgcctagaggcccagggtgcaggcaccgccacccacccgtgttccctatccaggagtggacccacatcacccta

SEQ ID NO: 14416 - DNA, 1596 bp, Homo sapiens
cccgcccagccccgccgccctcgcaataaggggcctgagcgcgcgggggagaagcgggagcgggagcgggagcgagctggcggcgccgtcgggcgccgggccgggccatggagctgtggccgtgtctggccgcggcgctgctgttgctgctgctgctggtgcagctgagccgcgcggccgagttctacgccaaggtcgccctgtactgcgcgctgtgcttcacggtgtccgccgtggcctcgctcgtctgcctgctgcgccacggcggccggacggtggagaacatgagcatcatcggctggttcgtgcgaagcttcaagtacttttacgggctccgcttcgaggtgcgggacccgcgcaggctgcaggaggcccgtccctgtgtcatcgtctccaaccaccagagcatcctggacatgatgggcctcatggaggtccttccggagcgctgcgtgcagatcgccaagcgggagctgctcttcctggggcccgtgggcctcatcatgtacctcgggggcgtcttcttcatcaaccggcagcgctctagcactgccatgacagtgatggccgacctgggcgagcgcatggtcagggagaacctcaaagtgtggatctatcccgagggtactcgcaacgacaatggggacctgctgccttttaagaagggcgccttctacctggcagtccaggcacaggtgcccatcgtccccgtggtgtactcttccttctcctccttctacaacaccaagaagaagttcttcacttcaggaacagtcacagtgcaggtgctggaagccatccccaccagcggcctcactgcggcggacgtccctgcgctcgtggacacctgccaccgggccatgaggaccaccttcctccacatctccaagaccccccaggagaacggggccactgcggggtctggcgtgcagccggcccagtagcccagaccacggcagggcatgacctggggagggcaggtggaagccgatggctggaggatgggcagaggggactcctcccggcttccaaataccactctgtccggctcccccagctctcactcagcccgggaagcaggaagccccttctgtcactggtctcagacacaggcccctggtgtcccctgcagggggctcagctggaccctccccgggctcgagggcagggactcgcgcccacggcacctctgggagctgggatgataaagatgaggcttgcggctgtggcccgctggtgggctgagccacaaggcccccgatggcccaggagcagatgggaggaccccgaggccagacgcacactgtccgagccctctgctcagccgcctgggacccaccagggtgcagctgggctccagggtccagcccacaagctgcatcagggtctctgggagaggaggggcctggagggccaggagtcccagactcacgcaccctgggccacagggagccgggaatcggggcctgctgctcctgctggcctggaagactctgtggggtcagcactgtactccgttgctgtttttttataaacacactcttggaagtggcgcaaaaacacaacaacaacaaaacaaaaaaagagggcggcggc

SEQ ID NO: 14417 - DNA, 1506 bp, Homo sapiens
cccgcccagccccgccgccctcgcaataaggggcctgagcgcgcgggggagaagcgggagcgggagcgggagcgagctggcggcgccgtcgggcgccgggccgggccatggagctgtggccgtgtctggccgcggcgctgctgttgctgctgctgctggtgcagctgagccgcgcggccgagttctacgccaaggtcgccctgtactgcgcgctgtgcttcacggtgtccgccgtggcctcgctcgtctgcctgctgcgccacggcggccggacggtggagaacatgagcatcatcggctggttcgtgcgaagcttcaagtacttttacgggctccgcttcgaggtgcgggacccgcgcaggctgcaggaggcccgtccctgtgtcatcgtctccaaccaccagagcatcctggacatgatgggcctcatggaggtccttccggagcgctgcgtgcagatcgccaagcgggagctgctcttcctggggcccgtgggcctcatcatgtacctcgggggcgtcttcttcatcaaccggcagcgctctagcactgccatgacagtgatggccgacctgggcgagcgcatggtcagggagaacctcaaagtgtggatctatcccgagggtactcgcaacgacaatggggacctgctgccttttaagaagggcgccttctacctggcagtccaggcacaggtgcccatcgtccccgtggtgtactcttccttctcctccttctacaacaccaagaagaagttcttcacttcaggaacagtcacagtgcaggtgctggaagccatccccaccagcggcctcactgcggcggacgtccctgcgctcgtggacacctgccaccgggccatgaggaccaccttcctccacatctccaagaccccccaggagaacggggccactgcggggtctggcgtgcagccggcccagtagcccagaccacggcagggcatgacctggggagggcaggtggaagccgatggctggaggatgggcagaggggactcctcccggcttccaaataccactctgtccggctcccccagctctcactcagcccgggaagcaggaagccccttctgtcactggtctcagacacaggcccctggtgtcccctgcagggggctcagctggaccctccccgggctcgagggcagggactcgcgcccacggcacctctgggagctgggatgataaagatgaggcttgcggctgtggcccgctggtgggctgagccacaaggcccccgatggcccaggagcagatgggaggaccccgaggccagacgcacactgtccgagccctctgctcagccgcctgggacccaccagggtgcagctgggctccagggtccagcccacaagctgcatcagggtctctgggagaggaggggcctggagggccaggagtcccagactcacgcaccctgggccacagggagccgggaatcggggcctgctgctcaacccctgagagggggaaccgttcctgatgg

SEQ ID NO: 14418 - DNA, 1369 bp, Homo sapiens
cccgcccagccccgccgccctcgcaataaggggcctgagcgcgcgggggagaagcgggagcgggagcgggagcgagctggcggcgccgtcgggcgccgggccgggccatggagctgtggccgtgtctggccgcggcgctgctgttgctgctgctgctggtgcagctgagccgcgcggccgagttctacgccaaggtcgccctgtactgcgcgctgtgcttcacggtgtccgccgtggcctcgctcgtctgcctgctgcgccacggcggccggacggtggagaacatgagcatcatcggctggttcgtgcgaagcttcaagtacttttacgggctccgcttcgaggtgcgggacccgcgcaggctgcaggaggcccgtccctgtgtcatcgtctccaaccaccagagcatcctggacatgatgggcctcatggaggtccttccggagcgctgcgtgcagatcgccaagcgggagctgctcttcctggggcccgtgggcctcatcatgtacctcgggggcgtcttcttcatcaaccggcagcgctctagcactgccatgacagtgatggccgacctgggcgagcgcatggtcagggagaacctcaaagtgtggatctatcccgagggtactcgcaacgacaatggggacctgctgccttttaagaagggcgccttctacctggcagtccaggcacaggtgcccatcgtccccgtggtgtactcttccttctcctccttctacaacaccaagaagaagttcttcacttcaggaacagtcacagtgcaggtgctggaagccatccccaccagcggcctcactgcggcggacgtccctgcgctcgtggacacctgccaccgggccatgaggaccaccttcctccacatctccaagaccccccaggagaacggggccactgcggggtctggcgtgcagccggcccagtagcccagaccacggcagggcatgacctggggagggcaggtggaagccgatggctggaggatgggcagaggggactcctcccggcttccaaataccactctgtccggctcccccagctctcactcagcccgggaagcaggaagccccttctgtcactggtctcagacacaggcccctggtgtcccctgcagggggctcagctggaccctccccgggctcgagggcagggactcgcgcccacggcacctctgggagctgggatgataaagatgaggcttgcggctgtggcccgctggtgggctgagccacaaggcccccgatggcccaggagcagatgggaggaccccgaggccaaagcaatgtcgagccttgtcagcgctggacacaggggagtgggtcaggcaaccgaggatagctggaaaaggcgg

SEQ ID NO: 14419 - DNA, 1396 bp, Homo sapiens
cccgcccagccccgccgccctcgcaataaggggcctgagcgcgcgggggagaagcgggagcgggagcgggagcgagctggcggcgccgtcgggcgccgggccgggccatggagctgtggccgtgtctggccgcggcgctgctgttgctgctgctgctggtgcagctgagccgcgcggccgagttctacgccaaggtcgccctgtactgcgcgctgtgcttcacggtgtccgccgtggcctcgctcgtctgcctgctgcgccacggcggccggacggtggagaacatgagcatcatcggctggttcgtgcgaagcttcaagtacttttacgggctccgcttcgaggtgcgggacccgcgcaggctgcaggaggcccgtccctgtgtcatcgtctccaaccaccagagcatcctggacatgatgggcctcatggaggtccttccggagcgctgcgtgcagatcgccaagcgggagctgctcttcctggggcccgtgggcctcatcatgtacctcgggggcgtcttcttcatcaaccggcagcgctctagcactgccatgacagtgatggccgacctgggcgagcgcatggtcagggagaacctcaaagtgtggatctatcccgagggtactcgcaacgacaatggggacctgctgccttttaagaagggcgccttctacctggcagtccaggcacaggtgcccatcgtccccgtggtgtactcttccttctcctccttctacaacaccaagaagaagttcttcacttcaggaacagtcacagtgcaggtgctggaagccatccccaccagcggcctcactgcggcggacgtccctgcgctcgtggacacctgccaccgggccatgaggaccaccttcctccacatctccaagaccccccaggagaacggggccactgcggggtctggcgtgcagccggcccagtagcccagaccacggcagggcatgacctggggagggcaggtggaagccgatggctggaggatgggcagaggggactcctcccggggcacctctgggagctgggatgataaagatgaggcttgcggctgtggcccgctggtgggctgagccacaaggcccccgatggcccaggagcagatgggaggaccccgaggccagacgcacactgtccgagccctctgctcagccgcctgggacccaccagggtgcagctgggctccagggtccagcccacaagctgcatcagggtctctgggagaggaggggcctggagggccaggagtcccagactcacgcaccctgggccacagggagccgggaatcggggcctgctgctcctgctggcctggaagactctgtggggtcagcactgtactccgttgctgtttttttataaacacactcttggaagtggc

SEQ ID NO: 14420 - DNA, 1267 bp, Homo sapiens
cccgcccagccccgccgccctcgcaataaggggcctgagcgcgcgggggagaagcgggagcgggagcgggagcgagctggcggcgccgtcgggcgccgggccgggccatggagctgtggccgtgtctggccgcggcgctgctgttgctgctgctgctggtgcagctgagccgcgcggccgagttctacgccaaggtcgccctgtactgcgcgctgtgcttcacggtgtccgccgtggcctcgctcgtctgcctgctgcgccacggcggccggacggtggagaacatgagcatcatcggctggttcgtgcgaagcttcaagtacttttacgggctccgcttcgaggtgcgggacccgcgcaggctgcaggaggcccgtccctgtgtcatcgtctccaaccaccagagcatcctggacatgatgggcctcatggaggtccttccggagcgctgcgtgcagatcgccaagcgggagctgctcttcctggggcccgtgggcctcatcatgtacctcgggggcgtcttcttcatcaaccggcagcgctctagcactgccatgacagtgatggccgacctgggcgagcgcatggtcagggagaacctcaaagtgtggatctatcccgagggtactcgcaacgacaatggggacctgctgccttttaagaagggcgccttctacctggcagtccaggcacaggtgcccatcgtccccgtggtgtactcttccttctcctccttctacaacaccaagaagaagttcttcacttcaggaacagtcacagtgcaggtgctggaagccatccccaccagcggcctcactgcggcggacgtccctgcgctcgtggacacctgccaccgggccatgaggaccaccttcctccacatctccaagaccccccaggagaacggggccactgcggggtctggcgtgcagccggcccagtagcccagaccacggcagggcatgacctggggagggcaggtggaagccgatggctggaggatgggcagaggggactcctcccggcttccaaataccactctgtccggctcccccagctctcactcagcccgggaagcaggaagccccttctgtcactggtctctgggagaggaggggcctggagggccaggagtcccagactcacgcaccctgggccacagggagccgggaatcggggcctgctgctcctgctggcctggaagactctgtggggtcagcactgtactccgttgctgtttttttataaacacactcttggaagtggc

SEQ ID NO: 14421 - DNA, 1839 bp, Homo sapiens
cccgcccagccccgccgccctcgcaataaggggcctgagcgcgcgggggagaagcgggagcgggagcgggagcgagctggcggcgccgtcgggcgccgggccgggccatggagctgtggccgtgtctggccgcggcgctgctgttgctgctgctgctggtgcagctgagccgcgcggccgagttctacgccaaggtcgccctgtactgcgcgctgtgcttcacggtgtccgccgtggcctcgctcgtctgcctgctgcgccacggcggccggacggtggagaacatgagcatcatcggctggttcgtgcgaagcttcaagtacttttacgggctccgcttcgaggtgcgggacccgcgcaggctgcaggaggcccgtccctgtgtcatcgtctccaaccaccagagcatcctggacatgatgggtaggccgggcctcgggggtggcttctggggtttgagtggggccggctgagctggggctgtgtggggctgggtcccggggacgaggacacagggctgcctgtgcctgggcgagctcggcctcagtacctccctcagggccagacacagaggctcggaggccacacgacccgtccaggtagccagggagaaggcagggtgccaggcaggcctgtgggtgctcagcagctgtcttccagcgcacgctgtctccccctctctctctgtctctgtctctctgtctcccaggcctcatggaggtccttccggagcgctgcgtgcagatcgccaagcgggagctgctcttcctggggcccgtgggcctcatcatgtacctcgggggcgtcttcttcatcaaccggcagcgctctagcactgccatgacagtgatggccgacctgggcgagcgcatggtcagggagaacctcaaagtgtggatctatcccgagggtactcgcaacgacaatggggacctgctgccttttaagaagggcgccttctacctggcagtccaggcacaggtgcccatcgtccccgtggtgtactcttccttctcctccttctacaacaccaagaagaagttcttcacttcaggaacagtcacagtgcaggtgctggaagccatccccaccagcggcctcactgcggcggacgtccctgcgctcgtggacacctgccaccgggccatgaggaccaccttcctccacatctccaagaccccccaggagaacggggccactgcggggtctggcgtgcagccggcccagtagcccagaccacggcagggcatgacctggggagggcaggtggaagccgatggctggaggatgggcagaggggactcctcccggcttccaaataccactctgtccggctcccccagctctcactcagcccgggaagcaggaagccccttctgtcactggtctcagacacaggcccctggtgtcccctgcagggggctcagctggaccctccccgggctcgagggcagggactcgcgcccacggcacctctgggagctgggatgataaagatgaggcttgcggctgtggcccgctggtgggctgagccacaaggcccccgatggcccaggagcagatgggaggaccccgaggccagacgcacactgtccgagccctctgctcagccgcctgggacccaccagggtgcagctgggctccagggtccagcccacaagctgcatcagggtctctgggagaggaggggcctggagggccaggagtcccagactcacgcaccctgggccacagggagccgggaatcggggcctgctgctcctgctggcctggaagactctgtggggtcagcactgtactccgttgctgtttttttataaacacactcttggaagtggc

SEQ ID NO: 14422 - DNA, 1191 bp, Homo sapiens
cccgcccagccccgccgccctcgcaataaggggcctgagcgcgcgggggagaagcgggagcgggagcgggagcgagctggcggcgccgtcgggcgccgggccgggccatggagctgtggccgtgtctggccgcggcgctgctgttgctgctgctgctggtgcagctgagccgcgcggccgagttctacgccaaggtcgccctgtactgcgcgctgtgcttcacggtgtccgccgtggcctcgctcgtctgcctgctgcgccacggcggccggacggtggagaacatgagcatcatcggctggttcgtgcgaagcttcaagtacttttacgggctccgcttcgaggtgcgggacccgcgcaggctgcaggaggcccgtccctgtgtcatcgtctccaaccaccagagcatcctggacatgatgggcctcatggaggtccttccggagcgctgcgtgcagatcgccaagcgggagctgctcttcctggggcccgtgggcctcatcatgtacctcgggggcgtcttcttcatcaaccggcagcgctctagcactgccatgacagtgatggccgacctgggcgagcgcatggtcagggagaacctcaaagtgtggatctatcccgagggtactcgcaacgacaatggggacctgctgccttttaagaagggcgccttctacctggcagtccaggcacaggtgcccatcgtccccgtggtgtactcttccttctcctccttctacaacaccaagaagaagttcttcacttcaggaacagtcacagtgcaggtgctggaagccatccccaccagcggcctcactgcggcggacgtccctgcgctcgtggacacctgccaccgggccatgaggaccaccttcctccacatctccaagaccccccgatggcccaggagcagatgggaggaccccgaggccagacgcacactgtccgagccctctgctcagccgcctgggacccaccagggtgcagctgggctccagggtccagcccacaagctgcatcagggtctctgggagaggaggggcctggagggccaggagtcccagactcacgcaccctgggccacagggagccgggaatcggggcctgctgctcctgctggcctggaagactctgtggggtcagcactgtactccgttgctgtttttttataaacacactcttggaagtggc

SEQ ID NO: 14423 - DNA, 917 bp, Homo sapiens
cccgcccagccccgccgccctcgcaataaggggcctgagcgcgcgggggagaagcgggagcgggagcgggagcgagctggcggcgccgtcgggcgccgggccgggccatggagctgtggccgtgtctggccgcggcgctgctgttgctgctgctgctggtgcagctgagccgcgcggccgagttctacgccaaggtcgccctgtactgcgcgctgtgcttcacggtgtccgccgtggcctcgctcgtctgcctgctgcgccacggcggccggacggtggagaacatgagcatcatcggctggttcgtgcgaagcttcaagtacttttacgggctccgcttcgaggtgcgggacccgcgcaggctgcaggaggcccgtccctgtgtcatcgtctccaaccaccagagcatcctggacatgatgggcctcatggaggtccttccggagcgctgcgtgcagatcgccaagcgggagctgctcttcctggggcccgtgggcctcatcatgtacctcgggggcgtcttcttcatcaaccggcagcgctctagcactgccatgacagtgatggccgacctgggcgagcgcatggtcagggagaacctcaaagtgtggatctatcccgagggtactcgcaacgacaatggggacctgctgccttttaagaagggcgccttctacctggcagtccaggcacaggtgcccatcgtccccgtggtgtactcttccttctcctccttctacaacaccaagaagaagttcttcacttcaggaacagtcacagtgcaggtgctggaagccatccccaccagcggcctcactgcggcggacgtccctgcgctcctgctggcctggaagactctgtggggtcagcactgtactccgttgctgtttttttataaacacactcttggaagtggc

SEQ ID NO: 14424 - DNA, 1169 bp, Homo sapiens
cccgcccagccccgccgccctcgcaataaggggcctgagcgcgcgggggagaagcgggagcgggagcgggagcgagctggcggcgccgtcgggcgccgggccgggccatggagctgtggccgtgtctggccgcggcgctgctgttgctgctgctgctggtgcagctgagccgcgcggccgagttctacgccaaggtcgccctgtactgcgcgctgtgcttcacggtgtccgccgtggcctcgctcgtctgcctgctgcgccacggcggccggacggtggagaacatgagcatcatcggctggttcgtgcgaagcttcaagtacttttacgggctccgcttcgaggtgcgggacccgcgcaggctgcaggaggcccgtccctgtgtcatcgtctccaaccaccagagcatcctggacatgatgggcctcatggaggtccttccggagcgctgcgtgcagatcgccaagcgggagctgctcttcctggggcccgtgggcctcatcatgtacctcgggggcgtcttcttcatcaaccggcagcgctctagcactgccatgacagtgatggccgacctgggcgagcgcatggtcagggagaacctcaaagtgtggatctatcccgagggtactcgcaacgacaatggggacctgctgccttttaagaagggcgccttctacctggcagtccaggcacaggtgcccatcgtccccgtggtgtactcttccttctcctccttctacaacaccaagaagaagttcttcacttcaggaacagtcacagtgcaggtgctggaagccatccccaccaggtgcagctgggctccagggtccagcccacaagctgcatcagggtctctgggagaggaggggcctggagggccaggagtcccagactcacgcaccctgggccacagggagccgggaatcggggcctgctgctcctgctggcctggaagactctgtggggtcagcactgtactccgttgctgtttttttataaacacactcttggaagtggcctggggagctgtggtcactcacagggcgggcaggtgaccagggcggtggaggcgacgctgtgtcttcccagctgccctgcctagaggcccagggtgcaggcaccgccacccacccgtgttccctatccaggagtggacccacatcacccta

SEQ ID NO: 14425 - DNA, 498 bp, Homo sapiens
ggatataaaattttattttttactttaaaaataaaactccaaatcctatctgtcttagagcatctactctaaggttcaaggaacatatcgagggaagtggtgatctatctaactgctatccaaatatagaatacatatgacttgtaccacctgcttcactggtactgggctgggtgacttaagggcatctagcagtgagttgttggtaaaaggggaaaagagtctgggttgttggtaaaaggggaaagtcaacctgtaggaacctcaatcccaagttcctcactaatttcctgaggggaagtcaaagcctcagtacaaacttccaagaatctaaactactgattacaaaccatttgcccaagtaaaagacttaactcttgcttcccaaggcgggggaactgatggtttcctacatcaccagggggagtaaaagactaatttttaaagcatgtatagtccctagtcagaagaagatcctctaaggctcatcccttctag

SEQ ID NO: 14426 - DNA, 406 bp, Homo sapiens
aacaaaataagtctccagaaaccaacttaatgaaatggagagattaaattacctgacgagaattcaaaataatcatcataaagatgttcaataaactcaggagaaaaatggatgaacaaagtgagaatttcaacaaagaaatagaaaatattaaaaatggaatcaaatagaaatctcagacctgaagaataaaataactgaagtgaaaaaatcactacctagttttaatagcaaacatgattaagctgaagaaagaatcagggaacttgaagacaggtcatttgaaattgcccagggagcaaaataaaataaaacaaaataaacagtgaagaaagtctaagggacttaggaaacaacatcaagtttgcaaatatttgtattatgggagtctcaaaaagagaagaaa

SEQ ID NO: 14427 - DNA, 371 bp, Homo sapiens
atagactaaaagtaaagtaaatgttttaaatttgtattacgtctaaagatttgtacgtggatgtcattaatttaaatgtccatactctatttataaatcttacttacaaattttgtaacatggaacaccatttgatttataatacttgcagaagttcctgtatgctgttaaataaattaatttgtaaaataattttgcattctatatttagttcagcatttaattgttaaatgagtttatagacttgatatgtgggtgaatgaaaaatatttacattaaaatcatccaaggcattttccatttatttttgtaggtatggcatattttaggaaaatgacttatggaatgtttccatcatcacagaaacagta

SEQ ID NO: 14428 - DNA, 399 bp, Homo sapiens
tgcttaaacaatccatagaccaaaactgttgagggaccactggtaagtggtagcctcttataggcaaagggatgcagtaaaggacttttgtaagttgttttttaaagtgtgaacatcattgctatgatctgaatgtgtcctccaaaattcatgttgaaacctcatcattattctaacaatgtgtcatcagaaaaaattttaatgaaattagcgttaaagtaaatttaatggctatggcatatttgaatttgtggacgtatgttttgcaaagactctgcttctgtctttattttttggaaactaggacatggactgtgggaggctgaagtgggatgatcgtttgagctcagaaagtcaagtctgcagtgagccgtgattgtgccactgcgttctagcctg

SEQ ID NO: 14429 - DNA, 601 bp, Homo sapiens
ccaaaagcttggattccagtgatctcccagtctttgttactcttccttttgttcttttccagatctgattcaggaatttttatcccatttgccttccttaataagccagcgtggatcgtatacacagacagtggattttagagctagggtttgtttgtttgtttgtttgtttgtttgtttttgttttgtcctccaaaatttcaggatatgtcagttctcatgtaaatatatacccccttttgtgagttagtttagtatctcctataacacctggtcaagtggataattttttagttcatgatagtttgttaattggacttgctcagccatattttcctccttattatacatggtcttcaagtctatcttggaaaattttagagaaaaggacaaatgctaaaagacttaatagtaccatgagaccttttttgctcccttgttctgtgctagctatggggataaatatagttgatccttgaacaacataggtttggattgtgtaggtccacttacatgtaggtttttcttcagtaaatatactggaaaagtttttggagatttgaaaaaactcacagatgaactgcatagcctagaaatactg

SEQ ID NO: 14430 - DNA, 561 bp, Homo sapiens
atgtttagtaacattttaatttctcttattcgactaatgttttaaaggtatgaccactttagaacattttcttattcaaccctcacagtattgctgtgagctaaaagagagtattatttttcttgcatgtttacagttgagaacattcaggcttagagtgttatgtgacttgctcaatcatatgtagcaagtaagtggccaatctggggccagatatctggtttctgcatcccaaaactgagttaataagaattttttcatgtgaatgattataatttatgatagttttatttctgctgaaatgtctagttataccatatttttattactgagcaatgttatagatgaataagatgcaatttgctagcttcattcagacagtttctcacttattttaaaaatgtgagtatctatctgttttgtgcatcaggaggaaaaaagaaaaagagatacaaaaactgccctcaaggagtttacagtctagaggggaagcaaataaataaatgtgttcactgcaataccataacaatttgtgtagtacaataaaaaatacatttggtc

SEQ ID NO: 14431 - DNA, 461 bp, Homo sapiens
gtttgtatctcagttgtgagtaacagctcttaaaagctaaaaatagggatcttcatgggaaatgaaaaagaaaatgtacaacatccatgcaattgaaggtaggctctcagtaaactaagaaatcttttcagaggtaaagaaaatgaaataatgatttgaaactaccacccaactctccatttcctatttgggaaaagctaaggttctttggaatatctaactttttcaaggcttatgacaccctcccctcccatccacctctcccctctctccagttcctagaaaaatgactgcataatgtgcttgtggaatttttgcaaatggctagagaaagctctggaaggaagaaaggacaagctacatgttcttcacgtgtctccatgcccctaatgcctcactccccattcaaagctaaggacctggccgggcgcggcagctcacacctgtaatcccagcacttt

SEQ ID NO: 14432 - DNA, 555 bp, Homo sapiens
catcctcaaacagccatgaggaatgggaagggaactttccctatgtttgcagaacgaatccatctctggatgagcgaacaactttcagcccctcggacactcaatgtcaagcttggtcctctccagtgtggccaccaggctcccacctgaaggcccagctctcctcaagtctctgaggctaatgctgagcaaaggcaggagggatttgctcacttgctgctaacctggcaggtaaagaaagtgaaccaagaaactgggcacctcagccaaggcctccgacttctcagccccttgtcctctgttggttcagttgaaactctgccaccccaaaggtgcctgagagcatgggctctgcgtgccacgtgcaggtccccaagacaactccacctctggaaaagaaaatgactctagagcttctctcccagggccctctccctcacgccaccacaatccccagtgtggacccctcctgccaaatacaagaggccaaagtaattgccctggcattacagttttccccccatggccccaaaccacctacctaaccatgcctcc

SEQ ID NO: 14433 - DNA, 515 bp, Homo sapiens
agcttacttaccttactttttgtggaggtgctagaactacttctgtcttgtgtttagatttcaagaaacctttgcatgggcattatgtggttgcacaaatgtacttcgttttgacctgaaaatgcaaaaacttcctttcttcccactttctgagactctgcaaccttaaaggaagagtggggttctttaaaggaaaggtggtggtggttgggtcatgggtaacaatgtctactgtgtacttcctttcccaaaacaagtccctgtctaccgtcagcatttccaaaatttgaaggtcaagtgtggtgttaactcatgaactaatgactagactttgagcggttgtggaagcaaaatctcagtgagtgcctggatgttctaattctgttaagtcagtgagtgcatattctgtacaatactctcttagcccagtggcaggtttaaggagtgggagagagatttctatgtttcggaaatcagatacacaaagaataaaaatttttaatcccaaaaatctt

SEQ ID NO: 14434 - DNA, 679 bp, Homo sapiens
agaactgcccctaggagcagctccttgattcccagtcccctgctctttctaccctgcataatatatgttgtaagctttttgtttctttatagttgtttgcctagtgttcattttagttactcgaattccttgcaaggtaggttttgtttgtttatttatggaagttatttagtaggaatttcacacttaactgggttttcctttggcgtatgacaaccttacctaggacttagaaatctgtgatttctgagtttttggaatttaggaaaatgctctgggtaggattgatagtagattgaataaattaagactttaagacagaattgtagacttttggagttgggagataatttaaagaatattttaaaccaccagttttacagatgaggaaacatgctaaattaatcaccacatttacatcttattagtccttattaaagaatggtaaccaaaagtctgtttgaaatgtttgctctatttgtttggtttcattacatgacagagctgcaggttcttgatattaatgagtaagtggaatgcagtttatttagcagtgttctattagaggtactgaaattttcagggataaggaaatgaaagagagtttagcattgggaaatttgcaccatggatagattaagaggtagacagttaatagaacatttacgggttggagtag

SEQ ID NO: 14435 - DNA, 413 bp, Homo sapiens
gagagggcctggactcctacaggagaaacgcctgaactgatagagggagttgcagccttctggtgaatgggagttaaggcaagaatcatcaacggatgctgaaatctagagggggaaatttgaggaggagcaggattttcgcatagtctcaaaatatctctctattgattgcttattagctgcaaggggaaacaaagtaagcactaattggagtatccagatcacatcatgactaggtgatcaaaattacatcactggtgagggacagatggacgtcatgtgcttcctgaggtgataccctgagaagaacacaacatcagttatgctatatgccagtcagggatggaaaacctgaaactaatcataaggaatctcagacaaacccaaattgtggaacattctattaaaaaaaa

SEQ ID NO: 14436 - DNA, 490 bp, Homo sapiens
tcacaatagggtttgtgctcccatgagaatctaatgctgctgctgatctgactggaggcagagctcaggtgataatgttcactcactcgctgctcacttcctgctatgcagcctggtttcctaacaggccatgaactgcccaggggttgggggcccattttaagccactgggtttgtggtaatctgttacagcagcaatagaaagttgatacaaacagtaatgtgtgagagtactttatggcctttttcacagtgtattgaacttggatttttgtcagtgagatagatgagaaattgtatttcaattcgtgttaatttatatttcttttcatctttaaaaaaattgatagttggtccttcttaatttttggacctctttatagactagggatattatttctctaacataaattgcaaatattttccccaatgttttgtcattcagaaaaattttaataaagtcacgtttgtcgttcttgttgctcttgga

SEQ ID NO: 14437 - DNA, 424 bp, Homo sapiens
gcataagctacttatcttttaaatatgataaccatactaagcttttctaaaagcctatcactccaaggagcctcaaaaattctgtgttgcagatggggttatgggggaagaagcatggatacaactcactttacttaaacttatggaattggacttatatgttggtatcagcgttttataataatttcccttattcagccatgtatcctgcagaaatatataataatcatttctatacattaatccaaatactatagcccacaaaccattttccagaactaagctattaaaaaaaaaaaacaaaaaaaaaacaccttcatctccttatgaaatgaagcaaccaacattggtacctagttgccactaggccattttatgacctctgacaccaaatgttgaaaggcacaaggtctaactaaaatat

SEQ ID NO: 14438 - DNA, 473 bp, Homo sapiens
cctcccagcttcaagcaatgctcccaccttggcctcccaaagcgctgggattacaggcatgagccaccatgcctggccattgccattgcacttcagctggttctcctgaaccttgaattatcttaggaaagattgtattttcaggaattaagtctattggagacacagcaggactccacagccagctagatttggataaaatgtagactgcctcaaggccagtgtgttgacttctgaccagtctcatctgaacccacaccctttaacatatatacaaaacacctgaagggttgggctgccagctttctttaggatgatagagggcaggttaagtttgtttgacataactagaagaggtggagcctcttcctaatggagcaaggtccatttatggcaaactgtggtcccccaccactatcagctacttctggatagcttttgcttaaagttgatgagatattgtttctttcaaa

SEQ ID NO: 14439 - DNA, 1045 bp, Homo sapiens
  misc_feature (113)..(113): n is a, c, g, or t
ctgactacggatgagggaatttagcctggaataaggaacttttatttccagcttagtgacgcacacaaattttaaaaataaaataaaaatcatgttttatgtgattcatgttnctcctaatgcaaagaagacgggtactattactaaaaatatttttaaaatgtaagggctaaggccccagaagttctgctatgattttttatgtttcatagagtgattatcatcacagaagctcaagcattacataaatacaaatgcgtgtaccccgacctggtaattctgcttcttgaaatttatcttcaggtccacccgcacatctacaaattgatgtatattcaatgttatgtactgcagcactgtttataagagcaaaagactggaaacagcctaaatttccatctataaaagactaaataaataaaggtacatccctaaaatggaatattatgtggcgttaaaaaagagagagagagaaagagaggagaagcaagaaaaagagaaagctttctacattcaaactaatagtagaaaactctccaagatacaattttaaggaaaaaaaaaatcaaagtcgagaagacaatagaggaggctgcctttagtgtaagacagttgaaaattataaatatattcatatgtttataaagaaattttaggaggctataaaaaaacaaaacaaagggaaagaggaacaggagctgggacataggtgagcaagatgcatggcaggcatatgtcttcatcttcctatgcttttatttaaaaatgttggaccacgtgtacatgttatctattttaaaaattagattttaaaatacaagcaagaaaacaagaaaatgaaagcataaaaagagcatgtggaactaccagtaaaagatactaatccatggagataatggcaaggtagctcctagatgcactgatttctctaccacattgtataaacaagccatcaactatgggatttgtaattaaaaatgagtctatttgaaacaccacactataaaaagctattaagtaaatctttaaagtgacagtaaatgat

SEQ ID NO: 14440 - DNA, 403 bp, Homo sapiens
ccaggagcttaaatataattttaaaagttatctctgaaattattggaaacacctttatagggaatattgtgaaataacattgtaaagaataatatgctgtatttcagttttgaaataaataaaaattttgaaaaatacaatgtacaaatgcatatccatggctaaaataattcaagtccattagttatttagaactatataaacaactacataaaacaaatttacagttacggtacctatgtaacacaccaaatagttaaaaagtacataacctattctgcaaaaagtgacatttgtagtttgatcagaataggtttgaatctgtaaattgctttgggcagtgtggtcattttaacaatattgattcaatccatgaacatggaatatttttccatttatttgc

SEQ ID NO: 14441 - DNA, 375 bp, Homo sapiens
tctcgatcttctgacctcgtgatccacccacctctgcctcccaaagtgctgggattacaggcgtgagccaacacgcccagtcaatttttgtatttttagtatgggaggggtttcaccatgctggccaggctggtcttgagctcctgacctctagtgatccacccacctcggcctcccaaagtgctgggattacaggcgtgagccactgcacccagtgaaaattaaatattttaaaaatatgaccaattaatactttctttaatgcgaggcaattcaaggataaagtgagatcttacagagatttgcaaatcttaatagattaatgtctacttctttccaatgaccttcaaaaattcaggttcaaagagaattatc

SEQ ID NO: 14442 - DNA, 447 bp, Homo sapiens
gcagtgacattggacccacaccattgctttcagaatcctcattctgggaatttgccaactgctttctcccagtgttctgtaggacattgtttagctttggcattcctagtcaccctaaaaataagaggaaaacaatcatcgtagttggaccacttatcttacaggtatataaggaagacactggggtcatttacagagcatggggagaaagctgttggcatggtacagtggttattgggtgcccactgtgaacagacattgtaggaactgtcttcaagagaagcccttgagggataggcttctagaagttcaggtacatgctggatttatctatgcaaattataatgtttccccgcttccctccctccctccctccctccttctcttctttagaagagaatcctcagattctcaaaaagtatcaagcagagtcctatggatggtaac

SEQ ID NO: 14443 - DNA, 487 bp, Homo sapiens
cgtctttagatttttttttagtccccagtagaaaaatactctctgtatgaagaacattcaaaagtgtgctcaaaaatgaaacccatgctcttactatgaaagaacgttagtacccaggttttccatgagattctctacacaggcaagaagctccatagaagtggcatttgaagggtgtggcagaggcagtgctgtgtttatcacactggttccatttccttgcaaataagaagtctatttcccagtaacccttgcagttaagagtgtgcccatgtgattgagttctagccaatggagtgtgagcaaaagtgatataagccactttcaggtctagcctttacaaacatcctcaggcttctctatccctgccaaggtgaccttggaggctgcttattccagactgggttgatagaaggtcactacttcatctgtgttggatttctttttagagtaagaaataaaagttcattgtgtctcaccactgaaa

SEQ ID NO: 14444 - DNA, 919 bp, Homo sapiens
tgagacagggtctcactttgttgcccaggctggaagtgcagtggctcaaacatggttcgctgcagcctcaacctcccaggctcaagcggtcctgctgcctcatcctccaaagtagctgggaccacagacatgcaccaccatgaccccagctgatttttgcagagatgggttttgccatgttgcccaggctggccttgaactcctgggctcaagtgatcctctcaccttggcctaccaaagtgctggcgttacaggtgtgagccaccacacccggcccgagtgagccattcttatctcttagggaatggtgggaaccctcctggagtctatgttcttagacaccacccaagggccaaccttgaagcaggcctttccaaggatcgcagttgaggcctgctctgttactgtttttctgcacagtgtgcaacaccacacagatgcccagtttctaccaaggtctgtggatggcaggataattttgaggaacctcctttttcgctaacactttcttcttttgtttacactcttcacattgtctattgagtctggattcaagatgattgattgtgaatattgttgtgcatgattttgggggtttcctccttgtgaaattttgaggtggcagatttgacattctactttaaactcatcttggtggcacttttcttgactcaccacctaagggggaataaataatgaagaaagaataaaaatagtgttatcagtcaccaaaaaacaaaaaaaagggggggtttaaatatccctggggccaagttagggtcccggttttgtcaagggcctaagggtgataaaagaagcaggcgggttaagtgatggaaagggtggttgggaagattttggggtaaatggcatccaggtagcaggataatggtgtggagtttgctaagtgttaaaagca

SEQ ID NO: 14445 - DNA, 697 bp, Homo sapiens
tcatcgtcatagctgattccagaggataaaatgacgttcatgggcacctagtcctgagcaagccattcttatctcttagggaatggtgggaaccctcctggagtctatgttcttagacaccacccaagggccaaccttgaagcaggcctttccaaggatcgcagttgaggcctgctctgttactgtttttctgcacagtgtgcaacaccacacagatgcccagtttctaccaaggtctgtggatggcaggataattttgaggaacctcctttttcgctaacactttcttcttttgtttacactcttcacattgtctattgagtctggattcaagatgattgattgtgaatattgttgtgcatgattttgggggtttcctccttgtgaaattttgaggtggcagatttgacattctactttaaactcatcttggtggcacttttcttgactcaccacctaagggggaataaataatgaagaaagaataaaaatagtgttatcagtcaccaaaaaacaaaaaaaagggggggtttaaatatccctggggccaagttagggtcccggttttgtcaagggcctaagggtgataaaagaagcaggcgggttaagtgatggaaagggtggttgggaagattttggggtaaatggcatccaggtagcaggataatggtgtggagtttgctaagtgttaaaagca

SEQ ID NO: 14446 - DNA, 1393 bp, Homo sapiens
  misc_feature (1393)..(1393): n is a, c, g, or t
gcgccccccgggccgaggcagccgggccgaggagtgtcggtgtggtccggctacggggcggggccggcggcggctgctgctgctgccgccgcggaggcagacagaccgggcgctgccaccgccgccctcccccggctccatgccgccgccgctgccgcctcctcctctccggcgaggggcggggggctccggcccggggtgggcaccattcctcgcagcgccgctcccctccctgccctccgcccgggcgctggagccggcgagggcacccgccgcctcctaggagtgcaccctccgcgcgccctgccggagcgagggggcgggcgtgggcggacgtcggggcagcggggaccccgcgcggctgcaagaggagggggcttccccaaggatgcccggcggctccccgctcctaggtgcgagctgagtctgaccgggagcgagcggcgcgtcgccatgccggcgtgacgggcgcccccggctgcccgcgcgggcccccgcgctggcccccacgccgcgccgtgccggcaccgggctgcaggatgggctgtatccaaagcatcacctgcaaggcgcggatccggcgcgagaacatcgtggtgtacgatgtgtgcgccaccatcgaccagtgccccacgcgcatcgaggagacctcgcccatcgtcctgcgctacaagaccccctacttcaaagcctccgcccgcgtggtcatgccccccatcccccgccacgagacctgggtggtgggctggattcaggcgtgcaatcagatggagttcttcaacacctacagcgacctgggcatgtcaagctgggaactgcctgacttgagggaagggagagtaaaagccatcagtgactcagatggggtgagctacccttggtacgggaacaccacagaaactgtgaccctggttggccccaccaacaagatctccaggttctccgtcagcatgaatgacaacttctaccccagtgtgacatgggcagtgcctgtgagtgacagcaatgtgccactgctcacaagaatcaagagagaccaaagtttcacgacctggctggtggccatgaacaccaccacaaaggagaagatcattctgcagaccatcaagtggaggatgagggtggacattgaagtggaccctcttcagctcttggggcagcgggcccggctggtgggcaggactcagcaggagcagccccggatcctgagccggatggaacccatcccccctaatgcactagtgaaacccaatgccaatgatgccaggtcctcatgtggaggcccaagcgggggccacctctggttgtgatccctcctaagtagaagcagactggcctgactgtgtgtggatcacacgcctctgagacatgcagtgagggtgccaggggtggn

SEQ ID NO: 14447 - DNA, 494 bp, Homo sapiens
gagcacgtcctgtgctgctccagccgttggggctctccaccccgggccacagcctcctggcgccccccgggccgaggcagccgggccgaggagtgtcggtgtggtccggctacggggcggggccggcgggagctccggtcgccgccgccgccgctgctgcctccgcctgcctcttgggccgcccgctcgcccgccgctgggtgcgctgcacgcggggggcagccgtggtgcagaggttcatgcagcggcggcggcggcggcggctgctgctgctgccgccgcggaggcagacagaccgggcgctgccaccgccgccctcccccggctccatgccgccgccgctgccgcctcctcctctccggcgaggggcggggggctccggcccggggtgggcaccattcctcgcagcgccgctcccctccctgccctccgcccgggcgctggagccggcgagggcacccgccgcctcctaggagtgcaccctccgcgcgccc

SEQ ID NO: 14448 - DNA, 433 bp, Homo sapiens
cagacaggaatactacagggtggtcacaggataacaaattctaggcagcagatttacatgacttgaggctgtgggctgttaagacgctgaaaaaccagggtgtggaccaagctggctaaggctgagtggacccaacgtggtgctggattggatggaggttttacctaggccctcattatatgctcattaacatactaaatcacacacccgccagtgccatgacagttctgagaccagtgtttgatgtaaaaatggcaccacagttccaagaaatctccacctttacccaggaattttcgtgaatattccaattcttggttaaagaaacccatcaagatgaaaccccagaacccattattctctcttgggtatgcccaagctcccctttcttgagtgtgtactttttgctttgcaataaatctcttctttcact

SEQ ID NO: 14449 - DNA, 360 bp, Homo sapiens
ttttttgtagagacagagtgtatgttgcccaggctggtctccataattgtctcccgtcttagcccccaaagtgctggaattacaggtgcgagtcaccgtgctcggcctgaaggttatacaactattaaatgtcaaggcaaagattcagtccagctctgtcagaggataaagagtatattcttcttcagttataatgctgataagtctgcttacggttctccgacttgtacatccacatctctatatcttttcttattcactaaaaggcttctaatccgtctaatctttttgttagttttaagcaggctttaaagcgactttttttttttttacacgttatcattgatttgtattttattt

SEQ ID NO: 14450 - DNA, 450 bp, Homo sapiens
cccataagtatgaagttttgagttatagtgagagattattatcttttttgtgtgcttatgactaaatataggaaaagtacctttagaagtttttcaaatagcatgagcaactatgatgtttcaaagtattaattatgtaggagttgtgaatggggagagtcatttagttgcttggtcataatacttataaatggggataactatttagcctatttctagttcaaatgggtctctgaccatattgatcattataaggagccataatctatatagagagattgtagagtatgaactctgaagtcagactgcctggggtgaacaccaacccagctgcttggtacctgggttgcttttgacaggtcacttatcctctcttgtctgtttcctcacccatgtaataaggataataataccctacagggttgtggtaaggattgaatgaaataacat

SEQ ID NO: 14451 - DNA, 2600 bp, Homo sapiens
atatgtaggctcatttgtgggagattgcaaactttatgtgcccccagttctccttggttttgtaggaaagctaaaagaaaaccttgtactctcactaataatgaaattcatagccaatttagaaagggaaaataacctgaaaaccaaaatacctcattcatctgaagatgcctggaataaaatatggaattcttctgtacctacctcccccttacagacttttctcctattttgagagagaaattcaagaagaagaatacagcttgttctctttccacaaatgatactttgtctaagggaataggagataccaagaaacagtatctttaaaaaagtaagctgcccacaggccttcttggagaatgaagaatatcagccccattcagggtttaccaatgtctctctgaggtgacaatacattctggttttccaggacagtcctggcttaggtctgctgtccttctataaatattaacaatgatccctcttatttccaaacgtgtcccagtttagacaacaaattatacagtgtctgcccccaacacacacacacacaccccaccatctttatgggttgttgttgttttcttgttgtttttaattttgtagaattggctttgtcttctccaaagcagataacagcttaaactaaagagcctagctacttctttctgactgagcagggtcatagtaaacagagaagaatggatcacttcctcctctgaaatctccatcaatccactttctgtccaactatctctctacccagcctatttttggtcctagttttcctctcataacccctgggctgtgagtcctgagttctgccttcatatggcagagcaagctagtcattattatgccaggttaggtggtggggcaagacaaaagatagctcttggggacacttgcttggtctgtagagatccacagggcactagtagggtattagagcatttattggtttctttcttccttgagttgagttacttctatcccaaaacagacaggtcttacgttaaccttcaccttaaaaaggatattgccttttttccttctgcttcacaaatttgctccaacactaattcccttgcatttgatttcatcattatgattgttcatcaaccattcttcacgaaaaatcctcacatcatgtcatataaaggttttattatttttaatggaaaataacattgagagattattttcctttttcataaaatttccctttttccctccctctattctctttactaacattggaaattaaacaagttttacaggctctattgttattaaccctcaaatctattcttcagagaatatatgatcagcctgtgtttactatgcacctactcttataccagaaactgtgaatacaaatacatatatttcctacttctctctttaattggggcacacagtcccatggtccattctgcatttttcaaaattgaatataattgcaacacctgataggttttgccacttagaattctgaaaataaatcaactctgttctaaaccttaagtttccactattattgccaaactctggactgatacaataagccttttaaaaggtgaatttaacacttcacctattatggttatttaagtaaaatgagttttcaaatatttcccccaggagaaatataaaggactatgcaaaaatagaaggagaaaaaggttagttagaggtccagaaggagaattaaaacatggaattgataaattcacctactgatttatgatgttaatgagcaggtacctatacattttatttacttgaaaacattttggccattaactatttctgttttctaaatacatttgtgtttataaaattttaaaatctatatcacaagccttagacatgcctttctttgcaataaagtatatatacctttttacaaatgtaaattttattttgaaacttggcattttctttataattcctaagatatctttgggcacacagactacagataaatctatttaaatcaattcatcattatcactggtttaaatatttaatgtaaccattggaatttttattcttattccttcagagaatcctccttttcttctatgtttctgactgcaatacagcccgatattgttattccctatatcttaatgaaaagcaagctgtcagcaaaatgcatttatagtttccagatgtttaacaatctctttcttcttttcttttttgttattatttttatttatgtgaagttagttagctgaggtaccaaaaaagagacaaagacagtattaaaaagtgtgcataaagcacttatttttgtactttagtacaatgttttatagaactttgtgatctatctaaatatattaagtaaaattacaccattcacttgttgggaaaataatctttggtttggaagatattaacataatgggcatcttagaatcataaatcacatgaaatgagagacaatgcaatattgtataattcctggatgatgcaattgttttaattgaattttcaagtgccattataaagttttaaaaattatcaatatgagttggtgcctaattttttctttcctaaaaataaaattttttctttttgtgagt

SEQ ID NO: 14452 - DNA, 2545 bp, Homo sapiens
atatgtaggctcatttgtgggagattgcaaactttatgtgcccccagttctccttggttttgtaggaaagctaaaagaaaaccttgtactctcactaataatgaaattcatagccaatttagaaagggaaaataacctgaaaaccaaaatacctcattcatctgaagatgcctggaataaaatatggaattcttctgtacctacctcccccttacagacttttctcctattttgagagagaaattcaagaagaagaatacagcttgttctctttccacaaatgatactttgtctaagggaataggagataccaagaaacagtatctttaaaaaagtaagctgcccacaggccttcttggagaatgaagaatatcagccccattcagggtttaccaatgtctctctgaggtgacaatacattctggttttccaggacagtcctggcttaggtctgctgtccttctataaatattaacaatgatccctcttatttccaaacgtgtcccagtttagacaacaaattatacagtgtctgcccccaacacacacacacacaccccaccatctttatgggttgttgttgttttcttgttgtttttaattttgtagaattggctttgtcttctccaaagcagataacagcttaaactaaagagcctagctacttctttctgactgagcagggtcatagtaaacagagaagaatggatcacttcctcctctgaaatctccatcaatccactttctgtccaactatctctctacccagcctatttttggtcctagttttcctctcataacccctgggctgtgagtcctgagttctgccttcatatggcagagcaagctagtcattattatgccaggttaggtggtggggcaagacaaaagatagctcttggggacacttgcttggtctgtagagatccacagggcactagtagggtattagagcatttattggtttctttcttccttgagttgagttacttctatccccttctgcttcacaaatttgctccaacactaattcccttgcatttgatttcatcattatgattgttcatcaaccattcttcacgaaaaatcctcacatcatgtcatataaaggttttattatttttaatggaaaataacattgagagattattttcctttttcataaaatttccctttttccctccctctattctctttactaacattggaaattaaacaagttttacaggctctattgttattaaccctcaaatctattcttcagagaatatatgatcagcctgtgtttactatgcacctactcttataccagaaactgtgaatacaaatacatatatttcctacttctctctttaattggggcacacagtcccatggtccattctgcatttttcaaaattgaatataattgcaacacctgataggttttgccacttagaattctgaaaataaatcaactctgttctaaaccttaagtttccactattattgccaaactctggactgatacaataagccttttaaaaggtgaatttaacacttcacctattatggttatttaagtaaaatgagttttcaaatatttcccccaggagaaatataaaggactatgcaaaaatagaaggagaaaaaggttagttagaggtccagaaggagaattaaaacatggaattgataaattcacctactgatttatgatgttaatgagcaggtacctatacattttatttacttgaaaacattttggccattaactatttctgttttctaaatacatttgtgtttataaaattttaaaatctatatcacaagccttagacatgcctttctttgcaataaagtatatatacctttttacaaatgtaaattttattttgaaacttggcattttctttataattcctaagatatctttgggcacacagactacagataaatctatttaaatcaattcatcattatcactggtttaaatatttaatgtaaccattggaatttttattcttattccttcagagaatcctccttttcttctatgtttctgactgcaatacagcccgatattgttattccctatatcttaatgaaaagcaagctgtcagcaaaatgcatttatagtttccagatgtttaacaatctctttcttcttttcttttttgttattatttttatttatgtgaagttagttagctgaggtaccaaaaaagagacaaagacagtattaaaaagtgtgcataaagcacttatttttgtactttagtacaatgttttatagaactttgtgatctatctaaatatattaagtaaaattacaccattcacttgttgggaaaataatctttggtttggaagatattaacataatgggcatcttagaatcataaatcacatgaaatgagagacaatgcaatattgtataattcctggatgatgcaattgttttaattgaattttcaagtgccattataaagttttaaaaattatcaatatgagttggtgcctaattttttctttcctaaaaataaaattttttctttttgtgagt

SEQ ID NO: 14453 - DNA, 480 bp, Homo sapiens
tgccacctggagccccacccaggagctggccgcggcaccttacgcttcagctgttgatccgctggtcccctcttttggggtagatgcggccccgatcaggcctgactcgctgctctttttgttcccttctgtctgctcgaaccacttgcctcgggctaatccctccctcttcctccacccggcactggggaagtcaagaatggggcctggggctctcagggagaactgcttcccctggcagagctgggtggcagctcttcctcccaccggacaccgacccgcccgctgctgtgccctgggagtgctgccctcttaccatgcacacgggtgctctccttttgggctgcatgctattccattttgcagccagaccgatgtgtatttaaccagtcactattgatggacatttgggttgtttcccatctttttgttaccataaataatggcatagtaaaaatccttgtgcattaaacgtgcgta

SEQ ID NO: 14454 - DNA, 408 bp, Homo sapiens
gcctgtgaagggtgggaggagggctgtggagctggggattctgggaagggaatgtcggcccagctgggaggttgtaccagatgacctcagctccctcttcctccacccggcactggggaagtcaagaatggggcctggggctctcagggagaactgcttcccctggcagagctgggtggcagctcttcctcccaccggacaccgacccgcccgctgctgtgccctgggagtgctgccctcttaccatgcacacgggtgctctccttttgggctgcatgctattccattttgcagccagaccgatgtgtatttaaccagtcactattgatggacatttgggttgtttcccatctttttgttaccataaataatggcatagtaaaaatccttgtgcattaaacgtgcgta

SEQ ID NO: 14455 - DNA, 495 bp, Homo sapiens
  misc_feature (47)..(47): n is a, c, g, or t
cgtggtagggaagggcgaccgcgaaactgggactttctcggagcccngggccctaccagcgttcacagtccgccgctcccacccttctcacgtctgacggactctgctgacagcccttgccctgttggatgaataggcacctctggaagagccaactgtgtgagatggtgcagcccagtggtggcccggcagcagatcaggacgtactgggcgaagagtctcctctggggaagcagatggctgaggacaaggcctctgtgaaagcccaggtgacgtccttgctcggggagctgcaggagagccagagtcgctgggagtgctgccctcttaccatgcacacgggtgctctccttttgggctgcatgctattccattttgcagccagaccgatgtgtatttaaccagtcactattgatggacatttgggttgtttcccatctttttgttaccataaataatggcatagtaaaaatccttgtgcattaaacgtgcgta

SEQ ID NO: 14456 - DNA, 1473 bp, Homo sapiens
  misc_feature (47)..(47): n is a, c, g, or t
cgtggtagggaagggcgaccgcgaaactgggactttctcggagcccngggccctaccagcgttcacagtccgccgctcccacccttctcacgtctgacggactctgctgacagcccttgccctgttggatgaataggcacctctggaagagccaactgtgtgagatggtgcagcccagtggtggcccggcagcagatcaggacgtactgggcgaagagtctcctctggggaagccagccatgctgcacctgccttcagaacagggcgctcctgagaccctccagcgctgcctggaggagaatcaagagctccgagatgccatccggcagagcaaccagattctgcgggagcgctgcgaggagcttctgcatttccaagccagccagagggaggagaaggagttcctcatgtgcaagttccaggaggccaggaaactggtggagagactcggcctggagaagctcgatctgaagaggcagaaggagcacggctctgcgggaggtggagcacctgaagagatgccagcagcagatggctgaggacaaggcctctgtgaaagcccaggtgacgtccttgctcggggagctgcaggagagccagagtcgcttggaggctgccactaacggaatgccaggctctggagggtcgggcccgggcggccagcgagcaggcgcggcagctggagagtgagcgcgaggcgctgcagcagcagcacagcgtgcaggtggaccagctgcgcatgcagggccagagcgtggaggccgcgctccgcatggagcgccaggccgcctcggaggagaagaggaagctggcccagttgcaggtggcctatcaccagctcttccaagaatacgacaaccacatcaagagcagcgtggtgggcagtgagcggaagcgaggaatgcagctggaagatctcaaacagcagctccagcaggccgaggaggccctggtggccaaacaggaggtgatcgataagctgaaggaggaggccgagcagcacaagattgtgatggagaccgttccggtgctgaaggcccaggcggatatctacaaggcggacttccaggctgagaggcaggcccgggagaagctggccgagaagaaggagctcctgcaggagcagctggagcagctgcagagggagtacagcaaactgaaggccagctgtcaggagtcggccaggtgggcaatggggcctggggctctcagggagaactgcttcccctggcagagctgggtggcagctcttcctcccaccggacaccgacccgcccgctgctgtgccctgggagtgctgccctcttaccatgcacacgggtgctctccttttgggctgcatgctattccattttgcagccagaccgatgtgtatttaaccagtcactattgatggacatttgggttgtttcccatctttttgttaccataaataatggcatagtaaaaatccttgtgcattaaacgtgcgta

SEQ ID NO: 14457 - DNA, 849 bp, Homo sapiens
  misc_feature (47)..(47): n is a, c, g, or t
cgtggtagggaagggcgaccgcgaaactgggactttctcggagcccngggccctaccagcgttcacagtccgccgctcccacccttctcacgtctgacggactctgctgacagcccttgccctgttggatgaataggcacctctggaagagccaactgtgtgagatggtgcagcccagtggtggcccggcagcagatcaggacgtactgggcgaagagtctcctctggggaagccagccatgctgcacctgccttcagaacagggcgctcctgagaccctccagcgctgcctggaggagaatcaagagctccgagatgccatccggcagagcaaccagattctgcgggagcgctgcgaggagcttctgcatttccaagccagccagagggaggagaaggagttcctcatgtgcaagttccaggaggccaggaaactggtggagagactcggcctggagaagctcgatctgaagaggcagaaggagcacggctctgcgggaggtggagcacctgaagagatgccagcaggaaaggacacaggttacggtgagcgaaggctcagggcgcacagggcgggctccaggagagaccaggcgtgagcttcagcggctcctcgcccaggggagttgtgcagacggcacctgtttctttcggcaacagtgtgggacagcgagcacggagtcacaaccgggaagctcaccccagccgtggcggccggggttttcacggggggtgggccgcgtgggcaccgagcgcctgcgtggccaaccctggtcactcggctgtagccaccagaggtccagctgtgtggcccaaggctccccccataaatcgtgtcattagcacaga

SEQ ID NO: 14458 - DNA, 382 bp, Homo sapiens
  misc_feature (337)..(337): n is a, c, g, or t
ggctcatcaatactcgggcattattcttctatgctagatggcttttctataatatataatttcacaaatcaaaacacctacaaagttgtaagatttatgcccattagggaggttgagatggagactaaacatgatttgaaagtaggaacagagagaatggagagaagatttaaacatgattatcagtatcctcctctgagacccatttaaattacatacaggaatacagtacacacaaacacacctctaaaagaaaagggaggccaggggcggtggctcatgcctgtaatcccagcactttgggagactgaagccaggagtttgagaccagcctggnaacgcagagaccttgcctatacaaaacaacaacaacaacaacaaa

SEQ ID NO: 14459 - DNA, 456 bp, Homo sapiens
actagaattcgatgcccagagaaaatatcctttaaggatgaggagaaaaacatttacagacaaaggaacactgagaaatcttaccataagccaaccctttgtaaaagaaagtttaaataatatacttgcaatagaagcaaagtgatcagaatgaggaacaaataaagtgcataaaaaacaatagtaatatcttattacattttaacacataattaataaagcctataaatcaagaaagggatagagttaagagttctaggtcctactttcagaactagggtaaagtactgatgaacttaagacttggtaaattaagtatccctgttataattcctaggttaatgattataactacacaagcagaatgtataacttccaaattagtagaaaaaaatctaaaatggttaacaaaagctaattgaaatgaaggcaagaaaaaagtgaaaagaaacaaaa

SEQ ID NO: 14460 - DNA, 403 bp, Homo sapiens
atcctatcagtggaggtggattaatatagtcccctcacaattctaatgactgcaggcttgcttgtgatgttgttggtgtagggtttaggtaagagtggggctcagggttgtccttggggatacaggaccagggaaaggagacagatacagccctcaacaacttatgcagctgaaaccaaactgaaatgaatataaggggcaaatagtagaaaaaaatcattaaaattcaacttgaggagtgtgtaggagagagatgttttgttctgctttgcctaagtcatggtagttgtgcaaaaagtgttggtcttaaaactcaggcttcttttggtacaaggtggttctgtgtcccccagctgctcccctttaccctctcccatcccgttacctctttattcacaagaga

SEQ ID NO: 14461 - DNA, 517 bp, Homo sapiens
gatgtagcacttacatgagatgaaattatgtgagatgcagaattcagattgcagtgaccattcataagttttagtgcagcatagctatacacattcattcatctatggactgtcattggtgactttggtattgtgatggccattgtgcaaaagagaccttatagcccacaaagttgaagatatttactgtctgaccttttccagaaaatatttgctgacccttggattacacctatagttttttccccaacctgttacacttcaccacacaggttaaaatagattatatatatataatctttgttttattttttgtaatagtacaaatttttaattgtactttaaaaaaattgtacaatttagtggctgagtgcagtggctcacagctataatcccagcactatgggaggcctaggtgggaggatcacttgagaccagagggtggaggcttcagtgagccatgatcacaccactgcactccagtctgggtgacaaagcgagaccctatctggggaaa

SEQ ID NO: 14462 - DNA, 312 bp, Homo sapiens
taaatataatttatataaatttacctattttggtttagttttactaaaaggggaccatgttgctataaaactaatacatttcagaggtacctgtaagaaaaatgtttaaactctgatttgcttcaaactatagtagaatatgtgtatgtttgttatcaggtgaatgggtagaatgtatttttattgtgaacatttttcttaattaatgaatatatttatttaagtgctaatgtttttttaaaggcaatagtaggcaagattcacagtgtatttcaagtgagagtctcttttcttaaatattttaatatcatt

SEQ ID NO: 14463 - DNA, 413 bp, Homo sapiens
tgtatttttagtagagatggggtttcaccgtgttagccagggtggaatttttttgtatttttagtagagatggggttttgctatgttgcccaggctggtctcttaactcctgagctcaggcagtctgcctgcctgggcctcccaaaatgctaggattacaggcgtgaccaccgtacccagccgctccagccttttttatttgcctttttccttctagcaaaaatgttccaattacaaataccctctgtctttccagactgccctaacgtccagtgcaccttagaatgctcatttccctcactcctccgttctttgtcttcaattgtgtaactcctatgtagcattttgactcagctcaggtgctggtcaccccggccctggcccatttcagcctcttggacctaaatctggga

SEQ ID NO: 14464 - DNA, 288 bp, Homo sapiens
gacccttgtttctctgccttttgggcaaagtgggcacattgcaatttcttcatctaaccaaggaatttcaaagcaaactgctgcatttcttttcatctcagagggttctggggctctctcctgagctgctgtatacttagctgacctcaagctgccagcacagagcctgggctctgttctgtggaaaaatagttgtgtgactttgagagaacatcttacactgttctctcaaagcacttacactcagtgttaatctgactcactgatcacaggacaggggattctcat

SEQ ID NO: 14465 - DNA, 1082 bp, Homo sapiens
ggcgcggctccgctctcggctggggttcgtcactgggcgcgggatttggccgccgcggggctccggagccgctcgctcccgacacggctcacgatgcgcggcgagcagggcgcggcgggggcccgcgtgctccagttcactaactgccggatcctgcgcggagggaaactgctcagggaggatctgtgggtgcgcggaggccgcatcttggacccagagaagctgttctttgaggagcggcgcgtggccgacgagcggcgggactgcgggggccgcatcttggctcccggattcatcgacgtgcagatcaacggtggatttggtgttgacttctctcaagccacggaggacgtgggttcgggggttgccctcgtggcccggaggatcctgtcgcacggcgtcacctccttctgccccaccctggtcacttccccaccggaggtttatcacaaggttgttcctcagatccctgtgaagagtggtggtccccatggggcaggggtcctcgggctgcacctggagggccccttcatcagccgggagaagcggggcgcgcaccccgaggcccacctccgctccttcgaggccgatgccttccaggacttgctggccacccagggtcagggtgagagagagctgggccagggagctgctgcaggatgattttgaggtgtgggggaagcactcttggttggttttggtttgctttttaaaaattgtggtaaaatacataacaaaagtaactatcgtaacctgagcagttctgtgacatgaagtgaattcactgctttgtgtgaccttggccaccatcattccccaccactcactcccgctgggctcccagccctgccccaccattccgctccctctacagctatgggttttacaaagaaggatgcagggcgccctgactgcggggtgaggggcaggcctgcccgcggtgtgggcattcgctgaagggggacgcccaggtgtctgcctgagttacgggttggggggtcgggcatgtggggagggatggagttggaggtgcatgctctcagagctggtaggggtggcccgtttcgtcccgtgtgtgaact

SEQ ID NO: 14466 - DNA, 871 bp, Homo sapiens
ggcgcggctccgctctcggctggggttcgtcactgggcgcgggatttggccgccgcggggctccggagccgctcgctcccgacacggctcacgatgcgcggcgagcagggcgcggcgggggcccgcgtgctccagttcactaactgccggatcctgcgcggagggaaactgctcagggaggatctgtgggtgcgcggaggccgcatcttggacccagagaagctgttctttgaggagcggcgcgtggccgacgagcggcgggactgcgggggccgcatcttggctcccggattcatcgacgtgcagatcaacggtgcggcccggggccggcaggggaacccaggggaggagctctgagctccatgcgacacttccttttctgtggctgcaggtggatttggtgttgacttctctcaagccacggaggacgtgggttcgggggttgccctcgtggcccggaggatcctgtcgcacggcgtcacctccttctgccccaccctggtcacttccccaccggaggtttatcacaaggttgttcctcagatccctgtgaagagtggtggtccccatggggcaggggtcctcgggctgcacctggagggccccttcatcagccgggagaagcggggcgcgcaccccgaggcccacctccgctccttcgaggccgatgccttccaggacttgctggccacctacgggcccctggacaatgtccgcatcgtgacgctggccccagagttgggccgtagccacgaagtgatccgggcgctgacggcccgtggcatctgcgtgtccctaggtgaggggccggctcggggtgggcctgcttgggggacctgggccaggtgcaaagtctgaatccaggtcccgc

SEQ ID NO: 14467 - DNA, 777 bp, Homo sapiens
ggcgcggctccgctctcggctggggttcgtcactgggcgcgggatttggccgccgcggggctccggagccgctcgctcccgacacggctcacgatgcgcggcgagcagggcgcggcgggggcccgcgtgctccagttcactaactgccggatcctgcgcggagggaaactgctcagggaggatctgtgggtgcgcggaggccgcatcttggacccagagaagctgttctttgaggagcggcgcgtggccgacgagcggcgggactgcgggggccgcatcttggctcccggattcatcgacgtgcagatcaacggtggatttggtgttgacttctctcaagccacggaggacgtgggttcgggggttgccctcgtggcccggaggatcctgtcgcacggcgtcacctccttctgccccaccctggtcacttccccaccggaggtttatcacaagggctgcacctggagggccccttcatcagccgggagaagcggggcgcgcaccccgaggcccacctccgctccttcgaggccgatgccttccaggacttgctggccacctacgggcccctggacaatgtccgcatcgtgacgctggccccagagttgggccgtagccacgaagtgatccgggcgctgacggcccgtggcatctgcgtgtccctagggcactcagtggctgacctgcgggcggcagaggatgctgtgtggagcggagccaccttcatcacccacctcttcaacgccatgctgcctgtgagtgctatggggccccagg

SEQ ID NO: 14468 - DNA, 3508 bp, Homo sapiens
ggcgcggctccgctctcggctggggttcgtcactgggcgcgggatttggccgccgcggggctccggagccgctcgctcccgacacggctcacgatgcgcggcgagcagggcgcggcgggggcccgcgtgctccagttcactaactgccggatcctgcgcggagggaaactgctcagggaggatctgtgggtgcgcggaggccgcatcttggacccagagaagctgttctttgaggagcggcgcgtggccgacgagcggcgggactgcgggggccgcatcttggctcccggattcatcgacgtgcagatcaacggtggatttggtgttgacttctctcaagccacggaggacgtgggttcgggggttgccctcgtggcccggaggatcctgtcgcacggcgtcacctccttctgccccaccctggtcacttccccaccggaggtttatcacaaggttgttcctcagatccctgtgaagagtggtggtccccatggggcaggggtcctcgggctgcacctggagggccccttcatcagccgggagaagcggggcgcgcaccccgaggcccacctccgctccttcgaggccgatgccttccaggacttgctggccacctacgggcccctggacaatgtccgcatcgtgacgctggccccagagttgggccgtagccacgaagtgatccgggcgctgacggcccgtggcatctgcgtgtccctagggcactcagtggctgacctgcgggcggcagaggatgctgtgtggagcggagccaccttcatcacccacctcttcaacgccatgctgcctttccaccaccgcgacccaggcatcgtggggctcctgaccagcgaccggctgcccgcaggccgctgcatcttctatgggatgattgcagatggcacgcacaccaaccccgccgccctgcggatcgcccaccgtgcccatccccaggggctggtgctggtcaccgatgccatccctgccttgggcctgggcaacggccggcacacgctgggacagcaggaagtggaagtggacggtctgacggcctacgtggcaggcaccaagacgctgagtggcagcatagccccaatggacgtctgtgtccggcacttcctgcaggccacaggctgcagcatggagtcggccctggaggctgcatccctgcaccccgcccagttgctggggctggagaagagtaaggggaccctggactttggtgctgacgcagacttcgtggtgctcgacgactcccttcacgtccaggccacctacatctcgggtgagctggtgtggcaggcggacgcagctaggcagtgacaaggacctcggctgagaggacacctggccgcagcgggatgccatcagggccgggtggttggggagctggtctccagggagtgagtcgggagccctgctggattgatgcccagggcctgtgcggccgccctggaggcggtggctgggataaacgtgcacccagcaggactcgccttggctccgggttttgcttgtgctcacatgtggcaccatccttggttgccctcctggagaaggcattcacggcctggggtgggatggctgggctgtagtttagcctgggccttgggccccagtgggggacagggcctgtctgcatgaagtggaccggagacctgcagaccccaggaaagtgtcactatgggagggaggggcaggcagtcagtggctggtgccatggggtgaagccaccatgggctgggggtgaagagccggcaggaaggggaccagtcacagggagtgtggacagtcaggggtttgctttctgctcctgagttggggtgtgcagcgtggagcccacagcctggttctgggccagggcacagtgccaggggctccgctctgacctccaggagggagactgggcccgggacccctgttttctgctccctggactgcctagccctgagtgccacggatgaccagcgttctgttttctcttctcaataaccctatctcttcacacatccccaggcccagtgcttgccggctgtggtgaccctgcctggtgctggagggcagtatgggaggcaccagtgtgccctgctcaccccattagtgtcatcctgccatcttctgtgtccccttggccctggcacacacccatgtggcaaacacgggccgtgaggctccctgaacagcttcgaggcgggtgggcttctggagccctcttggctctgaggacagccacagtggggtcagacgtcagggattggtgcagccccacgtcaggggtgattgtcttgactttctctccatttgagttctggggtgggtggctcccttcccccttgcttacaggtgctgtcctgggcacaggaggtacgcgcctggctctgcactgttctcttccctctgctgcaaagcccagttaaggaaatgtctccaggtccaaagagataggatggtctggggccccacctgtttggaagggaacagccagggaagaaccacctgcctgggcagggcctcgcctgagggagggcctggggcagggcacaaggggttgatctcagcccacaagccccaggggcagcccaggaaagcaggcgacggatgtggatcctgacctcctgagaggtgtgaggtgcagggatacccacctctgccttgacggccgcgcaccccttaggaagtggctgtccagcgcctgcctgtgctgggcctgggagaggagctgtcttgccagggctcccaggcagggagaggcaggtgaggttctcagccgatgtgttagaggttgagcatcgcctgtgcccagcttgctggctgtcagtgcttgatgtgcccatcctcagctaaaacccagagctggcatgttggtcatccccacctcagacgggacgcccagtccagagctggtgagccctgggccagcctttgggcctggcctgccccattcaccggccagcgccccacctccctggctggagggtcggggaggggctggcagagatggttggtccacagggctagccctgggtggtgggagaggggcccagggtcagggtgagagagagctgggccagggagctgctgcaggatgattttgaggtgtgggggaagcactcttggttggttttggtttgctttttaaaaattgtggtaaaatacataacaaaagtaactatcgtaacctgagcagttctgtgacatgaagtgaattcactgctttgtgtgaccttggccaccatcattccccaccactcactcccgctgggctcccagccctgccccaccattccgctccctctacagctatgggttttacaaagaaggatgcagggcgccctgactgcggggtgaggggcaggcctgcccgcggtgtgggcattcgctgaagggggacgcccaggtgtctgcctgagttacgggttggggggtcgggcatgtggggagggatggagttggaggtgcatgctctcagagctggtaggggtggcccgtttcgtcccgtgtgtgaact

SEQ ID NO: 14469 - DNA, 2816 bp, Homo sapiens
ggcgcggctccgctctcggctggggttcgtcactgggcgcgggatttggccgccgcggggctccggagccgctcgctcccgacacggctcacgatgcgcggcgagcagggcgcggcgggggcccgcgtgctccagttcactaactgccggatcctgcgcggagggaaactgctcagggaggatctgtgggtgcgcggaggccgcatcttggacccagagaagctgttctttgaggagcggcgcgtggccgacgagcggcgggactgcgggggccgcatcttggctcccggattcatcgacgtgcagatcaacggtggatttggtgttgacttctctcaagccacggaggacgtgggttcgggggttgccctcgtggcccggaggatcctgtcgcacggcgtcacctccttctgccccaccctggtcacttccccaccggaggtttatcacaaggttgttcctcagatccctgtgaagagtggtggtccccatggggcaggggtcctcgggctgcacctggagggccccttcatcagccgggagaagcggggcgcgcaccccgaggcccacctccgctccttcgaggccgatgccttccaggacttgctggccacctacgggcccctggacaatgtccgcatcgtgacgctggccccagagttgggccgtagccacgaagtgatccgggcgctgacggcccgtggcatctgcgtgtccctagggcactcagtggctgacctgcgggcggcagaggatgctgtgtggagcggagccaccttcatcacccacctcttcaacgccatgctgcctttccaccaccgcgacccaggcatcgtggggctcctgaccagcgaccggctgcccgcaggccgctgcatcttctatgggatgattgcagatggcacgcacaccaaccccgccgccctgcggatcgcccaccgtgcccatccccaggggctggtgctggtcaccgatgccatccctgccttgggcctgggcaacggccggcacacgctgggacagcaggaagtggaagtggacggtctgacggcctacgtggcaggcaccaagacgctgagtggcagcatagccccaatggacgtctgtgtccggcacttcctgcaggccacaggctgcagcatggagtcggccctggaggctgcatccctgcaccccgcccagttgctggggctggagaagagtaaggggaccctggactttggtgctgacgcagacttcgtggtgctcgacgactcccttcacgtccaggccacctacatctcgggtgagctggtgtggcaggcggacgcagctaggcagtgacaaggacctcggctgagaggacacctggccgcagcgggatgccatcagggccgggtggttggggagctggtctccagggagtgagtcgggagccctgctggattgatgcccagggcctgtgcggccgccctggaggcggtggctgggataaacgtgcacccagcaggactcgccttggctccgggttttgcttgtgctcacatgtggcaccatccttggttgccctcctggagaaggcattcacggcctggggtgggatggctgggctgtagtttagcctgggccttgggccccagtgggggacagggcctgtctgcatgaagtggaccggagacctgcagaccccaggaaagtgtcactatgggagggaggggcaggcagtcagtggctggtgccatggggtgaagccaccatgggctgggggtgaagagccggcaggaaggggaccagtcacagggagtgtggacagtcaggggtttgctttctgctcctgagttggggtgtgcagcgtggagcccacagcctggttctgggccagggcacagtgccaggggctccgctctgacctccaggagggagactgggcccgggacccctgttttctgctccctggactgcctagccctgagtgccacggatgaccagcgttctgttttctcttctcaataaccctatctcttcacacatccccaggcccagtgcttgccggctgtggtgaccctgcctggtgctggagggcagtatgggaggcaccagtgtgccctgctcaccccattagtgtcatcctgccatcttctgtgtccccttggccctggcacacacccatgtggcaaacacgggccgtgaggctccctgaacagcttcgaggcgggtgggcttctggagccctcttggctctgaggacagccacagtggggtcagacgtcagggattggtgcagccccacctccctggctggagggtcggggaggggctggcagagatggttggtccacagggctagccctgggtggtgggagaggggcccagggtcagggtgagagagagctgggccagggagctgctgcaggatgattttgaggtgtgggggaagcactcttggttggttttggtttgctttttaaaaattgtggtaaaatacataacaaaagtaactatcgtaacctgagcagttctgtgacatgaagtgaattcactgctttgtgtgaccttggccaccatcattccccaccactcactcccgctgggctcccagccctgccccaccattccgctccctctacagctatgggttttacaaagaaggatgcagggcgccctgactgcggggtgaggggcaggcctgcccgcggtgtgggcattcgctgaagggggacgcccaggtgtctgcctgagttacgggttggggggtcgggcatgtggggagggatggagttggaggtgcatgctctcagagctggtaggggtggcccgtttcgtcccgtgtgtgaact

SEQ ID NO: 14470 - DNA, 3598 bp, Homo sapiens
ggcgcggctccgctctcggctggggttcgtcactgggcgcgggatttggccgccgcggggctccggagccgctcgctcccgacacggctcacgatgcgcggcgagcagggcgcggcgggggcccgcgtgctccagttcactaactgccggatcctgcgcggagggaaactgctcagggaggatctgtgggtgcgcggaggccgcatcttggacccagagaagctgttctttgaggagcggcgcgtggccgacgagcggcgggactgcgggggccgcatcttggctcccggattcatcgacgtgcagatcaacggtggatttggtgttgacttctctcaagccacggaggacgtgggttcgggggttgccctcgtggcccggaggatcctgtcgcacggcgtcacctccttctgccccaccctggtcacttccccaccggaggtttatcacaaggttgttcctcagatccctgtgaagagtggtggtccccatggggcaggggtcctcgggctgcacctggagggccccttcatcagccgggagaagcggggcgcgcaccccgaggcccacctccgctccttcgaggccgatgccttccaggacttgctggccacctacgggcccctggacaatgtccgcatcgtgacgctggccccagagttgggccgtagccacgaagtgatccgggcgctgacggcccgtggcatctgcgtgtccctagggcactcagtggctgacctgcgggcggcagaggatgctgtgtggagcggagccaccttcatcacccacctcttcaacgccatgctgcctttccaccaccgcgacccaggcatcgtggggctcctgaccagcgaccggctgcccgcaggccgctgcatcttctatgggatgattgcagatggcacgcacaccaaccccgccgccctgcggatcgcccaccgtgcccatccccaggggctggtgctggtcaccgatgccatccctgccttgggcctgggcaacggccggcacacgctgggacagcaggaagtggaagtggacggtctgacggcctacgtggcaggtgagcgccctgacccactgggtcccaggtcccagcccgcatgccaggtggcccacgacccccccagagcctgccctctctgctctcaaggcaccaagacgctgagtggcagcatagccccaatggacgtctgtgtccggcacttcctgcaggccacaggctgcagcatggagtcggccctggaggctgcatccctgcaccccgcccagttgctggggctggagaagagtaaggggaccctggactttggtgctgacgcagacttcgtggtgctcgacgactcccttcacgtccaggccacctacatctcgggtgagctggtgtggcaggcggacgcagctaggcagtgacaaggacctcggctgagaggacacctggccgcagcgggatgccatcagggccgggtggttggggagctggtctccagggagtgagtcgggagccctgctggattgatgcccagggcctgtgcggccgccctggaggcggtggctgggataaacgtgcacccagcaggactcgccttggctccgggttttgcttgtgctcacatgtggcaccatccttggttgccctcctggagaaggcattcacggcctggggtgggatggctgggctgtagtttagcctgggccttgggccccagtgggggacagggcctgtctgcatgaagtggaccggagacctgcagaccccaggaaagtgtcactatgggagggaggggcaggcagtcagtggctggtgccatggggtgaagccaccatgggctgggggtgaagagccggcaggaaggggaccagtcacagggagtgtggacagtcaggggtttgctttctgctcctgagttggggtgtgcagcgtggagcccacagcctggttctgggccagggcacagtgccaggggctccgctctgacctccaggagggagactgggcccgggacccctgttttctgctccctggactgcctagccctgagtgccacggatgaccagcgttctgttttctcttctcaataaccctatctcttcacacatccccaggcccagtgcttgccggctgtggtgaccctgcctggtgctggagggcagtatgggaggcaccagtgtgccctgctcaccccattagtgtcatcctgccatcttctgtgtccccttggccctggcacacacccatgtggcaaacacgggccgtgaggctccctgaacagcttcgaggcgggtgggcttctggagccctcttggctctgaggacagccacagtggggtcagacgtcagggattggtgcagccccacgtcaggggtgattgtcttgactttctctccatttgagttctggggtgggtggctcccttcccccttgcttacaggtgctgtcctgggcacaggaggtacgcgcctggctctgcactgttctcttccctctgctgcaaagcccagttaaggaaatgtctccaggtccaaagagataggatggtctggggccccacctgtttggaagggaacagccagggaagaaccacctgcctgggcagggcctcgcctgagggagggcctggggcagggcacaaggggttgatctcagcccacaagccccaggggcagcccaggaaagcaggcgacggatgtggatcctgacctcctgagaggtgtgaggtgcagggatacccacctctgccttgacggccgcgcaccccttaggaagtggctgtccagcgcctgcctgtgctgggcctgggagaggagctgtcttgccagggctcccaggcagggagaggcaggtgaggttctcagccgatgtgttagaggttgagcatcgcctgtgcccagcttgctggctgtcagtgcttgatgtgcccatcctcagctaaaacccagagctggcatgttggtcatccccacctcagacgggacgcccagtccagagctggtgagccctgggccagcctttgggcctggcctgccccattcaccggccagcgccccacctccctggctggagggtcggggaggggctggcagagatggttggtccacagggctagccctgggtggtgggagaggggcccagggtcagggtgagagagagctgggccagggagctgctgcaggatgattttgaggtgtgggggaagcactcttggttggttttggtttgctttttaaaaattgtggtaaaatacataacaaaagtaactatcgtaacctgagcagttctgtgacatgaagtgaattcactgctttgtgtgaccttggccaccatcattccccaccactcactcccgctgggctcccagccctgccccaccattccgctccctctacagctatgggttttacaaagaaggatgcagggcgccctgactgcggggtgaggggcaggcctgcccgcggtgtgggcattcgctgaagggggacgcccaggtgtctgcctgagttacgggttggggggtcgggcatgtggggagggatggagttggaggtgcatgctctcagagctggtaggggtggcccgtttcgtcccgtgtgtgaact

SEQ ID NO: 14471 - DNA, 2075 bp, Homo sapiens
ggcgcggctccgctctcggctggggttcgtcactgggcgcgggatttggccgccgcggggctccggagccgctcgctcccgacacggctcacgatgcgcggcgagcagggcgcggcgggggcccgcgtgctccagttcactaactgccggatcctgcgcggagggaaactgctcagggaggatctgtgggtgcgcggaggccgcatcttggacccagagaagctgttctttgaggagcggcgcgtggccgacgagcggcgggactgcgggggccgcatcttggctcccggattcatcgacgtgcagatcaacggtggatttggtgttgacttctctcaagccacggaggacgtgggttcgggggttgccctcgtggcccggaggatcctgtcgcacggcgtcacctccttctgccccaccctggtcacttccccaccggaggtttatcacaaggttgttcctcagatccctgtgaagagtggtggtccccatggggcaggggtcctcgggctgcacctggagggccccttcatcagccgggagaagcggggcgcgcaccccgaggcccacctccgctccttcgaggccgatgccttccaggacttgctggccacctacgggcccctggacaatgtccgcatcgtgacgctggccccagagttgggccgtagccacgaagtgatccgggcgctgacggcccgtggcatctgcgtgtccctagggcactcagtggctgacctgcgggcggcagaggatgctgtgtggagcggagccaccttcatcacccacctcttcaacgccatgctgcctttccaccaccgcgacccaggcatcgtggggctcctgaccagcgaccggctgcccgcaggccgctgcatcttctatgggatgattgcagatggcacgcacaccaaccccgccgccctgcggatcgcccaccgtgcccatccccaggggctggtgctggtcaccgatgccatccctgccttgggcctgggcaacggccggcacacgctgggacagcaggaagtggaagtggacggtctgacggcctacgtggcaggcaccaagacgctgagtggcagcatagccccaatggacgtctgtgtccggcacttcctgcaggccacaggctgcagcatggagtcggccctggaggctgcatccctgcaccccgcccagttgctggggctggagaagagtaaggggaccctggactttggtgctgacgcagacttcgtggtgctcgacgactcccttcacgtccaggccacctacatctcgggtgagctggtgtggcaggcggacgcagctaggcagtgacaaggacctcggctgagaggacacctggccgcagcgggatgccatcagggccgggtggttggggagctggtctccagggagtgagtcgggagccctgctggattgatgcccagggcctgtgcggccgccctggaggcggtggctgggataaacgtgcacccagcaggactcgccttggctccgggttttgcttgtgctcacatgtggcaccatccttggttgccctcctggagaaggcattcacggcctggggtgggatggctgggctgtagtttagcctgggcccagggtcagggtgagagagagctgggccagggagctgctgcaggatgattttgaggtgtgggggaagcactcttggttggttttggtttgctttttaaaaattgtggtaaaatacataacaaaagtaactatcgtaacctgagcagttctgtgacatgaagtgaattcactgctttgtgtgaccttggccaccatcattccccaccactcactcccgctgggctcccagccctgccccaccattccgctccctctacagctatgggttttacaaagaaggatgcagggcgccctgactgcggggtgaggggcaggcctgcccgcggtgtgggcattcgctgaagggggacgcccaggtgtctgcctgagttacgggttggggggtcgggcatgtggggagggatggagttggaggtgcatgctctcagagctggtaggggtggcccgtttcgtcccgtgtgtgaact

SEQ ID NO: 14472 - DNA, 3579 bp, Homo sapiens
ggcgcggctccgctctcggctggggttcgtcactgggcgcgggatttggccgccgcggggctccggagccgctcgctcccgacacggctcacgatgcgcggcgagcagggcgcggcgggggcccgcgtgctccagttcactaactgccggatcctgcgcggagggaaactgctcagggaggatctgtgggtgcgcggaggccgcatcttggacccagagaagctgttctttgaggagcggcgcgtggccgacgagcggcgggactgcgggggccgcatcttggctcccggattcatcgacgtgcagatcaacggtggatttggtgttgacttctctcaagccacggaggacgtgggttcgggggttgccctcgtggcccggaggatcctgtcgcacggcgtcacctccttctgccccaccctggtcacttccccaccggaggtttatcacaaggttgttcctcagatccctgtgaagagtggtggtccccatggggcaggggtcctcgggctgcacctggagggccccttcatcagccgggagaagcggggcgcgcaccccgaggcccacctccgctccttcgaggccgatgccttccaggacttgctggccacctacgggcccctggacaatgtccgcatcgtgacgctggccccagagttgggccgtagccacgaagtgatccgggcgctgacggcccgtggcatctgcgtgtccctagggcactcagtggctgacctgcgggcggcagaggatgctgtgtggagcggagccaccttcatcacccacctcttcaacgccatgctgcctttccaccaccgcgacccaggcatcgtggggctcctgaccagcgaccggctgcccgcaggccgctgcatcttctatgggatgattgcagatggcacgcacaccaaccccgccgccctgcggatcgcccaccgtgcccatccccagggtaagctgcggcaggtggccaggacaggtaggatgactgggctagcaggttctgagcctcttctcccccagggctggtgctggtcaccgatgccatccctgccttgggcctgggcaacggccggcacacgctgggacagcaggaagtggaagtggacggtctgacggcctacgtggcaggcaccaagacgctgagtggcagcatagccccaatggacgtctgtgtccggcacttcctgcaggccacaggctgcagcatggagtcggccctggaggctgcatccctgcaccccgcccagttgctggggctggagaagagtaaggggaccctggactttggtgctgacgcagacttcgtggtgctcgacgactcccttcacgtccaggccacctacatctcgggtgagctggtgtggcaggcggacgcagctaggcagtgacaaggacctcggctgagaggacacctggccgcagcgggatgccatcagggccgggtggttggggagctggtctccagggagtgagtcgggagccctgctggattgatgcccagggcctgtgcggccgccctggaggcggtggctgggataaacgtgcacccagcaggactcgccttggctccgggttttgcttgtgctcacatgtggcaccatccttggttgccctcctggagaaggcattcacggcctggggtgggatggctgggctgtagtttagcctgggccttgggccccagtgggggacagggcctgtctgcatgaagtggaccggagacctgcagaccccaggaaagtgtcactatgggagggaggggcaggcagtcagtggctggtgccatggggtgaagccaccatgggctgggggtgaagagccggcaggaaggggaccagtcacagggagtgtggacagtcaggggtttgctttctgctcctgagttggggtgtgcagcgtggagcccacagcctggttctgggccagggcacagtgccaggggctccgctctgacctccaggagggagactgggcccgggacccctgttttctgctccctggactgcctagccctgagtgccacggatgaccagcgttctgttttctcttctcaataaccctatctcttcacacatccccaggcccagtgcttgccggctgtggtgaccctgcctggtgctggagggcagtatgggaggcaccagtgtgccctgctcaccccattagtgtcatcctgccatcttctgtgtccccttggccctggcacacacccatgtggcaaacacgggccgtgaggctccctgaacagcttcgaggcgggtgggcttctggagccctcttggctctgaggacagccacagtggggtcagacgtcagggattggtgcagccccacgtcaggggtgattgtcttgactttctctccatttgagttctggggtgggtggctcccttcccccttgcttacaggtgctgtcctgggcacaggaggtacgcgcctggctctgcactgttctcttccctctgctgcaaagcccagttaaggaaatgtctccaggtccaaagagataggatggtctggggccccacctgtttggaagggaacagccagggaagaaccacctgcctgggcagggcctcgcctgagggagggcctggggcagggcacaaggggttgatctcagcccacaagccccaggggcagcccaggaaagcaggcgacggatgtggatcctgacctcctgagaggtgtgaggtgcagggatacccacctctgccttgacggccgcgcaccccttaggaagtggctgtccagcgcctgcctgtgctgggcctgggagaggagctgtcttgccagggctcccaggcagggagaggcaggtgaggttctcagccgatgtgttagaggttgagcatcgcctgtgcccagcttgctggctgtcagtgcttgatgtgcccatcctcagctaaaacccagagctggcatgttggtcatccccacctcagacgggacgcccagtccagagctggtgagccctgggccagcctttgggcctggcctgccccattcaccggccagcgccccacctccctggctggagggtcggggaggggctggcagagatggttggtccacagggctagccctgggtggtgggagaggggcccagggtcagggtgagagagagctgggccagggagctgctgcaggatgattttgaggtgtgggggaagcactcttggttggttttggtttgctttttaaaaattgtggtaaaatacataacaaaagtaactatcgtaacctgagcagttctgtgacatgaagtgaattcactgctttgtgtgaccttggccaccatcattccccaccactcactcccgctgggctcccagccctgccccaccattccgctccctctacagctatgggttttacaaagaaggatgcagggcgccctgactgcggggtgaggggcaggcctgcccgcggtgtgggcattcgctgaagggggacgcccaggtgtctgcctgagttacgggttggggggtcgggcatgtggggagggatggagttggaggtgcatgctctcagagctggtaggggtggcccgtttcgtcccgtgtgtgaact

SEQ ID NO: 14473 - DNA, 3536 bp, Homo sapiens
ggcgcggctccgctctcggctggggttcgtcactgggcgcgggatttggccgccgcggggctccggagccgctcgctcccgacacggctcacgatgcgcggcgagcagggcgcggcgggggcccgcgtgctccagttcactaactgccggatcctgcgcggagggaaactgctcagggaggatctgtgggtgcgcggaggccgcatcttggacccagagaagctgttctttgaggagcggcgcgtggccgacgagcggcgggactgcgggggccgcatcttggctcccggattcatcgacgtgcagatcaacggtggatttggtgttgacttctctcaagccacggaggacgtgggttcgggggttgccctcgtggcccggaggatcctgtcgcacggcgtcacctccttctgccccaccctggtcacttccccaccggaggtttatcacaaggttgttcctcagatccctgtgaagagtggtggtccccatggggcaggggtcctcgggctgcacctggagggccccttcatcagccgggagaagcggggcgcgcaccccgaggcccacctccgctccttcgaggccgatgccttccaggacttgctggccacctacgggcccctggacaatgtccgcatcgtgacgctggccccagagttgggccgtagccacgaagtgatccgggcgctgacggcccgtggcatctgcgtgtccctagggcactcagtggctgacctgcgggcggcagaggatgctgtgtggagcggagccaccttcatcacccacctcttcaacgccatgctgcctttccaccaccgcgacccaggcatcgtggggctcctgaccagcgaccggcgccctgcggatcgcccaccgtgcccatccccaggggctggtgctggtcaccgatgccatccctgccttgggcctgggcaacggccggcacacgctgggacagcaggaagtggaagtggacggtctgacggcctacgtggcaggtgagcgccctgacccactgggtcccaggtcccagcccgcatgccaggtggcccacgacccccccagagcctgccctctctgctctcaaggcaccaagacgctgagtggcagcatagccccaatggacgtctgtgtccggcacttcctgcaggccacaggctgcagcatggagtcggccctggaggctgcatccctgcaccccgcccagttgctggggctggagaagagtaaggggaccctggactttggtgctgacgcagacttcgtggtgctcgacgactcccttcacgtccaggccacctacatctcgggtgagctggtgtggcaggcggacgcagctaggcagtgacaaggacctcggctgagaggacacctggccgcagcgggatgccatcagggccgggtggttggggagctggtctccagggagtgagtcgggagccctgctggattgatgcccagggcctgtgcggccgccctggaggcggtggctgggataaacgtgcacccagcaggactcgccttggctccgggttttgcttgtgctcacatgtggcaccatccttggttgccctcctggagaaggcattcacggcctggggtgggatggctgggctgtagtttagcctgggccttgggccccagtgggggacagggcctgtctgcatgaagtggaccggagacctgcagaccccaggaaagtgtcactatgggagggaggggcaggcagtcagtggctggtgccatggggtgaagccaccatgggctgggggtgaagagccggcaggaaggggaccagtcacagggagtgtggacagtcaggggtttgctttctgctcctgagttggggtgtgcagcgtggagcccacagcctggttctgggccagggcacagtgccaggggctccgctctgacctccaggagggagactgggcccgggacccctgttttctgctccctggactgcctagccctgagtgccacggatgaccagcgttctgttttctcttctcaataaccctatctcttcacacatccccaggcccagtgcttgccggctgtggtgaccctgcctggtgctggagggcagtatgggaggcaccagtgtgccctgctcaccccattagtgtcatcctgccatcttctgtgtccccttggccctggcacacacccatgtggcaaacacgggccgtgaggctccctgaacagcttcgaggcgggtgggcttctggagccctcttggctctgaggacagccacagtggggtcagacgtcagggattggtgcagccccacgtcaggggtgattgtcttgactttctctccatttgagttctggggtgggtggctcccttcccccttgcttacaggtgctgtcctgggcacaggaggtacgcgcctggctctgcactgttctcttccctctgctgcaaagcccagttaaggaaatgtctccaggtccaaagagataggatggtctggggccccacctgtttggaagggaacagccagggaagaaccacctgcctgggcagggcctcgcctgagggagggcctggggcagggcacaaggggttgatctcagcccacaagccccaggggcagcccaggaaagcaggcgacggatgtggatcctgacctcctgagaggtgtgaggtgcagggatacccacctctgccttgacggccgcgcaccccttaggaagtggctgtccagcgcctgcctgtgctgggcctgggagaggagctgtcttgccagggctcccaggcagggagaggcaggtgaggttctcagccgatgtgttagaggttgagcatcgcctgtgcccagcttgctggctgtcagtgcttgatgtgcccatcctcagctaaaacccagagctggcatgttggtcatccccacctcagacgggacgcccagtccagagctggtgagccctgggccagcctttgggcctggcctgccccattcaccggccagcgccccacctccctggctggagggtcggggaggggctggcagagatggttggtccacagggctagccctgggtggtgggagaggggcccagggtcagggtgagagagagctgggccagggagctgctgcaggatgattttgaggtgtgggggaagcactcttggttggttttggtttgctttttaaaaattgtggtaaaatacataacaaaagtaactatcgtaacctgagcagttctgtgacatgaagtgaattcactgctttgtgtgaccttggccaccatcattccccaccactcactcccgctgggctcccagccctgccccaccattccgctccctctacagctatgggttttacaaagaaggatgcagggcgccctgactgcggggtgaggggcaggcctgcccgcggtgtgggcattcgctgaagggggacgcccaggtgtctgcctgagttacgggttggggggtcgggcatgtggggagggatggagttggaggtgcatgctctcagagctggtaggggtggcccgtttcgtcccgtgtgtgaact

SEQ ID NO: 14474 - DNA, 3872 bp, Homo sapiens
ggcgcggctccgctctcggctggggttcgtcactgggcgcgggatttggccgccgcggggctccggagccgctcgctcccgacacggctcacgatgcgcggcgagcagggcgcggcgggggcccgcgtgctccagttcactaactgccggatcctgcgcggagggaaactgctcagggaggatctgtgggtgcgcggaggccgcatcttggacccagagaagctgttctttgaggagcggcgcgtggccgacgagcggcgggactgcgggggccgcatcttggctcccggattcatcgacgtgcagatcaacggtggatttggtgttgacttctctcaagccacggaggacgtgggttcgggggttgccctcgtggcccggaggatcctgtcgcacggcgtcacctccttctgccccaccctggtcacttccccaccggaggtttatcacaaggttgttcctcagatccctgtgaagagtggtggtccccatggggcaggggtcctcgggctgcacctggagggccccttcatcagccgggagaagcggggcgcgcaccccgaggcccacctccgctccttcgaggccgatgccttccaggacttgctggccacctacgggcccctggacaatgtccgcatcgtgacgctggccccagagttgggccgtagccacgaagtgatccgggcgctgacggcccgtggcatctgcgtgtccctagggcactcagtggctgacctgcgggcggcagaggatgctgtgtggagcggagccaccttcatcacccacctcttcaacgccatgctgcctttccaccaccgcgacccaggcatcgtggggctcctgaccagcgaccggctgcccgcaggccgctgcatcttctatgggatgattgcagatggcacgcacaccaaccccgccgccctgcggatcgcccaccgtgcccatccccaggggctggtgctggtcaccgatgccatccctgccttgggcctgggcaacggccggcacacgctgggacagcaggaagtggaagtggacggtctgacggcctacgtggcaggtgagcgccctgacccactgggtcccaggtcccagcccgcatgccaggtggcccacgacccccccagagcctgccctctctgctctcaaggcaccaagacgctgagtggcagcatagccccaatggacgtctgtgtccggcacttcctgcaggccacaggtcagtgagcagcacgggtgcgggtttaggtggtctgtgagtggtgggtccccaaggggctggaccgggtgcccggactgtagcccaagctctgcccacaggagctcctgggcattgggtacttggtgactcaggcccaggtgacaggcagaccagcagggtccttgttagcctgctgcagagtccctgagacagggagtgctggtgtggttgggggctgttggcaaagccatgtgggcttggggactgtcacctagctgtgtcccccaagcaggctgcagcatggagtcggccctggaggctgcatccctgcaccccgcccagttgctggggctggagaagagtaaggggaccctggactttggtgctgacgcagacttcgtggtgctcgacgactcccttcacgtccaggccacctacatctcgggtgagctggtgtggcaggcggacgcagctaggcagtgacaaggacctcggctgagaggacacctggccgcagcgggatgccatcagggccgggtggttggggagctggtctccagggagtgagtcgggagccctgctggattgatgcccagggcctgtgcggccgccctggaggcggtggctgggataaacgtgcacccagcaggactcgccttggctccgggttttgcttgtgctcacatgtggcaccatccttggttgccctcctggagaaggcattcacggcctggggtgggatggctgggctgtagtttagcctgggccttgggccccagtgggggacagggcctgtctgcatgaagtggaccggagacctgcagaccccaggaaagtgtcactatgggagggaggggcaggcagtcagtggctggtgccatggggtgaagccaccatgggctgggggtgaagagccggcaggaaggggaccagtcacagggagtgtggacagtcaggggtttgctttctgctcctgagttggggtgtgcagcgtggagcccacagcctggttctgggccagggcacagtgccaggggctccgctctgacctccaggagggagactgggcccgggacccctgttttctgctccctggactgcctagccctgagtgccacggatgaccagcgttctgttttctcttctcaataaccctatctcttcacacatccccaggcccagtgcttgccggctgtggtgaccctgcctggtgctggagggcagtatgggaggcaccagtgtgccctgctcaccccattagtgtcatcctgccatcttctgtgtccccttggccctggcacacacccatgtggcaaacacgggccgtgaggctccctgaacagcttcgaggcgggtgggcttctggagccctcttggctctgaggacagccacagtggggtcagacgtcagggattggtgcagccccacgtcaggggtgattgtcttgactttctctccatttgagttctggggtgggtggctcccttcccccttgcttacaggtgctgtcctgggcacaggaggtacgcgcctggctctgcactgttctcttccctctgctgcaaagcccagttaaggaaatgtctccaggtccaaagagataggatggtctggggccccacctgtttggaagggaacagccagggaagaaccacctgcctgggcagggcctcgcctgagggagggcctggggcagggcacaaggggttgatctcagcccacaagccccaggggcagcccaggaaagcaggcgacggatgtggatcctgacctcctgagaggtgtgaggtgcagggatacccacctctgccttgacggccgcgcaccccttaggaagtggctgtccagcgcctgcctgtgctgggcctgggagaggagctgtcttgccagggctcccaggcagggagaggcaggtgaggttctcagccgatgtgttagaggttgagcatcgcctgtgcccagcttgctggctgtcagtgcttgatgtgcccatcctcagctaaaacccagagctggcatgttggtcatccccacctcagacgggacgcccagtccagagctggtgagccctgggccagcctttgggcctggcctgccccattcaccggccagcgccccacctccctggctggagggtcggggaggggctggcagagatggttggtccacagggctagccctgggtggtgggagaggggcccagggtcagggtgagagagagctgggccagggagctgctgcaggatgattttgaggtgtgggggaagcactcttggttggttttggtttgctttttaaaaattgtggtaaaatacataacaaaagtaactatcgtaacctgagcagttctgtgacatgaagtgaattcactgctttgtgtgaccttggccaccatcattccccaccactcactcccgctgggctcccagccctgccccaccattccgctccctctacagctatgggttttacaaagaaggatgcagggcgccctgactgcggggtgaggggcaggcctgcccgcggtgtgggcattcgctgaagggggacgcccaggtgtctgcctgagttacgggttggggggtcgggcatgtggggagggatggagttggaggtgcatgctctcagagctggtaggggtggcccgtttcgtcccgtgtgtgaact

SEQ ID NO: 14475 - DNA, 3453 bp, Homo sapiens
ggcgcggctccgctctcggctggggttcgtcactgggcgcgggatttggccgccgcggggctccggagccgctcgctcccgacacggctcacgatgcgcggcgagcagggcgcggcgggggcccgcgtgctccagttcactaactgccggatcctgcgcggagggaaactgctcagggaggatctgtgggtgcgcggaggccgcatcttggacccagagaagctgttctttgaggagcggcgcgtggccgacgagcggcgggactgcgggggccgcatcttggctcccggattcatcgacgtgcagatcaacggtggatttggtgttgacttctctcaagccacggaggacgtgggttcgggggttgccctcgtggcccggaggatcctgtcgcacggcgtcacctccttctgccccaccctggtcacttccccaccggaggtttatcacaagggctgcacctggagggccccttcatcagccgggagaagcggggcgcgcaccccgaggcccacctccgctccttcgaggccgatgccttccaggacttgctggccacctacgggcccctggacaatgtccgcatcgtgacgctggccccagagttgggccgtagccacgaagtgatccgggcgctgacggcccgtggcatctgcgtgtccctagggcactcagtggctgacctgcgggcggcagaggatgctgtgtggagcggagccaccttcatcacccacctcttcaacgccatgctgcctttccaccaccgcgacccaggcatcgtggggctcctgaccagcgaccggctgcccgcaggccgctgcatcttctatgggatgattgcagatggcacgcacaccaaccccgccgccctgcggatcgcccaccgtgcccatccccaggggctggtgctggtcaccgatgccatccctgccttgggcctgggcaacggccggcacacgctgggacagcaggaagtggaagtggacggtctgacggcctacgtggcaggcaccaagacgctgagtggcagcatagccccaatggacgtctgtgtccggcacttcctgcaggccacaggctgcagcatggagtcggccctggaggctgcatccctgcaccccgcccagttgctggggctggagaagagtaaggggaccctggactttggtgctgacgcagacttcgtggtgctcgacgactcccttcacgtccaggccacctacatctcgggtgagctggtgtggcaggcggacgcagctaggcagtgacaaggacctcggctgagaggacacctggccgcagcgggatgccatcagggccgggtggttggggagctggtctccagggagtgagtcgggagccctgctggattgatgcccagggcctgtgcggccgccctggaggcggtggctgggataaacgtgcacccagcaggactcgccttggctccgggttttgcttgtgctcacatgtggcaccatccttggttgccctcctggagaaggcattcacggcctggggtgggatggctgggctgtagtttagcctgggccttgggccccagtgggggacagggcctgtctgcatgaagtggaccggagacctgcagaccccaggaaagtgtcactatgggagggaggggcaggcagtcagtggctggtgccatggggtgaagccaccatgggctgggggtgaagagccggcaggaaggggaccagtcacagggagtgtggacagtcaggggtttgctttctgctcctgagttggggtgtgcagcgtggagcccacagcctggttctgggccagggcacagtgccaggggctccgctctgacctccaggagggagactgggcccgggacccctgttttctgctccctggactgcctagccctgagtgccacggatgaccagcgttctgttttctcttctcaataaccctatctcttcacacatccccaggcccagtgcttgccggctgtggtgaccctgcctggtgctggagggcagtatgggaggcaccagtgtgccctgctcaccccattagtgtcatcctgccatcttctgtgtccccttggccctggcacacacccatgtggcaaacacgggccgtgaggctccctgaacagcttcgaggcgggtgggcttctggagccctcttggctctgaggacagccacagtggggtcagacgtcagggattggtgcagccccacgtcaggggtgattgtcttgactttctctccatttgagttctggggtgggtggctcccttcccccttgcttacaggtgctgtcctgggcacaggaggtacgcgcctggctctgcactgttctcttccctctgctgcaaagcccagttaaggaaatgtctccaggtccaaagagataggatggtctggggccccacctgtttggaagggaacagccagggaagaaccacctgcctgggcagggcctcgcctgagggagggcctggggcagggcacaaggggttgatctcagcccacaagccccaggggcagcccaggaaagcaggcgacggatgtggatcctgacctcctgagaggtgtgaggtgcagggatacccacctctgccttgacggccgcgcaccccttaggaagtggctgtccagcgcctgcctgtgctgggcctgggagaggagctgtcttgccagggctcccaggcagggagaggcaggtgaggttctcagccgatgtgttagaggttgagcatcgcctgtgcccagcttgctggctgtcagtgcttgatgtgcccatcctcagctaaaacccagagctggcatgttggtcatccccacctcagacgggacgcccagtccagagctggtgagccctgggccagcctttgggcctggcctgccccattcaccggccagcgccccacctccctggctggagggtcggggaggggctggcagagatggttggtccacagggctagccctgggtggtgggagaggggcccagggtcagggtgagagagagctgggccagggagctgctgcaggatgattttgaggtgtgggggaagcactcttggttggttttggtttgctttttaaaaattgtggtaaaatacataacaaaagtaactatcgtaacctgagcagttctgtgacatgaagtgaattcactgctttgtgtgaccttggccaccatcattccccaccactcactcccgctgggctcccagccctgccccaccattccgctccctctacagctatgggttttacaaagaaggatgcagggcgccctgactgcggggtgaggggcaggcctgcccgcggtgtgggcattcgctgaagggggacgcccaggtgtctgcctgagttacgggttggggggtcgggcatgtggggagggatggagttggaggtgcatgctctcagagctggtaggggtggcccgtttcgtcccgtgtgtgaact

SEQ ID NO: 14476 - DNA, 3439 bp, Homo sapiens
ggcgcggctccgctctcggctggggttcgtcactgggcgcgggatttggccgccgcggggctccggagccgctcgctcccgacacggctcacgatgcgcggcgagcagggcgcggcgggggcccgcgtgctccagttcactaactgccggatcctgcgcggagggaaactgctcagggaggatctgtgggtgcgcggaggccgcatcttggacccagagaagctgttctttgaggagcggcgcgtggccgacgagcggcgggactgcgggggccgcatcttggctcccggattcatcgacgtgcagatcaacggtggatttggtgttgacttctctcaagccacggaggacgtgggttcgggggttgccctcgtggcccggaggatcctgtcgcacggcgtcacctccttctgccccaccctggtcacttccccaccggaggtttatcacaaggttgttcctcagatccctgtgaagagtggtggtccccatggggcaggggtcctcgggctgcacctggagggccccttcatcagccgggagaagcggggcgcgcaccccgaggcccacctccgctccttcgaggccgatgccttccaggacttgctggccacctacgggcccctggacaatgtccgcatcgtgacgctggccccagagttgggccgtagccacgaagtgatccgggcgctgacggcccgtggcatctgcgtgtccctagggcactcagtggctgacctgcgggcggcagaggatgctgtgtggagcggagccaccttcatcacccacctcttcaacgccatgctgcctttccaccaccgcgacccaggcatcgtggggctcctgaccagcgaccggctgcccgcaggccgctgcatcttctatgggatgattgcagatggcacgcacaccaaccccgccgccctgcggatcgcccaccgtgcccatccccaggggctggtgctggtcaccgatgccatccctgccttgggcctgggcaacggccggcacacgctgggacagcaggaagtggaagtggacggtctgacggcctacgtggcaggctgcagcatggagtcggccctggaggctgcatccctgcaccccgcccagttgctggggctggagaagagtaaggggaccctggactttggtgctgacgcagacttcgtggtgctcgacgactcccttcacgtccaggccacctacatctcgggtgagctggtgtggcaggcggacgcagctaggcagtgacaaggacctcggctgagaggacacctggccgcagcgggatgccatcagggccgggtggttggggagctggtctccagggagtgagtcgggagccctgctggattgatgcccagggcctgtgcggccgccctggaggcggtggctgggataaacgtgcacccagcaggactcgccttggctccgggttttgcttgtgctcacatgtggcaccatccttggttgccctcctggagaaggcattcacggcctggggtgggatggctgggctgtagtttagcctgggccttgggccccagtgggggacagggcctgtctgcatgaagtggaccggagacctgcagaccccaggaaagtgtcactatgggagggaggggcaggcagtcagtggctggtgccatggggtgaagccaccatgggctgggggtgaagagccggcaggaaggggaccagtcacagggagtgtggacagtcaggggtttgctttctgctcctgagttggggtgtgcagcgtggagcccacagcctggttctgggccagggcacagtgccaggggctccgctctgacctccaggagggagactgggcccgggacccctgttttctgctccctggactgcctagccctgagtgccacggatgaccagcgttctgttttctcttctcaataaccctatctcttcacacatccccaggcccagtgcttgccggctgtggtgaccctgcctggtgctggagggcagtatgggaggcaccagtgtgccctgctcaccccattagtgtcatcctgccatcttctgtgtccccttggccctggcacacacccatgtggcaaacacgggccgtgaggctccctgaacagcttcgaggcgggtgggcttctggagccctcttggctctgaggacagccacagtggggtcagacgtcagggattggtgcagccccacgtcaggggtgattgtcttgactttctctccatttgagttctggggtgggtggctcccttcccccttgcttacaggtgctgtcctgggcacaggaggtacgcgcctggctctgcactgttctcttccctctgctgcaaagcccagttaaggaaatgtctccaggtccaaagagataggatggtctggggccccacctgtttggaagggaacagccagggaagaaccacctgcctgggcagggcctcgcctgagggagggcctggggcagggcacaaggggttgatctcagcccacaagccccaggggcagcccaggaaagcaggcgacggatgtggatcctgacctcctgagaggtgtgaggtgcagggatacccacctctgccttgacggccgcgcaccccttaggaagtggctgtccagcgcctgcctgtgctgggcctgggagaggagctgtcttgccagggctcccaggcagggagaggcaggtgaggttctcagccgatgtgttagaggttgagcatcgcctgtgcccagcttgctggctgtcagtgcttgatgtgcccatcctcagctaaaacccagagctggcatgttggtcatccccacctcagacgggacgcccagtccagagctggtgagccctgggccagcctttgggcctggcctgccccattcaccggccagcgccccacctccctggctggagggtcggggaggggctggcagagatggttggtccacagggctagccctgggtggtgggagaggggcccagggtcagggtgagagagagctgggccagggagctgctgcaggatgattttgaggtgtgggggaagcactcttggttggttttggtttgctttttaaaaattgtggtaaaatacataacaaaagtaactatcgtaacctgagcagttctgtgacatgaagtgaattcactgctttgtgtgaccttggccaccatcattccccaccactcactcccgctgggctcccagccctgccccaccattccgctccctctacagctatgggttttacaaagaaggatgcagggcgccctgactgcggggtgaggggcaggcctgcccgcggtgtgggcattcgctgaagggggacgcccaggtgtctgcctgagttacgggttggggggtcgggcatgtggggagggatggagttggaggtgcatgctctcagagctggtaggggtggcccgtttcgtcccgtgtgtgaact

SEQ ID NO: 14477 - DNA, 3371 bp, Homo sapiens
ggcgcggctccgctctcggctggggttcgtcactgggcgcgggatttggccgccgcggggctccggagccgctcgctcccgacacggctcacgatgcgcggcgagcagggcgcggcgggggcccgcgtgctccagttcactaactgccggatcctgcgcggagggaaactgctcaggtggatttggtgttgacttctctcaagccacggaggacgtgggttcgggggttgccctcgtggcccggaggatcctgtcgcacggcgtcacctccttctgccccaccctggtcacttccccaccggaggtttatcacaaggttgttcctcagatccctgtgaagagtggtggtccccatggggcaggggtcctcgggctgcacctggagggccccttcatcagccgggagaagcggggcgcgcaccccgaggcccacctccgctccttcgaggccgatgccttccaggacttgctggccacctacgggcccctggacaatgtccgcatcgtgacgctggccccagagttgggccgtagccacgaagtgatccgggcgctgacggcccgtggcatctgcgtgtccctagggcactcagtggctgacctgcgggcggcagaggatgctgtgtggagcggagccaccttcatcacccacctcttcaacgccatgctgcctttccaccaccgcgacccaggcatcgtggggctcctgaccagcgaccggctgcccgcaggccgctgcatcttctatgggatgattgcagatggcacgcacaccaaccccgccgccctgcggatcgcccaccgtgcccatccccaggggctggtgctggtcaccgatgccatccctgccttgggcctgggcaacggccggcacacgctgggacagcaggaagtggaagtggacggtctgacggcctacgtggcaggcaccaagacgctgagtggcagcatagccccaatggacgtctgtgtccggcacttcctgcaggccacaggctgcagcatggagtcggccctggaggctgcatccctgcaccccgcccagttgctggggctggagaagagtaaggggaccctggactttggtgctgacgcagacttcgtggtgctcgacgactcccttcacgtccaggccacctacatctcgggtgagctggtgtggcaggcggacgcagctaggcagtgacaaggacctcggctgagaggacacctggccgcagcgggatgccatcagggccgggtggttggggagctggtctccagggagtgagtcgggagccctgctggattgatgcccagggcctgtgcggccgccctggaggcggtggctgggataaacgtgcacccagcaggactcgccttggctccgggttttgcttgtgctcacatgtggcaccatccttggttgccctcctggagaaggcattcacggcctggggtgggatggctgggctgtagtttagcctgggccttgggccccagtgggggacagggcctgtctgcatgaagtggaccggagacctgcagaccccaggaaagtgtcactatgggagggaggggcaggcagtcagtggctggtgccatggggtgaagccaccatgggctgggggtgaagagccggcaggaaggggaccagtcacagggagtgtggacagtcaggggtttgctttctgctcctgagttggggtgtgcagcgtggagcccacagcctggttctgggccagggcacagtgccaggggctccgctctgacctccaggagggagactgggcccgggacccctgttttctgctccctggactgcctagccctgagtgccacggatgaccagcgttctgttttctcttctcaataaccctatctcttcacacatccccaggcccagtgcttgccggctgtggtgaccctgcctggtgctggagggcagtatgggaggcaccagtgtgccctgctcaccccattagtgtcatcctgccatcttctgtgtccccttggccctggcacacacccatgtggcaaacacgggccgtgaggctccctgaacagcttcgaggcgggtgggcttctggagccctcttggctctgaggacagccacagtggggtcagacgtcagggattggtgcagccccacgtcaggggtgattgtcttgactttctctccatttgagttctggggtgggtggctcccttcccccttgcttacaggtgctgtcctgggcacaggaggtacgcgcctggctctgcactgttctcttccctctgctgcaaagcccagttaaggaaatgtctccaggtccaaagagataggatggtctggggccccacctgtttggaagggaacagccagggaagaaccacctgcctgggcagggcctcgcctgagggagggcctggggcagggcacaaggggttgatctcagcccacaagccccaggggcagcccaggaaagcaggcgacggatgtggatcctgacctcctgagaggtgtgaggtgcagggatacccacctctgccttgacggccgcgcaccccttaggaagtggctgtccagcgcctgcctgtgctgggcctgggagaggagctgtcttgccagggctcccaggcagggagaggcaggtgaggttctcagccgatgtgttagaggttgagcatcgcctgtgcccagcttgctggctgtcagtgcttgatgtgcccatcctcagctaaaacccagagctggcatgttggtcatccccacctcagacgggacgcccagtccagagctggtgagccctgggccagcctttgggcctggcctgccccattcaccggccagcgccccacctccctggctggagggtcggggaggggctggcagagatggttggtccacagggctagccctgggtggtgggagaggggcccagggtcagggtgagagagagctgggccagggagctgctgcaggatgattttgaggtgtgggggaagcactcttggttggttttggtttgctttttaaaaattgtggtaaaatacataacaaaagtaactatcgtaacctgagcagttctgtgacatgaagtgaattcactgctttgtgtgaccttggccaccatcattccccaccactcactcccgctgggctcccagccctgccccaccattccgctccctctacagctatgggttttacaaagaaggatgcagggcgccctgactgcggggtgaggggcaggcctgcccgcggtgtgggcattcgctgaagggggacgcccaggtgtctgcctgagttacgggttggggggtcgggcatgtggggagggatggagttggaggtgcatgctctcagagctggtaggggtggcccgtttcgtcccgtgtgtgaact

SEQ ID NO: 14478 - DNA, 3158 bp, Homo sapiens
ggcgcggctccgctctcggctggggttcgtcactgggcgcgggatttggccgccgcggggctccggagccgctcgctcccgacacggctcacgatgcgcggcgagcagggcgcggcgggggcccgcgtgctccagttcactaactgccggatcctgcgcggagggaaactgctcaggtggatttggtgttgacttctctcaagccacggaggacgtgggttcgggggttgccctcgtggcccggaggatcctgtcgcacggcgtcacctccttctgccccaccctggtcacttccccaccggaggtttatcacaaggttgttcctcagatccctgtgaagagtggtggtccccatggggcaggggtcctcgggcactcagtggctgacctgcgggcggcagaggatgctgtgtggagcggagccaccttcatcacccacctcttcaacgccatgctgcctttccaccaccgcgacccaggcatcgtggggctcctgaccagcgaccggctgcccgcaggccgctgcatcttctatgggatgattgcagatggcacgcacaccaaccccgccgccctgcggatcgcccaccgtgcccatccccaggggctggtgctggtcaccgatgccatccctgccttgggcctgggcaacggccggcacacgctgggacagcaggaagtggaagtggacggtctgacggcctacgtggcaggcaccaagacgctgagtggcagcatagccccaatggacgtctgtgtccggcacttcctgcaggccacaggctgcagcatggagtcggccctggaggctgcatccctgcaccccgcccagttgctggggctggagaagagtaaggggaccctggactttggtgctgacgcagacttcgtggtgctcgacgactcccttcacgtccaggccacctacatctcgggtgagctggtgtggcaggcggacgcagctaggcagtgacaaggacctcggctgagaggacacctggccgcagcgggatgccatcagggccgggtggttggggagctggtctccagggagtgagtcgggagccctgctggattgatgcccagggcctgtgcggccgccctggaggcggtggctgggataaacgtgcacccagcaggactcgccttggctccgggttttgcttgtgctcacatgtggcaccatccttggttgccctcctggagaaggcattcacggcctggggtgggatggctgggctgtagtttagcctgggccttgggccccagtgggggacagggcctgtctgcatgaagtggaccggagacctgcagaccccaggaaagtgtcactatgggagggaggggcaggcagtcagtggctggtgccatggggtgaagccaccatgggctgggggtgaagagccggcaggaaggggaccagtcacagggagtgtggacagtcaggggtttgctttctgctcctgagttggggtgtgcagcgtggagcccacagcctggttctgggccagggcacagtgccaggggctccgctctgacctccaggagggagactgggcccgggacccctgttttctgctccctggactgcctagccctgagtgccacggatgaccagcgttctgttttctcttctcaataaccctatctcttcacacatccccaggcccagtgcttgccggctgtggtgaccctgcctggtgctggagggcagtatgggaggcaccagtgtgccctgctcaccccattagtgtcatcctgccatcttctgtgtccccttggccctggcacacacccatgtggcaaacacgggccgtgaggctccctgaacagcttcgaggcgggtgggcttctggagccctcttggctctgaggacagccacagtggggtcagacgtcagggattggtgcagccccacgtcaggggtgattgtcttgactttctctccatttgagttctggggtgggtggctcccttcccccttgcttacaggtgctgtcctgggcacaggaggtacgcgcctggctctgcactgttctcttccctctgctgcaaagcccagttaaggaaatgtctccaggtccaaagagataggatggtctggggccccacctgtttggaagggaacagccagggaagaaccacctgcctgggcagggcctcgcctgagggagggcctggggcagggcacaaggggttgatctcagcccacaagccccaggggcagcccaggaaagcaggcgacggatgtggatcctgacctcctgagaggtgtgaggtgcagggatacccacctctgccttgacggccgcgcaccccttaggaagtggctgtccagcgcctgcctgtgctgggcctgggagaggagctgtcttgccagggctcccaggcagggagaggcaggtgaggttctcagccgatgtgttagaggttgagcatcgcctgtgcccagcttgctggctgtcagtgcttgatgtgcccatcctcagctaaaacccagagctggcatgttggtcatccccacctcagacgggacgcccagtccagagctggtgagccctgggccagcctttgggcctggcctgccccattcaccggccagcgccccacctccctggctggagggtcggggaggggctggcagagatggttggtccacagggctagccctgggtggtgggagaggggcccagggtcagggtgagagagagctgggccagggagctgctgcaggatgattttgaggtgtgggggaagcactcttggttggttttggtttgctttttaaaaattgtggtaaaatacataacaaaagtaactatcgtaacctgagcagttctgtgacatgaagtgaattcactgctttgtgtgaccttggccaccatcattccccaccactcactcccgctgggctcccagccctgccccaccattccgctccctctacagctatgggttttacaaagaaggatgcagggcgccctgactgcggggtgaggggcaggcctgcccgcggtgtgggcattcgctgaagggggacgcccaggtgtctgcctgagttacgggttggggggtcgggcatgtggggagggatggagttggaggtgcatgctctcagagctggtaggggtggcccgtttcgtcccgtgtgtgaact

SEQ ID NO: 14479 - DNA, 3460 bp, Homo sapiens
ggcgcggctccgctctcggctggggttcgtcactgggcgcgggatttggccgccgcggggctccggagccgctcgctcccgacacggctcacgatgcgcggcgagcagggcgcggcgggggcccgcgtgctccagttcactaactgccggatcctgcgcggagggaaactgctcagggaggatctgtgggtgcgcggaggccgcatcttggacccagagaagctgttctttgaggagcggcgcgtggccgacgagcggcgggactgcgggggccgcatcttggctcccggattcatcgacgtgcagatcaacggtggatttggtgttgacttctctcaagccacggaggacgtgggttcgggggttgccctcgtggcccggaggatcctgtcgcacggcgtcacctccttctgccccaccctggtcacttccccaccggaggtttatcacaaggttgttcctcagatccctgtgaagagtggtggtccccatggggcaggggtcctcgggctgcacctggagggccccttcatcagccgggagaagcggggcgcgcaccccgaggcccacctccgctccttcgaggccgatgccttccaggacttgctggccacctacgggcccctggacaatgtccgcatcgtgacgctggccccagagttgggccgtagccacgaagtgatccgggcgctgacggcccgtggcatctgcgtgtccctagggcactcagtggctgacctgcgggcggcagaggatgctgtgtggagcggagccaccttcatcacccacctcttcaacgccatgctgcctttccaccaccgcgacccaggcatcgtggggctcctgaccagcgaccggctgcccgcaggccgctgcatcttctatgggatgattgcagatggcacgcacaccaaccccgccgccctgcggatcgcccaccgtgcccatccccaggggctggtgctggtcaccgatgccatccctgccttgggcctgggcaacggccggcacacgctgggacagcaggaagtggaagtggacggtctgacggcctacgtggcaggtgagcgccctgacccactgggtcccaggtcccagcccgcatgccaggtggcccacgacccccccagagcctgccctctctgctctcaaggcaccaagacgctgagtggcagcatagccccaaacttcgtggtgctcgacgactcccttcacgtccaggccacctacatctcgggtgagctggtgtggcaggcggacgcagctaggcagtgacaaggacctcggctgagaggacacctggccgcagcgggatgccatcagggccgggtggttggggagctggtctccagggagtgagtcgggagccctgctggattgatgcccagggcctgtgcggccgccctggaggcggtggctgggataaacgtgcacccagcaggactcgccttggctccgggttttgcttgtgctcacatgtggcaccatccttggttgccctcctggagaaggcattcacggcctggggtgggatggctgggctgtagtttagcctgggccttgggccccagtgggggacagggcctgtctgcatgaagtggaccggagacctgcagaccccaggaaagtgtcactatgggagggaggggcaggcagtcagtggctggtgccatggggtgaagccaccatgggctgggggtgaagagccggcaggaaggggaccagtcacagggagtgtggacagtcaggggtttgctttctgctcctgagttggggtgtgcagcgtggagcccacagcctggttctgggccagggcacagtgccaggggctccgctctgacctccaggagggagactgggcccgggacccctgttttctgctccctggactgcctagccctgagtgccacggatgaccagcgttctgttttctcttctcaataaccctatctcttcacacatccccaggcccagtgcttgccggctgtggtgaccctgcctggtgctggagggcagtatgggaggcaccagtgtgccctgctcaccccattagtgtcatcctgccatcttctgtgtccccttggccctggcacacacccatgtggcaaacacgggccgtgaggctccctgaacagcttcgaggcgggtgggcttctggagccctcttggctctgaggacagccacagtggggtcagacgtcagggattggtgcagccccacgtcaggggtgattgtcttgactttctctccatttgagttctggggtgggtggctcccttcccccttgcttacaggtgctgtcctgggcacaggaggtacgcgcctggctctgcactgttctcttccctctgctgcaaagcccagttaaggaaatgtctccaggtccaaagagataggatggtctggggccccacctgtttggaagggaacagccagggaagaaccacctgcctgggcagggcctcgcctgagggagggcctggggcagggcacaaggggttgatctcagcccacaagccccaggggcagcccaggaaagcaggcgacggatgtggatcctgacctcctgagaggtgtgaggtgcagggatacccacctctgccttgacggccgcgcaccccttaggaagtggctgtccagcgcctgcctgtgctgggcctgggagaggagctgtcttgccagggctcccaggcagggagaggcaggtgaggttctcagccgatgtgttagaggttgagcatcgcctgtgcccagcttgctggctgtcagtgcttgatgtgcccatcctcagctaaaacccagagctggcatgttggtcatccccacctcagacgggacgcccagtccagagctggtgagccctgggccagcctttgggcctggcctgccccattcaccggccagcgccccacctccctggctggagggtcggggaggggctggcagagatggttggtccacagggctagccctgggtggtgggagaggggcccagggtcagggtgagagagagctgggccagggagctgctgcaggatgattttgaggtgtgggggaagcactcttggttggttttggtttgctttttaaaaattgtggtaaaatacataacaaaagtaactatcgtaacctgagcagttctgtgacatgaagtgaattcactgctttgtgtgaccttggccaccatcattccccaccactcactcccgctgggctcccagccctgccccaccattccgctccctctacagctatgggttttacaaagaaggatgcagggcgccctgactgcggggtgaggggcaggcctgcccgcggtgtgggcattcgctgaagggggacgcccaggtgtctgcctgagttacgggttggggggtcgggcatgtggggagggatggagttggaggtgcatgctctcagagctggtaggggtggcccgtttcgtcccgtgtgtgaact

SEQ ID NO: 14480 - DNA, 2583 bp, Homo sapiens
  misc_feature (1)..(1): n is a, c, g, or t
  misc_feature (3)..(4): n is a, c, g, or t
nannatcgcgaaattcggcacgaggccaggggctggtgctggtcaccgatgccatccctgccttgggcctgggcaacggccggcacacgctgggacagcaggaagtggaagtggacggtctgacggcctacgtggcaggcaccaagacgctgagtggcagcatagccccaatggacgtctgtgtccggcacttcctgcaggccacaggctgcagcatggagtcggccctggaggctgcatccctgcaccccgcccagttgctggggctggagaagagtaaggggaccctggactttggtgctgacgcagacttcgtggtgctcgacgactcccttcacgtccaggccacctacatctcgggtgagctggtgtggcaggcggacgcagctaggcagtgacaaggacctcggctgagaggacacctggccgcagcgggatgccatcagggccgggtggttggggagctggtctccagggagtgagtcgggagccctgctggattgatgcccagggcctgtgcggccgccctggaggcggtggctgggataaacgtgcacccagcaggactcgccttggctccgggttttgcttgtgctcacatgtggcaccatccttggttgccctcctggagaaggcattcacggcctggggtgggatggctgggctgtagtttagcctgggccttgggccccagtgggggacagggcctgtctgcatgaagtggaccggagacctgcagaccccaggaaagtgtcactatgggagggaggggcaggcagtcagtggctggtgccatggggtgaagccaccatgggctgggggtgaagagccggcaggaaggggaccagtcacagggagtgtggacagtcaggggtttgctttctgctcctgagttggggtgtgcagcgtggagcccacagcctggttctgggccagggcacagtgccaggggctccgctctgacctccaggagggagactgggcccgggacccctgttttctgctccctggactgcctagccctgagtgccacggatgaccagcgttctgttttctcttctcaataaccctatctcttcacacatccccaggcccagtgcttgccggctgtggtgaccctgcctggtgctggagggcagtatgggaggcaccagtgtgccctgctcaccccattagtgtcatcctgccatcttctgtgtccccttggccctggcacacacccatgtggcaaacacgggccgtgaggctccctgaacagcttcgaggcgggtgggcttctggagccctcttggctctgaggacagccacagtggggtcagacgtcagggattggtgcagccccacgtcaggggtgattgtcttgactttctctccatttgagttctggggtgggtggctcccttcccccttgcttacaggtgctgtcctgggcacaggaggtacgcgcctggctctgcactgttctcttccctctgctgcaaagcccagttaaggaaatgtctccaggtccaaagagataggatggtctggggccccacctgtttggaagggaacagccagggaagaaccacctgcctgggcagggcctcgcctgagggagggcctggggcagggcacaaggggttgatctcagcccacaagccccaggggcagcccaggaaagcaggcgacggatgtggatcctgacctcctgagaggtgtgaggtgcagggatacccacctctgccttgacggccgcgcaccccttaggaagtggctgtccagcgcctgcctgtgctgggcctgggagaggagctgtcttgccagggctcccaggcagggagaggcaggtgaggttctcagccgatgtgttagaggttgagcatcgcctgtgcccagcttgctggctgtcagtgcttgatgtgcccatcctcagctaaaacccagagctggcatgttggtcatccccacctcagacgggacgcccagtccagagctggtgagccctgggccagcctttgggcctggcctgccccattcaccggccagcgccccacctccctggctggagggtcggggaggggctggcagagatggttggtccacagggctagccctgggtggtgggagaggggcccagggtcagggtgagagagagctgggccagggagctgctgcaggatgattttgaggtgtgggggaagcactcttggttggttttggtttgctttttaaaaattgtggtaaaatacataacaaaagtaactatcgtaacctgagcagttctgtgacatgaagtgaattcactgctttgtgtgaccttggccaccatcattccccaccactcactcccgctgggctcccagccctgccccaccattccgctccctctacagctatgggttttacaaagaaggatgcagggcgccctgactgcggggtgaggggcaggcctgcccgcggtgtgggcattcgctgaagggggacgcccaggtgtctgcctgagttacgggttggggggtcgggcatgtggggagggatggagttggaggtgcatgctctcagagctggtaggggtggcccgtttcgtcccgtgtgtgaact

SEQ ID NO: 14481 - DNA, 3226 bp, Homo sapiens
ggcgcggctccgctctcggctggggttcgtcactgggcgcgggatttggccgccgcggggctccggagccgctcgctcccgacacggctcacgatgcgcggcgagcagggcgcggcgggggcccgcgtgctccagttcactaactgccggatcctgcgcggagggaaactgctcagggaggatctgtgggtgcgcggaggccgcatcttggacccagagaagctgttctttgaggagcggcgcgtggccgacgagcggcgggactgcgggggccgcatcttggctcccggattcatcgacgtgcagatcaacggtggatttggtgttgacttctctcaagccacggaggacgtgggttcgggggttgccctcgtggcccggaggatcctgtcgcacggcgtcacctccttctgccccaccctggtcacttccccaccggaggtttatcacaaggttgttcctcagatccctgtgaagagtggtggtccccatggggcaggggtcctcgggcactcagtggctgacctgcgggcggcagaggatgctgtgtggagcggagccaccttcatcacccacctcttcaacgccatgctgcctttccaccaccgcgacccaggcatcgtggggctcctgaccagcgaccggctgcccgcaggccgctgcatcttctatgggatgattgcagatggcacgcacaccaaccccgccgccctgcggatcgcccaccgtgcccatccccaggggctggtgctggtcaccgatgccatccctgccttgggcctgggcaacggccggcacacgctgggacagcaggaagtggaagtggacggtctgacggcctacgtggcaggctgcagcatggagtcggccctggaggctgcatccctgcaccccgcccagttgctggggctggagaagagtaaggggaccctggactttggtgctgacgcagacttcgtggtgctcgacgactcccttcacgtccaggccacctacatctcgggtgagctggtgtggcaggcggacgcagctaggcagtgacaaggacctcggctgagaggacacctggccgcagcgggatgccatcagggccgggtggttggggagctggtctccagggagtgagtcgggagccctgctggattgatgcccagggcctgtgcggccgccctggaggcggtggctgggataaacgtgcacccagcaggactcgccttggctccgggttttgcttgtgctcacatgtggcaccatccttggttgccctcctggagaaggcattcacggcctggggtgggatggctgggctgtagtttagcctgggccttgggccccagtgggggacagggcctgtctgcatgaagtggaccggagacctgcagaccccaggaaagtgtcactatgggagggaggggcaggcagtcagtggctggtgccatggggtgaagccaccatgggctgggggtgaagagccggcaggaaggggaccagtcacagggagtgtggacagtcaggggtttgctttctgctcctgagttggggtgtgcagcgtggagcccacagcctggttctgggccagggcacagtgccaggggctccgctctgacctccaggagggagactgggcccgggacccctgttttctgctccctggactgcctagccctgagtgccacggatgaccagcgttctgttttctcttctcaataaccctatctcttcacacatccccaggcccagtgcttgccggctgtggtgaccctgcctggtgctggagggcagtatgggaggcaccagtgtgccctgctcaccccattagtgtcatcctgccatcttctgtgtccccttggccctggcacacacccatgtggcaaacacgggccgtgaggctccctgaacagcttcgaggcgggtgggcttctggagccctcttggctctgaggacagccacagtggggtcagacgtcagggattggtgcagccccacgtcaggggtgattgtcttgactttctctccatttgagttctggggtgggtggctcccttcccccttgcttacaggtgctgtcctgggcacaggaggtacgcgcctggctctgcactgttctcttccctctgctgcaaagcccagttaaggaaatgtctccaggtccaaagagataggatggtctggggccccacctgtttggaagggaacagccagggaagaaccacctgcctgggcagggcctcgcctgagggagggcctggggcagggcacaaggggttgatctcagcccacaagccccaggggcagcccaggaaagcaggcgacggatgtggatcctgacctcctgagaggtgtgaggtgcagggatacccacctctgccttgacggccgcgcaccccttaggaagtggctgtccagcgcctgcctgtgctgggcctgggagaggagctgtcttgccagggctcccaggcagggagaggcaggtgaggttctcagccgatgtgttagaggttgagcatcgcctgtgcccagcttgctggctgtcagtgcttgatgtgcccatcctcagctaaaacccagagctggcatgttggtcatccccacctcagacgggacgcccagtccagagctggtgagccctgggccagcctttgggcctggcctgccccattcaccggccagcgccccacctccctggctggagggtcggggaggggctggcagagatggttggtccacagggctagccctgggtggtgggagaggggcccagggtcagggtgagagagagctgggccagggagctgctgcaggatgattttgaggtgtgggggaagcactcttggttggttttggtttgctttttaaaaattgtggtaaaatacataacaaaagtaactatcgtaacctgagcagttctgtgacatgaagtgaattcactgctttgtgtgaccttggccaccatcattccccaccactcactcccgctgggctcccagccctgccccaccattccgctccctctacagctatgggttttacaaagaaggatgcagggcgccctgactgcggggtgaggggcaggcctgcccgcggtgtgggcattcgctgaagggggacgcccaggtgtctgcctgagttacgggttggggggtcgggcatgtggggagggatggagttggaggtgcatgctctcagagctggtaggggtggcccgtttcgtcccgtgtgtgaact

SEQ ID NO: 14482 - DNA, 2573 bp, Homo sapiens
cagggagggtgggtcctccctagctccctcctctcaggtgggctgccggctgccagcctcagttgtagccccgtgttgccatcaggccgggctttctggtgttgcagacaaggccaggcaaggggttgcagggagcattgtccagtacctctgtccatctgtgatgggtcagggtgtcttgcactagtcgtgtccctgggcctcagtttccccaccagcgtcgggttgttggggagcagctctggggtaggtgggcggccccactcctgccccctactcattgcccggctctgtcccagacttcgtggtgctcgacgactcccttcacgtccaggccacctacatctcgggtgagctggtgtggcaggcggacgcagctaggcagtgacaaggacctcggctgagaggacacctggccgcagcgggatgccatcagggccgggtggttggggagctggtctccagggagtgagtcgggagccctgctggattgatgcccagggcctgtgcggccgccctggaggcggtggctgggataaacgtgcacccagcaggactcgccttggctccgggttttgcttgtgctcacatgtggcaccatccttggttgccctcctggagaaggcattcacggcctggggtgggatggctgggctgtagtttagcctgggccttgggccccagtgggggacagggcctgtctgcatgaagtggaccggagacctgcagaccccaggaaagtgtcactatgggagggaggggcaggcagtcagtggctggtgccatggggtgaagccaccatgggctgggggtgaagagccggcaggaaggggaccagtcacagggagtgtggacagtcaggggtttgctttctgctcctgagttggggtgtgcagcgtggagcccacagcctggttctgggccagggcacagtgccaggggctccgctctgacctccaggagggagactgggcccgggacccctgttttctgctccctggactgcctagccctgagtgccacggatgaccagcgttctgttttctcttctcaataaccctatctcttcacacatccccaggcccagtgcttgccggctgtggtgaccctgcctggtgctggagggcagtatgggaggcaccagtgtgccctgctcaccccattagtgtcatcctgccatcttctgtgtccccttggccctggcacacacccatgtggcaaacacgggccgtgaggctccctgaacagcttcgaggcgggtgggcttctggagccctcttggctctgaggacagccacagtggggtcagacgtcagggattggtgcagccccacgtcaggggtgattgtcttgactttctctccatttgagttctggggtgggtggctcccttcccccttgcttacaggtgctgtcctgggcacaggaggtacgcgcctggctctgcactgttctcttccctctgctgcaaagcccagttaaggaaatgtctccaggtccaaagagataggatggtctggggccccacctgtttggaagggaacagccagggaagaaccacctgcctgggcagggcctcgcctgagggagggcctggggcagggcacaaggggttgatctcagcccacaagccccaggggcagcccaggaaagcaggcgacggatgtggatcctgacctcctgagaggtgtgaggtgcagggatacccacctctgccttgacggccgcgcaccccttaggaagtggctgtccagcgcctgcctgtgctgggcctgggagaggagctgtcttgccagggctcccaggcagggagaggcaggtgaggttctcagccgatgtgttagaggttgagcatcgcctgtgcccagcttgctggctgtcagtgcttgatgtgcccatcctcagctaaaacccagagctggcatgttggtcatccccacctcagacgggacgcccagtccagagctggtgagccctgggccagcctttgggcctggcctgccccattcaccggccagcgccccacctccctggctggagggtcggggaggggctggcagagatggttggtccacagggctagccctgggtggtgggagaggggcccagggtcagggtgagagagagctgggccagggagctgctgcaggatgattttgaggtgtgggggaagcactcttggttggttttggtttgctttttaaaaattgtggtaaaatacataacaaaagtaactatcgtaacctgagcagttctgtgacatgaagtgaattcactgctttgtgtgaccttggccaccatcattccccaccactcactcccgctgggctcccagccctgccccaccattccgctccctctacagctatgggttttacaaagaaggatgcagggcgccctgactgcggggtgaggggcaggcctgcccgcggtgtgggcattcgctgaagggggacgcccaggtgtctgcctgagttacgggttggggggtcgggcatgtggggagggatggagttggaggtgcatgctctcagagctggtaggggtggcccgtttcgtcccgtgtgtgaact

SEQ ID NO: 14483 - DNA, 1883 bp, Homo sapiens
cgccgcccccacccacccacctacggctaggtacgaggctcggtgttaaattcggcctatgggagggaggggcaggcagtcagtggctggtgccatggggtgaagccaccatgggctgggggtgaagagccggcaggaaggggaccagtcacagggagtgtggacagtcaggggtttgctttctgctcctgagttggggtgtgcagcgtggagcccacagcctggttctgggccagggcacagtgccaggggctccgctctgacctccaggagggagactgggcccgggacccctgttttctgctccctggactgcctagccctgagtgccacggatgaccagcgttctgttttctcttctcaataaccctatctcttcacacatccccaggcccagtgcttgccggctgtggtgaccctgcctggtgctggagggcagtatgggaggcaccagtgtgccctgctcaccccattagtgtcatcctgccatcttctgtgtccccttggccctggcacacacccatgtggcaaacacgggccgtgaggctccctgaacagcttcgaggcgggtgggcttctggagccctcttggctctgaggacagccacagtggggtcagacgtcagggattggtgcagccccacgtcaggggtgattgtcttgactttctctccatttgagttctggggtgggtggctcccttcccccttgcttacaggtgctgtcctgggcacaggaggtacgcgcctggctctgcactgttctcttccctctgctgcaaagcccagttaaggaaatgtctccaggtccaaagagataggatggtctggggccccacctgtttggaagggaacagccagggaagaaccacctgcctgggcagggcctcgcctgagggagggcctggggcagggcacaaggggttgatctcagcccacaagccccaggggcagcccaggaaagcaggcgacggatgtggatcctgacctcctgagaggtgtgaggtgcagggatacccacctctgccttgacggccgcgcaccccttaggaagtggctgtccagcgcctgcctgtgctgggcctgggagaggagctgtcttgccagggctcccaggcagggagaggcaggtgaggttctcagccgatgtgttagaggttgagcatcgcctgtgcccagcttgctggctgtcagtgcttgatgtgcccatcctcagctaaaacccagagctggcatgttggtcatccccacctcagacgggacgcccagtccagagctggtgagccctgggccagcctttgggcctggcctgccccattcaccggccagcgccccacctccctggctggagggtcggggaggggctggcagagatggttggtccacagggctagccctgggtggtgggagaggggcccagggtcagggtgagagagagctgggccagggagctgctgcaggatgattttgaggtgtgggggaagcactcttggttggttttggtttgctttttaaaaattgtggtaaaatacataacaaaagtaactatcgtaacctgagcagttctgtgacatgaagtgaattcactgctttgtgtgaccttggccaccatcattccccaccactcactcccgctgggctcccagccctgccccaccattccgctccctctacagctatgggttttacaaagaaggatgcagggcgccctgactgcggggtgaggggcaggcctgcccgcggtgtgggcattcgctgaagggggacgcccaggtgtctgcctgagttacgggttggggggtcgggcatgtggggagggatggagttggaggtgcatgctctcagagctggtaggggtggcccgtttcgtcccgtgtgtgaact

SEQ ID NO: 14484 - DNA, 1338 bp, Homo sapiens
ggcgcggctccgctctcggctggggttcgtcactgggcgcgggatttggccgccgcggggctccggagccgctcgctcccgacacggctcacgatgcgcggcgagcagggcgcggcgggggcccgcgtgctccagttcactaactgccggatcctgcgcggagggaaactgctcagggaggatctgtgggtgcgcggaggccgcatcttggacccagagaagctgttctttgaggagcggcgcgtggccgacgagcggcgggactgcgggggccgcatcttggctcccggattcatcgacgtgcagatcaacggtggatttggtgttgacttctctcaagccacggaggacgtgggttcgggggttgccctcgtggcccggaggatcctgtcgcacggcgtcacctccttctgccccaccctggtcacttccccaccggaggtttatcacaaggttgttcctcagatccctgtgaagagtggtggtccccatggggcaggggtcctcgggctgcacctggagggccccttcatcagccgggagaagcggggcgcgcaccccgaggcccacctccgctccttcgaggccgatgccttccaggacttgctggccacctacgggcccctggacaatgtccgcatcgtgacgctggccccagagttgggccgtagccacgaagtgatccgggcgctgacggcccgtggcatctgcgtgtccctagggcactcagtggctgacctgcgggcggcagaggatgctgtgtggagcggagccaccttcatcacccacctcttcaacgccatgctgcctttccaccaccgcgacccaggcatcgtggggctcctgaccagcgaccggctgcccgcaggccgctgcatcttctatgggatgattgcagatggcacgcacaccaaccccgccgccctgcggatcgcccaccgtgcccatccccaggggctggtgctggtcaccgatgccatccctgccttgggcctgggcaacggccggcacacgctgggacagcaggaagtggaagtggacggtctgacggcctacgtggcaggcaccaagacgctgagtggcagcatagccccaatggacgtctgtgtccggcacttcctgcaggccacaggctgcagcatggagtcggccctggaggctgcatccctgcaccccgcccagttgctggggctggagaagagtaaggggaccctggactttggtgctgacgcagcacctggagggccccgttcatcaggccgggcagaagcggaggcgccgcagcccgaggcccaagctccgggctccttcgagggccgaattgccttccaggggact

SEQ ID NO: 14485 - DNA, 851 bp, Homo sapiens
ggcgcggctccgctctcggctggggttcgtcactgggcgcgggatttggccgccgcggggctccggagccgctcgctcccgacacggctcacgatgcgcggcgagcagggcgcggcgggggcccgcgtgctccagttcactaactgccggatcctgcgcggagggaaactgctcagggaggatctgtgggtgcgcggaggccgcatcttggacccagagaagctgttctttgaggagcggcgcgtggccgacgagcggcgggactgcgggggccgcatcttggctcccggattcatcgacgtgcagatcaacggtggatttggtgttgacttctctcaagccacggaggacgtgggttcgggggttgccctcgtggcccggaggatcctgtcgcacggcgtcacctccttctgccccaccctggtcacttccccaccggaggtttatcacaaggttgttcctcagatccctgtgaagagtggtggtccccatggggcaggggtcctcgggctgcacctggagggccccttcatcagccgggagaagcggggcgcgcaccccgaggcccacctccgctccttcgaggccgatgccttccaggacttgctggccacctacgggcccctggacaatgtccgcatcgtgacgctggccccagagttgggccgtagccacgaagtgatccgggcgctgacggcccgtggcatctgcgtgtccctagggcactcagtggctgacctgcgggcggcagaggatgctgtgtggagcggagccaccttcatcacccacctcttcaacgccatgctgcctttccacctagaccgctttcatagacgtagctttccagccta

SEQ ID NO: 14486 - DNA, 495 bp, Homo sapiens
gactccccatcgagcattgaggcaagaaaacagcaaagccactcaccagtggtcaacaccagcaccttgggagagctaggcagctctgccttatcaaaagccatgaccagctgccaggaaaacaccactctgggatgaaaggagaaaatatggcatcaccagagttgagtcacatccaggcacctgtttgtggcccattccagctccctcacctttcactcctctttctgctgatcccaacctgcgagcatcagttcagtttcagcttgagttcacatctatgtccaagctcacctgtagatccctacacctttccatttcatagggccaaaagaccccaaaagaaaaaaaatcagaaaagaaagacgaggtctcaatgtactttactgggaggatcagacagtaattacataaatgaataggatcatttcagataatgatatttgctgtgaagaaaataaaacaatgtcaaacaaaacatgcaaagccctctta

SEQ ID NO: 14487 - DNA, 435 bp, Homo sapiens
  misc_feature (43)..(43): n is a, c, g, or t
agctgccaggaaaacaccactctgaaaaaaattttgggtaaanaataagggcggcacggaaacaaattcaattgggcggcccccaaaattttcccaccaagaagttgagtcacatccaggcacctgtttgtggcccattccagctccctcacctttcactcctctttctgctgatcccaacctgcgagcatcagttcagtttcagcttgagttcacatctatgtccaagctcacctgtagatccctacacctttccatttcatagggccaaaagaccccaaaagaaaaaaaatcagaaaagaaagacgaggtctcaatgtactttactgggaggatcagacagtaattacataaatgaataggatcatttcagataatgatatttgctgtgaagaaaataaaacaatgtcaaacaaaacatgcaaagccctctta

SEQ ID NO: 14488 - DNA, 412 bp, Homo sapiens
gagttttccccagcttcctcctttcctccaattttccttacaaagcctttccttctttcgtctgagctctaacactttgtacgttgtagtaattttatggagcccagtgccaaacatctctatagaggggatgttgtaagggttgaatatgaagagaccctacatgtgacgtgtgtcctacgaatcttggagtcttgactccttctccagtgtcagtactcgttatctttaatttggggccagatatgagcaccccacacactttccaaaaaagcccccgatccacaaatgtatgcatgatttttccttacataagtcttttcatgtttctggacatattttatctcccttcctcctctaatactttttcccttgctttccacagtgagaaaaacaacaacaacaaaaaaaa

SEQ ID NO: 14489 - DNA, 279 bp, Homo sapiens
ccatgcaatgaatccaagaagagggctattttaaagctcccttcttgagcaacaacaacaaaaaaaataatgcgggcttcaaatgcttgctttttaaaaataagacaaaactgaaaaggttgttaatttagcttcataaagaaagcactgagtttacttaataggttataagggtacactgttatgctaacggtgaacatttctattgtgttaactattcataaacattttgatgggtaaccttcacaccatctgcatgtaaagcaggtatcctttcat

SEQ ID NO: 14490 - DNA, 1934 bp, Homo sapiens
aggaggagggttaagggtggctttagaggctcagtccccgcgacgccgcgctggttggtgctcctgcgccggaggagttctgcgtctcggggtggtgactgggtccagaatggcttcggattcggggaaccaggggaccctctgcacgttggagttcgcggtgcagatgacctgtcagagctgtgtggacgcggtgcgcaaatccctgcaaggggtggcaggtgtccaggatgtggaggtgcacttggaggaccagatggtcttggtacacaccactctacccagccaggaggtgcaggctctcctggaaggcacggggcggcaggcggtactcaagggcatgggcagcggccagttgcagaatctgggggcagcagtggccatcctgggggggcctggcaccgtgcagggggtggtgcgcttcctacagctgacccctgagcgctgcctcatcgagggaactattgacggcctggagcctgggctgcatggactccacgtccatcagtacggggaccttacaaacaactgcaacagctgtgggaatcactttaaccctgatggagcatctcatgggggcccccaggactctgaccggcaccgcggagacctgggcaatgtccgtgctgatgctgacggccgcgccatcttcagaatggaggatgagcagctgaaggtgtgggatgtgattggccgcagcctgattattgatgagggagaagatgacctgggccggggaggccatcccttatccaagatcacagggaactccggggagaggttggcctgtggcatcattgcacgctccgctggccttttccagaaccccaagcagatctgctcttgcgatggcctcaccatctgggaggagcgaggccggcccatcgctggcaagggccgaaaggagtcagcgcagccccctgcccacctttgagcaggacctcaccttggctctgttgctgtcctccagggcgagcactttccacttccagagggggccagagggactttgcctgcccagtctttggagagctcagtacagggcaggagctgctgtggtgttcccttggcaaatgaaagttttattttcgtttgggagacttggtgttttgtgcttgtctccatgccccttatgggcttggtgaacatagctctgcttctttcctttgtatcagggccaccccttagcattggagccaaacaaacctgaattcaaacctacacacacactgaagtccccatcttcctccttggagccataatgaagagccactacagtcaaatttctgtttgtggcctcccccaacccctcactatggctgattggaaccaaaatggacacctgacccatggtggcccatgctttccctgagaaatcagggcagatccagctttagttttttcctgtggttggacccataacatgggaatatgggaagttttggtggccctcttctccctgccttattgactgagcatcagaaaaagccagtcggctaaggaggaaaaatgaggcagggagaatctaagagttgctggagaatcccagtcactctggagtcccctctctgagcctttcgtgaggccagctgcctcctgcctgggattgaagagatgctcccgaatcctcctaatgcatccccctgttaaaataatctggcttgaggctgggcacggtagctcacacctgtaatcccagcacttcggaaggccaaggcgggaggatctcttgagcccaggagtttgagaccagctgggggaacagagtaagaccctgtctctacaaaaaaaaaaaatttaattagctgggtgtgatggtgcatgcttgtggtcccagctatttgggaggctgaggtgggaggattgcttcagcctgggaggttgaggctgcagtgaaccatgatcacgccactgcattccagcctgggcaacag

SEQ ID NO: 14491 - DNA, 493 bp, Homo sapiens
  misc_feature (3)..(4): n is a, c, g, or t
  misc_feature (49)..(49): n is a, c, g, or t
  misc_feature (57)..(58): n is a, c, g, or t
  misc_feature (60)..(60): n is a, c, g, or t
  misc_feature (62)..(62): n is a, c, g, or t
  misc_feature (68)..(68): n is a, c, g, or t
acnngaaacctggaaatgccgtcataatctaacggcccccccatctcanaatggagnntnancagctnaaggtgtgggatgtgattggccgcagcctgattattgatgagggagaagatgacctgggccggggaggccatcccttatccaagatcacagggaactccggggagaggttggcctgtggcatcattgcacgctccgctggccttttccagaaccccaagcagatctgctcttgcgatggcctcaccatctgggaggagcgaggccggcccatcgctggcaagggccgaaaggagtcagcgcagccccctgcccacctttgagcaggacctcaccttggctctgttgctgtcctccagggcgagcactttccacttccagagggggccagagggactttgcctgcccagtctttggagagctcagtacagggcaggagctgctgtggtgttcccttggcaaatgaaagttttattttcgtttggga

SEQ ID NO: 14492 - DNA, 1098 bp, Homo sapiens
aggaggagggttaagggtggctttagaggctcagtccccgcgacgccgcgctggttggtgctcctgcgccggaggagttctgcgtctcggggtggtgactgggtccagaatggcttcggattcggggaaccaggggaccctctgcacgttggagttcgcggtgcagatgacctgtcagagctgtgtggacgcggtgcgcaaatccctgcaaggggtggcaggtgtccaggatgtggaggtgcacttggaggaccagatggtcttggtacacaccactctacccagccaggaggtgcaggctctcctggaaggcacggggcggcaggcggtactcaagggcatgggcagcggccagttgcagaatctgggggcagcagtggccatcctgggggggcctggcaccgtgcagggggtggtgcgcttcctacagctgacccctgagcgctgcctcatcgagggaactattgacggcctggagcctgggctgcatggactccacgtccatcagtacggggaccttacaaacaactgcaacagctgtgggaatcactttaaccctgatggagcatctcatgggggcccccaggactctgaccggcaccgcggagacctgggcaatgtccgtgctgatgctgacggccgcgccatcttcagaatggaggatgagcagctgaaggtgtgggatgtgattggccgcagcctgattattgatgagggagaagatgacctgggccggggaggccatcccttatccaagatcacagggaactccggggagaggttggcctgtggcatcattgcacgctccgctggccttttccagaaccccaagcagatctgctcttgcgatggcctcaccatctgggaggagcgaggccggcccatcgctggcaagggccgaaaggagtcagcgcagccccctgcccacctttgagcaggacctcaccttggctctgttgctgtcctccagggcgagcactttccacttccagagggggccagagggactttgcctgcccagtctttggagagctcagtacagggcaggagctgctgtggtgttcccttggcaaatgaaagttttattttcgtttggga

SEQ ID NO: 14493 - DNA, 1303 bp, Homo sapiens
aggaggagggttaagggtggctttagaggctcagtccccgcgacgccgcgctggttggtgctcctgcgccggaggagttctgcgtctcggggtggtgactgggtccagaatggcttcggattcggggaaccaggggaccctctgcacgttggagttcgcggtgcagatgacctgtcagagctgtgtggacgcggtgcgcaaatccctgcaaggggtggcaggtgtccaggatgtggaggtgcacttggaggaccagatggtcttggtacacaccactctacccagccaggaggtgcaggctctcctggaaggcacggggcggcaggcggtactcaagggcatgggcagcggccagttgcgtgagtgaccactgtggccttggcccctctcggagggaggtggctcagagctggtacaaatctaatcataggattctcaggctctgggttggagtggctttgaggaaggtgtgaaaattatgtgagactccctgcccttcccgagctgctgaagaggtgtgctgggtgaggtggcaagccagcccaagtgtctaataccttgcagagaatctgggggcagcagtggccatcctgggggggcctggcaccgtgcagggggtggtgcgcttcctacagctgacccctgagcgctgcctcatcgagggaactattgacggcctggagcctgggctgcatggactccacgtccatcagtacggggaccttacaaacaactgcaacagctgtgggaatcactttaaccctgatggagcatctcatgggggcccccaggactctgaccggcaccgcggagacctgggcaatgtccgtgctgatgctgacggccgcgccatcttcagaatggaggatgagcagctgaaggtgtgggatgtgattggccgcagcctgattattgatgagggagaagatgacctgggccggggaggccatcccttatccaagatcacagggaactccggggagaggttggcctgtggcatcattgcacgctccgctggccttttccagaaccccaagcagatctgctcttgcgatggcctcaccatctgggaggagcgaggccggcccatcgctggcaagggccgaaaggagtcagcgcagccccctgcccacctttgagcaggacctcaccttggctctgttgctgtcctccagggcgagcactttccacttccagagggggccagagggactttgcctgcccagtctttggagagctcagtacagggcaggagctgctgtggtgttcccttggcaaatgaaagttttattttcgtttggga

SEQ ID NO: 14494 - DNA, 1105 bp, Homo sapiens
tgtttatcgatgccacccatttttggtgtttatcgatgccacccacttggaggaccagatggtcttggtacacaccactctacccagccaggaggtgcaggctctcctggaaggcacggggcggcaggcggtactcaagggcatgggcagcggccagttgcgtgagtgaccactgtggccttggcccctctcggagggaggtggctcagagctggtacaaatctaatcataggattctcaggctctgggttggagtggctttgaggaaggtgtgaaaattatgtgagactccctgcccttcccgagctgctgaagaggtgtgctgggtgaggtggcaagccagcccaagtgtctaataccttgcagagaatctgggggcagcagtggccatcctgggggggcctggcaccgtgcagggggtggtgcgcttcctacagctgacccctgagcgctgcctcatcgagggaactattgacggcctggagcctgggctgcatggactccacgtccatcagtacggggaccttacaaacaactgcaacagctgtgggaatcactttaaccctgatggagcatctcatgggggcccccaggactctgaccggcaccgcggagacctgggcaatgtccgtgctgatgctgacggccgcgccatcttcagaatggaggatgagcagctgaaggtgtgggatgtgattggccgcagcctgattattgatgagggagaagatgacctgggccggggaggccatcccttatccaagatcacagggaactccggggagaggttggcctgtggcatcattgcacgctccgctggccttttccagaaccccaagcagatctgctcttgcgatggcctcaccatctgggaggagcgaggccggcccatcgctggcaagggccgaaaggagtcagcgcagccccctgcccacctttgagcaggacctcaccttggctctgttgctgtcctccagggcgagcactttccacttccagagggggccagagggactttgcctgcccagtctttggagagctcagtacagggcaggagctgctgtggtgttcccttggcaaatgaaagttttattttcgtttggga

SEQ ID NO: 14495 - DNA, 695 bp, Homo sapiens
tacggagctgattattgatgagggagaagatgccctgagcgctgcctcatcgagggaactattgacggcctggagcctgggctgcatggactccacgtccatcagtacggggaccttacaaacaactgcaacagctgtgggaatcactttaaccctgatggagcatctcatgggggcccccaggactctgaccggcaccgcggagacctgggcaatgtccgtgctgatgctgacggccgcgccatcttcagaatggaggatgagcagctgaaggtgtgggatgtgattggccgcagcctgattattgatgagggagaagatgacctgggccggggaggccatcccttatccaagatcacagggaactccggggagaggttggcctgtggcatcattgcacgctccgctggccttttccagaaccccaagcagatctgctcttgcgatggcctcaccatctgggaggagcgaggccggcccatcgctggcaagggccgaaaggagtcagcgcagccccctgcccacctttgagcaggacctcaccttggctctgttgctgtcctccagggcgagcactttccacttccagagggggccagagggactttgcctgcccagtctttggagagctcagtacagggcaggagctgctgtggtgttcccttggcaaatgaaagttttattttcgtttggga

SEQ ID NO: 14496 - DNA, 2155 bp, Homo sapiens
aggaggagggttaagggtggctttagaggctcagtccccgcgacgccgcgctggttggtgctcctgcgccggaggagttctgcgtctcggggtggtgactgggtccagaatggcttcggattcggggaaccaggggaccctctgcacgttggagttcgcggtgcagatgacctgtcagagctgtgtggacgcggtgcgcaaatccctgcaaggggtggcaggtgtccaggatgtggaggtgcacttggaggaccagatggtcttggtacacaccactctacccagccaggaggtgcaggctctcctggaaggcacggggcggcaggcggtactcaagggcatgggcagcggccagttgcgtgagtgaccactgtggccttggcccctctcggagggaggtggctcagagctggtacaaatctaatcataggattctcaggctctgggttggagtggctttgaggaaggtgtgaaaattatgtgagactccctgcccttcccgagctgctgaagaggtgtgctgggtgaggtggcaagccagcccaagtgtctaataccttgcagagaatctgggggcagcagtggccatcctgggggggcctggcaccgtgcagggggtggtgcgcttcctacagctgacccctgagcgctgcctcatcgagggaactattgacggcctggagcctgggctgcatggactccacgtccatcagtacggggaccttacaaacaactgcaacaggtgagttgtctgaagtctccccagtagcattctcagctacacattttcacactgggccctcaccaatactctgtgaggcacatacacacaggcacaacctccagatgaggaaactgaggctcacagaggttaaatgacttgccaaaggtccacagcaggtaaaaggtagagttggggtttgagtcaagatctgaccttggctgggcacagtagctcacacctgtaatctagcactttgggaggctgaggtgggcggatcacctgaggtcaggagttcaagaccagcctggccaacatggtgaaaccccatctctactaacaatacaaaaaaaaattagccaggtgcagtggcatgtgcccataatcccagctactagggaggcccgtaatctcctgaggcaggagaatcacttgaactcaggaggtggaggttgtggtgagctgagattgcaccacggcactccagctcaggggtgacagggcaaaactctgtctcaagaaaaaaaataaaatctgatcttgaaggtcctgcttataaccaccttactgcctctgagatggaaggggacttctggacacagcaaaggaagggtccccatgccatggtgtttgtcatgctgtgatataactagttgtttactcatctgtgagtcccctgagccagaagcttattcaggacaggacccatgtctgattcttctcggtgccctctacccaaagcccagcacagagtaggcctgtttgttgaatgaatgaatgaatgaatgaatgaagcaaatataaatagatgagagggtagagcacctggcctgtgagctgctttcctgcccacctgtttcctttctttcttagctgtgggaatcactttaaccctgatggagcatctcatgggggcccccaggactctgaccggcaccgcggagacctgggcaatgtccgtgctgatgctgacggccgcgccatcttcagaatggaggatgagcagctgaaggtgtgggatgtgattggccgcagcctgattattgatgagggagaagatgacctgggccggggaggccatcccttatccaagatcacagggaactccggggagaggttggcctgtggcatcattgcacgctccgctggccttttccagaaccccaagcagatctgctcttgcgatggcctcaccatctgggaggagcgaggccggcccatcgctggcaagggccgaaaggagtcagcgcagccccctgcccacctttgagcaggacctcaccttggctctgttgctgtcctccagggcgagcactttccacttccagagggggccagagggactttgcctgcccagtctttggagagctcagtacagggcaggagctgctgtggtgttcccttggcaaatgaaagttttattttcgtttggga

SEQ ID NO: 14497 - DNA, 1273 bp, Homo sapiens
  misc_feature (1109)..(1109): n is a, c, g, or t
  misc_feature (1119)..(1119): n is a, c, g, or t
  misc_feature (1273)..(1273): n is a, c, g, or t
aggaggagggttaagggtggctttagaggctcagtccccgcgacgccgcgctggttggtgctcctgcgccggaggagttctgcgtctcggggtggtgactgggtccagaatggcttcggattcggggaaccaggggaccctctgcacgttggagttcgcggtgcagatgacctgtcagagctgtgtggacgcggtgcgcaaatccctgcaaggggtggcaggtgtccaggatgtggaggtgcacttggaggaccagatggtcttggtacacaccactctacccagccaggaggtgcaggctctcctggaaggcacggggcggcaggcggtactcaagggcatgggcagcggccagttgcagaatctgggggcagcagtggccatcctgggggggcctggcaccgtgcagggggtggtgcgcttcctacagctgacccctgagcgctgcctcatcgagggaactattgacggcctggagcctgggctgcatggactccacgtccatcagtacggggaccttacaaacaactgcaacagctgtgggaatcactttaaccctgatggagcatctcatgggggcccccaggactctgaccggcaccgcggagacctgggcaatgtccgtgctgatgctgacggccgcgccatcttcagaatggaggatgagcagctgaaggtgtgggatgtgattggccgcagcctgattattgatgagggagaagatgacctgggccggggaggccatcccttatccaagatcacagggaactccggggagaggttggcctgtggcatcattgcacgctccgctggccttttccagaaccccaagcagatctgctcttgcgatggcctcaccatctgggaggagcgaggccggcccatcgctggcaagggccgaaaggagtcagcgcagccccctgcccacctttgagcaggacctcaccttggctctgttgctgtcctccagggcgagcactttccacttccagagggggccagagggactttgcctgcccagtctttggagagctcagtacagggcaggagctgctgtggtgttcccttggcaaatgaaagttttattttcgtttgggaaaaaaaaaaanaaaaaaaaanaaaaaaaaaaaaaaaaaaaaaaaaactagagggggggcccgaaaaccaaaaacctcctgggggggcccggatcccaattcaccgtatggggagtcacatcacaatgaattggccaaccttttacaaccccagcattggtgctgacggaatatcn

SEQ ID NO: 14498 - DNA, 2340 bp, Homo sapiens
aggaggagggttaagggtggctttagaggctcagtccccgcgacgccgcgctggttggtgctcctgcgccggaggagttctgcgtctcggggtggtgactgggtccagaatggcttcggattcggggaaccaggggaccctctgcacgttggagttcgcggtgcagatgacctgtcagagctgtgtggacgcggtgcgcaaatccctgcaaggggtggcaggtgtccaggatgtggaggtgcacttggaggaccagatggtcttggtacacaccactctacccagccaggaggtgcaggctctcctggaaggcacggggcggcaggcggtactcaagggcatgggcagcggccagttgcgtgagtgaccactgtggccttggcccctctcggagggaggtggctcagagctggtacaaatctaatcataggattctcaggctctgggttggagtggctttgaggaaggtgtgaaaattatgtgagactccctgcccttcccgagctgctgaagaggtgtgctgggtgaggtggcaagccagcccaagtgtctaataccttgcagagaatctgggggcagcagtggccatcctgggggggcctggcaccgtgcagggggtggtgcgcttcctacagctgacccctgagcgctgcctcatcgagggaactattgacggcctggagcctgggctgcatggactccacgtccatcagtacggggaccttacaaacaactgcaacaggtgagttgtctgaagtctccccagtagcattctcagctacacattttcacactgggccctcaccaatactctgtgaggcacatacacacaggcacaacctccagatgaggaaactgaggctcacagaggttaaatgacttgccaaaggtccacagcaggtaaaaggtagagttggggtttgagtcaagatctgaccttggctgggcacagtagctcacacctgtaatctagcactttgggaggctgaggtgggcggatcacctgaggtcaggagttcaagaccagcctggccaacatggtgaaaccccatctctactaacaatacaaaaaaaaattagccaggtgcagtggcatgtgcccataatcccagctactagggaggcccgtaatctcctgaggcaggagaatcacttgaactcaggaggtggaggttgtggtgagctgagattgcaccacggcactccagctcaggggtgacagggcaaaactctgtctcaagaaaaaaaataaaatctgatcttgaaggtcctgcttataaccaccttactgcctctgagatggaaggggacttctggacacagcaaaggaagggtccccatgccatggtgtttgtcatgctgtgatataactagttgtttactcatctgtgagtcccctgagccagaagcttattcaggacaggacccatgtctgattcttctcggtgccctctacccaaagcccagcacagagtaggcctgtttgttgaatgaatgaatgaatgaatgaatgaagcaaatataaatagatgagagggtagagcacctggcctgtgagctgctttcctgcccacctgtttcctttctttcttagctgtgggaatcactttaaccctgatggagcatctcatgggggcccccaggactctgaccggacagggccaagaggaccttgcctgcccagtccttggggagctcagatcctacgagactggtacccacaggaggaaatgggtactttagggaagcaggaagaggcgtcggaatcaggaaatcagaagatagcagcttggcaccacgtggcacacatcccctatacacacactggatctcattccagcaccgcggagacctgggcaatgtccgtgctgatgctgacggccgcgccatcttcagaatggaggatgagcagctgaaggtgtgggatgtgattggccgcagcctgattattgatgagggagaagatgacctgggccggggaggccatcccttatccaagatcacagggaactccggggagaggttggcctgtggcatcattgcacgctccgctggccttttccagaaccccaagcagatctgctcttgcgatggcctcaccatctgggaggagcgaggccggcccatcgctggcaagggccgaaaggagtcagcgcagccccctgcccacctttgagcaggacctcaccttggctctgttgctgtcctccagggcgagcactttccacttccagagggggccagagggactttgcctgcccagtctttggagagctcagtacagggcaggagctgctgtggtgttcccttggcaaatgaaagttttattttcgtttggga

SEQ ID NO: 14499 - DNA, 1488 bp, Homo sapiens
aggaggagggttaagggtggctttagaggctcagtccccgcgacgccgcgctggttggtgctcctgcgccggaggagttctgcgtctcggggtggtgactgggtccagaatggcttcggattcggggaaccaggggaccctctgcacgttggagttcgcggtgcagatgacctgtcagagctgtgtggacgcggtgcgcaaatccctgcaaggggtggcaggtgtccaggatgtggaggtgcacttggaggaccagatggtcttggtacacaccactctacccagccaggaggtgcaggctctcctggaaggcacggggcggcaggcggtactcaagggcatgggcagcggccagttgcgtgagtgaccactgtggccttggcccctctcggagggaggtggctcagagctggtacaaatctaatcataggattctcaggctctgggttggagtggctttgaggaaggtgtgaaaattatgtgagactccctgcccttcccgagctgctgaagaggtgtgctgggtgaggtggcaagccagcccaagtgtctaataccttgcagagaatctgggggcagcagtggccatcctgggggggcctggcaccgtgcagggggtggtgcgcttcctacagctgacccctgagcgctgcctcatcgagggaactattgacggcctggagcctgggctgcatggactccacgtccatcagtacggggaccttacaaacaactgcaacagctgtgggaatcactttaaccctgatggagcatctcatgggggcccccaggactctgaccggacagggccaagaggaccttgcctgcccagtccttggggagctcagatcctacgagactggtacccacaggaggaaatgggtactttagggaagcaggaagaggcgtcggaatcaggaaatcagaagatagcagcttggcaccacgtggcacacatcccctatacacacactggatctcattccagcaccgcggagacctgggcaatgtccgtgctgatgctgacggccgcgccatcttcagaatggaggatgagcagctgaaggtgtgggatgtgattggccgcagcctgattattgatgagggagaagatgacctgggccggggaggccatcccttatccaagatcacagggaactccggggagaggttggcctgtggcatcattgcacgctccgctggccttttccagaaccccaagcagatctgctcttgcgatggcctcaccatctgggaggagcgaggccggcccatcgctggcaagggccgaaaggagtcagcgcagccccctgcccacctttgagcaggacctcaccttggctctgttgctgtcctccagggcgagcactttccacttccagagggggccagagggactttgcctgcccagtctttggagagctcagtacagggcaggagctgctgtggtgttcccttggcaaatgaaagttttattttcgtttggga

SEQ ID NO: 14500 - DNA, 2113 bp, Homo sapiens
aggaggagggttaagggtggctttagaggctcagtccccgcgacgccgcgctggttggtgctcctgcgccggaggagttctgcgtctcggggtggtgactgggtccagaatggcttcggattcggggaaccaggggaccctctgcacgttggagttcgcggtgcagatgacctgtcagagctgtgtggacgcggtgcgcaaatccctgcaaggggtggcaggtgtccaggatgtggaggtgcacttggaggaccagatggtcttggtacacaccactctacccagccaggaggtgcaggctctcctggaaggcacggggcggcaggcggtactcaagggcatgggcagcggccagttgcgtgagtgaccactgtggccttggcccctctcggagggaggtggctcagagctggtacaaatctaatcataggattctcaggctctgggttggagtggctttgaggaaggtgtgaaaattatgtgagactccctgcccttcccgagctgctgaagaggtgtgctgggtgaggtggcaagccagcccaagtgtctaataccttgcagagaatctgggggcagcagtggccatcctgggggggcctggcaccgtgcagggggtggtgcgcttcctacagctgacccctgagcgctgcctcatcgagggaactattgacggcctggagcctgggctgcatggactccacgtccatcagtacggggaccttacaaacaactgcaacaggtgagttgtctgaagtctccccagtagcattctcagctacacattttcacactgggccctcaccaatactctgtgaggcacatacacacaggcacaacctccagatgaggaaactgaggctcacagaggttaaatgacttgccaaaggtccacagcaggtaaaaggtagagttggggtttgagtcaagatctgaccttggctgggcacagtagctcacacctgtaatctagcactttgggaggctgaggtgggcggatcacctgaggtcaggagttcaagaccagcctggccaacatggtgaaaccccatctctactaacaatacaaaaaaaaattagccaggtgcagtggcatgtgcccataatcccagctactagggaggcccgtaatctcctgaggcaggagaatcacttgaactcaggaggtggaggttgtggtgagctgagattgcaccacggcactccagctcaggggtgacagggcaaaactctgtctcaagaaaaaaaataaaatctgatcttgaaggtcctgcttataaccaccttactgcctctgagatggaaggggacttctggacacagcaaaggaagggtccccatgccatggtgtttgtcatgctgtgatataactagttgtttactcatctgtgagtcccctgagccagaagcttattcaggacaggacccatgtctgattcttctcggtgccctctacccaaagcccagcacagagtaggcctgtttgttgaatgaatgaatgaatgaatgaatgaagcaaatataaatagatgagagggtagagcacctggcctgtgagctgctttcctgcccacctgtttcctttctttcttagctgtgggaatcactttaaccctgatggagcatctcatgggggcccccaggactctgaccggcaccgcggagacctgggcaatgtccgtgctgatgctgacggccgcgccatcttcagaatggaggatgagcagctgaaggtgtgggatgtgattggccgcagccatcccttatccaagatcacagggaactccggggagaggttggcctgtggcatcattgcacgctccgctggccttttccagaaccccaagcagatctgctcttgcgatggcctcaccatctgggaggagcgaggccggcccatcgctggcaagggccgaaaggagtcagcgcagccccctgcccacctttgagcaggacctcaccttggctctgttgctgtcctccagggcgagcactttccacttccagagggggccagagggactttgcctgcccagtctttggagagctcagtacagggcaggagctgctgtggtgttcccttggcaaatgaaagttttattttcgtttggga

SEQ ID NO: 14501 - DNA, 2952 bp, Homo sapiens
aggaggagggttaagggtggctttagaggctcagtccccgcgacgccgcgctggttggtgctcctgcgccggaggagttctgcgtctcggggtggtgactgggtccagaatggcttcggattcggggaaccaggggaccctctgcacgttggagttcgcggtgcagatgacctgtcagagctgtgtggacgcggtgcgcaaatccctgcaaggggtggcaggtgtccaggatgtggaggtgcacttggaggaccagatggtcttggtacacaccactctacccagccaggaggtgcaggctctcctggaaggcacggggcggcaggcggtactcaagggcatgggcagcggccagttgcgtgagtgaccactgtggccttggcccctctcggagggaggtggctcagagctggtacaaatctaatcataggattctcaggctctgggttggagtggctttgaggaaggtgtgaaaattatgtgagactccctgcccttcccgagctgctgaagaggtgtgctgggtgaggtggcaagccagcccaagtgtctaataccttgcagagaatctgggggcagcagtggccatcctgggggggcctggcaccgtgcagggggtggtgcgcttcctacagctgacccctgagcgctgcctcatcgagggaactattgacggcctggagcctgggctgcatggactccacgtccatcagtacggggaccttacaaacaactgcaacaggtgagttgtctgaagtctccccagtagcattctcagctacacattttcacactgggccctcaccaatactctgtgaggcacatacacacaggcacaacctccagatgaggaaactgaggctcacagaggttaaatgacttgccaaaggtccacagcaggtaaaaggtagagttggggtttgagtcaagatctgaccttggctgggcacagtagctcacacctgtaatctagcactttgggaggctgaggtgggcggatcacctgaggtcaggagttcaagaccagcctggccaacatggtgaaaccccatctctactaacaatacaaaaaaaaattagccaggtgcagtggcatgtgcccataatcccagctactagggaggcccgtaatctcctgaggcaggagaatcacttgaactcaggaggtggaggttgtggtgagctgagattgcaccacggcactccagctcaggggtgacagggcaaaactctgtctcaagaaaaaaaataaaatctgatcttgaaggtcctgcttataaccaccttactgcctctgagatggaaggggacttctggacacagcaaaggaagggtccccatgccatggtgtttgtcatgctgtgatataactagttgtttactcatctgtgagtcccctgagccagaagcttattcaggacaggacccatgtctgattcttctcggtgccctctacccaaagcccagcacagagtaggcctgtttgttgaatgaatgaatgaatgaatgaatgaagcaaatataaatagatgagagggtagagcacctggcctgtgagctgctttcctgcccacctgtttcctttctttcttagctgtgggaatcactttaaccctgatggagcatctcatgggggcccccaggactctgaccggcaccgcggagacctgggcaatgtccgtgctgatgctgacggccgcgccatcttcagaatggaggatgagcagctgaaggtgtgggatgtgattggccgcagcctgattattgatgagggagaagatgacctgggccggggaggccatcccttatccaagatcacagggaactccggggagagccagaaccccaagcagatctgctcttgcgatggcctcaccatctgggaggagcgaggccggcccatcgctggcaagggccgaaaggagtcagcgcagccccctgcccacctttgagcaggacctcaccttggctctgttgctgtcctccagggcgagcactttccacttccagagggggccagagggactttgcctgcccagtctttggagagctcagtacagggcaggagctgctgtggtgttcccttggcaaatgaaagttttattttcgtttgggagacttggtgttttgtgcttgtctccatgccccttatgggcttggtgaacatagctctgcttctttcctttgtatcagggccaccccttagcattggagccaaacaaacctgaattcaaacctacacacacactgaagtccccatcttcctccttggagccataatgaagagccactacagtcaaatttctgtttgtggcctcccccaacccctcactatggctgattggaaccaaaatggacacctgacccatggtggcccatgctttccctgagaaatcagggcagatccagctttagttttttcctgtggttggacccataacatgggaatatgggaagttttggtggccctcttctccctgccttattgactgagcatcagaaaaagccagtcggctaaggaggaaaaatgaggcagggagaatctaagagttgctggagaatcccagtcactctggagtcccctctctgagcctttcgtgaggccagctgcctcctgcctgggattgaagagatgctcccgaatcctcctaatgcatccccctgttaaaataatctggcttgaggctgggcacggtagctcacacctgtaatcccagcacttcggaaggccaaggcgggaggatctcttgagcccaggagtttgagaccagctgggggaacagagtaagaccctgtctctacaaaaaaaaaaaatttaattagctgggtgtgatggtgcatgcttgtggtcccagctatttgggaggctgaggtgggaggattgcttcagcctgggaggttgaggctgcagtgaaccatgatcacgccactgcattccagcctgggcaacag

SEQ ID NO: 14502 - DNA, 2116 bp, Homo sapiens
aggaggagggttaagggtggctttagaggctcagtccccgcgacgccgcgctggttggtgctcctgcgccggaggagttctgcgtctcggggtggtgactgggtccagaatggcttcggattcggggaaccaggggaccctctgcacgttggagttcgcggtgcagatgacctgtcagagctgtgtggacgcggtgcgcaaatccctgcaaggggtggcaggtgtccaggatgtggaggtgcacttggaggaccagatggtcttggtacacaccactctacccagccaggaggtgcaggctctcctggaaggcacggggcggcaggcggtactcaagggcatgggcagcggccagttgcgtgagtgaccactgtggccttggcccctctcggagggaggtggctcagagctggtacaaatctaatcataggattctcaggctctgggttggagtggctttgaggaaggtgtgaaaattatgtgagactccctgcccttcccgagctgctgaagaggtgtgctgggtgaggtggcaagccagcccaagtgtctaataccttgcagagaatctgggggcagcagtggccatcctgggggggcctggcaccgtgcagggggtggtgcgcttcctacagctgacccctgagcgctgcctcatcgagggaactattgacggcctggagcctgggctgcatggactccacgtccatcagtacggggaccttacaaacaactgcaacaggtgagttgtctgaagtctccccagtagcattctcagctacacattttcacactgggccctcaccaatactctgtgaggcacatacacacaggcacaacctccagatgaggaaactgaggctcacagaggttaaatgacttgccaaaggtccacagcaggtaaaaggtagagttggggtttgagtcaagatctgaccttggctgggcacagtagctcacacctgtaatctagcactttgggaggctgaggtgggcggatcacctgaggtcaggagttcaagaccagcctggccaacatggtgaaaccccatctctactaacaatacaaaaaaaaattagccaggtgcagtggcatgtgcccataatcccagctactagggaggcccgtaatctcctgaggcaggagaatcacttgaactcaggaggtggaggttgtggtgagctgagattgcaccacggcactccagctcaggggtgacagggcaaaactctgtctcaagaaaaaaaataaaatctgatcttgaaggtcctgcttataaccaccttactgcctctgagatggaaggggacttctggacacagcaaaggaagggtccccatgccatggtgtttgtcatgctgtgatataactagttgtttactcatctgtgagtcccctgagccagaagcttattcaggacaggacccatgtctgattcttctcggtgccctctacccaaagcccagcacagagtaggcctgtttgttgaatgaatgaatgaatgaatgaatgaagcaaatataaatagatgagagggtagagcacctggcctgtgagctgctttcctgcccacctgtttcctttctttcttagctgtgggaatcactttaaccctgatggagcatctcatgggggcccccaggactctgaccggcaccgcggagacctgggcaatgtccgtgctgatgctgacggccgcgccatcttcagaatggaggatgagcagctgaaggtgtgggatgtgattggccgcagcctgattattgatgagggagaagatgacctgggccggggaggccatcccttatccaagatcacagggaactccggggagagccagaaccccaagcagatctgctcttgcgatggcctcaccatctgggaggagcgaggccggcccatcgctggcaagggccgaaaggagtcagcgcagccccctgcccacctttgagcaggacctcaccttggctctgttgctgtcctccagggcgagcactttccacttccagagggggccagagggactttgcctgcccagtctttggagagctcagtacagggcaggagctgctgtggtgttcccttggcaaatgaaagttttattttcgtttggga

SEQ ID NO: 14503 - DNA, 1783 bp, Homo sapiens
aggaggagggttaagggtggctttagaggctcagtccccgcgacgccgcgctggttggtgctcctgcgccggaggagttctgcgtctcggggtggtgactgggtccagaatggcttcggattcggggaaccaggggaccctctgcacgttggagttcgcggtgcagatgacctgtcagagctgtgtggacgcggtgcgcaaatccctgcaaggggtggcaggtgtccaggatgtggaggtgcacttggaggaccagatggtcttggtacacaccactctacccagccaggaggtgcaggctctcctggaaggcacggggcggcaggcggtactcaagggcatgggcagcggccagttgcgtgagtgaccactgtggccttggcccctctcggagggaggtggctcagagctggtacaaatctaatcataggattctcaggctctgggttggagtggctttgaggaaggtgtgaaaattatgtgagactccctgcccttcccgagctgctgaagaggtgtgctgggtgaggtggcaagccagcccaagtgtctaataccttgcagagaatctgggggcagcagtggccatcctgggggggcctggcaccgtgcagggggtggtgcgcttcctacagctgacccctgagcgctgcctcatcgagggaactattgacggcctggagcctgggctgcatggactccacgtccatcagtacggggaccttacaaacaactgcaacaggtgagttgtctgaagtctccccagtagcattctcagctacacattttcacactgggccctcaccaatactctgtgaggcacatacacacaggcacaacctccagatgaggaaactgaggctcacagaggttaaatgacttgccaaaggtccacagcaggtaaaaggtagagttggggtttgagtcaagatctgaccttggctgggcacagtagctcacacctgtaatctagcactttgggaggctgaggtgggcggatcacctgaggtcaggagttcaagaccagcctggccaacatggtgaaaccccatctctactaacaatacaaaaaaaaattagccaggtgcagtggcatgtgcccataatcccagctactagggaggcccgtaatctcctgaggcaggagaatcacttgaactcaggaggtggaggttgtggtgagctgagattgcaccacggcactccagctcaggggtgacagggcaaaactctgtctcaagaaaaaaaataaaatctgatcttgaaggtcctgcttataaccaccttactgcctctgagatggaaggggacttctggacacagcaaaggaagggtccccatgccatggtgtttgtcatgctgtgatataactagttgtttactcatctgtgagtcccctgagccagaagcttattcaggacaggacccatgtctgattcttctcggtgccctctacccaaagcccagcacagagtaggcctgtttgttgaatgaatgaatgaatgaatgaatgaagcaaatataaatagatgagagggtagagcacctggcctgtgagctgctttcctgcccacctgtttcctttctttcttagctgtgggaatcactttaaccctgatggagcatctcatgggggcccccaggactctgaccggcaccgcggagacctgggcaatgtccgtgctgatgctgacggccgcgccatcttcagaatggaggatgagcagctgcctcaatcgagggaactattgacggactggagcctgggctgcatggactccag

SEQ ID NO: 14504 - DNA, 1842 bp, Homo sapiens
aggaggagggttaagggtggctttagaggctcagtccccgcgacgccgcgctggttggtgctcctgcgccggaggagttctgcgtctcggggtggtgactgggtccagaatggcttcggattcggggaaccaggggaccctctgcacgttggagttcgcggtgcagatgacctgtcagagctgtgtggacgcggtgcgcaaatccctgcaaggggtggcaggtgtccaggatgtggaggtgcacttggaggaccagatggtcttggtacacaccactctacccagccaggaggtgcaggctctcctggaaggcacggggcggcaggcggtactcaagggcatgggcagcggccagttgcgtgagtgaccactgtggccttggcccctctcggagggaggtggctcagagctggtacaaatctaatcataggattctcaggctctgggttggagtggctttgaggaaggtgtgaaaattatgtgagactccctgcccttcccgagctgctgaagaggtgtgctgggtgaggtggcaagccagcccaagtgtctaataccttgcagagaatctgggggcagcagtggccatcctgggggggcctggcaccgtgcagggggtggtgcgcttcctacagctgacccctgagcgctgcctcatcgagggaactattgacggcctggagcctgggctgcatggactccacgtccatcagtacggggaccttacaaacaactgcaacaggtgagttgtctgaagtctccccagtagcattctcagctacacattttcacactgggccctcaccaatactctgtgaggcacatacacacaggcacaacctccagatgaggaaactgaggctcacagaggttaaatgacttgccaaaggtccacagcaggtaaaaggtagagttggggtttgagtcaagatctgaccttggctgggcacagtagctcacacctgtaatctagcactttgggaggctgaggtgggcggatcacctgaggtcaggagttcaagaccagcctggccaacatggtgaaaccccatctctactaacaatacaaaaaaaaattagccaggtgcagtggcatgtgcccataatcccagctactagggaggcccgtaatctcctgaggcaggagaatcacttgaactcaggaggtggaggttgtggtgagctgagattgcaccacggcactccagctcaggggtgacagggcaaaactctgtctcaagaaaaaaaataaaatctgatcttgaaggtcctgcttataaccaccttactgcctctgagatggaaggggacttctggacacagcaaaggaagggtccccatgccatggtgtttgtcatgctgtgatataactagttgtttactcatctgtgagtcccctgagccagaagcttattcaggacaggacccatgtctgattcttctcggtgccctctacccaaagcccagcacagagtaggcctgtttgttgaatgaatgaatgaatgaatgaatgaagcaaatataaatagatgagagggtagagcacctggcctgtgagctgctttcctgcccacctgtttcctttctttcttagctgtgggaatcactttaaccctgatggagcatctcatgggggcccccaggactctgaccggcaccgcggagacctgggcaatgtccgtgctgatgctgacggccgcgccatcttcagaatggaggatgagcagctgaaaggggtgggatgtaaattggcccccaccttgttttttggtgaagggagaagaataactggggcccgggaggggcatccttttttcccaaaaaaaccagggaaaattctcc

SEQ ID NO: 14505 - DNA, 1206 bp, Homo sapiens
aggaggagggttaagggtggctttagaggctcagtccccgcgacgccgcgctggttggtgctcctgcgccggaggagttctgcgtctcggggtggtgactgggtccagaatggcttcggattcggggaaccaggggaccctctgcacgttggagttcgcggtgcagatgacctgtcagagctgtgtggacgcggtgcgcaaatccctgcaaggggtggcaggtgtccaggatgtggaggtgcacttggaggaccagatggtcttggtacacaccactctacccagccaggaggtgcaggctctcctggaaggcacggggcggcaggcggtactcaagggcatgggcagcggccagttgcgtgagtgaccactgtggccttggcccctctcggagggaggtggctcagagctggtacaaatctaatcataggattctcaggctctgggttggagtggctttgaggaaggtgtgaaaattatgtgagactccctgcccttcccgagctgctgaagaggtgtgctgggtgaggtggcaagccagcccaagtgtctaataccttgcagagaatctgggggcagcagtggccatcctgggggggcctggcaccgtgcagggggtggtgcgcttcctacagctgacccctgagcgctgcctcatcgagggaactattgacggcctggagcctgggctgcatggactccacgtccatcagtacggggaccttacaaacaactgcaacaggtgagttgtctgaagtctccccagtagcattctcagctacacattttcacactgggccctcaccaatactctgtgaggcacatacacacaggcacaacctccagatgaggaaactgaggctcacagaggttaaatgacttgccaaaggtccacagcaggtaaaaggtagagttggggtttgagtcaagatctgaccttggctgggcacagtagctcacacctgtaatctagcactttgggaggctgaggtgggcggatcacctgaggtcaggagttcaagaccagcctggccaacatggtgaaaccccatctctactaacaatacaaaaaaaaattagccaggtgcagtggcatgtgcccataatcccagctactagggaggcccagtctttggagagctcagtacagggcaggagctgctgtggtgttcccttggcaaatgaaagttttattttcgtttggga

SEQ ID NO: 14506 - DNA, 931 bp, Homo sapiens
aggaggagggttaagggtggctttagaggctcagtccccgcgacgccgcgctggttggtgctcctgcgccggaggagttctgcgtctcggggtggtgactgggtccagaatggcttcggattcggggaaccaggggaccctctgcacgttggagttcgcggtgcagatgacctgtcagagctgtgtggacgcggtgcgcaaatccctgcaaggggtggcaggtgtccaggatgtggaggtgcacttggaggaccagatggtcttggtacacaccactctacccagccaggaggtgcaggctctcctggaaggcacggggcggcaggcggtactcaagggcatgggcagcggccagttgcgtgagtgaccactgtggccttggcccctctcggagggaggtggctcagagctggtacaaatctaatcataggattctcaggctctgggttggagtggctttgaggaaggtgtgaaaattatgtgagactccctgcccttcccgagctgctgaagaggtgtgctgggtgaggtggcaagccagcccaagtgtctaataccttgcagagaatctgggggcagcagtggccatcctgggggggcctggcaccgtgcagggggtggtgcgcttcctacagctgacccctgagcgctgcctcatcgagggaactattgacggcctggagcctgggctgcatggactccacgtccatcagtacggggaccttacaaacaactgcaacagctgtgggaatcactttaaccctgatggagcatctcatgggggcccccaggactctgaccggggcgagcactttccacttccagagggggccagagggactttgcctgcccagtctttggagagctcagtacagggcaggagctgctgtggtgttcccttggcaaatgaaagttttattttcgtttggga

SEQ ID NO: 14507 - DNA, 448 bp, Homo sapiens
agatggagaagataacgaggcatcaagttgacagaggctgggcagaaggtcccaccctcaggctgaattcactttcttcattactacccctgggcatgtttccagatcttccttcccccacttctagctccctttccagtttttagaatttgaagcatcaagtccttatcaggtgaacttcctgcttccagctggggagcaggccaggctgctgctctcacttctcattatgtacccctttccggcagtatacagcagaatgagaaattgaaagcaaaatgaatttctgccatttcagataagtttataatcttcctagtgaaatatgaagaaatatggagtttggaaagacttaatactcaaagccagaatctgggtcagaaatgaaacaatttcacatctgtgtgtgaatgctgtaggtaatgatgggggaaggtgcttatactga

SEQ ID NO: 14508 - DNA, 303 bp, Homo sapiens
tcatcctctgcctgacatctaatttcttaccctcttgatgagatgacaaattctagatcaggcaacccaggaatgctgtcatctggtaggatccttcatatgtatttatgtgattttatttggtaattgaatttgagaatttaaaatgctcttgatttcagatttacctaaaaaatcatcagggctgggcctggtggctcacgcctgtaatcccagcactttgggaggccaaggcgggaggatcgcttgagctcaggtgtttgagaccaggctgggcaacatagtgagaccctgtctgtctct

SEQ ID NO: 14509 - DNA, 454 bp, Homo sapiens
gtgcagtggtgtgatcttcgctcactgcagccttgacttcctgggcacaatcttccctcttcagccttcaaaatagctgggactacaggcatgcatcactacatctggctaatttttaaagttttgttatatagagacaaagtcttgctatcttgcttaggctggtcttgatctccttgtctcaagtgatcttcccttctgagcctcccaaagtgctgggattacaggtgtgagctgctgtacctgtctgctgctaatatattcctaatgcaggaatacttaaaaggggttctgtgtgataaggataggctgtcagtcctgcccaaatcacctggaagatgctgctgccctggactttcccggcttcaagtttggaaagactcaggccacctgttcaggttatactctatcttttggagtcactgccatctaacacattcataaggttactggt

SEQ ID NO: 14510 - DNA, 1711 bp, Homo sapiens
gaagaggagaagaggttgtgtgggacaagctgctcccgacagaaggatgtcgctgctgagcctgccctggctgggcctcagaccggtggcaatgtccccatggctactcctgctgctggttgtgggctcctggctactcgcccgcatcctggcttggacctatgccttctataacaactgccgccggctccagtgtttcccacagcccccaaaacggaactggttttggggtcacctgggcctgatcactcctacagaggagggcttgaaggactcgacccagatgtcggccacctattcccagggctttacggtatggctgggtcccatcatccccttcatcgttttatgccaccctgacaccatccggtctatcaccaatgcctcagctgccattgcacccaaggataatctcttcatcaggttcctgaagccctggctgggagaagggatactgctgagtggcggtgacaagtggagccgccaccgtcggatgctgacgcccgccttccatttcaacatcctgaagtcctatataacgatcttcaacaagagtgcaaacatcatgcttgacaagtggcagcacctggcctcagagggcagcagtcgtctggacatgtttgagcacatcagcctcatgaccttggacagtctacagaaatgcatcttcagctttgacagccattgtcaggagaggcccagtgaatatattgccaccatcttggagctcagtgcccttgtagagaaaagaagccagcatatcctccagcacatggactttctgtattacctctcccatgacgggcggcgcttccacagggcctgccgcctggtgcatgacttcacagacgctgtcatccgggagcggcgtcgcaccctccccactcagggtattgatgattttttcaaagacaaagccaagtccaagactttggatttcattgatgtgcttctgctgagcaaggatgaagatgggaaggcattgtcagatgaggatataagagcagaggctgacaccttcatgtttggaggccatgacaccacggccagtggcctctcctgggtcctgtacaaccttgcgaggcacccagaataccaggagcgctgccgacaggaggtgcaagagcttctgaaggaccgcgatcctaaagagattgaatgggacgacctggcccagctgcccttcctgaccatgtgcgtgaaggagagcctgaggttacatcccccagctcccttcatctcccgatgctgcacccaggacattgttctcccagatggccgagtcatccccaaaggcattacctgcctcatcgatattataggggtccatcacaacccaactgtgtggccggatcctgaggtctacgaccccttccgctttgacccagagaacagcaaggggaggtcacctctggcttttattcctttctccgcagggcccaggaactgcatcgggcaagcgtttcgccatggcggagatgaaagtggtcctggcgttgatgctgctgcacttccggttcctgccagaccacactgagccccgcaggaagctggaattgatcatgcgcgccgagggcgggctttggctgcgggtggagcccctgaatgtaggcttgcagtgactttctgacccatccacctgtttttttgcagattgtcatgaataaaacggtgctgtcacctctgcctgggcctcactgacagcctgcag

SEQ ID NO: 14511 - DNA, 975 bp, Homo sapiens
tgccgtcgattctgaggatcccaaacacatgaagcaatggactttctgtattacctctcccatgacgggcggcgcttccacagggcctgccgcctggtgcatgacttcacagacgctgtcatccgggagcggcgtcgcaccctccccactcagggtattgatgattttttcaaagacaaagccaagtccaagactttggatttcattgatgtgcttctgctgagcaaggatgaagatgggaaggcattgtcagatgaggatataagagcagaggctgacaccttcatgtttggaggccatgacaccacggccagtggcctctcctgggtcctgtacaaccttgcgaggcacccagaataccaggagcgctgccgacaggaggtgcaagagcttctgaaggaccgcgatcctaaagagattgaatgggacgacctggcccagctgcccttcctgaccatgtgcgtgaaggagagcctgaggttacatcccccagctcccttcatctcccgatgctgcacccaggacattgttctcccagatggccgagtcatccccaaaggcattacctgcctcatcgatattataggggtccatcacaacccaactgtgtggccggatcctgaggtctacgaccccttccgctttgacccagagaacagcaaggggaggtcacctctggcttttattcctttctccgcagggcccaggaactgcatcgggcaagcgtttcgccatggcggagatgaaagtggtcctggcgttgatgctgctgcacttccggttcctgccagaccacactgagccccgcaggaagctggaattgatcatgcgcgccgagggcgggctttggctgcgggtggagcccctgaatgtaggcttgcagtgactttctgacccatccacctgtttttttgcagattgtcatgaataaaacggtgctgtcacctctgcctgggcctcactgacagcctgcag

SEQ ID NO: 14512 - DNA, 2016 bp, Homo sapiens
gaagaggagaagaggttgtgtgggacaagctgctcccgacagaaggatgtcgctgctgagcctgccctggctgggcctcagaccggtggcaatgtccccatggctactcctgctgctggttgtgggctcctggctactcgcccgcatcctggcttggacctatgccttctataacaactgccgccggctccagtgtttcccacagcccccaaaacggaactggttttggggtcacctgggcctgatcactcctacagaggagggcttgaaggactcgacccagatgtcggccacctattcccagggctttacggtatggctgggtcccatcatccccttcatcgttttatgccaccctgacaccatccggtctatcaccaatgcctcagctgccattgcacccaaggataatctcttcatcaggttcctgaagccctggctgggagaagggatactgctgagtggcggtgacaagtggagccgccaccgtcggatgctgacgcccgccttccatttcaacatcctgaagtcctatataacgatcttcaacaagagtgcaaacatcatgcttgacaagtggcagcacctggcctcagagggcagcagtcgtctggacatgtttgagcacatcagcctcatgaccttggacagtctacagaaatgcatcttcagctttgacagccattgtcaggagaggcccagtgaatatattgccaccatcttggagctcagtgcccttgtagagaaaagaagccagcatatcctccagcacatggactttctgtattacctctcccatgacgggcggcgcttccacagggcctgccgcctggtgcatgacttcacagacgctgtcatccgggagcggcgtcgcaccctccccactcagggtattgatgattttttcaaagacaaagccaagtccaagactttggatttcattgatgtgcttctgctgagcaaggatgaagatgggaaggcattgtcagatgaggatataagagcagaggctgacaccttcatgtttggaggccatgacaccacggccagtggcctctcctgggtcctgtacaaccttgcgaggcacccagaataccaggagcgctgccgacaggaggtgcaagagcttctgaaggaccgcgatcctaaagagattgaatgggacgacctggcccagctgcccttcctgaccatgtgcgtgaaggagagcctgaggttacatcccccagctcccttcatctcccgatgctgcacccaggacattgttctcccagatggccgagtcatccccaaaggcattacctgcctcatcgatattataggggtccatcacaacccaactgtgtggccggatcctgaggtgctgccttccccattcaccaccaccacccccatcctctacttttgtgtgtgtgtgtgtgaattccaaggttcctagtggagggggcagggttttgatgaggaaaatccaacatcacctcaccccaaaacacacacaagtgtctctccaaggctgctggacataggaaatcccactggcaaaccttctttgtctcacctgcaggtctacgaccccttccgctttgacccagagaacagcaaggggaggtcacctctggcttttattcctttctccgcagggcccaggtaagagcgccctgtgtctgaggcagggatgggatgatgggtgcgggagttaaaaaaagggggacgttgcagatggtcccagttccagctctccttccctccattccttcacagtttatgggaaaacgtccatagaatggggatgagtaggtcctagaggggtccgcggagtgctcaaaatccccttctccatctgctggtctgagctgggagctggagtcaggcccagtctccgggacatacaagcccacatgggagtcccaggcacgcttagtctttctctctctctctcaggctgagctgggtgcagttgggggtcccaggccaggttcctgggttgatgggacccaaatgcgggtcttgggcaca

SEQ ID NO: 14513 - DNA, 239 bp, Homo sapiens
ggagttaggtgcctgccatattggtggaggtactaaagaagcaaacagtgctccagagttagctgccaagagaacttgttacaatgaagaagcagtagaagtagaaacttctgtcctaactgcttaattccaagatcacgtcatttgaggcaaaagttggaaaactgagaaactattgccacaactgttgtctcaagaactgtagagccaagcagtagctactaatctgcgccagcaaa

SEQ ID NO: 14514 - DNA, 1148 bp, Homo sapiens
accgacgccggttgctgccggagccgttagagggaggagacaaacgaaccgaggcgggagcggccacgggtgacagcggcagcggcggggccgggctgcgctcccgaaggcgttcctggagggccctgggatggactcagagatccccagagccccaggggacggaaaatctagccccgggcacttgccttggagtctgagtgatgcgcgtcgttggagcgcgaagccggtctccctagcctccgcccgacacagcgtctccaggggttttcctccttttcgcgcctctccttccctcttccccacaccatttgagagcctcaaatggtagtcctgccgccacctctctcccttcgccagcctgccatcgtccccatgggtgcagatatgcgctcccgaagccgcctgcctgccgcgtctgcctcgggcatcagcccacgagtggggagtcggctcagcttgccacgagggaacctcgggttaggaccaatcgcccgggagagagccctcctcgcccccgcacctcctgctccaagtctcctgtcctggttatcccaagttcagggcccacctggggtcacatggggaactacttgtcttaaggctgtaaacaatagttggaagaggagttgctagcttttgagaacttccatgatcatccaaagtctgaaacaaagtaggcggtcagcctttcaaaatacgtgttggaagaaacagacaccttcccatccccagcgtttgttcagtgccttggttgggctttgattctcactgctttgtgaagtacagcttatttttacccccaaaaaaaaaaaaaaaaaaaaaaaaaaaaaaaaaaaaaaaaaaaaaaaaaaacaaaaacaaaaaaaaaaaaaaaaaagagagaaacaaaaaacgaaaaacaacacaagagagaacaatgactcagacaaaagtggtgacccgcagtagagtgatcttctacataacaacactatagtatatgatatcccttcaactactagtcaacaaatctgtcacttactacttcacaaaacatgtaatatttatgaaataactattctaatacaaacttctctacaaaaacgacataatgcaaacaatatactttaaaatatataattaacaaaataactattagcaccatg

SEQ ID NO: 14515 - DNA, 798 bp, Homo sapiens
  misc_feature (13)..(13): n is a, c, g, or t
caagttttcggcncgagggggaggagacaaacgaaccgaggcgggagcggcccgcctgcctgccgcgtctgcctcgggcatcagcccacgagtggggagtcggctcagcttgccacgagggaacctcgggttaggaccaatcgcccgggagagagccctcctcgcccccgcacctcctgctccaagtctcctgtcctggttatcccaagttcagggcccacctggggtcacatggggaactacttgtcttaaggctgtaaacaatagttggaagaggagttgctagcttttgagaacttccatgatcatccaaagtctgaaacaaagtaggcggtcagcctttcaaaatacgtgttggaagaaacagacaccttcccatccccagcgtttgttcagtgccttggttgggctttgattctcactgctttgtgaagtacagcttatttttacccccaaaaaaaaaaaaaaaaaaaaaaaaaaaaaaaaaaaaaaaaaaaaaaaaaaacaaaaacaaaaaaaaaaaaaaaaaagagagaaacaaaaaacgaaaaacaacacaagagagaacaatgactcagacaaaagtggtgacccgcagtagagtgatcttctacataacaacactatagtatatgatatcccttcaactactagtcaacaaatctgtcacttactacttcacaaaacatgtaatatttatgaaataactattctaatacaaacttctctacaaaaacgacataatgcaaacaatatactttaaaatatataattaacaaaataactattagcaccatg

SEQ ID NO: 14516 - DNA, 541 bp, Homo sapiens
aggactcgaggctccgttgtcaggcctgttaaatccagatccgagtcctgcccggaacatctgactctgaccctcccaggtcagcctgagaatctgcatctgtaacaagttccctggtctgctgctgcaggagtgaggcaccccaccctcaggggactcggatggtggtgagggggaagagttgaggtctccgtgtcagccctggagccaaggctaggcccagggtcagactcagctgggtggccttgggtcagttcctcaccctctctggacctcttggaccgggattaatagcatagccgcatcgtgaggcgcatgtgacaggggtgcttcttagccaggagagagggcaccttctcaggtaggatctgacgctgtcacctctcagctgctgcctttctgctgtgaccagcggtggggtccccttagggctcacctcaagacttgacacacgccaggcaggggctgggtcgggatccctgcaggagcggagaagcgggggatcaggggcactgctgagggcagttctgtggccaacaca

SEQ ID NO: 14517 - DNA, 336 bp, Homo sapiens
aagcagcaagcagtcctagtgcaggggcctgctgggctagctgtgggcctgagcgtgtttcttcagctctgagtggagaagactcttctgtgaatgggctgcctgggtttccccctctgtggtttgcatcttgtcctctcccttgggctgtagctgcccagcctttcattccagttttcctcctgccttttgcgcagaggttgttctgggcacagagccctggctggggcccctgtggtagagcagaccttggttgaaacagtgaagaagggaaagcttgcctgctaccccctgccacctcagtccatacctttccagtgcctggggcttgctgtg

SEQ ID NO: 14518 - DNA, 5668 bp, Homo sapiens
  misc_feature (1)..(2): n is a, c, g, or t
nnataaactctaaggaagacagtgatggagtgaagtgggctgggggcgatagagaggatggggtggggcaccaggcgagagatgcgaaggaagccagaacgaaaagagagcgaccgaggagagaagagagcagagcaatacaaaagcagcctcggatctagccggagctgcaagcgttaaggggaggcggagagtgacgcggtttgcgtctggagcggctccttggagtccacagcatccaccgccggagcctcgccttcctttctccctctgcagacacaacgagacacaaaaagagaggcaacccctagaccaccgcgaaggacccatctgcaccatgaccgagaccaccaagacccacgttatcttgctcgcctgcggcagcttcaatcccatcaccaaagggcacattcagatgtttgaaagagccagggattatctgcacaaaactggaaggtttattgtgattggcgggattgtctcccctgtccacgactcctatggaaaacagggcctcgtgtcaagccggcaccgtctcatcatgtgtcagctggccgtccagaattctgattggatcagggtggacccttgggagtgctaccaggacacctggcagacgacctgcagcgtgttggaacaccaccgggacctcatgaagagggtgactggctgcatcctctccaatgtcaacacaccttccatgacacctgtgatcggacagccacaaaacgagaccccccagcccatttaccagaacagcaacgtggccaccaagcccactgcagccaagatcttggggaaggtgggagaaagcctcagccggatctgctgtgtccgcccgccggtggagcgtttcacctttgtagatgagaatgccaatctgggcacggtgatgcggtatgaagagattgagctacggatcctgctgctgtgtggtagtgacctgctggagtccttctgcatcccagggctctggaacgaggcagatatggaggtgattgttggtgactttgggattgtggtggtgccccgggatgcagccgacacagaccgaatcatgaatcactcctcaatactccgcaaatacaaaaacaacatcatggtggtgaaggatgacatcaaccatcccatgtctgttgtcagctcaaccaagagcaggctggccctgcagcatggggacggccatgttgtggattacctgtcccagccggtcatcgactacatcctcaaaagccagctgtacatcaatgcctccggctagcagcccctcgtcctccggcaacacaatggcccctccatctttgtcagccccctgtttctctcctgcctctctgtttctccatctcctcgtcttgactgttttccctacttgctgacttaaccccccatagtgtgggggacctgcagagaaccatggcattccctattccacagtcatctttggacagactttcctctagtctccgggttgggggtgggtgagggaatggggtgggagtcgggggaagtgcagtccttggagatgtactggtgtccgtctcccagcatgctctagagaggcggctctggtgcccatcctcccagcacgctctggggaggcggctctggtgcccatcctcccagcatgctctagagaggcggctctggtgcccctcctcccagcatgctctggggaggcggctctggctcttgccttcccagcatgccctttactacaaagggctatttttcttttctttcttttgtttatttatttttctttgttcactccctgtagaacttggatgaaatcagtgtccatggttctttatgtttgtagtcttgatgtgctcctgtggtattacttcccctctgataggacattgtagccagcctcagcactcagtgagttcatcagggccacacccagtagagaaggccaagcaacctccacttcttcagcaccacacacacgcacacacacacacacgcacacatgcgtgtgcacccgcgcacgcacatacacacacacatatagcagtagcagcagcagcagcagcagcagcaacctttgatcaggagtgagattttcgggttctgaaacctgggacacgagtctgtgaatagtcggttttctcagaataatttgaatctgttttcttagtttcaaatgaccatttccctgatgctctgagcttatgatcacacagagccagtccatcctcatttcctggtggcatctgttcatttacctttgtggactgtagctgatggcacagtgcgggttccctaccagccaggggtttccaagggacctttggaggccatgcttagacacattcctgtacctgagaacaaccacataggcaggaccagatccacatcgtgcagtcgtgtcataaaaaaacaaaacaaaacaaaaaaacactaggagtccactcaaccctggaggtctttgctaattggaattatgtattgtctgttgggctgggaaatgtctctttcatattgtaagtccaggatgaactaggagaaagcaatttgttgccctgatgataactgatgattttcaccctctctagctgaggtaactcagacagtgcatgaggtcagtttcttcttgagaagcagtgccttggtcttgtttctgtggttggttctagcccctgcagagcctgggagctgcaggaactgtctgagaaaatctccctaataggggagtgggttcccagaagggagatctgggaggggtcaggagccactaagttgcttcactccttttttctctaattttctaccttcctctctgttcctgcagacagttttgccagctttgcttctggttactagggtctcatgcgtgtcctgcttggagagccataaggaaattgctgtcttgtgctttgtgtctctcatccagtctctggctcttgggattctggtctttgagaaatagtccctgagtattaggatacttttatcaaaatctagtaccagctacggccagaaagggccaggtgggacctgaaagcaaagacaatgttctttaccacacgtttcacatctgcaacatccttcaattgcgggaaaaggaacttgatttaacagaagaacatggtagagcagcatccagaaagtctgttattcctcttggattttttgaaataatcttcagaggaaggaaggaaaatcctattttggggtatcagtgtttgactagggatcatgaaataataaactgaaaaaaactttagagttcagttgatccaacactttcctttaaaagttgagggagcagaggcccatgggattaaatggctggtccaggtcagccagcaggtgtagggcctgacaagaacatattgtttccctgacccctaggccgtcacaccacaccctccatttcctcatgttgctgaccaggtgcccatatgatttctacacttcccaagccttaccctggcatctttcttttaaattatatctgtcccaggtgctctccacacataggatggtaatgccagtcccaggggagggtgtgatagtaaggaaggccactgttaggtttcctttagaaataaagagatctcagcagcttggaagaaatcccagaagcggaactccatcaatccaagaaagagttgctttgtggaaggtgaaggaagacccacagagtgctcaggatgatgctattgctggagagcgaaagatggaacagccttgtccaggcagaacagtcataagccaggaaatgaaacaaaggaaaacaggtgcctgaatttcctggggaaacatggcttgtttaaggacttggagttatggatggaatttatgggacccacgtgagcagacctgaggaaggctcgatttcttttgtttcttggtccactctgtcactctgctctggtcaagccccatttggtctacagcccatgagaaggaatgaggctggttctgcactctcagcatgcagtccgaaagcatgtgggagtggggagggaaagtgagatgaattaagacaaagaacaggtgccatagaagtagatttctaggaatgaagtggggcagatcttatctttgtggattacaggcactgtactaaaaacaggtttcctatttaatataaaaagaaagtgaatcttcttttggatagaatcatccattcccatcgccgcaccccctaccccccaaacacacacacacacacacacacacacacacacacacacacacacacacacacgccctactcttcatttgctaggggaaggtcacagcacaactaaatccaggacaggacattgtgaccatgacccagccacagtcaataccagaaagatgattcagagtctgaagtggtgccccaggtgccaacaggataacctctaccccccgactttgtctctggggtcctgttccttcctgcaaagcccaatccaagactggcatggctcagaggttgtgagaaaggcatggactggaacaatcatgtccagaggggtctggagctttgtttcctgttcaccagcaaaaaatgtctctcccatttttctgaaagtggctgatgtaagaacaggcagaaggaaaaccctttttgtcaataactctgtccttaaggaatggtcctctgggagggctgtgctgctagtgggtacctcagtcacacacccccaaccccaggcagcctctagagccttcttgctttcattttccttgaatgtacataggaacaagggggaaagtctcttactgaagtgcctgaaacccaaagctagagcttctagagacgccgttcttcctgtctcagcttggccagcctttcaacaatgttctctagtttcaagctccagcttctcagaaagaattaaagaacttgctgttcaaattaagtagaaagtgagactcaataataactgaactacagcaaaaggcagagaattacagggagaaaaaacttgtacttaccagcccaattctactctcctcaaactgacacacacacacacacacacacacacacacacacacacacacacacactcttttaggggactaagagagagaagcatgttattacattttactcatccaaacagtaatgcaaaaataaaacggtagaatatgaaaagctcaggatctctcccaaggctacctactgcaggagggccaacaggtgagatgggaagaatggaaacagggaccgattttgtagctcatacaattaggacaccttaggaatagcattgtagtaatggtgatgaatatgctctgccaaattcatccagtctgcaccatcttatagctgcccagcacactcgactgttcatgtggtctctttgtagtgtgagtttggagtgtcctattagcctgttctggttaggaatgagttaacggctctttccctcaaccttagtctagtcccagggctgaggattcagctggatccacatggtcttgagggttggcatgaggagggggaagcttttttgaatcgctttttgatcacataatctgccattttaagagtaagatttgctttatggaaatcaattcattaataaaaaatgatattcaagttgcaataccatttcacagtgaaatattttgagtacaattttgttgctagaatagtcatgggcaagagttttatgcaaaatgtttcaattatgttaataaataagacaatgct

SEQ ID NO: 14519 - DNA, 1058 bp, Homo sapiens
aaggcacaacgagggatgagctgcaccactttgtgttactctctgatggccagcacagggctgcaagtagtggctgcaaaaaccagacaaatagatggaaatccaggaactagaggaaattcaggcctgccaggggctctgggaagtgttgttactctctcagaaagagccagggattatctgcacaaaactggaaggtttattgtgattggcgggattgtctcccctgtccacgactcctatggaaaacagggcctcgtgtcaagccggcaccgtctcatcatgtgtcagctggccgtccagaattctgattggatcagggtggacccttgggagtgctaccaggacacctggcagacgacctgcagcgtgttggaacaccaccgggacctcatgaagagggtgactggctgcatcctctccaatgtcaacacaccttccatgacacctgtgatcggacagccacaaaacgagaccccccagcccatttaccagaacagcaacgtggccaccaagcccactgcagccaagatcttggggaaggtgggagaaagcctcagccggatctgctgtgtccgcccgccggtggagcgtttcacctttgtagatgagaatgccaatctgggcacggtgatgcggtatgaagagattgagctacggatcctgctgctgtgtggtagtgacctgctggagtccttctgcatcccagggctctggaacgaggcagatgtgagtagcaaggttattgcctggcacccagctgggactgggagggatgggaagtgtgcatttgattttggcctcctgtcttcacttcttctgagcttctaagagggcagtccgttcacatcactatggtagaaaattctcacctacccccaagctttatctcctactgcatttttacacttactcctcctcaagcttgctccagtaaagcccctgggaaaaaagcaagctgagtcatacagtatctagcaccaaatagtgctggggtatgcatgtgttgccgatggggagaaggaagggagaaaaaaaaatctttgcccttttaagat

SEQ ID NO: 14520 - DNA, 279 bp, Homo sapiens
atctgtgcccctctcccacatcccaaatagctgtcagtgtcaggagtggtacaaggtgagagggggaagggggaggaggacaggagtagaaatgaggtgcttcagaatttccccatcgtaaccagagggcagtttggtagcaggggaagtgtgggtatctagaatcagactcctttatcagggcatggtggcacacgcctgtagtcccagctacttgggaggctgaggtgggaggattgcttgagcctaggaaatagaggctacagtgactgtgatcac

SEQ ID NO: 14521 - DNA, 426 bp, Homo sapiens
atgactgtatgcatgttctgagatatacacacacccattaaagctattgatcttgtgttttacctttatgtgacactttacctttaaagttctctttgtgtgcatgtgtacaggggttgggaagaagcagttcagtatcatttaataagggggagaaacccaaccccaagatacttgatgaaatctaaggaatacagtctaagtaacacctacctgctcctcccaccaatataagaagagctaaaatcattaatgcatgtatgtataggaaaataatgaaagacaaatatggcaaaatgaggtcagttcaaaggatttatctgtgtgctaagagatgagatagaggctagtggcatgagaaaagcaaaaatggaaataagaggaaaatgaataggtagaactgagggcaatgacctggctcattgg

SEQ ID NO: 14522 - DNA, 444 bp, Homo sapiens
atccccatggcacataatacatttcccgttttcacagacagccacaggtcatgaatgcgagaatactgagaggttggagcaatgttcctgggattcataagggggagcaaatgctccaagatacacccatcgcgggttactcaccacctttgcctcttactccattgttttctgactcctctgcgaatacatagagtaagggggctggcctgggaatggtgtcatgttggatgccatttcttccctgaagaaatatattttgattccaatttacatgttactgtagagtcctaaagaaggatataaagaagtagacagatatcaatatattatatatttttatgtgcattaataaaatctaagatgcacacttaaaaaatccacatcagttttctggaggaatgcagttggcagaaggagaaacatattctgatctttttccct

SEQ ID NO: 14523 - DNA, 613 bp, Homo sapiens
acttttttgatatgggcattgaatactgtaaatttctctcttagcactgcttttgttatatgccacaggctttggtatgctgtactttttttcatttcaaaaagtttttaaatttctgtctgaatttctttgttaacctactgattggtcaggctctctgctcttcttgcacaaagaactgggagggactctctggaatttccctatctaagaaagtttaaatgcacttaagaccccctacctagggatctcacaaaataaccaggaaaaatcaaccatctgagaagagaagagactgggagttctcactgcacccagatagacttttcatctagtcttctgagggcagctttaagagattacctgttggactttatctgtataagacaactttagttcctgtgtagttccacccctcactttcctcctgggtccattcatcctccctaatgatttactgtccctcaaaagaattgcctacatcccccatctcttccttatgaaaaagggtatataaatgtctgtaccatgctgggtaattgggtaatcatgatgtgattttcctccatgcatgttaataaatctgtatgccttttcccctattaaacttcct

SEQ ID NO: 14524 - DNA, 319 bp, Homo sapiens
ttctgagagtgagcaaattgtcttgcttatgcacagcagtcttcacaacacatgacatttcagggaaacttcaaaggagtagcagagacagcagcccgagatgtggtttacatattggggagacaattgggagcttatttgcgcttatcttttttcaagttaaaaggcatgacatctactgaaaacagttcctgaggtttaaaagtatacatctgaaaagagatggaatactttgtctaaattctacatttgtcttaatatgcagttacatgttgtcagtttacccacccgcaatgattgctagcacatggcgcaatct

SEQ ID NO: 14525 - DNA, 1541 bp, Homo sapiens
cctaaaaatctgggcaagtggtgtcctaattagttactgagttaaaacaagttcatgaatttaggccttttgggaaagaaagagaatgtaagatttaacctgtaaatgttaagaatagaaccaaagagagggccacagaccattagttgttaagaggtatcaatcttaacagcatattttctcttgtgcaatgaaaagaacaatcgtagctcttttgggcatcttaggtcttttattctttctggatggcttacatcgaatccttgtgatttatttaaagacacatttttcctggagaggagaaagatcttctctaaaatagccttaacactgagaacatattaggcctaattttaaaagtccaattcagataactcctcagaagtaaatgcagcacactaaaattcattatcacaaaacttaatatttgttaatatgtttcctctgtgctaaaaggctgctgctaaccatggtagttagggaggaagagaaagtaaaagacattagtgttcaaaacttacatctttgggggtaaacaagacatatagtacatttaactcctagggaacttagaatatttatggtaggatagaaagagatgattgtggacacacacaagtaccccaaaaggccattatggtctagaataggtttcatagagaggattactaccacctgtgattatatggtatatgaaacatgagattttgtaacctggacattgcttttagctctgttggaaatggtcagtagagcaatttctgaatattttgatggtacggtgttgatggcatcagtccttttctgtggctttcagcccaacttaatacaagaggagttaaaaatagcacccaaaaggggtagctagagcaccctcaccatgcactaaagataaatctaaaaggtgttcaagtacattgaatcaagatgagtaatccaacttctatgttatgtaggatggatggagcacacaaattcttgcaaacattgtagaggtttttttaaacttcatccactaaggatttttttataataattacttttgaaaataaaatctcaactattttccaagttatgagtgtgctgctcttaaccctgtgagatgaaatcttcccatttggattacatatttgtagttctatatcgacatcagcagatggcaatagtatacaaatagtatacagcatgagccttccattgcttttatttctttgtttataagtatactataatccttcatctgaaacccttagggttttagaattcagaattttccccttttcagagagaatatatataatgtagattacataacaccctcaatggggcctggggcaacaccccataatcaaacattagtacattcatagtaactgggattaactatgtaaggcagtaagctacctgccttacatagtttaggtcaatttttgtcacaaacttatggaaaaactaggtttttagaaattttttggatctcagaattcgtgattagggattgctgacctctgtaaggaaactggtgtcaggtctagaatttt

SEQ ID NO: 14526 - DNA, 1230 bp, Homo sapiens
cttttattttatgcaagaagacacccctctcaagacattgaaatcaacagtaaaaccacattataacaaaaatttactctgatttttcaagtattatccacacaatagattttaatacttgtatccatggattgtaactaaccaccatgtattactaaggcgataatgagaagtaacttggcaatctgtacccaaaatgacaaagaacttagtcaaggaaatagacctttaaaagggttaaattactaagctatgattagtaacaccacgtaagcaaaaacaaagaaaaactggcatgcatggtagttcctttcgacacaagtccaagcaatacactgaatacacatgtgatctatttataaatcaaagggcagaggtactttcttaaggccactgatattcctacacccatcaacaatttgctattagccctcagctataatgctaaaagaagcagtggcagtagaagggggtgactaactgaactcttccccaaccttttagcttaactatttatctggtttgctgcctagagataaatggaaaacattactctaaaatacatcaaggtctatttgttcctttaaatactattggttttgaaatagcttattgtctacatgtaagaattaagcaaagacttcggctgtggacaagattagaaaaagaaaaagaagcaaagatgttgaaaacaaagacgtacattgatcattccttaatgcagtaatgtgttaaaaggaaaagatttttaaaccattaagcgcaggaaaacagtaggaaagtgacttcaaaatggaaaatttgacattcagtgactgaagcattggtatgataatttctaacacttgtagaaggtccatgactgtaattttaccaatgaaaagcatttaactgttttggattccaaactagcagcactacaatgctttgctagagctggtaaaatggaaccaaatcgcctcttcaatggatttggtccccttcaaccagctgtagctatgcattgattactacgggacaaccaacgttttcatttgtgaatatcaattacttgccaactaatttcaacttatttacattatgcagactgtgattataatcaaataacttgttactgttaattctacctggaaaagctagaatggttaaagatgtttataaaaagctttatgaaaaatgtatggatgacttaaggatttcaaataaaaattttacttattatggtctctt

SEQ ID NO: 14527 - DNA, 351 bp, Homo sapiens
tatgcatcctatcttctagtgcatttgtttgtgtatttgtgctgtcttccctagtagattgtgagctccttgagggcagggactgtgtctgtttcctctctgtatctctagggactcataccatgttttacacacagtcggcactcagtgtctgttaatgtgaatggaattaagtccctggaggagaaaatataaatgtgtcatcttttctcagtgagaaaacaaaacttccaaagtccatgatgcaatactgacctttttttttttccaaatcttaccctgacattccaggtttgtttcgaaaaattctgggaaaaacttatgtatggaaagaaaataaatttctcattg

SEQ ID NO: 14528 - DNA, 239 bp, Homo sapiens
ggtatgcagcatcagtgtcctctaagccatttccttgcctggtgtctgttcacctaagaccctcattagtgcacataggactccgaaagactgtgagcttgaggctcagcctaattgtgcccacaccaggaccttgggtgtatgtggggagaagcacctctctgttggcagcactccccttccactgggggtcctggcttggtgcatcctggtccttgtaaccagctcagatcactgag

SEQ ID NO: 14529 - DNA, 306 bp, Homo sapiens
gattgaagtaagtataaatatagctagtaatataggctcacctaacttgatatgaaaacgtctttggataataagtggattcctatctaaattcatgagttctcttatgacatttgggttaagcctgaaatggattaatctttttctgataaagtttcataagctgtgatttctctggtgaccacatttaattagatattaaataaactgcttatctttataccaacaggttttatgactgcattttttttctgagctgtatttcctagattaaatagctagcagaagtaaaaaaaataaataaaa

SEQ ID NO: 14530 - DNA, 460 bp, Homo sapiens
tctgagacagggtctcactttgtcacccaggctggagtgcagtgtgatcttggctcactgcagccttaacctccttgggctcaggtgatctccctcctcagcttcccaagtagctgggaatacaggcatgtactatcaagcatggttaattttgtaatttttgtagagatagggtgtccctatgttgcccaggctgggctcaaactcctaagctcaagcgatcctcccaaagtgctggaattacaggtgtgagccatggcgcttggcctgtaataattttttagtacaagttaagtcaccccttattttcaggctcctccttattcttaaagacattctggggaggtccttgtgtttgttatactatctaaactccaggaagagttagtatgtgaataccaggggttattaatataataacactagcacctggataaaatctagtacaggaatagtatcc

SEQ ID NO: 14531 - DNA, 353 bp, Homo sapiens
tctaaatatcagcatgtaataaaaaccaatttatgtgaagaaacatttgtaaacataatatttaaaatctgttttgtttttataaccaaaagtgggatagtttataaatgaaatgacgtaacacttggtatgaaagttttgcttcacaaccaaaatagcaggacttggaacaatttaaaaagttgtgctgaagattagatatttgctcaagagtataaatgatctgcttcttcataggtataatggacagtgggaccttggccaggaagttcttgatgatatcatttatagagcccagctagagcttttttctcaaccactattggtaagttattatcttaactctttattaa

SEQ ID NO: 14532 - DNA, 504 bp, Homo sapiens
ctctccagatgtgtagcgtctgtttcaccacagaacaaggggtttgctgctgcagcagtcctgagcccttgatttaggatgggcagagcactagagctctgctggagaggctatacattttgacagccagagccatctccatggttttcatcagtcatggccctcattttgcattgtgatatgtgagagagaagcggaactaatgaccacacgctctaatgggggattgtacagatacagctgcgggccttttgtatggttggctaagattttagagtctcttgtcttgccccagggattgtgcttctgttgagattcgcagaaagataacctaaagaatcaggagctgtcatttaggaaaagttctacagacaaatgacttattatttggacattttttcatatttttcctctgttataattaacgtttatagaaattttgactgcctgaggttaattatacgtaggtgtgtacatgtagatacaaatgtgtatatataaata

SEQ ID NO: 14533 - DNA, 874 bp, Homo sapiens
attgtattacatagtagtaaggtatgttaatagtataatagtactatagatagtacaatataatacagcaacagtataatatagttagtaaggtattatgtatcaccaagattttttttcattggaaaggtgtaaaagacaaatgggtggtggaggcaggggagtcttttgtccaaccaaagtcagttaaaggagagagagtgagagagagagcctgagttatagagcaggataatctgagtttggacttctcgctgagaatgcttggcatgaaacagtagggatgagccttcttcaccatgactgtctttaggggaatccactaggctgctttaatgctgctctttatgcttctctatttataatgaagtgctgtgagaccctgtagcagagatagtattgttttttgtttcaatatcaactggtactttttctctacaatgaaaaatgttttgtccataatatatatcacctcgtctctggttttattgttgaaaaccacctgacttgcgctccttttcttttcaacattttttattaagaaaatatttggaaggaagcaataatactaaattgcagaattacaaaagggcagcttatacagctaaattttaagatactctgagggacaaagaaataaagccactgatgctgggtaagaaaaatgtgtgacaatggaagtatgcaatgtgatttacttggctggctaccatgtaggaggaataaattctataatcttgccaaaacctaagggaaatgtgaattgaatagcaataaataaccttattggaaacagttgaatgtgatatactgtatcctctagccttaatacatgaaaatttctcattgattgcagcatcagactcaagtagac

SEQ ID NO: 14534 - DNA, 467 bp, Homo sapiens
gaggacgaggcaggaggattgcttgaggccaggagtttgagaccagcctgggcaacagagtgagacccctctctacaaaaacaaacaacatttatgcagcatactagccagcaccagcatcacaaacccagaagctgttttgggttggcttgtagctactacgaggagctcccccagggtgaatgtcaatcctgtccttggccaactgtctttatggttgttcctttccttacaagtgtccaggttcagtcttgtgatagagtggcaacataatgtatgtttctatttatggtgtctcagatacagtgtaggagaaaaccttctgaagtgagtctgtatatcttatttcttagaaacacaaatggagtccagtgaataagtgcttaaagggtgttttatagtcttctctcactcaaaagttttgtttaaggcattatgatacattcactctgtacttgccgcacccc

SEQ ID NO: 14535 - DNA, 525 bp, Homo sapiens
cctcactcagctggttacagtgctgggctcaaacccctcattcagaccttgaatgggcagcttacttttctcatttctaggccatataccaccccaaacccctttgttacttttcaaaacatgatatccaagggatatctggccaggggaactctatattcctctttgttgttaaagtagctcagaggaagtagctttactgcaccgttctgaacaaatcagtcatgttaaaacataatgtatggctaatactctggggagtggaatcgaggagggcctggagtgtgtcactttatacttctgtattgtttcagttacttacaatgaatgtttattactttcaaaattaaagaaaaataaatttaaaatactgtgagaaataattggctgctggtccagtatatttcttgctcatattatggtatttttaaaaacctatttttccctaaaatgaattactgtaataatcatagcaaatgccatcctgttaataaaagaaatgattgataatctattcaagaaaat

SEQ ID NO: 14536 - DNA, 1265 bp, Homo sapiens
ctacatggcagttaccagagacacctgactatatatacatgctgtgctttgaaaatctggcttggactaatctaaatgactacctaagaacatttgaatattccctgaagttttattaattgtgagaaagcccttatctttctgtaatgtgaacaatccaaaatgtcaacaaaatgctaatttggaatggctgtccttgacaatctcagcttcctgagggctgcatgctcaggggctgggagtcgtctgtgtagagtcgatggagaccctggctctcttgcacttctgattatcatgggaagcctcgccttggaaatgtgggactggagttgagctgaaaagaaggaaaaactttacctagactctgcagggagcaagttgaaaagcagagaatgggtatattaattatggggtttttgaaaacagcactaagtacttttcagaaaaacttattttgaaataattatggattcataggaaattgcaaaacagtaccgagaaatcccatgtacttaatttactcagtttcctccatttttatgtaactttagttaaatatcaaaccaggatattgatattggtacaatccacagactttattcagatttcattagttttacatgcatgtgtgtggtgtatgtgtgacatttgtgtgtatgtgtgtgtgtgtgtggtgggtcctcggcaattttatcatgtgtagatttgtgtaaccgtcatcagaaccaaggttacagaagagtttcatcaccacaggtttccttaacgctatgccctttctatcatacccttcccacacctccctgcacttccctaaccccttgcaatgaatttgttctccatctctataaatttaccatcttgagaatgctatataaatggaatcatatattatattatctttggggattttttaaaacttagtatccatgaaattgtttcatgtatcaatggtttgtctcttttttattgatgagtagtattccacagtatggatgtaccagagttggtttaaccatttacacactgaaggatatttggattgtttcaagttttttatttattttattttattttttattttttttactattacaaataaagctactatgaacattcagatttttgtgtcgacataaatataaatttttatttctgtgggatagatacccaggaatgtgattcatagattgcatggtaagtggatgtctactttttcaagaaactaccaaaagacccttactattattcttctaaaacttatt

SEQ ID NO: 14537 - DNA, 324 bp, Homo sapiens
ggtctttggggaggggggcgggatccagcctttgttttgttgtgttggggtgggggtgttgtttttctaaaagctacctcttatgtttgtccagttgttcttttgttcctttcccgcctcccattctgctgctcttcctccctcttttccccaacctcccccgaccctcctgaattttggaaagcacatttgcaatattcgtgtttgctttgggacggaccctccgtttcatctcatgctttatgtgtaagagttttttattattattttttctttcctttctctctctgagaaagttgtggctgcgttttgatcttaggtttt

SEQ ID NO: 14538 - DNA, 170 bp, Homo sapiens
gtaccttttcttaacatgttttaaaaataaaaatacaatggcttatttaaaatgtccctatgcatggtgaaatgttaaataccaagtggatgaatggttctcaaatatattgtaatggagaattattcacatgcatctattgtttaaactaataagtaaaatagacttcc

SEQ ID NO: 14539 - DNA, 373 bp, Homo sapiens
gcacagggtaaaacaaacccccatagaaacctcataaccttgacaaagaaaaaaatcatgcttgccttaatagcaaactattgataaaagatttattctccttgagagaaataattaaaaggaggtagaagtcaaatgggagctgggaaagtaactgaaataggtgctgtaaaacctggggaagaccaacagaaaagatgagagaatagcaactcccaggggcatggattgttcatactttgcaatgttagaaaatgtttggctgccacggtggttctgtttagttctggactatgaatctggtgaaaattgtgcaaatggttcatcatgtaagatgcttaataaagatggtgatgctttgcatcctcttaat

SEQ ID NO: 14540 - DNA, 523 bp, Homo sapiens
cgaccaggatgaagaaacttcaggcggagtcccaggagagcagcgcgggatcccagcctcagcctgcccagacggagaggtgcagaccgacctccaagaagatggttctaactcctcccgccctctcttcccattgagaaatggagccccaccgcgacacaggcttggagaagaagtcgagaacgggatgtggcaaggatctctgtcactccaacgctggcctttctggccaagtcacccgtttggcactccttcccggaagcccatggcggtggcattgtgctgtatcccgcctgggctctgacctctacactgtcctccctcttgctctgtctgccatgtttctgacgggcctggatgcttcttggtctggctcagtgtcttccacagagaacacttttgagtccatcagggagaaactgtgtggaaatccatttcgtgaatgttgtcatcataaatcatcaaaatgtcatctgatagaacatatttttctaagttaatttacttatgagacatttacaag

SEQ ID NO: 14541 - DNA, 1476 bp, Homo sapiens
  misc_feature (332)..(332): n is a, c, g, or t
  misc_feature (705)..(705): n is a, c, g, or t
  misc_feature (837)..(837): n is a, c, g, or t
  misc_feature (1127)..(1127): n is a, c, g, or t
  misc_feature (1161)..(1161): n is a, c, g, or t
  misc_feature (1238)..(1238): n is a, c, g, or t
caagaaccagcagttgcaagtggccatttctgatgaaaatactggttgctaaaacttagtctagttctgatgtgtttaaaatccattttttaaaaaaaaaatcctgtttgtgaatcggtgtaaaaatatagtctttccttctaagtgagaggcaagaggtcaggtgaatatggcagatgaggcaaaactctgcagcccaatttgttcaacttttgaagccttaggttgtgcagcatgtggtcaggcgtggtcatggagaagaattgggccctttctgtcgaccagtgctggctgcaggtgttgcaggtttcagtggatgtcatcgatttccngagcatacttctcagttgtcatgggttcgccaggattcagaaagctgtagtggatcagaccggcagcagagaccaccgtgatctttttttggtgcaagtttggctttgggaagtgctttggagcttcttctcagtccaaccactgagctggtcatcactcgttgtcatataaaatccactcttcgtcgcatgtcacagtctgatcgagaaacgattcattgttgttgcatagaataagagaagaccacacctcaaaacagcaattttaaaaaaatttttgctcaactcatgaggcatccacttatcgagcttttttactgttccaatttgcttcaaatgtcgaactactgtagaatggttatcgctgagttcnttggcaacttctcatatagttgtaagaggatcagcttcaatgattgctctcaattggtcattgtcaacttatgcttctcatcttcaaggctctcttctcttttgcagaacttcttagaccactgctgcactntatgttcattagcagttcctgggccaaatgcattgttgatgttgtgagttatatctgccgttttacaacccattttggactcaaataagaaaattgcttgaatttgctttttgtctaacatcatttccatagtctaaaataaatataaaataaacagcaagtactaagtcattagcaaaaacacaaagtgagaaatgtgcattaaaatgatgtgtaacataaccatatttattgaagaatgcattcccacatcattgttgcaaatatgaacagtgcaaaaactgcagttncttttgcaccaacctatttgcatcaacaattttncctaactggtccatgttaagaaatgtgtgtgggccgggtgcagtggctcatgcctataatgtcagcactttgggagnccaaggcaggtggatcccttaggtcaggagttggagaccagcctggccaacatggtgaatctccatctctactaaaaatacaacaattagccagacatggtggcacgcatctgtaatcccagctacttgggaggctgaggcaggagaatcacttgaatccgggaggcagaatttacagttagctgggcgccattgtactccagcctcagtgacaagggaaagctccaaaaaaaaaaaa

SEQ ID NO: 14542 - DNA, 436 bp, Homo sapiens
ctgatgatttcaagtaggtaaagaatagggatgttaaatctcctataatacacacgacagcctctcacaacaaaaaattatttgacccagaatgtcagtagtgctaaggtggaaaaaaccttatgtgaatcaattaaatcagggagaacttcagagcttttttaagacctttatttatatctagatgattgatattttttaggtattcatgaaaatactttcttttacctttcttgtggtaagcacaagataacactttcttgcctggttaaaaatggacaactgctacacttttaaaataatataaagcattcagtaattcaaaccatcctgtcttctgatttgtctgaattagtgtggctttactgcattttcagggcttattattctttcagtagggagactactaagatttcattaaagatagctgaataaa

SEQ ID NO: 14543 - DNA, 156 bp, Homo sapiens
ttacatgctgccactctaaataccccagtacattgttatttgggcagtagatactttatttgtgtgatgacctgtagtatgtcagattttaggagagcaaactccagtgtgaaacagaacagctgttgttctgtacattccaatgatggctgatgc

SEQ ID NO: 14544 - DNA, 941 bp, Homo sapiens
taataataataataataataatagactgactcaaatctaccataaagcacctctactcattttggaatatgtacgtggaattttgcttcaatagctgaaatctaaaaacactctttctgttgcatttgattattcaatcatgataaggtaaatgtaaacagactgtgtagcactctatcacctggagtgaacttagaatttacagcttagagtacatgactaaaagaggaatggagtggaagtgggcagtaggtgtctttggggcaaaaattctataaactggtgttatctaaactatcacattactttgttaaattattgtttcatcacgtatgacctttgtgatttgtcacacattttacttctacatatgcacataattgtaatttttttaactttaaaaagtcaattatgtttaagaaaatttttaaaataagaatgaacgtatgtgatatttactgtgatatttactcgtgtatttacgatttctgatgcccttattttctttacatacatccgtgtatccacctgttaccattttccttctgcccaaagtatttatcatctataccagtgaagaactgttggttcaactgttgtatgtctgaaaatgtgactctttttctgcctccattctgtgaaaaaaaaattgctgcatatagaatttgaggttaacatggttttgtggatttttttcagtattttaaagatgttgctctaatatttctggtttgctttgttcctgctgtcattcttatttttattttctgtacattatgtgtcctctagctgctttaaagattttccctttgtcacttgctttaaccaatttgattttgatatgtagtgtcgatttctgcatgtttctgtgcctgtggtttgctgaacttcttggatccatgaatttgcagtctttatcgaaaatttcagccattatttct

SEQ ID NO: 14545 - DNA, 427 bp, Homo sapiens
ggtctccgctcacgcctggcctgcactgtaagttttaagagtctacttaaaatcttttttgtatgtttattattagtaaatgagtatctacagattgaactaaaaattaaaaactgaagtctatactgagctgaagaaattgtattcagtaattttcacaattcttgtgggttttcactgtaacttaaggataaaagaattggctactttggctgcgtgtggtggctcacacctgtaattccagcactttgagaggccagcgtgggaggattgcttgagcccaggagtttgagaccagcctgggcaacatggtgagactccatctctactaaaaatacaaaaattggctgggtgtgatggtacgcttgtagtcccagctaagctactgggggtggcagtggtggggttctgacgtcgggggtcgctt

SEQ ID NO: 14546 - DNA, 409 bp, Homo sapiens
gacaaaatgccatgccaattttttttaaactggggaaagggacgttcaaatgtctatgggtcagtttctcagcaatacatcctccagtctcctatctgaggagattaagtttgactacctatatctgggaactaagaactgaatgaagaccttcactaaatccctgttttgggaatgtcacctctcagctgagtctagcatccccaagtacaggtcctgcctgattttatttctccagaaaataaacctccaaagttctgctgagaaaggatgtgggagtttaattgttccttatataacctttgaactaatcctcctcttttcacagctctacctctcaacatttgagaacctctaatacctaggctagggtctgtaccacaaaatgactgttgatactgacattcct

SEQ ID NO: 14547 - DNA, 332 bp, Homo sapiens
tttcaaaaaagctctctagctgctacattgagaataaatgtagacatgattatctgctaggagactattgagacttggtgcctgcagtggaatgatagtgagaaatgattctattttggatatgttttaaaaggagaacccacaggatttaccaatagatgtggagttgaggaaaaattatgaattatttagaatattttttgcccaggcaattgaaacaatggacttgccttcaactgagatgaggaaggtagtatatatagcaggttttggatgagatgatatttagaatccatctagtgcacattaagcttcagatgcctttaaaactc

SEQ ID NO: 14548 - DNA, 253 bp, Homo sapiens
cgggggtgggcaaagggaaggcatttcttcacatccttgtactcttctatagtgaggtagggggtatagcttcataaaaagttccctttccctgaagcttcatttcctgaagcttgtttattatcactgaaaaaatgatcattaataatctttccattcaggtctgctggtagttcaatttatgccttttctttaaattcatccatacttgttttgagtaggctgcttgtttaaagttcacaatataccactt

SEQ ID NO: 14549 - DNA, 442 bp, Homo sapiens
cacaaagttgtataattctcaacacaatctaattttagaacattttcatcaccccagaaggaagccttatacccattagcaacccccttcccagccctggcccctggctgccactcatctaggttctgtctctgtggacttgcccgttctagacatttactatgcatggactcatacaacacggggtattttgtagtcgacttcttgcactaagcaaatcagctatgaacatccgtgtaccaaggcttgtgtgggggtgtgtttccattttcttggatatatagacagttctcttttaagagggtttcacatgctgagcttctcggtgtttcaaactgctcgcaggctcgtgtgctctcgctgtcttatgcgtgctgggcttcgtagttctcaagtctgccttccctgtcttcccccagcatttcactgcgctttcccagat

SEQ ID NO: 14550 - DNA, 225 bp, Homo sapiens
tccgcctcccgggttcaagcgattctcctgcctcagccaccgcgcccggcccattatctggattctttagtacctgttcctctagactctacgctccattaaagcaggaactccatctgttgcaacacctagcacagcgtccggcacactgcagttcttcaataaatacttgctgcatgaagccctctcttcaccaccacccccacccctcctcctcgcaaaaaa

SEQ ID NO: 14551 - DNA, 494 bp, Homo sapiens
atgcagggagttccaggagagagagaaagagagagagagtgcagaaacaatcaaaatgtccatcaaactttgaatgggtgaatacattacgttatatttacacaatggaatactgttcaccaataagtaagccatataccacatgcagaggcgtgaatgaatctcaaacgtaatgccaagtgaaagtagtcagatacaaaagagaacatacttgccgggcatggtggctcatacctgtaatcccagcacttttggaggcttgaggtgggcagatcacctgtggtcaggagttcgagaccaccctgaccaacatggagaagcctcgtctctacttaaaaatacagaattagccgggcatggtggcatgcgcctgtaatcccagctactcaggaggctgaggcaagagaatcacttgaacccaaggcagaggttgcagtgagctgagatcacactattgcactccagcctggggaataagagtgcaactccgtctc

SEQ ID NO: 14552 - DNA, 730 bp, Homo sapiens
tcagtggcctttaacataagaaattgggtatatgtatgaataataatttttcttgaatgtaagttctaaacaggatttttttccttcaaccctactccttctgtaaggaaaaagttttaagtatgatacatattatgttgtggatttggtttatgaatgggaaatgccagaagtgcttgcttctgtaatcaaactttaaccacaagatggcagtataactttcccatgtctttaaaaaatttttaaataattactaaattaaattattttttctctcttaatgagaaatgtatacagctaagggatttcaagatagttctaaggaggatgaatattgaaggtactgtactaaatataagaaatattaaagactatttagtgattatttatttattttttgagtcttgctctgtgagtcagcctgagtctgtgcccaggctggagttgcagtgaactgagatcacatcactgcactccagcctgggctacagagttgagactctgtctcaaaaaaaaaaaaaaaaaaaaagaaaagaaaaaaaagaaaaaggaaatatagttaccatgtgtgagaaaaagtgtggtctcatgtaatgccctaaacatatatgtcatgtttcaaaaatctgtagttttaggtgagtttgaggtcagaatgcatttccccctagaacaatgttatgcaattcatgggcaagccacaaaaattttcttccttttttttaaaaaa

SEQ ID NO: 14553 - DNA, 427 bp, Homo sapiens
ttcatcattatcatcttttaaatttgttcatgttttatccccaccctcccaaaagaatgtattagatgtttcaaagattcttcccttagtgtttaattcatttctactttactcagattaacctaaagcagataacctgatattcaggtcaatgttctacaaatagaactacttgcttgcattttaatttgttaattatttgtaataatgaattaagtattatatttttctgcccatcctaattctaggaaaatctctttatataaacaactattcgttagattcagcaaggccactgttgtatcaggaaatttaattaacgtgagtttgtcatccttctggaataccaaggaagtttctgtctattaaggcattctgctaaaaatattgccagctgcaattatgataaaattcatccctggaaatc

SEQ ID NO: 14554 - DNA, 733 bp, Homo sapiens
  misc_feature (35)..(35): n is a, c, g, or t
  misc_feature (38)..(38): n is a, c, g, or t
  misc_feature (47)..(47): n is a, c, g, or t
aactctcgaggatctcggcagctatccggtcaatnctntttcttttnacattttatataatttaaaaaagcagagacgacgtctcacgatgttgcccaggtggtctcgaactcctgagctcaagtgatccttccgtctcggcctcccaaagtgctgggattacagccatgagccaccattccccacctgtcataaccatcttaattgtatttaacaaatgctcaaaacttcataagacagacaccattgttatgcatattttattttaccaaatagtgaggtttcactatattgcccaggctagtcttaaactcctgagctcaagagattctcccacctctgcctcccaaagtgctgggattataggcatgagatgccgcccttggccattattcctgttttatatagatgatgaaactgaaatccagagagtgagagtaatttgcccaaagacacacagctaaaagtggcagagctaggatttgaacccaggctggccggctggctctactcattacacgtcactgcgttgcctcctgaagcgtgtgtcacgaccccactgttaaccacgaccttgatattccatctctccaaaaaacagttagacgtgcctctttgtggatcttgacctttagttacatttcttttcccagcatcttcaaagtctcatctgccttcctcatctcaaaaacgaaaaaagaaagtcacacaatctatgccgttctctctagta

SEQ ID NO: 14555 - DNA, 414 bp, Homo sapiens
aatcatcattctcattgtatagatggacactgaggctcgagaacggaaacgacttcttttgagttgggtgcctctccccccttgccaggcagccgcctttctctgttgccatagcacaaatcacaagggtatttatggaacaaaagctcagaccgctgagatgttcactctgcactttcagcagcactcacattgagatatgagaagactgcaacaagaacaaaagggttgtgccacctcctttggatgtgaagaggatgtgctgacacgtgtgctcgggagccagactttgtggccttggggaaaggactgaatatttctgtgcttcgtcgtttgcatctgtggaatgcaggtgatactgagctcttccttgtgggattattgcctggaaatacaccattataggttcatcgc

SEQ ID NO: 14556 - DNA, 352 bp, Homo sapiens
gtgaatataagaaagtgctatcaaaatgagaacaatcatcatgtcttgagagcaggaacatttaaacattccctaggccacctgtttctagaatcagatattgatgttatttccttggtagcctggcaaaagggagaaaggtaggtttgtatgtagggttatataaatgctggggccatcaagcaatgtagatcctgcttttttcttcccagtgtactcaagagggcttgaaagccatgcatcctaagtaaagtggttgggggatttggaatgaaacagtatcatctgccatgatactgttccttcagtactcttatcttatttaacagcatcacaatccatccagtgaccc

SEQ ID NO: 14557 - DNA, 365 bp, Homo sapiens
cctataggttttcactgttataaataagattgtgatacatttcttctaaaactctgtcctccccaatgcaacaagatggtgccattgctcctgcaggagatgagataccatgcctgaggcagacagcagagtcatcttttgagtctaagatccttgacaagggaactcaacagattcggggtagaaatggggtgcatgtcaggggatggggacattttattggcctgctagacttctcagtgcctttcccttaaatgtcaccagtagcttcacctggttctggaatgaaatacaacacacattagggcttcagaccctcttctctctgaaagcctgccctttgtttttgagacagagtcttgctc

SEQ ID NO: 14558 - DNA, 320 bp, Homo sapiens
aaagtgcatcacaaatgactccactagttattagagccactttatctgtgggggcacccagcagcaggagatctgtctttgctgtcagtgggggacttgctgaggcaataacagtggctcaggcctttggcacacagtttgcagtggagagagaaatataatattgtgggcaggctgaaggtaaatgaggccaggaatcctccagctgtctgtgcttttgaaagaggtgccatcactgagtgacattcagcatttagatctctacccatctaaaccagtcatgccttttccctcaagtaaagcagttatctgttggctca

SEQ ID NO: 14559 - DNA, 399 bp, Homo sapiens
ttctcaccctgttcgctagactcctacctcagcggcttcctctccctatctcacatgcccaccttacagccctggctttacaggcccctctgcttgaaccagtcttccccttgatcatcacttaggttttggctcaaatgtcactcacttcttctggggcacccttccaatatctgctaaagccacctctaccactgtgcatagtgtcagcaaatcatcactaaagaaatcagcagagaactgtggaggcacctgaagagtaaggcgattctcacactcacccaggataaacatccctacaacagtgctggtatgcagtgggtgcttgttgaatgaatgaatgaatgaatgaatgaatggcaaacaaaccaatgaagacaagcgcccttaaatgtaaat

SEQ ID NO: 14560 - DNA, 266 bp, Homo sapiens
tcgggcccttactgtagcaaacattctcttctcacctgggctcagcctgcctctctgttctcaccccaagtctttgttcagatatcacttcctgaggtcttgcctgactgtcatgtaaataattatcatccttctggtggggtgtggtggctcatgtctataatcctagcactttgggagccagaggcggacagatcacttgaggccaggagtttgagaccagcctggccaacatggtgaaattccgtctctactaaaatacaaaa

SEQ ID NO: 14561 - DNA, 347 bp, Homo sapiens
cattgataactaatattttctatttccctctattgttttgtggtggtggtggtggctgtggatgaacatcattctcaaatatattataattcccttcctcatcaagcccagcatgataaacttcagttttgcctgatggttcatcatcttatttctgtgtgtaagattgttggatttgacattaaacatttggaaactattttataattgataacttgtgctttctcagctttgagtaagcgctctcttcttcatcttataccattttatttttatttattattcacttctgcttctgatctgagatctaggaagctggacaaatcccagataagcaagctaaacaa

SEQ ID NO: 14562 - DNA, 500 bp, Homo sapiens
ttatttcctttattttcagatgtcaaagaaagaaatgcagatccttcagttcaactctcagttgcagtaaagccacctacaggatcaggtcatactaaactgaaatgttgttattatccttttctgtaagggaggcagtcaatggtgaatgctggcctcgctgattactcacctggagacctttctgaggatcagttttctcatctagaaaatgggacaactgccagaccactgaagaaaatacagaaaacagccccacacatcagcatgtttggttgctgccagtctacttggatctgagtattttttcttgccatgaatgtgacgtgattatcttctcctacatcacactgaagttttatgaatgatgctttgaagtgggaagggccagagagttaatattttcggcttcttgggccagctggtctcggtggcagctactgagctctgccactgcagcagagaacgggcacaggcgatatggaaatgataggcgcggc

SEQ ID NO: 14563 - DNA, 466 bp, Homo sapiens
agggtctcactctgtcacccaggctggagtgcagtggcgcagtcatggctccctgtaacctcaacctctcagactccagcaatcctcctgcgacagggaggcagtcaatggtgaatgctggcctcgctgattactcacctggagacctttctgaggatcagttttctcatctagaaaatgggacaactgccagaccactgaagaaaatacagaaaacagccccacacatcagcatgtttggttgctgccagtctacttggatctgagtattttttcttgccatgaatgtgacgtgattatcttctcctacatcacactgaagttttatgaatgatgctttgaagtgggaagggccagagagttaatattttcggcttcttgggccagctggtctcggtggcagctactgagctctgccactgcagcagagaacgggcacaggcgatatggaaatgataggcgcggc

SEQ ID NO: 14564 - DNA, 448 bp, Homo sapiens
gtctcaactaaatcacaaaaatcaaaaccataacaaccacactgttggaccacagctcaagcacaaccagcttctgagtgacttttggttaaagaataaaattaaggcagaaatttaaaaaaattatttgaaactaataacagacacaacataccagaatcttcaggacacaactaaagaaggatgaagaggaaagtttatagtgctgtacacctacctcaagaagttagaaagatctcaaattaagactctaattattgcacctagaggaaccagaaaaacaagagaaaacaaatcccaaagccagcagaaaaaaagaaattacaaaaattagagcagaactgaacaaaactgaggcatgaaaatccatacaaaagatcagcaaaaccaaaagttgattcttcagaagattaaacaagtttgatagcctggtgcctagatttataag

SEQ ID NO: 14565 - DNA, 303 bp, Homo sapiens
gtcttctttcctattcgttcaggaagttctactgcataatattatgtggggaagaggggagacctgtttgaagacagggtgggaacagaaattccggtacaaaagtgtgctaacatttgtcagcagttactgagcttctgccaaattcacacctctgctcgttttatcctagaggctacacttcaatcttctctctggttacccaccttccccatttcctaagggacacaacagttccctcaacttctacaagtcctctcccagagattattctcttccaactttgtacaacctattctagat

SEQ ID NO: 14566 - DNA, 483 bp, Homo sapiens
tgctgggattacaggcatgaagcaccaccacacccagcctatttcctcatttaaatgccactttattccatgaagagttttaaaggagctgcaaagcaagatactgtcaatctaaaatgagagacagttgactatttagaagaaaataaagttagatttctatctcagggacttcatacaaaaatatattgtacaggaggccaggcaccgtggctcacgcctgtaatcctagaactttgcgaggccgaggtgggtggttcgcctgagctcaggagttcgggatcagcctgggcaacatggcaaaaccctgtctctaaaatacaaaaaactagccaggtgtggtggcacatgcccgtggtcccagctacttgggaggctgaggcacgagaattgcttgaatctgggaggcggaggttgcagtgagctgagattgtgctactgcactcagcctaggcaacagagtgagactctgtctcaaaaaaa

SEQ ID NO: 14567 - DNA, 659 bp, Homo sapiens
agtaattatgattgaagaaaagatttgggtgaaatctagtgttcttccctgcaaagggggttgttctcacggattcttatggtgccatgtttctcagaatttgtagtttcagttacttatatttgcacacctgactttagatgagctccagaatagcagttactaattaaggatgagcatttagagtagataaaagtggcaggaacagcaagactcactcccagagagcctcactacaggtctaataggtgaggaaattccccatgtttcccatttttcttcattacctccctgtggggcaagcactgccattattcatgagtaaactgtctgagttatagataagtaatgacatgaaacttcacaaacacgctgagcacagtggctcacgcctgtaatcccagcactttgggaagccgacgtgggtgaatcacgaggtcaggagttcgagatcagcctgaccaacatggtgaaaccctgtctgtactaaaaatacaagaaattagctggccatgatggtgggcacctgtaataccagctactcgggaggctgagacaggagaatcgcttgaacttgggaggcagaggttgcaatgagctgagatcatgccactgcactccagcccaggcggcagtgcaagactccatctaaaaaaaga

SEQ ID NO: 14568 - DNA, 475 bp, Homo sapiens
tcagaatgttggaggtgtttcttttccattaaggaaattgaagccattttaatttctatccattttgctgagaatcttgcagaaggcctcactttgaattgccttcagtttagtgaatttttgagttattcattgttgatttttgtccctccattttctttatctttctggaatttctgttatttggatgttggtcctcctggactaacccattgatactgccttttttctgttctcatagccatctctttgcctttctgttctaatttcggtgagacttcctcaactttattttctgaaatgtctatttcatttatcttatgatgttttaaaatctgatctccttttttctcctggatgtcctcatcatagttcttttcatagttgcaatgcaatcttttactgtcaggatttttattataatttcttgtaaaatttcttctctctgtatatttattactaacaaatcatgtct

SEQ ID NO: 14569 - DNA, 615 bp, Homo sapiens
cctgctgtgccccgcccccccaaccgtggccacctctagcaaagctcagccctagctgtggctggagctgtgtcgtctagaaatggccatctgacataatacatgtccaaataagacccaaagtaggacccatcttctcttcctccccactctgaagattgtgtctgtctttgcttttaaatctatctcacccaccttcaaccttgggctccctgaagggtttgttgggagaatggaaaagagtttctcccggctttcctgtctttacaacatcaaacgagtacatagcccttttcctctcaagagttttgctgccagcctgaaggaggccccgtggcaaggcagggctgggaaactgacggaaacatggggaggtggaagaaccttcccaggttcttaagcctggcctcatgtctggcccgcagctcctgactgcttttctctgtggtacctaaatcccagtgggttctctctccacttcttctgtccagggcagcgttctccccgacttcaggtggccccacctgtcctcagctcaggcccttatttcctgctccaagggcgcaggcaggtggatcagcagatgggagctagtattcatccaggtgccccacg

SEQ ID NO: 14570 - DNA, 554 bp, Homo sapiens
ctaacctatccctgcagccagcccagaccttctacaatcatatctaccagtggtgaaaggcagttcaagatgagttggacacaatcaagaaaaatagggaacaaatatgtcatagctcctctctgtctgctgtctatagaaggaggctaatagcagcagatctggtgagggccagtggcccatggacctgcctgccccaaggcagcaatcatgggagtggggtcaaggaaacactaaggaggtacacctgataggactttttaaagaggagtggccagggttctggccggtttgaagcctggagagaatggaatggcatgagttcagttttggggacattcagtggtaagactggtttctgttttctcttctggaagctcatagatacaggatctgctcattcacttgatttgtgcctcttatttgggcttcaggacacatctctggccaatcgcaattaaaacaccatgcccagttagccatcatcgccactcagagctgtctgctttaccgggctaaaaaaaatgatctttatcaccagttgtaagtgactt

SEQ ID NO: 14571 - DNA, 387 bp, Homo sapiens
aacttcccacttaacaggaaatatagggtttgaggaacaagctaaagaacaaacaagtatctacacaaatctaaagaaggggacattctatgtggtaactaagtccgacctcaacaggtccccaaaagggaccagagctctttggagaaattccaggctgggtcagaggacgtatgaagaatattttgttgtaacagaaaggagatgctcaaaagctgatggaggtgtcaaaaggacacaagaactggcttgaaggggctcccaatgcccaaactttgaagcatagaaaagaataatggatcctttgtattttatgagagtgacgattgggtgttcatgtgcaatgtgtgcattgtcaccacgatggcacattactcgtctgatgtg

SEQ ID NO: 14572 - DNA, 416 bp, Homo sapiens
acagaggaggtgaggcttgaatgatttgtcggtcttctccttgggtaactcatgttatctttgtaggcctgcttcctcatttataaaaaggagtagaggaatacaggtagggaaaattgaagaaattttaataaagtcacatatattactttaaaaaagtataactttcataaattatgtatattataacattatatatatttttatatatattttatatatatatatatataaattacttgcaagagggaaggagagagggtctcactatgttgcctaggctggtctcaaactcctggcctcaagcagtcctcctgccccaacctcccaacacgttggaaggctgaggtgggtggctcacttgaggtcaggagtttgagaccagcctgactaacgtggtgaagccccgtctctac

SEQ ID NO: 14573 - DNA, 697 bp, Homo sapiens
  misc_feature (1)..(1): n is a, c, g, or t
  misc_feature (432)..(432): n is a, c, g, or t
ncaggggttgaaaaaatggagggtgggcagaggtggggtgggctgggacaaaacccagagagcactcttcttaaaggcaggcaaattcagacttgcaatacacattctgctgaacgaagctaatttctgaggaaagtgaggcccagagtggttaagtgattcatgatggtatcagggagggccctgagggttctgatcactcccagcacttgatccaaaggccccaggcccttggaggcatttcagtggctggcttgggttaaaactgcatgacaggcgcctcttaacctgggcctcttgggcctggaaaattggctgctggaagggagaaaggctaagggtagcgtcccagccggtatctcagcaacgcggggttacaggccgcaggatgagtgctccagctgacccagactcaccacttttcagttgtcntgcaagcaagcaaacacttcccaattccaggccagaaatctttctaaactgtggcagccgcttccctttcttcacaagcagacggcactgggtataatttaagctttttcttcatgtctccgtgccatcttgctgaaacatcagctactgttctgtccttcaatgcagacctggcctcaggagattgtaaggtgggtagaaacattggcttttctcataaaggattccagacagtgacgtgtttgggctttttttctttgattta

SEQ ID NO: 14574 - DNA, 367 bp, Homo sapiens
ggagctataggtgcgccccaggcgttttcttttaggcagctttgggatcagtgcaggtcccagggcccagctggactccctttgggactgctctttcttgggacttttcaatacagcagcgttagcaggagggttcatctgtcacataaatatctgatcctcaggggtggcagcccccaagcttttcccactcccagcagatgcagaatagcatgaagatctgtggacaaactgggcaatctgctcctcaatccacccctccctcactttagaatttgaactctctctactgttttgcaaaagtggtttttgtaaaggtagtaaaaggacagaatcgcaaaataaaatggtccagtaggtaaaccca

SEQ ID NO: 14575 - DNA, 414 bp, Homo sapiens
catatctaggaactctttgcctatcccaaggtcacaaagattttctcctatcttttcttctcaaagttttatagttttatgttttacctgtaggtctgtgatccatttagagttaattatttttaaggtataaagtataggttgaatttttttgtagattgtttttgttttgcatatgagcatctagttgttccagcaccatttgttgaaaagaccatcttttctcgattgagtcatccttgtgccttcgcaaaaattaatggactacgcagtgtttgtgtggatctgtttctggactctattctgttccattgttctgcgtatccatcagtattatactgtcttgattgtggcttcacagtaagtcttgaaatcagatagcattaatcttccagctgtgtttttcattaaaaa

SEQ ID NO: 14576 - DNA, 283 bp, Homo sapiens
ttattgagacagagtccccggttgcccaggctggactgcagtggcgtgatctcggctcactgcaagctccgcctcctgggttcacgccattctcctgcctcagcctcccaagtataatgcaagatgaaaattatttacaaataaaggcagcctgtgatgtaagaactcctgagaatggctttcaaaaccaaccagccagctagtcacgggcaagaggttagaactattctgagagctggccttggtggttttaacttagcacattcactcaacgtgacgtcat

SEQ ID NO: 14577 - DNA, 319 bp, Homo sapiens
gagataagaatgacatgtaatttgtgttagaatttgactgttaattgtgtataaagctgtggccttttcaagtcccaacatttggcaggatcgttaattgggggaaagagaggaagtttgaatgaaattacatgtagaaaagatagacatttacataattagcaaagccccttgagttaataaatatgtgttctagttttttgtgggggactggtgaattttgggacacttatgtttttggtaataaagatggcaatttatttgcatttttgtattttaatgttaagcctcattataaaattattttggtctaattttt

SEQ ID NO: 14578 - DNA, 283 bp, Homo sapiens
tttcctgccctcatgttgcctgttcctaaaccaccatggtcccaccctgccccccgccatcctgtgtctataaaggccccagactcagccagcagagaggagaagcagctggatgttaagggacagcttgacggtgtcacttcagagaagaatccatctgcagacacagatgtggccagacttcaggggaagattaccttcccgccccatcccctttccagctccccttcctgctgacagccactttcatcagcaataaaatcccccacatttaccatccttc

SEQ ID NO: 14579 - DNA, 425 bp, Homo sapiens
atgtccatcagtggggcacttccacaataaaccacagtttatccaaacagttgaatactctgcagctttagaaaagaatgaggatgctgtctttgtgcccatacagactgatgtacaaatacacttggaggctgggcatggtggctcacgcctttaatcccagcacttcgagaggccaaggcaggaggattgctttgctcctgaagccaggagtttgagaccagcctggacaacatagcgacaccctgtatttacaaaaaatataaatttttaatcagctgggtgtggcgacactcacctgaagcaccagctatactcaggaggctgaggtgggaggattgcttcggcctgggaggtcaaggctgcagtgagccgtgattgcaccactgcactccaacctgagtgatggagcgagaccctgtctc

SEQ ID NO: 14580 - DNA, 4748 bp, Homo sapiens
  misc_feature (325)..(325): n is a, c, g, or t
  misc_feature (2279)..(2281): n is a, c, g, or t
  misc_feature (3949)..(3949): n is a, c, g, or t
gagcaggctgtttagcaaggctctgaaaggagaccaccgctgtggggagaccgagacccccaagagctgcagcgaagttgcaggatgcaaggcagccatgaggcaccaggggaagatccccgaggagctttcactagatgacagagcgaggacccagaagaagtgggggagggggaaatgggagccagaacccagtagcaagccccccagggaagccactctggaagagaggcacgcaaggggagagaagcatcttggggtggagattgaaaagacctcgggtgaaattatcagatgcgagaagtgcaagagagagagggagctncagcagagcctggagcgtgagaggctttctctggggaccagtgagctggatatggggaagggcccaatgtatgatgtggagaagctggtgaggaccagaagctgcaggaggtctcccgaggcaaatcctgcaagtggggaggaagggtggaagggtgacagccacaggagcagccccaggaatcccactcaagagctgaggagacccagcaagagcatggacaagaaagaggacagaggcccagaggatcaagaaagccatgctcagggagcagccaaggccaagaaggaccttgtggaagttcttcctgtcacagaggaggggctgagggaggtgaagaaggacaccaggcccatgagcaggagcaaacatggtggctggctcctgagagagcaccaggcgggctttgagaagctccgcaggacccgaggagaagagaaggaggcagagaaggagaaaaagccatgtatgtctggaggcagaaggatgactctcagagatgaccaacctgcaaagctagaaaaggagcccaagacgaggccagaagagaacaagccagagcggcccagcggtcggaagccacggcccatgggcatcattgccgccaatgtggaaaagcattatgagactggccgggtcattggggatgggaactttgctgtcgtgaaggagtgcagacaccgcgagaccaggcaggcctatgcgatgaagatcattgacaagtccagactcaagggcaaggaggacatggtggacagtgagatcttgatcatccagagcctctctcaccccaacatcgtgaaattgcatgaagtctacgaaacagacatggaaatctacctgatcctggagtacgtgcagggaggagacctttttgacgccatcatagaaagtgtgaagttcccggagcccgatgctgccctcatgatcatggacttatgcaaagccctcgtccacatgcacgacaagagcattgtccaccgggacctcaagccggaaaaccttttggttcagcgaaatgaggacaaatctactaccttgaaattggctgattttggacttgcaaagcatgtggtgagacctatatttactgtgtgtgggaccccaacttacgtagctcccgaaattctttctgagaaaggttatggactggaggtggacatgtgggctgctggcgtgatcctctatatcctgctgtgtggctttcccccattccgcagccctgagagggaccaggacgagctctttaacatcatccagctgggccactttgagttcctccccccttactgggacaatatctctgatgctgctaaagatctggtgagccggttgctggtggtagaccccaaaaagcgctacacagctcatcaggttcttcagcacccctggatcgaaacagctggcaagaccaatacagtgaaacgacagaagcaggtgtcccccagcagcgagggtcacttccggagccagcacaagagggttgtggagcaggtatcatagtcaccaccttgggaatctgtccagcccccagttctgctcaaggacagagaaaaggatagaagtttgagagaaaaacaatgaaagaggcttcttcacataattggtgaatcagagggagagacactgagtatattttaaagcatattaaaaaaattaagtcaatgttaaatgtcacaacatatttttagatttgtatatttaaagcctttaatacatttttggggggtaagcattgtcatcagtgaggaattttggtaataatgatgtgttttgcttcccctttgtaaccaagtttattctgtactacaggagtggtgcttaccagggtctaaactccccctgtgagattaataaggtgcattgtggtctttctgtgttaataaaatgtgctctgaataacagaagtgggcctgtattctgattacttctttgtgctggtgatgacagccannnaatgaattatagttcaggcatatctcctgaagctgatatgactacatatagatgtgaaggacacttgattagttgacaagacctgtttatttaggatgcactaatcttggtctcttgcatttcagtcttaccaaaaatcagttttggtgcagtctgagacatggaaagaaaaaaaacaaaccattgaatcattcttgctcctgcaataccgttatactgcttttcagccccaattatccctgagcctgagtcatttctatgtgaagtcaggcgctcaggctgtgaccgtgttaacattttcagatcacgagggagccatttagtacattaatatgtcagaaatgcagtaaatggattacactggggctcgaaggagctcagagttcaagcacattcctacctgcagggcatacacccaggacacattccagatttctgtgctgaaatattggtctttgcagatgattctgggagtctgtgtgagctgacagcaagacatatcctaatatttcccaaattgaccttcctagattatgaatgacctggttagtaggccacaaaatctagtcaagagtgtggctttttcacgtctaccttccctaacagttttggagccatctgggcggaggcgtgtgttagttaggaaaaccggaacagtactagagaattcaacataaggaattgcttaatcaggttttggaaaatggaagaagcacaaaggaggctctggtataatttagagatagtaactgcaggaagtggctcctgttctttggagaaccaagggaagaagttggggttattagaacctattgaaggagaaatttcttgtagtggacactgtagtatgccactcaggtcctccaagactgaagggaataagctccttggggtgctgctggatgatggctctcagctttcagccctctacaggaattaccctccactggaagagacacctttcagctccctcctgaagcaggctatatcaaatgactagtccctgtagggtatggtggctcagctcctttgtcccaaacagggacaatactgaagggccatccaactacggacctgcccatgggggttggctgaactgttggttgagactgcatcatagcccactttctcccttgcccaatcctgcttctttcctttcccttccagaggtaatgatcctgagaccactccctaataagccttttggatgctaatctggattttagagttggcttctcgggaaaccaaaccgttgacaccccctagaaacttgaaaccacatcaaagaagtaccagctggtgctttaacctcagaagcttggagaaggggccctgtggagcagggactcagacccctgaggagtgggtgctgcccagcaggcagtgtaatgggactcattctgaacacgtgaaagaggctggaagctggattcagttgctactagaacatattttgataaagacaccagtaaccttcatttcactaaatccaaaagagaattttcaatcctcaaattagcatcacttgaccctattgaccactttctctttgaataatttctcctgttgactaccatgatgtcacatttttctggtttttttttctcctatacctttggatctcttgtatagattcagtcttcttccagttgctaaaagctgtagttncatccttagtggctagggaaatgcaaattaaaatcacaatgaaatatcactatacacccattagaatagctaaaattaaatggctaaaatgagaagactgaccttaccaactactagcgaggatgcagagtgactggaacttcccgtacattgctgctgggagtataaaatgggacttctcctttggagaatggtttggtagttcctttaaaagttaaacatgtacctaccatatgatattccacttctagatgtttacccagcagaaattcaagcatatgtcctatgaagacttcacaatatttataggtgctttatttgtagtagccccaaagtggaaacatcttgaatgggcatgatttggtgcatggataaacagattgtatatccacacaatgaataacagccacaaaaaagggatgaactattcatacacgaacaacatggatggactgccaaagaattaggctgaatgaaagaagaaaaaaaagactacattttgattatttcatttacatactattccagaaaatacaagtgaatctatagtgacagaaagtgatcagggggtttgctggagatggaaatggggagaggagggacagaaggattgcaagggaacacttggtaactttggggaagagggacgtgttcattttcttgaatgtaataatggatttatgggggtatatatgtcaaaacttaccaaattgtacacttttgttatgtgcagtttattgtgtgtcaattatacctcaataaagttgttaaaaatatagttgcaggtcctcaaagttca

SEQ ID NO: 14581 - DNA, 3477 bp, Homo sapiens
  misc_feature (1008)..(1010): n is a, c, g, or t
  misc_feature (2678)..(2678): n is a, c, g, or t
ccagttgaaaatggaccttggagggaaaaagtacgagaaaccatgaaggatcaagtaagaaggttcagcgaaatgaggacaaatctactaccttgaaattggctgattttggacttgcaaagcatgtggtgagacctatatttactgtgtgtgggaccccaacttacgtagctcccgaaattctttctgagaaaggttatggactggaggtggacatgtgggctgctggcgtgatcctctatatcctgctgtgtggctttcccccattccgcagccctgagagggaccaggacgagctctttaacatcatccagctgggccactttgagttcctccccccttactgggacaatatctctgatgctgctaaagatctggtgagccggttgctggtggtagaccccaaaaagcgctacacagctcatcaggttcttcagcacccctggatcgaaacagctggcaagaccaatacagtgaaacgacagaagcaggtgtcccccagcagcgagggtcacttccggagccagcacaagagggttgtggagcaggtatcatagtcaccaccttgggaatctgtccagcccccagttctgctcaaggacagagaaaaggatagaagtttgagagaaaaacaatgaaagaggcttcttcacataattggtgaatcagagggagagacactgagtatattttaaagcatattaaaaaaattaagtcaatgttaaatgtcacaacatatttttagatttgtatatttaaagcctttaatacatttttggggggtaagcattgtcatcagtgaggaattttggtaataatgatgtgttttgcttcccctttgtaaccaagtttattctgtactacaggagtggtgcttaccagggtctaaactccccctgtgagattaataaggtgcattgtggtctttctgtgttaataaaatgtgctctgaataacagaagtgggcctgtattctgattacttctttgtgctggtgatgacagccannnaatgaattatagttcaggcatatctcctgaagctgatatgactacatatagatgtgaaggacacttgattagttgacaagacctgtttatttaggatgcactaatcttggtctcttgcatttcagtcttaccaaaaatcagttttggtgcagtctgagacatggaaagaaaaaaaacaaaccattgaatcattcttgctcctgcaataccgttatactgcttttcagccccaattatccctgagcctgagtcatttctatgtgaagtcaggcgctcaggctgtgaccgtgttaacattttcagatcacgagggagccatttagtacattaatatgtcagaaatgcagtaaatggattacactggggctcgaaggagctcagagttcaagcacattcctacctgcagggcatacacccaggacacattccagatttctgtgctgaaatattggtctttgcagatgattctgggagtctgtgtgagctgacagcaagacatatcctaatatttcccaaattgaccttcctagattatgaatgacctggttagtaggccacaaaatctagtcaagagtgtggctttttcacgtctaccttccctaacagttttggagccatctgggcggaggcgtgtgttagttaggaaaaccggaacagtactagagaattcaacataaggaattgcttaatcaggttttggaaaatggaagaagcacaaaggaggctctggtataatttagagatagtaactgcaggaagtggctcctgttctttggagaaccaagggaagaagttggggttattagaacctattgaaggagaaatttcttgtagtggacactgtagtatgccactcaggtcctccaagactgaagggaataagctccttggggtgctgctggatgatggctctcagctttcagccctctacaggaattaccctccactggaagagacacctttcagctccctcctgaagcaggctatatcaaatgactagtccctgtagggtatggtggctcagctcctttgtcccaaacagggacaatactgaagggccatccaactacggacctgcccatgggggttggctgaactgttggttgagactgcatcatagcccactttctcccttgcccaatcctgcttctttcctttcccttccagaggtaatgatcctgagaccactccctaataagccttttggatgctaatctggattttagagttggcttctcgggaaaccaaaccgttgacaccccctagaaacttgaaaccacatcaaagaagtaccagctggtgctttaacctcagaagcttggagaaggggccctgtggagcagggactcagacccctgaggagtgggtgctgcccagcaggcagtgtaatgggactcattctgaacacgtgaaagaggctggaagctggattcagttgctactagaacatattttgataaagacaccagtaaccttcatttcactaaatccaaaagagaattttcaatcctcaaattagcatcacttgaccctattgaccactttctctttgaataatttctcctgttgactaccatgatgtcacatttttctggtttttttttctcctatacctttggatctcttgtatagattcagtcttcttccagttgctaaaagctgtagttncatccttagtggctagggaaatgcaaattaaaatcacaatgaaatatcactatacacccattagaatagctaaaattaaatggctaaaatgagaagactgaccttaccaactactagcgaggatgcagagtgactggaacttcccgtacattgctgctgggagtataaaatgggacttctcctttggagaatggtttggtagttcctttaaaagttaaacatgtacctaccatatgatattccacttctagatgtttacccagcagaaattcaagcatatgtcctatgaagacttcacaatatttataggtgctttatttgtagtagccccaaagtggaaacatcttgaatgggcatgatttggtgcatggataaacagattgtatatccacacaatgaataacagccacaaaaaagggatgaactattcatacacgaacaacatggatggactgccaaagaattaggctgaatgaaagaagaaaaaaaagactacattttgattatttcatttacatactattccagaaaatacaagtgaatctatagtgacagaaagtgatcagggggtttgctggagatggaaatggggagaggagggacagaaggattgcaagggaacacttggtaactttggggaagagggacgtgttcattttcttgaatgtaataatggatttatgggggtatatatgtcaaaacttaccaaattgtacacttttgttatgtgcagtttattgtgtgtcaattatacctcaataaagttgttaaaaatatagttgcaggtcctcaaagttca

SEQ ID NO: 14582 - DNA, 386 bp, Homo sapiens
tcaccttggcttcccaaagtgctgggattacaggtgtgagcgactgtacctggccaactgtatgtcttttgattagagagtttagttgatttacaatcagtgttattattggtaggtaagcactactcctaccattttatttgtcttctggttgttttttggtcttctcttctttctttccttctttcctgtcttccttttagtgaagatgattttctccaatgttacgctttaatttctttttattttttgggtgtccattgtacgttggacatgcacacaatggacacacataaaacacaacaattagtattcggtttgcaaatactatctcgtaacccattattttaaatggatgacaacactgattgcagaaataaacaagc

SEQ ID NO: 14583 - DNA, 1212 bp, Homo sapiens
tgagtaatgaacatgagcctttctgggtagcatttacagcacaaagcaatttgaggaataaatgaaagagcacgtgtctagtgcctagcaatgcgctggacacagtgccggtgctcagccatcatgtcacaccagcactgaccggtgagcataaaccctggggatgcccagagctggtacagccaggagctccagaagcgtgggattctcagagggaagtggagctcactgctctacaggtcctgttcaagttagaaagtaagatacaatgcacacaaagccaaattgtcatcattcagctcctattacaggagaactaagagctgcattgaaaattacttgcaaagcttgtaagtggttctgccacttattagccgtgtgaaccttagcaaattacctagcgtctctgagtttcaacttcctcatctgcaaaatagaaatgataataataaccgcatcgcaagagttgttggaaaaatgaaaatgaggtatcataggaggtaacatgtatggagcatttaccataggccaagcactgttctaagaacttcggacatgttatctcacttgtataagtacttaggtgcctacaacataaacagcacctggtaaattaagtattgaaaaaatgctatggggcagaggaagaaatgctaagcttctgtgagaagagaagacagcttgttacacaggtgaaaagaacaagctgcagctgagagaagaaaagtataagagttgctaggtgtgacaatctcaagacttttcaaccactacaaatttaaacagccaccctaaatcaccccaaaggacagactcgagttgttctttttgtctttaatgtttgcgcctctccgaatcagagaagaagctgccaggattccagtacataccaaaacatgatgacaataccctcaactgtgcaagcttttgtgcatctaccgctatgtaaaggaagctgatgtcagtagactggggggaaccagtaaggcatgtttgtgaccgaagctcaatttgccatcacagtgtggccacacctacctcactaatattctaatagtgggataaataattcaatagggataaagcctggattttcctcttattctctcttagtgcttacattcttggcatgatatcgatgtgccatagacaagccaatatatgagtgtactctatctgaataaagtatagcctttctacattgcaaaaaca

SEQ ID NO: 14584 - DNA, 489 bp, Homo sapiens
gatctctccttcctgtgtcatcagcttcctgacccttgaactatgacaacattgctcctccctgggtctgcagctccatgactctcaaactagaacagcagcaccagctccttcctggacctccaggtcaatgactctcagacttcaaaggcagcagcagctccacccccaggctccagctctaaaaccctcagatgtgagcagtggcagcaccagctcctttctgcgtctccggcttcatgatccttaaattagaacagcagcgccatcttctccctgcgtctccagctccaggaacctcaaactgcaacaggagcacctgttcctctgggattttcacctccacgaccctgaggtgtcagtggcagcactggctcctcccctgggctgcagctccagaaccctcaagaataatcccttctcatgaaatgtagcagtcaggaaaactgcagaggaagtaaataaataaatgttttctttcaaactgat

SEQ ID NO: 14585 - DNA, 756 bp, Homo sapiens
cacagaatggaatgcttagatcatagaatatgtatatctcagcattatcagatactatcagagatacttccatttcttttttttttgtcaattaccctattcaaagatactaccaaagtggatatagcatgtacatttctactagcaatgtgtgagaatactagttactccacatcttcacctatacatgataacagtttttaaaaaattggctattccagtgtggttgcagtagtctctcattttggtttcaatttatgtttacttgatgatttatgagtttaaatgcctttttgtgtgtttattggctttttagattgcctcttttaaagcacctattcagtccttttccctgttttataggagttcattatgcattctgattatgaatcctttttcagatacatgtacggtattgcagttatcttctctcattctgtggtattttttttactctcttaaaggaatcttttggtgaagatatcatcaattctaatgaaatccagctaatcttttcctttattctaagccagtctcagtcacttatgcctgcaatcccagcactttggaaggctgaggcaggaggattgctcgaggccaggagtttgaaaccaacctgggcaacaaagtgagactctgtctctacaataaaaatggaaaagaaaaaaaattagttttgattgcaccactgcactcctgctaggcaccagagcaaaaccccgtctcaaaaaccaaacaaacaccaccaccaccaac

SEQ ID NO: 14586 - DNA, 502 bp, Homo sapiens
ctgtaaagtctaagtcagactgtccatccagactggaaccccccttttagagtacctggtgtggaaccagccaacatgggaagcatctgcatctccctattagtaaaccagggttaggcagaaacagaccaaggcaaaggcagctgggtgttcagtgccagacaatttctctgctgctgctaagcaaatggcagggtggagtactcaaccctgagatgagtgtgcctgaaaaagacgactactcaaaccactgaagaaacttcttatctgcccccacttggagcgtcatttcagtctttaccaaattagcaacaaaaggaggggtcccctttctagtcaaggggtacagctaacagctccccacctacgaacatccacccagccagaaggttgcccaaagtagcttgctgctgacttaatgacacttgacagtctatcagagagagtcaggcccacctgttttaggcaatatataatttaatagattctaaaaaaagaaaaa

SEQ ID NO: 14587 - DNA, 357 bp, Homo sapiens
tttttcctcctaagcttaatgacaaaagtccagataattattgtgatcttctgtagaccccagggaaaccaggtactacttaaccctgcagagagaatgagccaccacgtcccacaaagccacgtgccctctcagcgcttctctgctggaagcagcttccccagcctcaggctgcatgcccagagcgccctggacggatgacccaggggtgaggcaggtcaccctggcgcagggccacctccagggtgttcatgacaggcaggaaacactgcaggaaagaaagcaagaaagacagagaaagagggaaggaaggaaagaagaaggaaggagggagggaaggaaccataggaattcgaa

SEQ ID NO: 14588 - DNA, 568 bp, Homo sapiens
cagtagctttcttccaggactcttagattagggatcaaatttgtctgtgaggacaagtgaggccaataaatgaaagttatagagaagaagggtccagcccattttgaggaagatatttcaaagctgtcagcctgccctggaaagaactggatggcctcatgaggcagagtccttgatcactgaatgtgtttcatatgtcagccaaatgattacttaaaactccttcaaatctaactgtgactcttaaactactaaatgcttctctgaacaaagaacaattaagttcttcaaaaacagcaccaagtaaaatttagaacaagttttatcttagctcttcaggactgggtatcccttatactctggcatacaataaattggggatagggggcatacatgagaaatgaaattaaaagttcatcagatgaaaatgttttccaaagcagagtttaaggatagttttaccttattgtttatttaaaaccagagggccagaaaaatgtccagctttaagttcagaggtttaaaaggttcagaggtttaaaagtttacactgctaccaaaaaataaa

SEQ ID NO: 14589 - DNA, 494 bp, Homo sapiens
tgaggaataagcgagggtctagtcccctcattcttggagtgtggagacaggggacttgctgctctcaaccagtcctcttacaatgattgtgacctatttaaagcattcagagaagtacagagatggtgataaggaacattggataccaccagccagctttgccaaatctttacattctatatccatattttatacttgcttgaaatttttatttgaagaaatcataggtacagtccaagcaccctgtgaacctccccccacccagagcactcttcctcctgcctttccttgagctactaataatctggtgactatgtccccaaaatgcatatctttatattttaccacagatataattacatatggacgatatataatcttgttttgcatgttttaaaactatgtaagtggatcttgctgtatgtatccctctgttacttccaaaaccttaaaaaacctaaataacattagagatttatagaaattttgagatg

SEQ ID NO: 14590 - DNA, 1047 bp, Homo sapiens
  misc_feature (1047)..(1047): n is a, c, g, or t
ctctaatcagcagcagaacaaacactcacaaagggtctccttccctcctaggacttccttcgctgggcatctggctgggattcttgttggactaatgtacactcaagggcctctgaagaaaatcatggaagcatgtgcaggtacagaataaaacacctttggcatgacaacagcttggaagttcatgttaattttaatgtgaacagaagcaaccccaagtttccctgtggttcagctcaagaattccctaatatgcctgtttttctttttaaaccgaaaggcggtttttcctccagtgttggttacccaggacggcaatactactttaatagttcaggcagctctggatatcaggattattatccgcatggcaggccagatcactatgaagaagcacccaggaactatgacacgtacacagcaggactgagtgaagaagaacagctcgagagagcattacaagccagcctctgggaccgaggaaataccagaaatagcccaccaccctacgggtttcatctctcaccagaagaaatgaggagacagcggcttcacagattcgatagccagtgaggtggcatcttgggaagacatggcctattcgtgtaattattgcccatttggctcattccccaagcccctaattcattttaattcattttaaacaaaagcagagtacaccggtattgctccagatcgctcacatcacctgggacagtcccatggccctatgagtcaactcacagcttgcggggagtgggccttctcctggcttgttcttgctcataaacaggtcacttcctcatgagagacaggttcacgctccatctctcatgtgatcaggagcctctggctgggcgtttgagaatggacttcaccggagttattacacagcgggaaaagcctatcgcgggagccggtgatgaaggggggcaccaggccctggcacgagggcagagaggggggaagggcatcaccggaaccacggcgggggagacaaagggcaaaagaggacgggcccgcgcccgggcccgcgccgcacgcggn

SEQ ID NO: 14591 - DNA, 3135 bp, Homo sapiens
  misc_feature (1334)..(1334): n is a, c, g, or t
  misc_feature (1550)..(1550): n is a, c, g, or t
  misc_feature (1556)..(1556): n is a, c, g, or t
  misc_feature (1861)..(1861): n is a, c, g, or t
  misc_feature (2179)..(2179): n is a, c, g, or t
  misc_feature (2521)..(2521): n is a, c, g, or t
  misc_feature (2805)..(2805): n is a, c, g, or t
cgtccgctttaaggccctcccctcccgcacccggccccaggaacccggggcgccccggatcgggaacgtgcgtgatgacgcacgtgcgcgcgaagacgtggggacgcaggcgggtcgtagagagcgttcagccgtctgtatatctccccagatacctgaaactgaccacctgagtacgttttcccattgctgagctgtttccctgatatctggccatgcaacggagatcaagagggataaatactggacttattctactcctttctcaaatcttccatgttgggatcaacaatattccacctgtcaccctagcaactttggccctcaacatctggttcttcttgaaccctcagaagccactgtatagctcctgccttagtgtggagaagtgttaccagcaaaaagactggcagcgtttactgctctctccccttcaccatgctgatgattggcatttgtatttcaatatggcatccatgctctggaaaggaataaatctagaaagaagactgggaagtagatggtttgcctatgttatcaccgcattttctgtacttactggagtggtatacctgctcttgcaatttgctgttgccgaatttatggatgaacctgacttcaaaaggagctgtgctgtaggtttctcaggagttttgtttgctttgaaagttcttaacaaccattattgccctggaggctttgtcaacattttgggctttcctgtaccgaacagatttgcttgttgggtcgaacttgtggctattcatttattctcaccagggacttccttcgctgggcatctggctgggattcttgttggactaatgtacactcaagggcctctgaagaaaatcatggaagcatgtgcaggcggtttttcctccagtgttggttacccaggacggcaatactactttaatagttcaggcagctctggatatcaggattattatccgcatggcaggccagatcactatgaagaagcacccaggaactatgacacgtacacagcaggactgagtgaagaagaacagctcgagagagcattacaagccagcctctgggaccgagtgccttgtcagtctcctctgctctggaagaattctgatatgacatagaaactgctagatgctggcaaataactcctgggtttcgggccatctagacaataaacaactccataatattcaatgcagcagcctctgtagcgcccatctgtttcaaaataaccctaattctgcttacgatgcggaatgctttgttgactggaatttgtcctagttttcttcagcagatttaatgtcataggcctctggttccacctgctggcaganataaataccagaatgaaactcgggtggatatgttcagttgcaagaaaaatccgagctgtagctcaatggttctcaaaggctgatgtacatcggagtcacccgggagctcattaaaactacagcggcctgggctctgtgggaagcccacccaatcagcaactatttcttaaacagccctcctggtgattcacacacccacaccaacgttagcagacnccactncacctggaatgaggggtgcagaacccagcaaggttagggatgattccagaccactatatcctactcatgcccaagagtgacaaagccaccttgagatgcccactcctacctcttccagtttatccaggtaactcttagtggcaaaggccaaagctttattcccttggaactcattttaaaaagaaaaagttcaaagtggagaaaactgatgaaagcactacttatctaagtggtcaaggttaatgtcaccagtgataagtcatgttgacagcacgttgatatgtgatgagggcatttcacctctntggtattcttcaccaaaacccataaccccagtctaaccatgaggacaaatagcagacaaaccagaccgaatgaaattcttcacgatatctgtctgctaccactcaagactgtcaaggtcatgggggtcaagaaaggactcagaaagagccacagaccaaaagagactaaggagacttggtaacaaaatgtactgtggtctccaggattggaccccgaacagaaaaaggaaattagtgaaaaaaactggtgagatctaaatgtctggaatttagttcagaggaatgtatcaatgttggtttcttagtttcgacaaatgnactgtaagatgttaacatttagggaatagacttgtctgcagtatctttgcaacttttacgtaaatttaaaattattccaaaataaaaagtttattaaaaaaatttacaagaaaaaaataaccccatcaaaaagcaggtaaaggatatgaacagatgcttctcaaaagaagacatttatgtggccaagaagcatatgaaaaaaagctcatcatcactggtcattagagaaatgcaaatcaaaaccacaatgagataccatctcatgccagttagaatagcgatcactaaaaagtcaggaaacaacagatgctggagaggatgtggaaaatgggaatgcttgtncactgttggtgggagtgtaaattagttcaaccattgtggaagatagtgtggcgattcctcaaggatctagaactggaaataccatttgactcagcaatccattactgggtatatacccaaaggactataaatcattctgctataaagacacatgcacgtgtgtgcttattgtagcactattcataatagcagacttggggccaacccaaatgcccatcagtgatcgactggataaagaaaatgtggcacatgtacaccatggaatactatgcagccataaaaangaatgagttcatgtcctttgcagggacatggatgaagctggaaaccatcattctcagcacagtaacacaggaacagaaaaccaacaccgcatgttctcgctcataagtgggagttgaacatgagaacacatggacacagagaggggaacatcacagaccagggcctgttgggggctgggggcaaggggaggcatagcattaggacaatacccatgcatctggggcttataacgagatgacaggttgatgggtgcagcaaccaccatggcacacatatacctatgtaacaaacctgcatgttctgcacacgtatcccagaacttaaagtat

SEQ ID NO: 14592 - DNA, 3216 bp, Homo sapiens
  misc_feature (1415)..(1415): n is a, c, g, or t
  misc_feature (1631)..(1631): n is a, c, g, or t
  misc_feature (1637)..(1637): n is a, c, g, or t
  misc_feature (1942)..(1942): n is a, c, g, or t
  misc_feature (2260)..(2260): n is a, c, g, or t
  misc_feature (2602)..(2602): n is a, c, g, or t
  misc_feature (2886)..(2886): n is a, c, g, or t
cagaatcttacctgtaaaactcaggagccgagaagctttaagaacagtgaggttgaagggcacaggctcttggtccttggcagcgatattaggaggcgtgcctagggaacctcggattccggggagctggacgtgaaactctgtggtggaatagaaatcctcagggcatgagctatacctaaaacgtaatggtattaagaattctggttcagccgtctgtatatctccccagatacctgaaactgaccacctgagtacgttttcccattgctgagctgtttccctgatatctggccatgcaacggagatcaagagggataaatactggacttattctactcctttctcaaatcttccatgttgggatcaacaatattccacctgtcaccctagcaactttggccctcaacatctggttcttcttgaaccctcagaagccactgtatagctcctgccttagtgtggagaagtgttaccagcaaaaagactggcagcgtttactgctctctccccttcaccatgctgatgattggcatttgtatttcaatatggcatccatgctctggaaaggaataaatctagaaagaagactgggaagtagatggtttgcctatgttatcaccgcattttctgtacttactggagtggtatacctgctcttgcaatttgctgttgccgaatttatggatgaacctgacttcaaaaggagctgtgctgtaggtttctcaggagttttgtttgctttgaaagttcttaacaaccattattgccctggaggctttgtcaacattttgggctttcctgtaccgaacagatttgcttgttgggtcgaacttgtggctattcatttattctcaccagggacttccttcgctgggcatctggctgggattcttgttggactaatgtacactcaagggcctctgaagaaaatcatggaagcatgtgcaggcggtttttcctccagtgttggttacccaggacggcaatactactttaatagttcaggcagctctggatatcaggattattatccgcatggcaggccagatcactatgaagaagcacccaggaactatgacacgtacacagcaggactgagtgaagaagaacagctcgagagagcattacaagccagcctctgggaccgagtgccttgtcagtctcctctgctctggaagaattctgatatgacatagaaactgctagatgctggcaaataactcctgggtttcgggccatctagacaataaacaactccataatattcaatgcagcagcctctgtagcgcccatctgtttcaaaataaccctaattctgcttacgatgcggaatgctttgttgactggaatttgtcctagttttcttcagcagatttaatgtcataggcctctggttccacctgctggcaganataaataccagaatgaaactcgggtggatatgttcagttgcaagaaaaatccgagctgtagctcaatggttctcaaaggctgatgtacatcggagtcacccgggagctcattaaaactacagcggcctgggctctgtgggaagcccacccaatcagcaactatttcttaaacagccctcctggtgattcacacacccacaccaacgttagcagacnccactncacctggaatgaggggtgcagaacccagcaaggttagggatgattccagaccactatatcctactcatgcccaagagtgacaaagccaccttgagatgcccactcctacctcttccagtttatccaggtaactcttagtggcaaaggccaaagctttattcccttggaactcattttaaaaagaaaaagttcaaagtggagaaaactgatgaaagcactacttatctaagtggtcaaggttaatgtcaccagtgataagtcatgttgacagcacgttgatatgtgatgagggcatttcacctctntggtattcttcaccaaaacccataaccccagtctaaccatgaggacaaatagcagacaaaccagaccgaatgaaattcttcacgatatctgtctgctaccactcaagactgtcaaggtcatgggggtcaagaaaggactcagaaagagccacagaccaaaagagactaaggagacttggtaacaaaatgtactgtggtctccaggattggaccccgaacagaaaaaggaaattagtgaaaaaaactggtgagatctaaatgtctggaatttagttcagaggaatgtatcaatgttggtttcttagtttcgacaaatgnactgtaagatgttaacatttagggaatagacttgtctgcagtatctttgcaacttttacgtaaatttaaaattattccaaaataaaaagtttattaaaaaaatttacaagaaaaaaataaccccatcaaaaagcaggtaaaggatatgaacagatgcttctcaaaagaagacatttatgtggccaagaagcatatgaaaaaaagctcatcatcactggtcattagagaaatgcaaatcaaaaccacaatgagataccatctcatgccagttagaatagcgatcactaaaaagtcaggaaacaacagatgctggagaggatgtggaaaatgggaatgcttgtncactgttggtgggagtgtaaattagttcaaccattgtggaagatagtgtggcgattcctcaaggatctagaactggaaataccatttgactcagcaatccattactgggtatatacccaaaggactataaatcattctgctataaagacacatgcacgtgtgtgcttattgtagcactattcataatagcagacttggggccaacccaaatgcccatcagtgatcgactggataaagaaaatgtggcacatgtacaccatggaatactatgcagccataaaaangaatgagttcatgtcctttgcagggacatggatgaagctggaaaccatcattctcagcacagtaacacaggaacagaaaaccaacaccgcatgttctcgctcataagtgggagttgaacatgagaacacatggacacagagaggggaacatcacagaccagggcctgttgggggctgggggcaaggggaggcatagcattaggacaatacccatgcatctggggcttataacgagatgacaggttgatgggtgcagcaaccaccatggcacacatatacctatgtaacaaacctgcatgttctgcacacgtatcccagaacttaaagtat

SEQ ID NO: 14593 - DNA, 1637 bp, Homo sapiens
  misc_feature (1637)..(1637): n is a, c, g, or t
cgtccgctttaaggccctcccctcccgcacccggccccaggaacccggggcgccccggatcgggaacgtgcgtgatgacgcacgtgcgcgcgaagacgtggggacgcaggcgggtcgtagagagcgttcagccgtctgtatatctccccagatacctgaaactgaccacctgagtacgttttcccattgctgagctgtttccctgatatctggccatgcaacggagatcaagagggataaatactggacttattctactcctttctcaaatcttccatgttgggatcaacaatattccacctgtcaccctagcaactttggccctcaacatctggttcttcttgaaccctcagaagccactgtatagctcctgccttagtgtggagaagtgttaccagcaaaaagactggcagcgtttactgctctctccccttcaccatgctgatgattggcatttgtatttcaatatggcatccatgctctggaaaggaataaatctagaaagaagactgggaagtagatggtttgcctatgttatcaccgcattttctgtacttactggagtggtatacctgctcttgcaatttgctgttgccgaatttatggatgaacctgacttcaaaaggagctgtgctgtaggtttctcaggagttttgtttgctttgaaagttcttaacaaccattattgccctggaggctttgtcaacattttgggctttcctgtaccgaacagatttgcttgttgggtcgaacttgtggctattcatttattctcaccagggacttccttcgctgggcatctggctgggattcttgttggactaatgtacactcaagggcctctgaagaaaatcatggaagcatgtgcaggcggtttttcctccagtgttggttacccaggacggcaatactactttaatagttcaggcagctctggatatcaggattattatccgcatggcaggccagatcactatgaagaagcacccaggaactatgacacgtacacagcaggactgagtgaagaagaacagctcgagagagcattacaagccagcctctgggaccgaggaaataccagaaatagcccaccaccctacgggtttcatctctcaccagaagaaatgaggagacagcggcttcacagattcgatagccagtgaggtggcatcttgggaagacatggcctattcgtgtaattattgcccatttggctcattccccaagcccctaattcattttaattcattttaaacaaaagcagagtacaccggtattgctccagatcgctcacatcacctgggacagtcccatggccctatgagtcaactcacagcttgcggggagtgggccttctcctggcttgttcttgctcataaacaggtcacttcctcatgagagacaggttcacgctccatctctcatgtgatcaggagcctctggctgggcgtttgagaatggacttcaccggagttattacacagcgggaaaagcctatcgcgggagccggtgatgaaggggggcaccaggccctggcacgagggcagagaggggggaagggcatcaccggaaccacggcgggggagacaaagggcaaaagaggacgggcccgcgcccgggcccgcgccgcacgcggn

SEQ ID NO: 14594 - DNA, 907 bp, Homo sapiens
  misc_feature (907)..(907): n is a, c, g, or t
ctctaatcagcagcagaacaaacactcacaaagggtctccttccctcctaggacttccttcgctgggcatctggctgggattcttgttggactaatgtacactcaagggcctctgaagaaaatcatggaagcatgtgcaggcggtttttcctccagtgttggttacccaggacggcaatactactttaatagttcaggcagctctggatatcaggattattatccgcatggcaggccagatcactatgaagaagcacccaggaactatgacacgtacacagcaggactgagtgaagaagaacagctcgagagagcattacaagccagcctctgggaccgaggaaataccagaaatagcccaccaccctacgggtttcatctctcaccagaagaaatgaggagacagcggcttcacagattcgatagccagtgaggtggcatcttgggaagacatggcctattcgtgtaattattgcccatttggctcattccccaagcccctaattcattttaattcattttaaacaaaagcagagtacaccggtattgctccagatcgctcacatcacctgggacagtcccatggccctatgagtcaactcacagcttgcggggagtgggccttctcctggcttgttcttgctcataaacaggtcacttcctcatgagagacaggttcacgctccatctctcatgtgatcaggagcctctggctgggcgtttgagaatggacttcaccggagttattacacagcgggaaaagcctatcgcgggagccggtgatgaaggggggcaccaggccctggcacgagggcagagaggggggaagggcatcaccggaaccacggcgggggagacaaagggcaaaagaggacgggcccgcgcccgggcccgcgccgcacgcggn

SEQ ID NO: 14595 - DNA, 1153 bp, Homo sapiens
cagaatcttacctgtaaaactcaggagccgagaagctttaagaacagtgaggttgaagggcacaggctcttggtccttggcagcgatattaggaggcgtgcctagggaacctcggattccggggagctggacgtgaaactctgtggtggaatagaaatcctcagggcatgagctatacctaaaacgtaatggtattaagaattctggttcagccgtctgtatatctccccagatacctgaaactgaccacctgagtacgttttcccattgctgagctgtttccctgatatctggccatgcaacggagatcaagagggataaatactggacttattctactcctttctcaaatcttccatgttgggatcaacaatattccacctgtcaccctagcaactttggccctcaacatctggttcttcttgaaccctcagaagccactgtatagctcctgccttagtgtggagaagtgttaccagcaaaaagactggcagcgtttactgctctctccccttcaccatgctgatgattggcatttgtatttcaatatggcatccatgctctggaaaggaataaatctagaaagaagactgggaagtagatggtttgcctatgttatcaccgcattttctgtacttactggagtggtatacctgctcttgcaatttgctgttgccgaatttatggatgaacctgacttcaaaaggagctgtgctgtaggtttctcaggagttttgtttgctttgaaagttcttaacaaccattattgccctggaggctttgtcaacattttgggctttcctgtaccgaacagatttgcttgttgggtcgaacttgtggctattcatttattctcaccagggacaacctgccattttgttctgaagatttgaatagcaacacagatcctaaagaagcttagtaatactgcaaagctaatgattatgactttcatccagagcactatttagaaacacttgcctgtgccaaatggaggaaggtgttcttaacaactcaccccagcaacagcaaaactatttaggcttatccaccacattgatgagagaagtactgttcttaaaatgagagccttgctcggtgtcttttccctttgcatttaaaaataaatgaaattactgaaacactattataa

SEQ ID NO: 14596 - DNA, 486 bp, Homo sapiens
attttctatatatgtaaaattagatacgtacatgtatatgtaaatgttctttaaaaaaactattaaaaacggaagcgattctttaaaaggtagatttccttttatgttgcagtcatagccacgtaagcaatggacctcatattttttttcaacagggagcctcttaaacagaatcttacctgtaaaactcaggagccgagaagctttaagaacagtgaggttgaagggcacaggctcttggtccttggcagcgatattaggaggcgtgcctagggaacctcggattccggggagctggacgtgaaactctgtggtggaatagaaatcctcagggcatgagctatacctaaaacgtaatggtattaagaattctggtaagtgggattcacaaacttgttctgaagacaatttccaaggttgtcagccatgtcaccatatggatggcttctcatgcagaggagtgagtgattattgagaaaaaaaaaa

SEQ ID NO: 14597 - DNA, 323 bp, Homo sapiens
gaggcaaaacaaaacaaaaatccatacaaataaagtatctcctccatccatgtttgcactattccttctcattcccccgtccaatgccacaatttggtaagtttgcctcaacacgttttcagttcttaacactgtgataagaataaacaatagatcccgtagtaagatgacctgttaaaaggaatggggcatggcagagatgagtttggatgaggaaaggtgtcagtccgtttgggctgctctaactaagttctgagatgtgtgttaggtaattttgactttggttgaacatcatagagtgcactcacacagacatagatgac

SEQ ID NO: 14598 - DNA, 454 bp, Homo sapiens
tttgcagatgacatgattgtatatttagaaaaccccattgtctcagcccaaaatctccttaagctgataggcaacttcagcaaagtctcaggatacaaaatcaatgtgcaaaaatcacaagcattcttatacaccaataacagacaaaaatgagcgatttaaacttactccctggcatgtgacctctggcaagttagcttctctgagcctctgtttctttatccaataaatggggatcgatcattgcacatccctcacagatttgtgctgaggattaaataacagggaaaagtcccagcagattgttgggcacataggtaggtagaggataaacatttgttcttttcctcagaatatgccaagaaacttggcgggttgggggccagaggctttggcatgtttccgaacctcctttccagttgatgcaggcagttcagtcagcatcaggtgtcac

SEQ ID NO: 14599 - DNA, 934 bp, Homo sapiens
accaggcagtcccaccctgagaagggaccaagcacagaggcggccactgcagccaactgcacagctggacccgggtagggctcctccctcgggacctccagatggctcctcacccttgaggtcccttctttttggtcagagctactctagtcgcacccactcagtcgtgaactggagcagcagccagagagagagtaagacaatggtgaatgagaagaggccaggtgacaggaacctgcaagctcatccatccacaaacatccactgagcacctgccacgggctgggccccgtgcattcaacaacaaaatgaactaaactgagcttccagcagtgatgggacccactcagcatcgccattctgcacagcctatccgcagcccctctccgataacccaccatcatttcccaccaaacaaatgaagaaagagtgcggccttcagttcagtcttcaatgtgtcttcatttgtttgcaaccgctgaacacagctatctgatatcactgtggcctgggactctcagcttccagcaagtgggagccccacctggctcatccacttcaaaagaggattgcatgctaatgaattaatacatacaagaaagtgttgcaaactctacaatcctatataaatcttaagaagattagaagtttaccaaatgctctgtaatgcattttgaagggctatcccttaaaagaaactggaaatcagcaagacaagcttttccttcttttagtgtctttatttagcctgtacgtactacttgcacacattagtttcacagttaattttaccgccttaaaaacaggactcagatcaaaacctaaacatgagaactcagccactgacagtgattttcctggtggctcccggaagtcattgctctcagagcttccatttccccctcccattaagcaaaggaaataggaggggaag

SEQ ID NO: 14600 - DNA, 794 bp, Homo sapiens
accaggcagtcccaccctgagaagggaccaagcacagaggcggccactgcagccaactgcacagctggacccgggtagggctcctccctcgggacctccagatggctcctcacccttgaggtcccttctttttggtcagagctactctagtcgcacccactcagtcgtgaactggagcagcagccagagagagagtaagacaatggtgaatgagaagaggccaggtgacaggaacctgcaagctcatccatccacaaacatccactgagcacctgccacgggctgggccccgtgcattcaacaacaatcttcaatgtgtcttcatttgtttgcaaccgctgaacacagctatctgatatcactgtggcctgggactctcagcttccagcaagtgggagccccacctggctcatccacttcaaaagaggattgcatgctaatgaattaatacatacaagaaagtgttgcaaactctacaatcctatataaatcttaagaagattagaagtttaccaaatgctctgtaatgcattttgaagggctatcccttaaaagaaactggaaatcagcaagacaagcttttccttcttttagtgtctttatttagcctgtacgtactacttgcacacattagtttcacagttaattttaccgccttaaaaacaggactcagatcaaaacctaaacatgagaactcagccactgacagtgattttcctggtggctcccggaagtcattgctctcagagcttccatttccccctcccattaagcaaaggaaataggaggggaag

SEQ ID NO: 14601 - DNA, 499 bp, Homo sapiens
gtcaggaaattgcaaagaagaattcactttaaacacattgtaaaatcgatgtgtctcaggtttcttttctgttcatgcagacaaatgtagacgcaggtaccttccctccatttgcaatggatttatagttatgtctatataatcagtggaaaaaattcttggcagcacattaattgagcccattcagatggcagcaaaagcagtatttcagggtcattggggaatcatttgtaataaattaacctcatcggtttgtcccagatgtgatgcccagggtgctctcaagaccattctgggagcctgcatgctgatgccttctctccagagcatcttctaatgtagcacacgtgtgaaaaaatcctctacttgaatctgtgtctcctccctgaggttacttatggaagcaggagagggactgaaatacttaagaagtgggaaagaattttcaatacataccactgtatgatcaatctaataaaactgatgcctttaaaacatt

SEQ ID NO: 14602 - DNA, 2518 bp, Homo sapiens
  misc_feature (808)..(808): n is a, c, g, or t
atgcgaacacaagtatatgaggggttgtgtaaaaattatttttctcttgctgtactacaaagagatagaatcaaactgctttttttcgacatactggtttttctttctgtttttcttctctttcttctatttcttgtggatattatggctaataacacaacaagtttagggagtccatggccagaaaacttttgggaggaccttatcatgtccttcactgtatccatggcaatcgggctggtacttggaggatttatttgggctgtgttcatttgtctgttctcaccttccagcgacaagcttccctggaacaagcaaattcctttccaagaaaatcaagtttcagagcttctactttccatccctttctgcaatgtccaccacttcctgtggaaactgagagtcagctggtgactctcccttcttccaatatctctcccaccatcagcacttcccacagtctgagccgtcctgactactggtccagtaacagtcttcgagtgggcctttcaacaccgcccccacctgcctatgagtccatcatcaaggcattcccagattcctgagtagggtggcttttggtttttgtttctttcttgtcttgtcttttattgaaaggaaatcaaaaataggctaaacagaattttgagggcatggcccaaataactcatgagttccaagttgaaacatggttgtgcaagttggacattacaatgtttttagtagagatgaagtgtcactatgttaccaaggctggtctcaaactcctaaactcagatgatcctcctgcctcggcctcccaaagtgntggaattagcctggccaatcttggatttttaatggaatatgtgggcacaaaatgacagaacataggacattctaaagttccttgatttgatcattataagaagtgtgggactcaagcacaggaaactgaactcttttggtgtcattggatgtttcatttttgacactaattttttctggacaaactctttatgtgtttttcccaagaatagttatctacttcctggaggcaaaatccttggatttactaacatgatgatttaccttttcttcaccgttgtcgttacattgttagaaaagcaacaggaaaaaatccaattcatttgacctaaaaacaagcctcaagtttaaaaccaagctcacgtttttcttaagggaaaaattttctttcttaaacttacatctagcaacttggaaagcactttctctggggatcttcttttgtaactttgcagacaaataagtatgagtcactggggagagagtttgttattgaaatagatgttgcccatgaagaattctccttcctggattgactcttaatcatcaggcatcattcctggtttgcttctctacgaatctcaattccaacttctctgcagagtctgtacagtgattaagccatgccagatggtctttggtgcacacagttatttaagaatccacttccacaggtggctgcccttgtaaggaagaatgcatccctaaatgtggccaccagagagttccagtgggcagatgtctgtggctgcccttctcatttaaggacatgagttcactggagtattactcaaaaagtctgtggttcatttccagtattgtgaatatttagtttatgtggccgtttctttgtttctttgaacagtgggattttcagtgaaaaagtaccctctttttcatttcctattgcagtggtcacagctaatagtgtctgaacatggttcaagaataagagattccatgtagcattttctttattattttcatttcccttatattatccatcattccttaaggacaattattcttaataatgcttatagaaaatgttctctaattaaacatgccaaaaggaaaaagtaagagaaagagggagcaagaagaaaatggaagaaaaagggaaaaaagctaaccggataaccaatttgttataagttggttttcaacaaagaaatttagcagccaagtaaggtttcaagggaatattaacttggtatcagggctacttttttttttttttttttacttgcatgtcatccttaatgtctaacatgaaaaatcagcaaagagtatggtttttatcaagaatttgtgttgggagtaaaaactgctttatagctcccaaattaggaagagaagagcagaaatcctctggggcatttaaccatctggcagaattgttgctgcacccttatcccagttataagacagtcaaaatgactatttcctaaatattgtgagtgtatgaaatgtgaaattaaagcaaaaactggagacttttaatgtatttctttaatttgaaatgttttgtggattgtgaaataaaaataaatttatgtcaagttttattcaaaattcatttatgaaataatgccaacactgttctaaaaagcaaggagtcaagaaattataaaattcagattaaatcaggaaaacacattagatggaaaattatactatagaatttgagcttattaaaatttattgcata

SEQ ID NO: 14603 - DNA, 1103 bp, Homo sapiens
atgcgaacacaagtatatgaggggttgtgtaaaaattatttttctcttgctgtactacaaagagatagaatcaaactgctttttttcgacatactggtttttctttctgtttttcttctctttcttctatttcttgtggatattatggctaataacacaacaagtttagggagtccatggccagaaaacttttgggaggaccttatcatgtccttcactgtatccatggcaatcgggctggtacttggaggatttatttgggctgtgttcatttgtctgtctcgaagaagaagagccagtgctcccatctcacagtggagttcaagcaggagatctaggtcttcttacacccacggcctcaacagaactggattttaccgccacagtggctgtgaacgtcgaagcaacctcagcctggccagtctcaccttccagcgacaagcttccctggaacaagcaaattcctttccaagaaaatcaagtttcagagcttctactttccatccctttctgcaatgtccaccacttcctgtggaaactgagagtcagctggtgactctcccttcttccaatatctctcccaccatcagcacttcccacagtctgagccgtcctgactactggtccagtaacagtcttcgagtgggcctttcaacaccgcccccacctgcctatgagtccatcatcaaggcattcccagattcctgagtagggtggcttttggtttttgtttctttcttgtcttgtcttttattgaaaggaaatcaaaaataggctaaacagaattttgagggcatggcccaaataactcatgagttccaagttgaaacatggttgtgcaagttggacattacaatgtaaaacacattttcttcaaacacgttttcccttttgtttcaaaaaatgtaatattttcccccaagcgttttatatttatgtattttgtattcaatgtgaggcttattaaaaatagtgattctaatgtaagaatcagctaagatgcattatatatattttaattaaaattaaaacttcagatatttgtggattacaatcctcatttacttccaatgtgactaaaaagagaaaaaaaatcactgtgt

SEQ ID NO: 14604 - DNA, 2818 bp, Homo sapiens
  misc_feature (1108)..(1108): n is a, c, g, or t
tttctctagtgctgtttggaatacatcccacgtatgtgtgattcaggagtcaaccaaagatatgtgaaatgtttataaataaaatttggggattctcctctctggctttctcttctccaggatttccctctcacattctcagcagctcttgtttccacaatctctgtcctttgtttctcaagatcagaaacagtgcaggttttcgactgtagctttacctgtcccagactggaagcttccctcaggttaaaaggtttgaaaactggagcttgactagtacttgctgttcttttcttccaggtctcaactcctctccagtagctacaagcatttggtcattcttaaggcctttagaggaccttatcatgtccttcactgtatccatggcaatcgggctggtacttggaggatttatttgggctgtgttcatttgtctgtctcgaagaagaagagccagtgctcccatctcacagtggagttcaagcaggagatctaggtcttcttacacccacggcctcaacagaactggattttaccgccacagtggctgtgaacgtcgaagcaacctcagcctggccagtctcaccttccagcgacaagcttccctggaacaagcaaattcctttccaagaaaatcaagtttcagagcttctactttccatccctttctgcaatgtccaccacttcctgtggaaactgagagtcagctggtgactctcccttcttccaatatctctcccaccatcagcacttcccacagtctgagccgtcctgactactggtccagtaacagtcttcgagtgggcctttcaacaccgcccccacctgcctatgagtccatcatcaaggcattcccagattcctgagtagggtggcttttggtttttgtttctttcttgtcttgtcttttattgaaaggaaatcaaaaataggctaaacagaattttgagggcatggcccaaataactcatgagttccaagttgaaacatggttgtgcaagttggacattacaatgtttttagtagagatgaagtgtcactatgttaccaaggctggtctcaaactcctaaactcagatgatcctcctgcctcggcctcccaaagtgntggaattagcctggccaatcttggatttttaatggaatatgtgggcacaaaatgacagaacataggacattctaaagttccttgatttgatcattataagaagtgtgggactcaagcacaggaaactgaactcttttggtgtcattggatgtttcatttttgacactaattttttctggacaaactctttatgtgtttttcccaagaatagttatctacttcctggaggcaaaatccttggatttactaacatgatgatttaccttttcttcaccgttgtcgttacattgttagaaaagcaacaggaaaaaatccaattcatttgacctaaaaacaagcctcaagtttaaaaccaagctcacgtttttcttaagggaaaaattttctttcttaaacttacatctagcaacttggaaagcactttctctggggatcttcttttgtaactttgcagacaaataagtatgagtcactggggagagagtttgttattgaaatagatgttgcccatgaagaattctccttcctggattgactcttaatcatcaggcatcattcctggtttgcttctctacgaatctcaattccaacttctctgcagagtctgtacagtgattaagccatgccagatggtctttggtgcacacagttatttaagaatccacttccacaggtggctgcccttgtaaggaagaatgcatccctaaatgtggccaccagagagttccagtgggcagatgtctgtggctgcccttctcatttaaggacatgagttcactggagtattactcaaaaagtctgtggttcatttccagtattgtgaatatttagtttatgtggccgtttctttgtttctttgaacagtgggattttcagtgaaaaagtaccctctttttcatttcctattgcagtggtcacagctaatagtgtctgaacatggttcaagaataagagattccatgtagcattttctttattattttcatttcccttatattatccatcattccttaaggacaattattcttaataatgcttatagaaaatgttctctaattaaacatgccaaaaggaaaaagtaagagaaagagggagcaagaagaaaatggaagaaaaagggaaaaaagctaaccggataaccaatttgttataagttggttttcaacaaagaaatttagcagccaagtaaggtttcaagggaatattaacttggtatcagggctacttttttttttttttttttacttgcatgtcatccttaatgtctaacatgaaaaatcagcaaagagtatggtttttatcaagaatttgtgttgggagtaaaaactgctttatagctcccaaattaggaagagaagagcagaaatcctctggggcatttaaccatctggcagaattgttgctgcacccttatcccagttataagacagtcaaaatgactatttcctaaatattgtgagtgtatgaaatgtgaaattaaagcaaaaactggagacttttaatgtatttctttaatttgaaatgttttgtggattgtgaaataaaaataaatttatgtcaagttttattcaaaattcatttatgaaataatgccaacactgttctaaaaagcaaggagtcaagaaattataaaattcagattaaatcaggaaaacacattagatggaaaattatactatagaatttgagcttattaaaatttattgcata

SEQ ID NO: 14605 - DNA, 2607 bp, Homo sapiens
  misc_feature (897)..(897): n is a, c, g, or t
atgcgaacacaagtatatgaggggttgtgtaaaaattatttttctcttgctgtactacaaagagatagaatcaaactgctttttttcgacatactggtttttctttctgtttttcttctctttcttctatttcttgtggatattatggctaataacacaacaagtttagggagtccatggccagaaaacttttgggaggaccttatcatgtccttcactgtatccatggcaatcgggctggtacttggaggatttatttgggctgtgttcatttgtctgtctcgaagaagaagagccagtgctcccatctcacagtggagttcaagcaggagatctaggtcttcttacacccacggcctcaacagaactggattttaccgccacagtggctgtgaacgtcgaagcaacctcagcctggccagtctcaccttccagcgacaagcttccctggaacaagcaaattcctttccaagttcctgtggaaactgagagtcagctggtgactctcccttcttccaatatctctcccaccatcagcacttcccacagtctgagccgtcctgactactggtccagtaacagtcttcgagtgggcctttcaacaccgcccccacctgcctatgagtccatcatcaaggcattcccagattcctgagtagggtggcttttggtttttgtttctttcttgtcttgtcttttattgaaaggaaatcaaaaataggctaaacagaattttgagggcatggcccaaataactcatgagttccaagttgaaacatggttgtgcaagttggacattacaatgtttttagtagagatgaagtgtcactatgttaccaaggctggtctcaaactcctaaactcagatgatcctcctgcctcggcctcccaaagtgntggaattagcctggccaatcttggatttttaatggaatatgtgggcacaaaatgacagaacataggacattctaaagttccttgatttgatcattataagaagtgtgggactcaagcacaggaaactgaactcttttggtgtcattggatgtttcatttttgacactaattttttctggacaaactctttatgtgtttttcccaagaatagttatctacttcctggaggcaaaatccttggatttactaacatgatgatttaccttttcttcaccgttgtcgttacattgttagaaaagcaacaggaaaaaatccaattcatttgacctaaaaacaagcctcaagtttaaaaccaagctcacgtttttcttaagggaaaaattttctttcttaaacttacatctagcaacttggaaagcactttctctggggatcttcttttgtaactttgcagacaaataagtatgagtcactggggagagagtttgttattgaaatagatgttgcccatgaagaattctccttcctggattgactcttaatcatcaggcatcattcctggtttgcttctctacgaatctcaattccaacttctctgcagagtctgtacagtgattaagccatgccagatggtctttggtgcacacagttatttaagaatccacttccacaggtggctgcccttgtaaggaagaatgcatccctaaatgtggccaccagagagttccagtgggcagatgtctgtggctgcccttctcatttaaggacatgagttcactggagtattactcaaaaagtctgtggttcatttccagtattgtgaatatttagtttatgtggccgtttctttgtttctttgaacagtgggattttcagtgaaaaagtaccctctttttcatttcctattgcagtggtcacagctaatagtgtctgaacatggttcaagaataagagattccatgtagcattttctttattattttcatttcccttatattatccatcattccttaaggacaattattcttaataatgcttatagaaaatgttctctaattaaacatgccaaaaggaaaaagtaagagaaagagggagcaagaagaaaatggaagaaaaagggaaaaaagctaaccggataaccaatttgttataagttggttttcaacaaagaaatttagcagccaagtaaggtttcaagggaatattaacttggtatcagggctacttttttttttttttttttacttgcatgtcatccttaatgtctaacatgaaaaatcagcaaagagtatggtttttatcaagaatttgtgttgggagtaaaaactgctttatagctcccaaattaggaagagaagagcagaaatcctctggggcatttaaccatctggcagaattgttgctgcacccttatcccagttataagacagtcaaaatgactatttcctaaatattgtgagtgtatgaaatgtgaaattaaagcaaaaactggagacttttaatgtatttctttaatttgaaatgttttgtggattgtgaaataaaaataaatttatgtcaagttttattcaaaattcatttatgaaataatgccaacactgttctaaaaagcaaggagtcaagaaattataaaattcagattaaatcaggaaaacacattagatggaaaattatactatagaatttgagcttattaaaatttattgcata

SEQ ID NO: 14606 - DNA, 752 bp, Homo sapiens
tgagctcaggagtttgagaccatcctgggcaacatagtgagacctggtctcttgaaaaaaaaaaagtggatggaacttgtagcagagaattttatctacttctcaacctgcttcagaatacccatttgagatgttcccctggaaagatgaacacaatactgcatctgaagccatttcttcccacctaacattcttaaaatgattagagtctaaactttgtcattcattcctaattctggagctctgaggttgaggtgttcagagtttggtgaataattgggtttaagttttaacattttagtaataataaaagcaaacacatacatgttaaggcctgacaataggttgcaatacccatgcattgggactcatacccagcataaatggtgagggactgaacattagtgctttgagcaagaattggttaactacctgagatctctaaaacagtaatttgaattactaatacataaaccacaagtctcttcgaattgttaattgcctaaatttaccctaaaacttagttaacgctgcagtgcctttattaaagcttttttttggggggggggtgggcacagctactccataactttaaattttaaagcatgaaggtgatctagctagtgttagtgcttgagttggtagttacataggctgctcttgaatcgtcctgttttctttgcctagtattagcaccacaggtacatatttgtaaaataagcattaaaagtactttgtccagctaaaaaaag

SEQ ID NO: 14607 - DNA, 343 bp, Homo sapiens
aaggatgtttattccccattggtgtagggagctgatttgataaaggcacattttttgttacaaggttgttctatggcaggcaatttgtagggaaaccaaagcacattctgatagcttacatgcaaggtggaggttttgctacttacctgcaagatctgggtgggcacagctactccataactttaaattttaaagcatgaaggtgatctagctagtgttagtgcttgagttggtagttacataggctgctcttgaatcgtcctgttttctttgcctagtattagcaccacaggtacatatttgtaaaataagcattaaaagtactttgtccagctaaaaaaag

SEQ ID NO: 14608 - DNA, 495 bp, Homo sapiens
cgctcccgatcgggctaaaggcttgccattgttcctgcacggctaagtgcctgggttcatcctaatcaagctgaacattagtcactgggttccacggttctcttccatgacccatggcttctaatagagctataacactcaccgcatggcccaagattccattccttggaatctgtgaggccaagaaccccaggtcagagaacatgaggcttgccaccattttggaagtggcctgccaccatcttgggagctctgggagcaaggaccccctggtaacagtagtagatacatagaatttttaaataaacatacttatattaagggtactcttagggtctatactaagaaattttgcatgcttgtcattaaaagctttgagtccaagtcctgtgtgtgtgtatatgactttgactctaagtcaagtgtaaatgtaactgtatagatatgccatgtatataatgtaaataaaatatatacatatatttataaataagg

SEQ ID NO: 14609 - DNA, 755 bp, Homo sapiens
aaaccatgtccattcattgggaagatccagcccacatgcccttgtgcctattaatcctgcaaaaaaggatactgcccacacaaactcccctgagggtggccttggcagctggtggtggtgcctgtctctgcccacacagactgcctcgccactgccaggtcccacgtagagctccagtctctaacttcccagaaacaaacctaactaacagctaacctggtgtcttgcctgactgactgcagtttgttttttttttttttctttacaacaaatattaattgctttgccttatttcccatagtgtagaaaccttgagtcttttcaagcctcctgagtacaaattctttacttggaaactttttgtactattgagtgagatcaaaggcttttagacttggtcccagtggggtggtgcttgaagtgacataggaagggattcacagcttctctggaaatagtacacctgagctacagaaattgttcttgttacattgaaaactggacaggtgggtttccttgtgggcatggggctgtgggaagctgcagaggagcatctgttggaacccttatgctcctgggactcaggtgtgtggatagccaacacagaagttaactgacaccaccaggcttattactggttgaagagaaatgagacttgtcaatgggctagggccgggcggctctcagggagactgctaggcttgtgctctccctccctggcctctctagtgtgaggtctttttgcctctcttggc

SEQ ID NO: 14610 - DNA, 412 bp, Homo sapiens
tttaaactgattgaatcagcccactcagattaaagtctgaccgggcacagtggctaacccctgcaatcccagcactttggaaggccaaggcaggtggatcacttgagctcaggagtttgagaccaaccgtgcaacataatgaaaccccgtctctacaaacaaattagccaggcgtggtggcatgtacctgtagtttccaggaggcagaggttgcagtgagccaagatagtaccactgcgctccagcctaggcaacagagtgagatcctgtctcaaaaaaatttaaaaaaaaaactgaattgtaatcacatctacaaaatgccttcaaagcaacacctagatacagtatctgaataaccaaggactatatcctagtcaagtttaacactatgggaaggaaagaactacacagc

SEQ ID NO: 14611 - DNA, 257 bp, Homo sapiens
cattctgctctcctctcattggctctgttctactcctgtctgcgcacactctttcagcttccctgcaagtggctcgccttggtccctagagcagttacggctctgatgacgtcgtatcctcagagtaacgtggtcattttgagtactgttctgcagcttactttttcttttcctaatcaatgaatcaatgaatatactcttgacaaacattttctccattatgcagtattctattatatgcctatgcgaggatttat

SEQ ID NO: 14612 - DNA, 536 bp, Homo sapiens
  misc_feature (44)..(44): n is a, c, g, or t
  misc_feature (65)..(65): n is a, c, g, or t
  misc_feature (87)..(87): n is a, c, g, or t
  misc_feature (91)..(91): n is a, c, g, or t
  misc_feature (101)..(101): n is a, c, g, or t
  misc_feature (142)..(142): n is a, c, g, or t
  misc_feature (144)..(144): n is a, c, g, or t
  misc_feature (162)..(162): n is a, c, g, or t
  misc_feature (176)..(176): n is a, c, g, or t
  misc_feature (195)..(195): n is a, c, g, or t
  misc_feature (197)..(197): n is a, c, g, or t
ttcgtctatttcatttaaatggaatcatgcagtacattgtgttntgtgtgtgccttcatccactnaatgtctttgagattcattctnggtngtcgcttgtntgagaagctcgtcatgtccatgccgagtagtactccattgntngaatatgccacatttagnttatcattcttctnttacatgacatgctttccnanactctctcactctttctctgtctcactctctcttacacaacacacacactcataagaagacacctatatacatttttttcctgaaccattggtaagtaatttgcacacaggatgtcccttcaccccccagtccaccaatacttcggtgtgtttcctaagaacaaaggccttctggaagtttcacattaattccatactggatctacagtccgagttcagatttcaccaattgtcccaataaagtcctttaggtttttctggcccaggatcacttgtcacttttggttgtcaggtctctttaagtctccttcagccttatgtgttgtcgacctttttttt

SEQ ID NO: 14613 - DNA, 473 bp, Homo sapiens
tctagaggatcgctgtatccccaccctggtgcatgcctgtaatcccagctacttgggagactgaggcaggagaattgcttgaacctgggtaacagagtgagactctgtatcaaaaaaagaaaaaataaagcaaacaaagaacagtttacttgtgtggttacagaaagttagtaaacaggcttttatatgctaataaccatttggactaaggagaagaggatataatatgccaatattgtagaaacttacttgacaagggaacctttactcttggagttcagtgtggaattagggtaggtgttctgttatcaattgtggtacatctatttgatggaatattaagtagtcattaaaacgattattttgaagatgatagcagcgtggaaaatgcctgtataaagacatcagcattcaaattagtttgctacaatgattacaattatggtaaatatccatgcatggaaaattaaaac

SEQ ID NO: 14614 - DNA, 761 bp, Homo sapiens
cagtatgacctcactttaacttgattacatatgtaaagtccctgtttacaaataaggtaacattaacagatacctggattaggacttcagcatattttggaagggggcataattcaacccacaatagatggcagtatttcccaaactaatcttccgattaagtgtaatccctatcaaaatcctggtacttttttttgcagaaattgacacactgatattaaaattcctgacccgaggtcaggagttcgagaacaggctggccaacgtagcgaaaccctgcctctactaaaaatacaaaaattagctgagcgttgtggtgcatgcctgtaatcccagctacttgggagactgaggcaggagaattgcttgaacctgggtaacagagtgagactctgtatcaaaaaaagaaaaaataaagcaaacaaagaacagtttacttgtgtggttacagaaagttagtaaacaggcttttatatgctaataaccatttggactaaggagaagaggatataatatgccaatattgtagaaacttacttgacaagggaacctttactcttggagttcagtgtggaattagggtaggtgttctgttatcaattgtggtacatctatttgatggaatattaagtagtcattaaaacgattattttgaagatgatagcagcgtggaaaatgcctgtataaagacatcagcattcaaattagtttgctacaatgattacaattatggtaaatatccatgcatggaaaattaaaac

SEQ ID NO: 14615 - DNA, 358 bp, Homo sapiens
aaaaaaacaatttggccaaactgacaaaactacacattcatttaacttttgacccacttctaggaatctaccctgaagatacacttccaacaatacgaaaataaatatgcacaaggctgtagcatgtgtgtaatagtaaaatattaggaacaacctaaatgaccatacacaggagagacgctaagctatgatgcactcacacaataaagcacaaggatgagaaagatctctataaactgatttagagtgatttccaagatatatttttagatgaaaaaagcaaagtatggctgggcacaatggctcacaaatgcaatcccagtgctttaggaggccaaggcaggaggatcgcttgaga

SEQ ID NO: 14616 - DNA, 460 bp, Homo sapiens
tgagcctggaggtaaaccccagtcccttggcagccttcctcggacactggctttctaatctttgcacagaaatagcagttaaacccctctctggctttagagatctaaaaatattatttaagaacgaggttccttctcatgatgtcttgttttaactctgaaattctgtggtcacatgtcttggaatcgaatgaacccatccagttccagcgtgtacaacagagtaagagaaagacttggttttatactgagacattctagaaatccaggagttcttctaggcattctgttgctacagaagcactttttctggacactttaagtcgagcagtggtttctgtctgttccgcttacttaagtgaacataagcatgatttgtcttttaaaaggtaactgttttagtactcaggtagaatttgtgctttttccttccctacatactttcctacttaaaaaaaaa

SEQ ID NO: 14617 - DNA, 1243 bp, Homo sapiens
cttgtcttagagtctgctattgggggaacccaaactaaaactggcctctgtacagcaggttgagaggcaatatagcatggtggtcagggacataggctttggagccagagtgcctgggctcaagccctggccccacagtttccttgggcaagtgactgagccattctgtgcctctatttcctcattgataaagtaggcgttgtcgtagcacacacctcatcgagtggtgtggagggttaaagaatatgacacagttaaagtgagtccccaataaatgctgttatttctaagagcatccaaatgtagaggaagtgtgcccctgaggactgagcacaccctgcttttagcctgtcctgcccccagctgaaggtgaaaccttggccgcctgccctcctgaagtcccgccactgctgctgggggttggccaactccgctaccgactgtctctgctctctaagaataggtttccctcacagatggcatctctctggatgctgctagagcatctggtgcttccaactgcacactccagggaggaaggcagtgtggtctgtgccggggagcagggctctgccttccagcagatctgagaggagtcccatttggctccttcctagctgccctccattctctaagacctgtaaaacagggatggccagagggctcttgttgcacagtaagtgctatgcttcctaaatgctagttcctgaaatagaatggtttaacctctacttactaaacacctgctacaatcctgttaattcttttgacatgtaagactaaaataaataaataaataaataaatataaaaaaaaaaaaaaaaaaaaaaaaaaaaaaaaaaaaaaaaaaaaaaaaaacaacaacaaaaaagaagacaggcgggaaagaaaaaaaaacagaagaacaaacaacaacaacagcagcgagcggtgggggcgcggcgcacgccgccgccaggagaacaactgttaacccccaacacagtggtgggggcgggcggcgcgccccacagggagtgagtagcaaagaggagggtgaatatcatgcggtcgctccgagagaacagatgtcggggcagacagaacaaagcagcgcgggggctcacacccccgaaaataaaaaaagccggggcgggcaaaaaaaggggggtctgggaaacacccgcggagaggggtcgcgacgagcgcagaggggggtactaacaaagggggggccacagagacgcgtaataaatagccccgc

SEQ ID NO: 14618 - DNA, 1611 bp, Homo sapiens
  misc_feature (337)..(337): n is a, c, g, or t
  misc_feature (1093)..(1093): n is a, c, g, or t
aaactatgcaattgagcaaaaataaggtgcatattcacattctaatatttttaaaatcttcattataaggctattcctgcttataatgaaatatttacatattagggaaattcttaacaccaaaaaaaaccgtatcatcgaagccaatggggccaggaacttaattgttgccagtaatcaatttttctctcttgttttccacgtctctttctttttctctattactacagccagtagctccactgacacattttaagtactctgcagtgataaaaagaaaagagtcaatattcctgagacatctgaagtaatgactaattggctggactagactcangtgctcatgcctcagccaatcactactgcaaggtcttggggctgatgacaatctccattcagaattcatgtccaaaatgatagaaggaaagatgttatacagatgtgaccgccagggtatttgctgtgagctaggcagccacaccacgttttatttactgttctactactatttttactgttgggcacttgcacagcaccttatatgcttgcttcatttaaattttttattaacctttttatgttgggaactggagcccaaagaagttgtgtgttcccaaagttacccaactaatcaatggcagagcctggatgcataaggaccttgaaagccagaagagcagcttatgtggtaggaaatagataaatatttaaggctttttagccagataatccctatcttatgaaaatgcatataacagactaacaaagcagcaaaagggcgaagcacagtggctcacacctgtaatcccagcactttgggaggccaaggaaggaggactgcttaaagtgaggagttcaagaccagcctgagcagcgtagcaagacctcatctctactaagaataaaagttacctgggcatggtggcatatatccataatcctagctgcttgggaggctgaagtgggaggatcccttgagcccagaacttcaaggctgagcagtgagctctgattatgccagtgcattccagccaggatgacagagcaagactgcatctcaaaaaaaaagaaagaaagaaaaagaaaaggcagnaaaggtaagttcagagacccagaggctggaagtagaaggtccaacatatatttaaaagagtttcaggaggagagaaggaaggagaggtgatctccagagatgatgtctgagaaattttcagacttgaaaaatgtgagttgtcagatcaaaggagtacattgtctcaagcagaataaattttagaaattgagacctgtacatagtaatgaaattaaagaataccaaacataacaaaattatgttaaaagttaccactgagaaaagtcaaattaccctaagagaaatgactatcatcctgtcagcagatttatcaccaacagttgtgacagaagatgatggaaaatattttcaaagtattaagagaccaaaactgagaaactagaattctatacctagctaaaccatctttcaagagaaaggacaaaataaacacattttcaaaatttaggatgcacacatactcattcaaagaagtcctaggaaatatactccaacaagaaaaaagctgaaacctgaag

SEQ ID NO: 14619 - DNA, 1834 bp, Homo sapiens
  misc_feature (337)..(337): n is a, c, g, or t
  misc_feature (1093)..(1093): n is a, c, g, or t
aaactatgcaattgagcaaaaataaggtgcatattcacattctaatatttttaaaatcttcattataaggctattcctgcttataatgaaatatttacatattagggaaattcttaacaccaaaaaaaaccgtatcatcgaagccaatggggccaggaacttaattgttgccagtaatcaatttttctctcttgttttccacgtctctttctttttctctattactacagccagtagctccactgacacattttaagtactctgcagtgataaaaagaaaagagtcaatattcctgagacatctgaagtaatgactaattggctggactagactcangtgctcatgcctcagccaatcactactgcaaggtcttggggctgatgacaatctccattcagaattcatgtccaaaatgatagaaggaaagatgttatacagatgtgaccgccagggtatttgctgtgagctaggcagccacaccacgttttatttactgttctactactatttttactgttgggcacttgcacagcaccttatatgcttgcttcatttaaattttttattaacctttttatgttgggaactggagcccaaagaagttgtgtgttcccaaagttacccaactaatcaatggcagagcctggatgcataaggaccttgaaagccagaagagcagcttatgtggtaggaaatagataaatatttaaggctttttagccagataatccctatcttatgaaaatgcatataacagactaacaaagcagcaaaagggcgaagcacagtggctcacacctgtaatcccagcactttgggaggccaaggaaggaggactgcttaaagtgaggagttcaagaccagcctgagcagcgtagcaagacctcatctctactaagaataaaagttacctgggcatggtggcatatatccataatcctagctgcttgggaggctgaagtgggaggatcccttgagcccagaacttcaaggctgagcagtgagctctgattatgccagtgcattccagccaggatgacagagcaagactgcatctcaaaaaaaaagaaagaaagaaaaagaaaaggcagnaaaggtaagttcagagacccagaggctggaagtagaaggtccaacatatatttaaaagagtttcaggaggagagaaggaaggagaggtgatctccagagatgatgtctgagaaattttcagacttgaaaaatgtgagttgtcagatcaaaggagtacattgtctcaagcagaataaattttagaaattgagacctgtacatagtaatgaaattaaagaataccaaacataacaaaattatgttaaaagttaccactgagaaaagtcaaattaccctaagagaaatgactatcatcctgtcagcagatttatcaccaacagttgtgacagaagatgatggaaaatattttcaaagtattaagagaccaaaactgagaaactagaattctatacctagctaaaccatctttcaagagaaaggacaaaataaacacattttcaaaatttaggatgcacacatactcattcaaagaagtcctaggaaatatactccaacaagaaaaaagctgaaacctgaagaaaaaaataaacaaattagcaagtatcttggttaatatgaatcagtagtatgtttttaagtgctagtattttagaattttaaaaccaggtgaaattaaaatatctattaaaatatggtagatgatggtaggagggagttctgagctaaaatattctggagttattttattcaaaggcaatgaaatattccttcaccttagactttgacaagttatactggtta

SEQ ID NO: 14620 - DNA, 343 bp, Homo sapiens
agctacatgatctttttaagagatagtgaaaagcattgataagatccagtgtcccttcatgataaaaacattaaacaatagggaaagtttggaacttccttaacttgttaaaaagcatctgtaaaaaaacccacggttaacatcatagtggaggattggaggttttcctgctaattcaggaacaagatggacccctcctggcatttctattcaacattgtactggaggatctagtcaggaaaatgaagcccatttttttttttcaaataataaaagcatcgaaattggaaagggagaagtaaaatatacacggataacatgatttaatatgtagaaaattcta

SEQ ID NO: 14621 - DNA, 1209 bp, Homo sapiens
catttttttccttctttctttctttgcccatttttttctttcttttatttggaagttacatgtcttagttctgatgttttaattttataataggtttaacgcatataattcctaatttttaagatgtttaactagttttataacagatttaatttagcatacttaagttaaattgatccttagtaccttgtctcttaccccgcaagtatcaaatgattattgttatttaataccatcagtgtattaaatatatgtttaccaacatgtgtttacagatttttctttttacaaaaaaaaaccctgagttataatgtgcgtagagttaggttcacaaataataagtgtacagatcagtgaattttatatatgtatatggtcctatcaggatatagatttacaacacctcagaagactttgtttttccctactctaggtaattttcactctcaaaaataaccactattcagacctctgtcatgatatattggtccaatcttgatcttcacataaattgagtcataaacaggtatccttttgtgtttgttttatgcagttttaggtcgatgagattcttccatatagtggcatatagcagtacttttttttctatagtattgtataagtatatcacaaattatccattctactgttgatggacatttattttttccagtgtttctgactattacaaataaatctcatttgaacatatctttggtagacataaaaacttacttctcatgaacatacatctggtcagcctaaataatgtcagacagttttgccacatagctgtatcgatttatgttcccatcagaaatatatataagttcatcagctccagatcctcatcacaatttgatattgtcactatagttaattttagccacgtgaaatggatataggtatcttattatggttttaatttgtattactttgatgactaattatattaagcatctttttgtatgcttattggccatttgaataccatattttgtgatgcacctgcacatgtattttgtctatttgggggtaaaggggtggtttctttttttaattaattttgtgagtgtgttaaattatattccgaatatgcatatatattttttcttgtatcagcgatttgcaaatatcctcttccaatctttggcttgctttttcccattggtaattatgtcttttaataaaaagaacctctttatttaa

SEQ ID NO: 14622 - DNA, 167 bp, Homo sapiens
gttctagatctatctgacaccaaaccctgtgtccctcaacactgttgattgctgagtctggtatcatcattttatagaaaataaagcagactgaggaaactgaagtcattctgagtcttagttcatgcatctataaaatgggaataacaatactttcctacctcttt

SEQ ID NO: 14623 - DNA, 4156 bp, Homo sapiens
ggctccttacccacccggagacttttttttgaaaggaaactagggagggagggagagggagagagggagaaaacgaaggggagctcgtccatccattgaagcacagttcactatgatcttactcacattcagcactggaagacggttggatttcgtgcatcattcgggggtgtttttcttgcaaaccttgctttggattttatgtgctacagtctgcggaacggagcagtatttcaatgtggaggtttggttacaaaagtacggctaccttccaccgactgaccccagaatgtcagtgctgcgctctgcagagaccatgcagtctgccctagctgccatgcagcagttctatggcattaacatgacaggaaaagtggacagaaacacaattgactggatgaagaagccccgatgcggtgtacctgaccagacaagaggtagctccaaatttcatattcgtcgaaagcgatatgcattgacaggacagaaatggcagcacaagcacatcacttacagtataaagaacgtaactccaaaagtaggagaccctgagactcgtaaagctattcgccgtgcctttgatgtgtggcagaatgtaactcctctgacatttgaagaagttccctacagtgaattagaaaatggcaaacgtgatgtggatataaccattatttttgcatctggtttccatggggacagctctccctttgatggagagggaggatttttggcacatgcctacttccctggaccaggaattggaggagatacccattttgactcagatgagccatggacactaggaaatcctaatcatgatggaaatgacttatttcttgtagcagtccatgaactgggacatgctctgggattggagcattccaatgaccccactgccatcatggctccattttaccagtacatggaaacagacaacttcaaactacctaatgatgatttacagggcatccagaagatatatggtccacctgacaagattcctccacctacaagacctctaccgacagtgcccccacaccgctctattcctccggctgacccaaggaaaaatgacaggccaaaacctcctcggcctccaaccggcagaccctcctatcccggagccaaacccaacatctgtgatgggaactttaacactctagctattcttcgtcgtgagatgtttgttttcaaggaccagtggttttggcgagtgagaaacaacagggtgatggatggatacccaatgcaaattacttacttctggcggggcttgcctcctagtatcgatgcagtttatgaaaatagcgacgggaattttgtgttctttaaaggtaacaaatattgggtgttcaaggatacaactcttcaacctggttaccctcatgacttgataacccttggaagtggaattccccctcatggtattgattcagccatttggtgggaggacgtcgggaaaacctatttcttcaagggagacagatattggagatatagtgaagaaatgaaaacaatggaccctggctatcccaagccaatcacagtctggaaagggatccctgaatctcctcagggagcatttgtacacaaagaaaatggctttacgtatttctacaaaggaaaggagtattggaaattcaacaaccagatactcaaggtagaacctggatatccaagatccatcctcaaggattttatgggctgtgatggaccaacagacagagttaaagaaggacacagcccaccagatgatgtagacattgtcatcaaactggacaacacagccagcactgtgaaagccatagctattgtcattccctgcatcttggccttatgcctccttgtattggtttacactgtgttccagttcaagaggaaaggaacaccccgccacatactgtactgtaaacgctctatgcaagagtgggtgtgatgtagggttttttcttctttctttcttttgcaggagtttgtggtaacttgagattcaagacaagagctgttatgctgtttcctagctaggagcaggcttgtggcagcctgattcggggctgacctttcaaacccagagggttgctggtcctgcacatgagtggaaatacactcatggggaagcttccatgatgcacagtatctgctgttcttcagtcctttgtctttctttgtcattcagttctaggcctttcctctgcacgctcaatgcccagtaaaatttcaggattaactaaagaagaggagaaaaagaagaaaagattctttcttaaaagtttctaatgttattttccttctgaagtctgagcccatttctggggggagaaaaaaaaagcaaatcagaaaacccacggtttttctttttttctttttttctttttttcttttttggctttaaaacaaagggaaaaaagagtttaaacaaaaaacccacaattgaacttccaggaaagtgtgaagacccaaaacagctttgtctccaaagaagatagctctctgactgctttggatagtctcctacgcaccattttgtcaggtgggagatttggaatacacatgcaggacgttagactgttgggacagccattttccaacaaccaaggggccaaaatatctgcaatatagtaacagccttaataatacatccatttttcgttttatacagctgttctcagctatgtcctcagtgtttcatcgcatttatattcatagctattttcaaacacgaccttttaattgtttttgaagtatttctaaaccccttctttccaccttactcctccatcattgtgataatcttcccaagttgtattaggccattgccccagggcttccatgggtctgtcagggaatattcgttacaaagcagagcaagaaggcagtatgtctctgaagtggattacagtggcagttattttacaaggatttgtgacactagtaacatacccgtgtaaccctttgagaactatcagaccagctttcagagtcttaggattgtcggtcttgcgatctgataaattatagaactgggcaatggtaaaaacagtcacaagttcaagaagttcaggtttttaaaacagatatcctataatgtcatataatttttaaatgatttacaagactacataaatgtgtttataacaaacagaaatgatgttacttgccaaaatttttctggcaaataaaaaaggtattttattaagattctcataaatctgaaattttatttgaaaaactgataatagcctaagtcttcttttcttttttttaggcatactgaatttctgttttaaaatccattgcatgaaaattcaatttgccttggtatatgcagttagcattgccattttaaaaatgaattaaaacggtgactctgaagttgcatgaatatcctccagtgcattacctattgcatgtccaccatagttctcaaagggttagtgtggcttctggcatttagccgtccatttgatcactgacagagccaagagaccaccaaagcatttcattgttgagtgtaatttgtcctaacagcagtattgtcattttcatgtgacctgcagagcaggtttgtatcaatatttttttcctagagaaaagtcagcaactgacagacctctttattgatttttaggagctgcttcttgcagtgaaaggctttacagccactgggctgtgaacttattagagatggtcagaatgaatgcaccccatgagtcagacattggctttgtgtgaaagccagctttgaggggattagcttttgaaacaatgaacagcttgccttgaacttgattattgatctattgactgtcattaacaacaacttaaacattgtcttctgtgaaaattttccttgaagagtcctgttctatgtctttgccctttgacctttaacttgcaaactggcacaaactgaaggaaatctggtgttgcttctccattggattagttgttctctaaaacctagtaagcatgagctgtttccttagagtggagagagtggtgatggcagatctgcagatggacactttgctctttacatgcacactctgaaaatgccctataggtagaagtgaattttaatttcattttaatataatttcaagtctaaattcatcattttagtacaaattacaaaaactataggaaaaaaaaaacc

SEQ ID NO: 14624 - DNA, 1644 bp, Homo sapiens
ggctccttacccacccggagacttttttttgaaaggaaactagggagggagggagagggagagagggagaaaacgaaggggagctcgtccatccattgaagcacagttcactatgatcttactcacattcagcactggaagacggttggatttcgtgcatcattcgggggtgtttttcttgcaaaccttgctttggattttatgtgctacagtctgcggaacggagcagtatttcaatgtggaggtttggttacaaaagtacggctaccttccaccgactgaccccagaatgtcagtgctgcgctctgcagagaccatgcagtctgccctagctgccatgcagcagttctatggcattaacatgacaggaaaagtggacagaaacacaattgactggatgaagaagccccgatgcggtgtacctgaccagacaagaggtagctccaaatttcatattcgtcgaaagcgatatgcattgacaggacagaaatggcagcacaagcacatcacttacagtataaagaacgtaactccaaaagtaggagaccctgagactcgtaaagctattcgccgtgcctttgatgtgtggcagaatgtaactcctctgacatttgaagaagttccctacagtgaattagaaaatggcaaacgtgatgtggatataaccattatttttgcatctggtttccatggggacagctctccctttgatggagagggaggatttttggcacatgcctacttccctggaccaggaattggaggagatacccattttgactcagatgagccatggacactaggaaatcctaatcatgatggaaatgacttatttcttgtagcagtccatgaactgggacatgctctgggattggagcattccaatgaccccactgccatcatggctccattttaccagtacatggaaacagacaacttcaaactacctaatgatgatttacagggcatccagaagatatatggtccacctgacaagattcctccacctacaagacctctaccgacagtgcccccacaccgctctattcctccggctgacccaaggaaaaatgacaggccaaaacctcctcggcctccaaccggcagaccctcctatcccggagccaaacccaacatctgtgatgggaactttaacactctagctattcttcgtcgtgagatgtttgttttcaaggaccagtggttttggcgagtgagaaacaacagggtgatggatggatacccaatgcaaattacttacttctggcggggcttgcctcctagtatcgatgcagtttatgaaaatagcgacgggaattttgtgttctttaaagtgaagggagacactctatctgtaatccaagatggttggctctacaaataccattggaaatggattctagaacaaaggcagtcagtgcctgtgctctcaagacaaactgaaaagcacaagacctatgaagaattatcttccatcacatactaacaaagaacaatcaggaattgaaaatttaaaataaaaggccatttacaattgcattcgaaaacaccaaataccgagggatcaatctgcaaaaaatgtgcatgacctctacattgaaaacaacaaaacactactaaatgtttgtctttaaaggcagctgg

SEQ ID NO: 14625 - DNA, 487 bp, Homo sapiens
actaagagaagtcaataagaaaacgataactcttgggagagtccaggagggctggagtcctggtccttggtcttggaaagactcggagaactgctagggagctgggagagaactgtgtggagccatactgggaacctggacccatctgcattttcacatatccaaaacagttccgttcccaagccacccaaatgtgtgagctctcactgcatttctgcttcattactctttgaaatgaaataaggacacagctgtacctcaatttaaatcagtgattgctcttcactctgattctctatggtgcctacaatctatgacaatcaagctgttccacatagaatgaattcttgctgcttttctaggactgtgcctccactagatggaaagttaagcattccatcaaataattgcaatggggatggttggtggttgtggttgctagtcttaatctaccattgaaataaacatttggactgattactcaaaa

SEQ ID NO: 14626 - DNA, 545 bp, Homo sapiens
tgatatgttcaatagaaaagcatcatttaaaaattaatgtagtatatttttcctatagagaaataattgagaacagtaaacacttaaaaaatagtcaaataacaaaaaatgcttttcataggttgctatggtctgaatataacctcttaaaattcacatgttgaagtcctaatcccaacggaaggtattaggaggtagtgccttcaggaagtgattaggtgatgacagtgggattagtgcccttacaaaagtggactgagagagactccctgtccctttcactatgtgaggacatagtgagaaggtgttgtctatgaaccagaaagttggttcttgccaaagaaaggatctacctcgaagttagatttctagcctccagaactgtgagaaataaatttctgtcatgaataaacaacccagtgtgtgatatttgttatggtagccttaacggactaagacacaagtatattgttgtcaggtaagtgtaggaggaggaaagaagaatgcaactagaaggaaaaaaaaaccaatacattaaggaacag

SEQ ID NO: 14627 - DNA, 1320 bp, Homo sapiens
gcgcagcgcgtgcaccagcggctccggagcgagcggccgtggctgagaaggggagggcggaaagtttgtttccccgacgtcagcgccgggcgggccgcgaggctaggaggcggcgggagctgggcagagcgcggggcggccggggctctcgctccgacccgcgcccgcgacccttcctgggacccgagcccgagacccccgccggcccccccggggccgctcgcgggcatggacagcgcggccgccgccttcgccctggacaagccggcgctgggcccggggccgccgccgcctccacccgcgctggggcccggcgactgcgcccaggcgcgcaagaacttctcggtgagccacctcctggacctggaagaggtggcggcggccgggcggctggcggcgcgccccggggccagggccgaggcgcgggagggcgcagcacgggagccgtccgggggcagcagcggcagcgaggcggcgccgcaggatggtgagtgtcccagcccggggcgcggtagcgccgccaagcggaagaagaagcagcggcggaaccgcaccacgttcaacagcagccaactgcaggcgctggagcgcgtgttcgagcgcacgcactaccccgacgcctttgtgcgcgaggagcttgcccggcgcgtcaacctcagcgaggcgcgcgttcaggtctggtttcagaaccgccgcgccaagttccgcaggaatgaaagggccatgctggccagccgctctgcctcgctgctcaagtcctacagccaggaggccgccatcgagcagcccgtggctccccggcccaccgccctgagtccagattatctctcctggacagcctcgtccccctacagcacagtgccaccctacagccctgggagctcaggccccgcaaccccaggggtcaacatggccaacagcatcgccagcctccgtctcaaggccaaggagttcagcctgcaccacagccaggtgcctacggtgaactgaagtccagtcccaccaggacccagacgcctccctgggtggacagcaatagaaaagggggcagacgcccaggaagtgaccttctcctggatgagctctcctggcccgtctgtccagcctggactcccgagcccacgaggctgttgaggcccctgcagccgggcccagctcttctgtccttggccaccagagactgcagcccacaacccttggaggggttgggccggaaggtggaagagcctgccaaggacctcatttagtttgtgtattaaaaccaaaaagcttttgtctttaagaaataaaaccatttttttaagccccaaaaaaaaaaag

SEQ ID NO: 14628 - DNA, 389 bp, Homo sapiens
agcagaggttgcagtgagcctagatcatgccattgaactccggcctgggtgacaagagcaaaactctgtatcaaaaaaaaaaaaaaaaaaaggaaactgtgtcctgtgcagatttgcatctgtgtttattcatgcttaaacctctccagaaggatttgcacacatacatttgtgcacacacacccccagggtgagggaacccagtgtgaaggggccctggacacacaagaccctgggaatagtggttgcctcctcggggagggagccagaaggccaggggacaggggtggtgggacacatttcagtgttaaatgctttcatatgttctgcactatttcccatgtgcatgtgatatttattccaaaataaagttttaaaaaatactaaaa

SEQ ID NO: 14629 - DNA, 322 bp, Homo sapiens
gtcctcctgaaatcgacccttgttaatgttccttctagtaagaggcttaaatgtttgtggagacaacgccattggttgaatgctcctacaaagggcctggatgccagatttcgaaactaaaatacaggacacctagttaaatgtaaattccagatttaaataaagcaaatacttttttagaataagtatgggccatgcagtatttgggacataagtaggcatcctgtattttctctggcaaacctaaacctatatgacatctgccaaaatgggcatatctctgctctgatgttgactctgaccccaacctattttccaggga

SEQ ID NO: 14630 - DNA, 448 bp, Homo sapiens
aataggaaaaagggagagctttgaaactcacatagaaataaaaacggtcttaggggataaaccatatttatattatactacctacgccatttaaggaatgtggttatacattttctgaaaaataaaatgtcctatcctgtcttaaaaaactgaatttgtataatattgggtttgcctaaagagtaaagcacatatactaattttcttttttgttgttattttttctttttttttttttattttgagacagaatctcgctctggagtgcagtggcatgatcccaggtcactgcaacctctacctcccaggttcaagcaattctcttgtctcagcttcccaagtagctgggaccagaggctcctgccaccatgcccagttaatgtttgtatttttagtagagacaatgtttccccatgttggccaggctggtctcgaactcctgacctca

SEQ ID NO: 14631 - DNA, 464 bp, Homo sapiens
ataactcagaagcagtattcatggcttattcatttcgaaagccaccacaagtgatggtttaagctgttccaactttgtgttgttgtttttgaaataaaagaaaggctttttcttttcagtgttaggaaaagggaagacattcaagagagctgaaccaagcgctaagtatcctgaagatctaagatctaaggaccctgaagaccttagatctggctaaaaattataccaagaagcaagtgctgttataatcagagggatagggcaacgctgagcagtgaactcacagagcactcatccattcctttctgacatttgtcattttttatctatgttgtatttatttaagatcatgttttagttacatattgtaactaaaatatctcaaaacagagattgtgtatagtatttctcaaaacagagattgtgtatagtatagaaatactataaatatctcaaaacagaaa

SEQ ID NO: 14632 - DNA, 395 bp, Homo sapiens
ttaatttcttttcctgtaattagctcattcagctttcactgaagttttctagacaagaggactgatgactaaaacagtttgaatatatcctgtgctttcaactgacccagttctgatttcttttccaaggcgcatggataccacagatgtgtgtttttaagggcataaataaatacgtaacttttgaaaagatgtggtatgtattaggcacaaatgtagttgaacccaaaatgatatattttttaggctggtattgataaacaggcagcaattagagttgcattgagtcaccccgaaacggagactttaaactactaaaatccacacacggtagataattcacatattgtaagatcactttaaaaagactgtcaatctgccaggcaaaaagcagc

SEQ ID NO: 14633 - DNA, 577 bp, Homo sapiens
tcctggcctcagtgatgcctcctgatctatccataggcctggaagatcagcactgggatgacgatgagcagaatggtcatgaggatgcccagaatcagggcccagatgttcaggcacttggcggtggaggcataggcctgggccccggtcacgtcgccaaccatcttcctgtccctagacttcacggagtaggcgaatgctatgaagcccaggcagcaggggttcatgaagagggtgttgaacagtaacccgaccgccgctggtcttcgctggacaccatgaatcacactgtccaaaccttcttctctcctgtcaacagtggccagccccccaactatgagatgctcaaggaggagcacgaggtggctgtgctgggggcgccccacaaccctgctcccccgacgtccaccgtgatccacatccgcagcgagacctccgtgcccgaccatgtcgtctggtccctgttcaacaccctcttcatgaacccctgctgcctggggcttcatagcatttgcttattccgtgaagtctagggacaggaagatggttggtgacctgactggggcccaggcgtatg

SEQ ID NO: 14634 - DNA, 772 bp, Homo sapiens
ttttttttttgctgttttttcaaaaacatttcttttgacataatgtgagactcacaagaaatggtaccttttaccttctttgatggcaggtaacatcttacataaccatagtacgtttcaaaacagtaaacactggtgcaataattttagctaaactgcccacctcgtttgaattttaccagtttctgagtgcataaatgcactcaatttgactgcatttttgcaggatattttttccaagtatggaattctagggtgacactttttttccttcctgtattttaaagatactgttatactgtctacaatttgtattatttccagtgagaaatcagctatcactacggtggtttttcagtatcctccagctcctctgcagataccaaaatccacaggtaattaagtccctcatattaaatgcctagtagttgtatgtagtctatgcatataggtgcatactcctgtataccttaaatcatctctagattacttatacctaatgaaatataaatgttatatggcattctttatttgtattatttttattgtagtatgatttttttggtgtttgggttttttttcttcccccggtccatgattggttgaatccaagaatgcagaacccatggatacggaaagccaatggtattgttattcctcaaaaatggttttgttttgttttttggtatggctgcttctttgatgtgccttgatgtaattttcttcatgtttattttgcctgtggttcactggacaccttgagtctgtgggt

SEQ ID NO: 14635 - DNA, 806 bp, Homo sapiens
agcgggtttgcacgccggaccgggagagcgcggaggcagccatggtgcggttcaagcacaggtacctgctctgcgaactggtgtctgacgacccccgctgccgcctaagcctcgatgaccgagttctgagcagcctcgtacgggacacgatcgccagggtgcacggaactttcggcgcagccgcctgctccatcggcttcgcggttcgatatctcaatgcctatactggaatagtgctacttcgatgcagaaaagaattctatcagcttgtgtggtcagctcttcccttcatcacatacttggagaacaaaggacaccgttacccatgctttttcaacacattacatgtgggaggtacaataagaacatgtcagaagttcctaattcagtacaacaggagacagctgttgatcttgttgcagaactgcactgatgaaggagagcgggaagctatccagaagtctgtgacaagaagctgcttactagaggaggaggaggagtcaggtgaggaggctgcagaagcaatggagtgaacctctgctccccacacagctggctacactgctcaggcttcaggcccacttgttgaacagaacaatctgggtagcaacagcatcttccacagttttccaaactggatagctgccaaccagcagacattacccacttgaaatggagtactcagttaaactgaagttgcctttacctagcattccctggtgaagtgttgcaggttgtgaactctgtagacatctttattgcttggctaagagtagatttaataaatgtatctggtttccgtggca

SEQ ID NO: 14636 - DNA, 843 bp, Homo sapiens
agcgggtttgcacgccggaccgggagagcgcggaggcagccatggtgcggttcaagcacaggtacctgctctgcgaactggtgtctgacgacccccgctgccgcctaagcctcgatgaccgagttctgagcagcctcgtacgggacacgatcgccagggtgcacggaactttcggcgcagccgcctgctccatcggcttcgcggttcgatatctcaatgcctatactggaatagtgctacttcgatgcagaaaagaattctatcagcttgtgtggtcagctcttcccttcatcacatacttggagaacaaaggacaccgttacccatgctttttcaacacattacatgtgggaggtacaataagaacatgtcagaagttcctaattcagtacaacaggagacagctgttgatcttgttgcagaactgcactgatgaaggagagcgggaagctatccagaagtctgtgacaagaagctgcttactagaggaggaggaggagtcaggtgaggaggctgcagaagcaatggagtgaacctctgctccccacacagctggctacactgctcaggcttcaggcccacttgttgaacagaacaatctgggtagcaacagcatcttccacagttttccaaactggatagctgccaaccagcagacattacccacttgaaatggagtactcagttaaactgaagttgcctttacctagcattccctggtgaagtgttgcaggttgtgaactctgtagacatctttattgcttggctaagagtagatttaataaatgtatctggtttccgtggcaaaaaaaaaacaaaaggggcgggcgtcaaaaatatcct

SEQ ID NO: 14637 - DNA, 731 bp, Homo sapiens
agcgggtttgcacgccggaccgggagagcgcggaggcagccatggtgcggttcaagcacaggtacctgctctgcgaactggtgtctgacgacccccgctgccgcctaagcctcgatgaccgagttctgagcagcctcgtacgggacacgatcgccagggtgcacggaactttcggcgcagccgcctgctccatcggcttcgcggttcgatatctcaatgcctatactggaatagtgctacttcgatgcagaaaagaattctatcagcttgtgtggtcaggtacaataagaacatgtcagaagttcctaattcagtacaacaggagacagctgttgatcttgttgcagaactgcactgatgaaggagagcgggaagctatccagaagtctgtgacaagaagctgcttactagaggaggaggaggagtcaggtgaggaggctgcagaagcaatggagtgaacctctgctccccacacagctggctacactgctcaggcttcaggcccacttgttgaacagaacaatctgggtagcaacagcatcttccacagttttccaaactggatagctgccaaccagcagacattacccacttgaaatggagtactcagttaaactgaagttgcctttacctagcattccctggtgaagtgttgcaggttgtgaactctgtagacatctttattgcttggctaagagtagatttaataaatgtatctggtttccgtggca

SEQ ID NO: 14638 - DNA, 2000 bp, Homo sapiens
agcgggtttgcacgccggaccgggagagcgcggaggcagccatggtgcggttcaagcacaggtacctgctctgcgaactggtgtctgacgacccccgctgccgcctaagcctcgatgaccgagttctgagcagcctcgtacgggacacgatcgccagggtgcacggaactttcggcgcagccgcctgctccatcggcttcgcgggtgcaagggcgctgggggaagaggggaacccgggaggatggcgggatgtggagggggcaggcgccggaggaagaaagaaggggcacgagtggccaagcccgtgcaccgttttttgtaaggtatctctttaagcgcctgggaccccaagcgagagtccgaaattagcagagcgctaaaaggaggggcccgaaggcagtggggctttgagctagaagcctctttttacctgcttgacaggtaatttctgtaattggttgtgattgaatttgatagggtagagaattaaatgagggaagctgtgtatacttcctagtaagagctattatatgaccgattacattaacatcatatggaaaaaaattgtcaaaagtactccgggaaagcccttaaatagttggtaaagtacagaacacatgattgtcaatatatgtaaatacaggatgagctaggacagaggggcccttctttcacaccacttaaattagttcccactttaaccttgtttgagattgacttctggagagttaaatgcagatagacttaactctcctaagtcaggtgagactgagagtctccgactgctacaataattacggagcccaaatgcagtaaaacagcctgtttttcaggcaagggttttgtgggggtttttcctaaattaaaacggatcgcctcctacctgctcctatttattgaattaactagtgaattagaaagcattttcaattctaaattcattcaccagttctgagtggtgtgcaacacagtgggtgttttggcttttctcttttactcgctgatagatctacgtgccacttgcctacaacatacttttggcacatagtaggctctgttactccaaagttttccttttttcgagacagtctggctgttgcccaggctgctggagtgcagcagcgagatcgggggtcattgctgcctctgcctcctgggttcaggcgattctcatgcctcagcctcctgagtggctggaattacaggtgcgcaccaccacacccagctaatttttgtatttttagtagagacggggtttcatcatgttggccaggctggcctcgaactcctgacttaaagtgatctgcccgcctcagcctcccaaagtgctgggattacaggcgtgagccaccacacagagcaaaagttttccaaaatgatttttctttcctgttgtagttcgatatctcaatgcctatactggaatagtgctacttcgatgcagaaaagaattctatcagcttgtgtggtcagctcttcccttcatcacatacttggagaacaaaggacaccgttacccatgctttttcaacacattacatgtgggaggtacaataagaacatgtcagaagttcctaattcagtacaacaggagacagctgttgatcttgttgcagaactgcactgatgaaggagagcgggaagctatccagaagtctgtgacaagaagctgcttactagaggaggaggaggagtcaggtgaggaggctgcagaagcaatggagtgaacctctgctccccacacagctggctacactgctcaggcttcaggcccacttgttgaacagaacaatctgggtagcaacagcatcttccacagttttccaaactggatagctgccaaccagcagacattacccacttgaaatggagtactcagttaaactgaagttgcctttacctagcattccctggtgaagtgttgcaggttgtgaactctgtagacatctttattgcttggctaagagtagatttaataaatgtatctggtttccgtggca

SEQ ID NO: 14639 - DNA, 1694 bp, Homo sapiens
ggtaccagttcgacggagactctctttaagcgcctgggaccccaagcgagagtccgaaattagcagagcgctaaaaggaggggcccgaaggcagtggggctttgagctagaagcctctttttacctgcttgacaggtaatttctgtaattggttgtgattgaatttgatagggtagagaattaaatgagggaagctgtgtatacttcctagtaagagctattatatgaccgattacattaacatcatatggaaaaaaattgtcaaaagtactccgggaaagcccttaaatagttggtaaagtacagaacacatgattgtcaatatatgtaaatacaggatgagctaggacagaggggcccttctttcacaccacttaaattagttcccactttaaccttgtttgagattgacttctggagagttaaatgcagatagacttaactctcctaagtcaggtgagactgagagtctccgactgctacaataattacggagcccaaatgcagtaaaacagcctgtttttcaggcaagggttttgtgggggtttttcctaaattaaaacggatcgcctcctacctgctcctatttattgaattaactagtgaattagaaagcattttcaattctaaattcattcaccagttctgagtggtgtgcaacacagtgggtgttttggcttttctcttttactcgctgatagatctacgtgccacttgcctacaacatacttttggcacatagtaggctctgttactccaaagttttccttttttcgagacagtctggctgttgcccaggctgctggagtgcagcagcgagatcgggggtcattgctgcctctgcctcctgggttcaggcgattctcatgcctcagcctcctgagtggctggaattacaggtgcgcaccaccacacccagctaatttttgtatttttagtagagacggggtttcatcatgttggccaggctggcctcgaactcctgacttaaagtgatctgcccgcctcagcctcccaaagtgctgggattacaggcgtgagccaccacacagagcaaaagttttccaaaatgatttttctttcctgttgtagttcgatatctcaatgcctatactggaatagtgctacttcgatgcagaaaagaattctatcagcttgtgtggtcagctcttcccttcatcacatacttggagaacaaaggacaccgttacccatgctttttcaacacattacatgtgggaggtacaataagaacatgtcagaagttcctaattcagtacaacaggagacagctgttgatcttgttgcagaactgcactgatgaaggagagcgggaagctatccagaagtctgtgacaagaagctgcttactagaggaggaggaggagtcaggtgaggaggctgcagaagcaatggagtgaacctctgctccccacacagctggctacactgctcaggcttcaggcccacttgttgaacagaacaatctgggtagcaacagcatcttccacagttttccaaactggatagctgccaaccagcagacattacccacttgaaatggagtactcagttaaactgaagttgcctttacctagcattccctggtgaagtgttgcaggttgtgaactctgtagacatctttattgcttggctaagagtagatttaataaatgtatctggtttccgtggca

SEQ ID NO: 14640 - DNA, 1638 bp, Homo sapiens
  misc_feature (23)..(23): n is a, c, g, or t
  misc_feature (29)..(29): n is a, c, g, or t
gccgtcgatatcagaacgtcggngagtgncaaaagcagtggggctttgagctagaagcctctttttacctgcttgacaggtaatttctgtaattggttgtgattgaatttgatagggtagagaattaaatgagggaagctgtgtatacttcctagtaagagctattatatgaccgattacattaacatcatatggaaaaaaattgtcaaaagtactccgggaaagcccttaaatagttggtaaagtacagaacacatgattgtcaatatatgtaaatacaggatgagctaggacagaggggcccttctttcacaccacttaaattagttcccactttaaccttgtttgagattgacttctggagagttaaatgcagatagacttaactctcctaagtcaggtgagactgagagtctccgactgctacaataattacggagcccaaatgcagtaaaacagcctgtttttcaggcaagggttttgtgggggtttttcctaaattaaaacggatcgcctcctacctgctcctatttattgaattaactagtgaattagaaagcattttcaattctaaattcattcaccagttctgagtggtgtgcaacacagtgggtgttttggcttttctcttttactcgctgatagatctacgtgccacttgcctacaacatacttttggcacatagtaggctctgttactccaaagttttccttttttcgagacagtctggctgttgcccaggctgctggagtgcagcagcgagatcgggggtcattgctgcctctgcctcctgggttcaggcgattctcatgcctcagcctcctgagtggctggaattacaggtgcgcaccaccacacccagctaatttttgtatttttagtagagacggggtttcatcatgttggccaggctggcctcgaactcctgacttaaagtgatctgcccgcctcagcctcccaaagtgctgggattacaggcgtgagccaccacacagagcaaaagttttccaaaatgatttttctttcctgttgtagttcgatatctcaatgcctatactggaatagtgctacttcgatgcagaaaagaattctatcagcttgtgtggtcagctcttcccttcatcacatacttggagaacaaaggacaccgttacccatgctttttcaacacattacatgtgggaggtacaataagaacatgtcagaagttcctaattcagtacaacaggagacagctgttgatcttgttgcagaactgcactgatgaaggagagcgggaagctatccagaagtctgtgacaagaagctgcttactagaggaggaggaggagtcaggtgaggaggctgcagaagcaatggagtgaacctctgctccccacacagctggctacactgctcaggcttcaggcccacttgttgaacagaacaatctgggtagcaacagcatcttccacagttttccaaactggatagctgccaaccagcagacattacccacttgaaatggagtactcagttaaactgaagttgcctttacctagcattccctggtgaagtgttgcaggttgtgaactctgtagacatctttattgcttggctaagagtagatttaataaatgtatctggtttccgtggca

SEQ ID NO: 14641 - DNA, 1611 bp, Homo sapiens
cagtagtcggctatgagttaaacatgcctctctttacctgctgtgaacggtccgtcctgtaataacgttcgtgaattggaaaaaccctggtagagaattaaatgagggaagctgtgtatacttcctagtaagagctattatatgaccgattacattaacatcatatggaaaaaaattgtcaaaagtactccgggaaagcccttaaatagttggtaaagtacagaacacatgattgtcaatatatgtaaatacaggatgagctaggacagaggggcccttctttcacaccacttaaattagttcccactttaaccttgtttgagattgacttctggagagttaaatgcagatagacttaactctcctaagtcaggtgagactgagagtctccgactgctacaataattacggagcccaaatgcagtaaaacagcctgtttttcaggcaagggttttgtgggggtttttcctaaattaaaacggatcgcctcctacctgctcctatttattgaattaactagtgaattagaaagcattttcaattctaaattcattcaccagttctgagtggtgtgcaacacagtgggtgttttggcttttctcttttactcgctgatagatctacgtgccacttgcctacaacatacttttggcacatagtaggctctgttactccaaagttttccttttttcgagacagtctggctgttgcccaggctgctggagtgcagcagcgagatcgggggtcattgctgcctctgcctcctgggttcaggcgattctcatgcctcagcctcctgagtggctggaattacaggtgcgcaccaccacacccagctaatttttgtatttttagtagagacggggtttcatcatgttggccaggctggcctcgaactcctgacttaaagtgatctgcccgcctcagcctcccaaagtgctgggattacaggcgtgagccaccacacagagcaaaagttttccaaaatgatttttctttcctgttgtagttcgatatctcaatgcctatactggaatagtgctacttcgatgcagaaaagaattctatcagcttgtgtggtcagctcttcccttcatcacatacttggagaacaaaggacaccgttacccatgctttttcaacacattacatgtgggaggtacaataagaacatgtcagaagttcctaattcagtacaacaggagacagctgttgatcttgttgcagaactgcactgatgaaggagagcgggaagctatccagaagtctgtgacaagaagctgcttactagaggaggaggaggagtcaggtgaggaggctgcagaagcaatggagtgaacctctgctccccacacagctggctacactgctcaggcttcaggcccacttgttgaacagaacaatctgggtagcaacagcatcttccacagttttccaaactggatagctgccaaccagcagacattacccacttgaaatggagtactcagttaaactgaagttgcctttacctagcattccctggtgaagtgttgcaggttgtgaactctgtagacatctttattgcttggctaagagtagatttaataaatgtatctggtttccgtggca

SEQ ID NO: 14642 - DNA, 931 bp, Homo sapiens
agcgggtttgcacgccggaccgggagagcgcggaggcagccatggtgcggttcaagcacaggtacctgctctgcgaactggtgtctgacgacccccgctgccgcctaagcctcgatgaccgagttctgagcagcctcgtacgggacacgatcgccagggtgcacggaactttcggcgcagccgcctgctccatcggcttcgcgggtgcaagggcgctgggggaagaggggaacccgggaggatggcgggatgtggagggggcaggcgccggaggaagaaagaaggggcacgagtggccaagcccgtgcaccgttttttgtaaggtatctttcgatatctcaatgcctatactggaatagtgctacttcgatgcagaaaagaattctatcagcttgtgtggtcagctcttcccttcatcacatacttggagaacaaaggacaccgttacccatgctttttcaacacattacatgtgggaggtacaataagaacatgtcagaagttcctaattcagtacaacaggagacagctgttgatcttgttgcagaactgcactgatgaaggagagcgggaagctatccagaagtctgtgacaagaagctgcttactagaggaggaggaggagtcaggtgaggaggctgcagaagcaatggagtgaacctctgctccccacacagctggctacactgctcaggcttcaggcccacttgttgaacagaacaatctgggtagcaacagcatcttccacagttttccaaactggatagctgccaaccagcagacattacccacttgaaatggagtactcagttaaactgaagttgcctttacctagcattccctggtgaagtgttgcaggttgtgaactctgtagacatctttattgcttggctaagagtagatttaataaatgtatctggtttccgtggca

SEQ ID NO: 14643 - DNA, 631 bp, Homo sapiens
  misc_feature (18)..(18): n is a, c, g, or t
tcgactctcttaatctancaccgctacacttcgatatctcaatgcctatactggaatagtgctacttcgatgcagaaaagaattctatcagcttgtgtggtcagctcttcccttcatcacatacttggagaacaaaggacaccgttacccatgctttttcaacacattacatgtgggaggtacaataagaacatgtcagaagttcctaattcagtacaacaggagacagctgttgatcttgttgcagaactgcactgatgaaggagagcgggaagctatccagaagtctgtgacaagaagctgcttactagaggaggaggaggagtcaggtgaggaggctgcagaagcaatggagtgaacctctgctccccacacagctggctacactgctcaggcttcaggcccacttgttgaacagaacaatctgggtagcaacagcatcttccacagttttccaaactggatagctgccaaccagcagacattacccacttgaaatggagtactcagttaaactgaagttgcctttacctagcattccctggtgaagtgttgcaggttgtgaactctgtagacatctttattgcttggctaagagtagatttaataaatgtatctggtttccgtggca

SEQ ID NO: 14644 - DNA, 981 bp, Homo sapiens
agcgggtttgcacgccggaccgggagagcgcggaggcagccatggtgcggttcaagcacaggtacctgctctgcgaactggtgtctgacgacccccgctgccgcctaagcctcgatgaccgagttctgagcagcctcgtacgggacacgatcgccagggtgcacggaactttcggcgcagccgcctgctccatcggcttcgcggttcgatatctcaatgcctatactggaatagtgctacttcgatgcagaaaagaattctatcagcttgtgtggtcagctcttcccttcatcacatacttggagaacaaaggacaccgttacccatgctttttcaacacattacatgtgggaggtaggagtgaggtggtatggctactgattttcaattggtgacacgttcacagttcagtctaaactggtgggtgggtcttgctgctgtcccgctaacaagacacttccccctacctctgaaagtctgtaaggtcgagatctttcacaagctgttgaccacagtaactcatatgccagtacaataagaacatgtcagaagttcctaattcagtacaacaggagacagctgttgatcttgttgcagaactgcactgatgaaggagagcgggaagctatccagaagtctgtgacaagaagctgcttactagaggaggaggaggagtcaggtgaggaggctgcagaagcaatggagtgaacctctgctccccacacagctggctacactgctcaggcttcaggcccacttgttgaacagaacaatctgggtagcaacagcatcttccacagttttccaaactggatagctgccaaccagcagacattacccacttgaaatggagtactcagttaaactgaagttgcctttacctagcattccctggtgaagtgttgcaggttgtgaactctgtagacatctttattgcttggctaagagtagatttaataaatgtatctggtttccgtggca

SEQ ID NO: 14645 - DNA, 656 bp, Homo sapiens
agcgggtttgcacgccggaccgggagagcgcggaggcagccatggtgcggttcaagcacaggtacctgctctgcgaactggtgtctgacgacccccgctgccgcctaagcctcgatgaccgagttctgagcagcctcgtacgggacacgatcgccagggtgcacggaactttcggcgcagccgcctgctccatcggcttcgcgggtacaataagaacatgtcagaagttcctaattcagtacaacaggagacagctgttgatcttgttgcagaactgcactgatgaaggagagcgggaagctatccagaagtctgtgacaagaagctgcttactagaggaggaggaggagtcaggtgaggaggctgcagaagcaatggagtgaacctctgctccccacacagctggctacactgctcaggcttcaggcccacttgttgaacagaacaatctgggtagcaacagcatcttccacagttttccaaactggatagctgccaaccagcagacattacccacttgaaatggagtactcagttaaactgaagttgcctttacctagcattccctggtgaagtgttgcaggttgtgaactctgtagacatctttattgcttggctaagagtagatttaataaatgtatctggtttccgtggca

SEQ ID NO: 14646 - DNA, 477 bp, Homo sapiens
ggaaagggtttaccaaaattaaggggtacaataagaacatgtcagaagttcctaattcagtacaacaggagacagctgttgatcttgttgcagaactgcactgatgaaggagagcgggaagctatccagaagtctgtgacaagaagctgcttactagaggaggaggaggagtcaggtgaggaggctgcagaagcaatggagtgaacctctgctccccacacagctggctacactgctcaggcttcaggcccacttgttgaacagaacaatctgggtagcaacagcatcttccacagttttccaaactggatagctgccaaccagcagacattacccacttgaaatggagtactcagttaaactgaagttgcctttacctagcattccctggtgaagtgttgcaggttgtgaactctgtagacatctttattgcttggctaagagtagatttaataaatgtatctggtttccgtggca

SEQ ID NO: 14647 - DNA, 2276 bp, Homo sapiens
agcgggtttgcacgccggaccgggagagcgcggaggcagccatggtgcggttcaagcacaggtacctgctctgcgaactggtgtctgacgacccccgctgccgcctaagcctcgatgaccgagttctgagcagcctcgtacgggacacgatcgccagggtgcacggaactttcggcgcagccgcctgctccatcggcttcgcgggtgcaagggcgctgggggaagaggggaacccgggaggatggcgggatgtggagggggcaggcgccggaggaagaaagaaggggcacgagtggccaagcccgtgcaccgttttttgtaaggtatctctttaagcgcctgggaccccaagcgagagtccgaaattagcagagcgctaaaaggaggggcccgaaggcagtggggctttgagctagaagcctctttttacctgcttgacaggtaatttctgtaattggttgtgattgaatttgatagggtagagaattaaatgagggaagctgtgtatacttcctagtaagagctattatatgaccgattacattaacatcatatggaaaaaaattgtcaaaagtactccgggaaagcccttaaatagttggtaaagtacagaacacatgattgtcaatatatgtaaatacaggatgagctaggacagaggggcccttctttcacaccacttaaattagttcccactttaaccttgtttgagattgacttctggagagttaaatgcagatagacttaactctcctaagtcaggtgagactgagagtctccgactgctacaataattacggagcccaaatgcagtaaaacagcctgtttttcaggcaagggttttgtgggggtttttcctaaattaaaacggatcgcctcctacctgctcctatttattgaattaactagtgaattagaaagcattttcaattctaaattcattcaccagttctgagtggtgtgcaacacagtgggtgttttggcttttctcttttactcgctgatagatctacgtgccacttgcctacaacatacttttggcacatagtaggctctgttactccaaagttttccttttttcgagacagtctggctgttgcccaggctgctggagtgcagcagcgagatcgggggtcattgctgcctctgcctcctgggttcaggcgattctcatgcctcagcctcctgagtggctggaattacaggtgcgcaccaccacacccagctaatttttgtatttttagtagagacggggtttcatcatgttggccaggctggcctcgaactcctgacttaaagtgatctgcccgcctcagcctcccaaagtgctgggattacaggcgtgagccaccacacagagcaaaagttttccaaaatgatttttctttcctgttgtagttcgatatctcaatgcctatactggaatagtgctacttcgatgcagaaaagaattctatcagcttgtgtggtcagctcttcccttcatcacatacttggagaacaaaggacaccgttacccatgctttttcaacacattacatgtgggaggtaggagtgaggtggtatggctactgattttcaattggtgacacgttcacagttcagtctaaactggtgggtgggtcttgctgctgtcccgctaacaagacacttccccctacctctgaaagtctgtaaggtcgagatctttcacaagctgttgaccacagtaactcatatgccagtacaataagaacatgtcagaagttcctaattcagtacaacaggagacagctgttgatcttgttgcagaactgcactgatgaaggtaagcaacactagcccagtgcccactgagcagtgactgaccttaagctgaagaaatcactcccaaagatatctttcatccctgttatctgccttctccaggagagcgggaagctatccagaagtctgtgacaagaagctgcttactagaggaggaggaggagtcaggtgaggaggctgcagaagcaatggagtgaacctctgctccccacacagctggctacactgctcaggcttcaggcccacttgttgaacagaacaatctgggtagcaacagcatcttccacagttttccaaactggatagctgccaaccagcagacattacccacttgaaatggagtactcagttaaactgaagttgcctttacctagcattccctggtgaagtgttgcaggttgtgaactctgtagacatctttattgcttggctaagagtagatttaataaatgtatctggtttccgtggca

SEQ ID NO: 14648 - DNA, 1198 bp, Homo sapiens
  misc_feature (1181)..(1181): n is a, c, g, or t
agcgggtttgcacgccggaccgggagagcgcggaggcagccatggtgcggttcaagcacaggtacctgctctgcgaactggtgtctgacgacccccgctgccgcctaagcctcgatgaccgagttctgagcagcctcgtacgggacacgatcgccagggtgcacggaactttcggcgcagccgcctgctccatcggcttcgcgggtgcaagggcgctgggggaagaggggaacccgggaggatggcgggatgtggagggggcaggcgccggaggaagaaagaaggggcacgagtggccaagcccgtgcaccgttttttgtaaggtatctctttaagcgcctgggaccccaagcgagagtccgaaattagcagagcgctaaaaggaggggcccgaaggcagtggggctttgagctagaagcctctttttacctgcttgacaggtaatttctgtaattggttgtgattgaatttgatagggtagagaattaaatgagggaagctgtgtatacttcctagtaagagctattatatgaccgattacattaacatcatatggaaaaaaattgtcaaaagtactccgggaaagcccttaaatagttggtaaagtacagaacacatgattgtcaatatatgtaaatacaggatgagctaggacagaggggcccttctttcacaccacttaaattagttcccactttaaccttgtttgagattgacttctggagagttaaatgcagatagacttaactctcctaagtcaggtgagactgagagtctccgactgctacaataattacggagcccaaatgcagtaaaacagcctgtttttcaggcaagggttttgtgggggtttttcctaaattaaaacggatcgcctcctacctgctcctatttattgaattaactagtgaattagaaagcattttcaattctaaattcattcaccagttctgagtggtgtgcaacacagtgggtgttttggcttttctcttttactcgctgatagatctacgtgccacttgcctacaacatacttttggcacatagtaggctctgttactccaaagttttccttttttcgagacagtctggctgttgcccaggctgctggagtgcagcagcgagatcagaggttgcagtgagccgagcttgcaccattgcactccagcctgggcaacangagtgaaactccacctc

SEQ ID NO: 14649 - DNA, 760 bp, Homo sapiens
caacaggagacagctgttgatcttgttgcagaactgcactgatgaaggtaagcaacactagcccagtgcccactgagcagtgactgaccttaagctgaagaaatcactcccaaagatatctttcatccctgttatctgccttctccaggagagcgggaagctatccagaagtctgtgacaagaagctgcttactagaggaggaggaggagtcaggtgaggaggctgcagaagcaatggagtgaacctctgctccccacacagctggctacactgctcaggcttcaggcccacttgttgaacagaacaatctgggtagcaacagcatcttccacagttttccaaactggatagctgccaaccagcagacattacccacttgaaatggagtactcagttaaactgaagttgcctttacctagcattccctggtgaagtgttgcaggttgtgaactctgtagacatctttattgcttggctaagagtagatttaataaatgtatctggtttccgtggcatttagcatacttatattacagaaagggcttatggagtccatgcttggccaagtctctgttctctctctatccctagccttggtgggaagactgactccctatgtggtactagttaaacttttttttttgagacagtctcagtctatcacccaggctggagtgtagtggcccagtatcggctcactgcaacctccgcctcctgggttcaagcaattctcccacctcagccttccaagtaactggg

SEQ ID NO: 14650 - DNA, 1851 bp, Homo sapiens
acaactcccaggacccagcgggcgctgccgcccacgcgacgtcacggcggcggagggcgcaggcggctgggcgcctggcgagtggactgttcgagcccttccgctgggacccgggccctggctccggccccgcgatgggagctgctctccgcgggctgagcctgtcagcatcctcgacgcaccctggtccctgaagtcggagaagagcccctacccacccacacccccttgccccattttgggtcgcctgggtcctcagtcctagcggatcctcagtcctagcggccaccgggtctgaaaggagcaagacgatgatcctggcgtcggtgctgaggagcggtcccgggggcgggcttccgctccggcccctcctgggacccgcactcgcgctccgggcccgctcgacgtcggccaccgacacacaccacgtggagatggctcgggagcgctccaagaccgtcacctccttttacaaccagtcggccatcgacgcggcagcggagaagccctcagtccgcctaacgcccaccatgatgctctacgctggccgctctcaggacggcagccaccttctgaaaagtgctcggtacctgcagcaagaacttccagtgaggattgctcaccgcatcaagggcttccgctgccttcctttcatcattggctgcaaccccaccatactgcacgtgcatgagctatatatccgtgccttccagaagctgacagacttccctccgatcaaggaccaggcggacgaggcccagtactgccagctggtgcgacagctgctggatgaccacaaggatgtggtgaccctcttggcagagggcctacgtgagagccggaagcacatagaggatgaaaagctcgtccgctacttcttggacaagacgctgacttcgaggcttggaatccgcatgttggccacgcatcacctggcgctgcatgaggacaagcctgactttgtcggcatcatctgtactcgtctctcaccaaagaagattattgagaagtgggtggactttgccagacgcctgtgtgagcacaagtatggcaatgcgccccgtgtccgcatcaatggccatgtggctgcccggttccccttcatccctatgccactggactacatcctgccggagctgctcaagaatgccatgagagccacaatggagagtcacctagacactccctacaatgtcccagatgtggtcatcaccatcgccaacaatgatgtcgatctgatcatcaggatctcagaccgtggtggaggaatcgctcacaaagatctggaccgggtcatggactaccacttcactactgctgaggccagcacacaggacccccggatcagccccctctttggccatctggacatgcatagtggcgcccagtcaggacccatgcacggctttggcttcgggttgcccacgtcacgggcctacgcggagtacctcggtgggtctctgcagctgcagtccctgcagggcattggcacggacgtctacctgcggctccgccacatcgatggccgggaggaaagcttccggatctgaccccacagcctttggcctgctcacccgaccagcctgggccgcattccctgcaggacctcccgggtcaggcagggcggccccctgctccacacactgctgcatcttgggtctcagggacccagacagatggacttacatggagctgggcactgccctgcctcaacagggtccattgcctcctcgcctccagaacttggagcagggaagtgggcaccctgaggcctccagcaccagttccgtcattctcgttcctggggaacccccactctgacctgttattaaagttcacattttgaatgcc

SEQ ID NO: 14651 - DNA, 2080 bp, Homo sapiens
acaactcccaggacccagcgggcgctgccgcccacgcgacgtcacggcggcggagggcgcaggcggctgggcgcctggcgagtggactgttcgagcccttccgctgggacccgggccctggctccggccccgcgatgggagctgctctccgcgggctgagcctgtcagcatcctcgacgcaccctggtccctgaagtcggagaagagcccctacccacccacacccccttgccccattttgggtcgcctgggtcctcagtcctagcggatcctcagtcctagcggccaccgggtctgaaaggagcaagacgatgatcctggcgtcggtgctgaggagcggtcccgggggcgggcttccgctccggcccctcctgggacccgcactcgcgctccgggcccgctcgacgtcggccaccgacacacaccacgtggagatggctcgggagcgctccaagaccgtcacctccttttacaaccagtcggccatcgacgcggcagcggagaagccctcagtccgcctaacgcccaccatgatgctctacgctggccgctctcaggacggcagccaccttctgaaaagtgctcggtacctgcagcaagaacttccagtgaggattgctcaccgcatcaagggcttccgctgccttcctttcatcattggctgcaaccccaccatactgcacgtgcatgagctatatatccgtgccttccagaagctgacagacttccctccgatcaaggaccaggcggacgaggcccagtactgccagctggtgcgacagctgctggatgaccacaaggatgtggtgaccctcttggcagagggcctacgtgagagccggaagcacatagaggatgaaaagctcgtccgctacttcttggacaagacgctgacttcgaggcttggaatccgcatgttggccacgcatcacctggcgctgcatgaggacaagcctgactttgtcggcatcatctgtactcgtctctcaccaaagaagattattgagaagtgggtggactttgccagacgcctgtgtgagcacaagtatggcaatgcgccccgtgtccgcatcaatggccatgtggctgcccggttccccttcatccctatgccactggactacatcctgccggagctgctcaagaatgccatgagagccacaatggagagtcacctagacactccctacaatgtcccagatgtggtcatcaccatcgccaacaatgatgtcgatctgatcatcaggatctcagaccgtggtggaggaatcgctcacaaagatctggaccgggtcatggactaccacttcactactgctgaggccagcacacaggacccccggatcagccccctctttggccatctggacatgcatagtggcgcccagtcaggacccatgcacggctttggcttcgggttgcccacgtcacgggcctacgcggagtacctcggtgggtctctgcagctgcagtccctgcagggcattggcacggacgtctacctgcggctccgccacatcgatggccgggaggaaagcttccggatctgaccccacagcctttggcctgctcacccgaccagcctgggccgcattccctgcaggacctcccgggtcaggcagggcggccccctgctccacacactgctgcatcttgggtctcagggacccagacagatggacttacatggagctgggcactgccctgcctcaacagggtccattgcctcctcgcctccagaacttggagcagggaagtgggcaccctgaggcctccagcaccagttccgtcattctcgttcctggggaacccccactctgacctgttattaaagttcacattttgaatgccctctcgggccccgtgtgtggggagggcaggtgaacttttgtttctgcccccattcaggttcactgagcccttgggttgaactggttcgtgtcccagtctcttacctgccctgagagcctggcaggccaggagtagaatgggtcccaagtctgttgcatgtttgatttggtgggagtgggatgactgcagcaccttatacaaagagctttcattcatcttgttgaacaaa

SEQ ID NO: 14652 - DNA, 1847 bp, Homo sapiens
acaactcccaggacccagcgggcgctgccgcccacgcgacgtcacggcggcggagggcgcaggcggctgggcgcctggcgagtggactgttcgagcccttccgctgggacccgggccctggctccggccccgcgatgggagctgctctccgcgggctgagcctgtcagcatcctcgacgcaccctggtccctgaagtcggagaagagcccctacccacccacacccccttgccccattttgggtcgcctgggtcctcagtcctagcggatcctcagtcctagcggccaccgggtctgaaaggagcaagacgatgatcctggcgtcggtgctgaggagcggtcccgggggcgggcttccgctccggcccctcctgggacccgcactcgcgctccgggcccgctcgacgtcggccaccgacacacaccacgtggagatggctcgggagcgctccaagaccgtcacctccttttacaaccagtcggccatcgacgcggcagcggagaagccctcagtccgcctaacgcccaccatgatgctctacgctggccgctctcaggacggcagccaccttctgaaaagtgctcggtacctgcagcaagaacttccagtgaggattgctcaccgcatcaagggcttccgctgccttcctttcatcattggctgcaaccccaccatactgcacgtgcatgagctatatatccgtgccttccagaagctgacagacttccctccgatcaaggaccaggcggacgaggcccagtactgccagctggtgcgacagctgctggatgaccacaaggatgtggtgaccctcttggcagagggcctacgtgagagccggaagcacatagaggatgaaaagctcgtccgctacttcttggacaagacgctgacttcgaggcttggaatccgcatgttggccacgcatcacctggcgctgcatgaggacaagcctgactttgtcggcatcatctgtactcgtctctcaccaaagaagattattgagaagtgggtggactttgccagacgcctgtgtgagcacaagtatggcaatgcgccccgtgtccgcatcaatggccatgtggctgcccggttccccttcatccctatgccactggactacatcctgccggagctgctcaagaatgccatgaggatctcagaccgtggtggaggaatcgctcacaaagatctggaccgggtcatggactaccacttcactactgctgaggccagcacacaggacccccggatcagccccctctttggccatctggacatgcatagtggcgcccagtcaggacccatgcacgggtgagaccctgccaggccaggatggaggggtgggggaccccaggagactcaagcctctgaagcctcctgtcctgtccccctgcccactttggcttcgggttgcccacgtcacgggcctacgcggagtacctcggtgggtctctgcagctgcagtccctgcagggcattggcacggacgtctacctgcggctccgccacatcgatggccgggaggaaagcttccggatctgaccccacagcctttggcctgctcacccgaccagcctgggccgcattccctgcaggacctcccgggtcaggcagggcggccccctgctccacacactgctgcatcttgggtctcagggacccagacagatggacttacatggagctgggcactgccctgcctcaacagggtccattgcctcctcgcctccagaacttggagcagggaagtgggcaccctgaggcctccagcaccagttccgtcattctcgttcctggggaacccccactctgacctgttattaaagttcacattttgaatgcc

SEQ ID NO: 14653 - DNA, 793 bp, Homo sapiens
aattaaaatggaaggccacagaaaaggggaaaagaggaaataataacagtaatcgttaatccagcaaaaagaaatgaaaagggattacccttctatgtggttttcccttttcatttctttttgctggattaacgattactgttattagacgaggcttggaatccgcatgttggccacgcatcacctggcgctgcatgaggacaagcctgactttgtcggcatcatctgtactcgtctctcaccaaagaagattattgagaagtgggtggactttgccagacgcctgtgtgagcacaagtatggcaatgcgccccgtgtccgcatcaatggccatgtggctgcccggttccccttcatccctatgccactggactacatcctgccggagctgctcaagaatgccatgagagccacaatggagagtcacctagacactccctacaatgtcccagatgtggtcatcaccatcgccaacaatgatgtcgatctgatcatcaggatctcagaccgtggtggaggaatcgctcacaaagatctggaccgggtcatggactaccacttcactactgctgaggccagcacacaggacccccggatcagccccctctttggccatctggacatgcatagtggcgcccagtcaggacccatgcacggaggacaaggagggtctcctatgctgcccagagcttggttctttgaaacttcctgggctgaaggcggtctcctgcttgggattcctggacgtgccgggcattccggtgtggggcaccttcttctgaagctgtttttc

SEQ ID NO: 14654 - DNA, 904 bp, Homo sapiens
gctggtaccggccggagattagggatctggctccggccccgcgatgggagctgctctccgcgggctgagcctgtcagcatcctcgacgcaccctggtccctgaagtcggagaagagcccctacccacccacacccccttgccccattttgggtcgcctgggtcctcagtcctagcggatcctcagtcctagcggccaccgggtctgaaaggagcaagacgatgatcctggcgtcggtgctgaggagcggtcccgggggcgggcttccgctccggcccctcctgggacccgcactcgcgctccgggcccgctcgacgtcggccaccgacacacaccacgtggagatggctcgggagcgctccaagaccgtcacctccttttacaaccagtcggccatcgacgcggcagcggagaagccctcagtccgcctaacgcccaccatgatgctctacgctggccgctctcaggacggcagccaccttctgaaaagtgctcggtacctgcagcaagaacttccagtgaggattgctcaccgcatcaagggcttccgctgccttcctttcatcattggctgcaaccccaccatactgcacgtgcatgagctatattttccggtggccttccaggagggctggacagaatttcagttcggattgaaggaaccaggcggagaggtccagtaagtgccagctgtgtcgaagctgttggttaacccaggttgtgggggcctctgtgcgagggctagtggagagggaaacataagggatgagacctacgtatttggaaaacgcttggatggacgctgtggacactcgcaggaagaaatcgaaattgtccccgaaggtggggcgctcacttgcttctctcctctctcctccggtcaacactttttaccggtgagaagt

SEQ ID NO: 14655 - DNA, 676 bp, Homo sapiens
tggctaggtacgaggctgggtgttcgggcctggctcggccccgcgatgggagctgctctccgcgggctgagcctgtcagcatcctcgacgcaccctggtccctgaagtcggagaagagcccctacccacccacacccccttgccccattttgggtcgcctgggtcctcagtcctagcggatcctcagtcctagcggccaccgggtctgaaaggagcaagacgatgatcctggcgtcggtgctgaggagcggtcccgggggcgggcttccgctccggcccctcctgggacccgcactcgcgctccgggcccgctcgacgtcggccaccgacacacaccacgtggagatggctcgggagcgctccaagaccgtcacctccttttacaaccagtcggccatcgacgcggcagcggagaagccctcagtccgcctaacgcccaccatgatgctctacgctggccgctctcaggacggcagccaccttctgaaaagtgctcggtacctgcagcaagaacttccagtgaggattgctcaccgcatcaagggcttccgctgccttcctttcatcattggctgcaaccccaccatactgcacgtgcatgagctatatatccgtgccttccagaagctgacagacttccctccgatcaaggacatgcgaacgaggccagtactgc

SEQ ID NO: 14656 - DNA, 344 bp, Homo sapiens
tggacagcacaggaaggtggacagcacagaggaggtggacagcacagagaggcaccctgaggcctccagcaccagttccgtcattctcgttcctggggaacccccactctgtcctcttgctgtccagcacagaggaggtggacagcacagggaggtgccaactgcatcatgttcgtcctctgcacccgcgccgtccgaactcggctcttctctctctgttgctgctgctgctcttctcagcctcctctgtgctgtcgacagcacagaggaggtggacagcataggtaggttccacagttactcttcccacaagttcccttaagtcttgccctcctctgtgctgt

SEQ ID NO: 14657 - DNA, 1937 bp, Homo sapiens
acaactcccaggacccagcgggcgctgccgcccacgcgacgtcacggcggcggagggcgcaggcggctgggcgcctggcgagtggactgttcgagcccttccgctgggacccgggccctggctccggccccgcgatgggagctgctctccgcgggctgagcctgtcagcatcctcgacgcaccctggtccctgaagtcggagaagagcccctacccacccacacccccttgccccattttgggtcgcctgggtcctcagtcctagcggatcctcagtcctagcggccaccgggtctgaaaggagcaagacgatgatcctggcgtcggtgctgaggagcggtcccgggggcgggcttccgctccggcccctcctgggacccgcactcgcgctccgggcccgctcgacgtcggccaccgacacacaccacgtggagatggctcgggagcgctccaagaccgtcacctccttttacaaccagtcggccatcgacgcggcagcggagaagccctcagtccgcctaacgcccaccatgatgctctacgctggccgctctcaggacggcagccaccttctgaaaagtgctcggtacctgcagcaagaacttccagtgaggattgctcaccgcatcaagggcttccgctgccttcctttcatcattggctgcaaccccaccatactgcacgtgcatgagctatatatccgtgccttccagaagctgacagacttccctccgatcaaggaccaggcggacgaggcccagtactgccagctggtgcgacagctgctggatgaccacaaggatgtggtgaccctcttggcagagggcctacgtgagagccggaagcacatagaggatgaaaagctcgtccgctacttcttggacaagacgctgacttcgaggcttggaatccgcatgttggccacgcatcacctggcgctgcatgaggacaagcctgactttgtcggcatcatctgtactcgtctctcaccaaagaagattattgagaagtgggtggactttgccagacgcctgtgtgagcacaagtatggcaatgcgccccgtgtccgcatcaatggccatgtggctgcccggttccccttcatccctatgccactggactacatcctgccggagctgctcaagaatgccatgagagccacaatggagagtcacctagacactccctacaatgtcccagatgtggtcatcaccatcgccaacaatgatgtcgatctgatcatcaggatctcagaccgtggtggaggaatcgctcacaaagatctggaccgggtcatggactaccacttcactactgctgaggccagcacacaggacccccggatcagccccctctttggccatctggacatgcatagtggcgcccagtcaggacccatgcacgggtgagaccctgccaggccaggatggaggggtgggggaccccaggagactcaagcctctgaagcctcctgtcctgtccccctgcccactttggcttcgggttgcccacgtcacgggcctacgcggagtacctcggtgggtctctgcagctgcagtccctgcagggcattggcacggacgtctacctgcggctccgccacatcgatggccgggaggaaagcttccggatctgaccccacagcctttggcctgctcacccgaccagcctgggccgcattccctgcaggacctcccgggtcaggcagggcggccccctgctccacacactgctgcatcttgggtctcagggacccagacagatggacttacatggagctgggcactgccctgcctcaacagggtccattgcctcctcgcctccagaacttggagcagggaagtgggcaccctgaggcctccagcaccagttccgtcattctcgttcctggggaacccccactctgacctgttattaaagttcacattttgaatgcc

SEQ ID NO: 14658 - DNA, 1790 bp, Homo sapiens
acaactcccaggacccagcgggcgctgccgcccacgcgacgtcacggcggcggagggcgcaggcggctgggcgcctggcgagtggactgttcgagcccttccgctgggacccgggccctggctccggccccgcgatgggagctgctctccgcgggctgagcctgtcagcatcctcgacgcaccctggtccctgaagtcggagaagagcccctacccacccacacccccttgccccattttgggtcgcctgggtcctcagtcctagcggatcctcagtcctagcggccaccgggtctgaaaggagcaagacgatgatcctggcgtcggtgctgaggagcggtcccgggggcgggcttccgctccggcccctcctgggacccgcactcgcgctccgggcccgctcgacgtcggccaccgacacacaccacgtggagatggctcgggagcgctccaagaccgtcacctccttttacaaccagtcggccatcgacgcggcagcggagaagccctcagtccgcctaacgcccaccatgatgctctacgctggccgctctcaggacggcagccaccttctgaaaagtgctcggtacctgcagcaagaacttccagtgaggattgctcaccgcatcaagggcttccgctgccttcctttcatcattggctgcaaccccaccatactgcacgtgcatgagctatatatccgtgccttccagaagctgacagacttccctccgatcaaggaccaggcggacgaggcccagtactgccagctggtgcgacagctgctggatgaccacaaggatgtggtgaccctcttggcagagggcctacgtgagagccggaagcacatagaggatgaaaagctcgtccgctacttcttggacaagacgctgacttcgaggcttggaatccgcatgttggccacgcatcacctggcgctgcatgaggacaagcctgactttgtcggcatcatctgtactcgtctctcaccaaagaagattattgagaagtgggtggactttgccagacgcctgtgtgagcacaagtatggcaatgcgccccgtgtccgcatcaatggccatgtggctgcccggttccccttcatccctatgccactggactacatcctgccggagctgctcaagaatgccatgagagccacaatggagagtcacctagacactccctacaatgtcccagatgtggtcatcaccatcgccaacaatgatgtcgatctgatcatcaggatctcagaccgtggtggaggaatcgctcacaaagatctggaccgggtcatggactaccacttcactactgctgaggccagcacacaggacccccggatcagccccctctttggccatctggacatgcatagtggcgcccagtcaggacccatgcacggctgcagtccctgcagggcattggcacggacgtctacctgcggctccgccacatcgatggccgggaggaaagcttccggatctgaccccacagcctttggcctgctcacccgaccagcctgggccgcattccctgcaggacctcccgggtcaggcagggcggccccctgctccacacactgctgcatcttgggtctcagggacccagacagatggacttacatggagctgggcactgccctgcctcaacagggtccattgcctcctcgcctccagaacttggagcagggaagtgggcaccctgaggcctccagcaccagttccgtcattctcgttcctggggaacccccactctgacctgttattaaagttcacattttgaatgcc

SEQ ID NO: 14659 - DNA, 1711 bp, Homo sapiens
acaactcccaggacccagcgggcgctgccgcccacgcgacgtcacggcggcggagggcgcaggcggctgggcgcctggcgagtggactgttcgagcccttccgctgggacccgggccctggctccggccccgcgatgggagctgctctccgcgggctgagcctgtcagcatcctcgacgcaccctggtccctgaagtcggagaagagcccctacccacccacacccccttgccccattttgggtcgcctgggtcctcagtcctagcggatcctcagtcctagcggccaccgggtctgaaaggagcaagacgatgatcctggcgtcggtgctgaggagcggtcccgggggcgggcttccgctccggcccctcctgggacccgcactcgcgctccgggcccgctcgacgtcggccaccgacacacaccacgtggagatggctcgggagcgctccaagaccgtcacctccttttacaaccagtcggccatcgacgcggcagcggagaagccctcagtccgcctaacgcccaccatgatgctctacgctggccgctctcaggacggcagccaccttctgaaaagtgctcggtacctgcagcaagaacttccagtgaggattgctcaccgcatcaagggcttccgctgccttcctttcatcattggctgcaaccccaccatactgcacgtgcatgagctatatatccgtgccttccagaagctgacagacttccctccgatcaaggaccaggcggacgaggcccagtactgccagctggtgcgacagctgctggatgaccacaaggatgtggtgaccctcttggcagagggcctacgtgagagccggaagcacatagaggatgaaaagctcgtccgctacttcttggacaagacgctgacttcgaggcttggaatccgcatgttggccacgcatcacctggcgctgcatgaggacaagcctgactttgtcggcatcatctgtactcgtctctcaccaaagaagattattgagaagtgggtggactttgccagacgcctgtgtgagcacaagtatggcaatgcgccccgtgtccgcatcaatggccatgtggctgcccggttccccttcatccctatgccactggactacatcctgccggagctgctcaagaatgccatgagagccacaatggagagtcacctagacactccctacaatgtcccagatgtggtcatcaccatcgccaacaatgatgtcgatctgatcatcaggatctcagaccgtggtggaggaatcgctcacaaagatctggaccgggtcatggactaccacttcactactgctgaggccagcacacaggacccccggatcagccccctctttggccatctggacatgcatagtggcgcccagtcaggacccatgcacgggtgagaccctgccaggccaggatggaggggtgggggaccccaggagactcaagcctctgaagcctcctgtcctgtccccctgcccactgctccacacactgctgcatcttgggtctcagggacccagacagatggacttacatggagctgggcactgccctgcctcaacagggtccattgcctcctcgcctccagaacttggagcagggaagtgggcaccctgaggcctccagcaccagttccgtcattctcgttcctggggaacccccactctgacctgttattaaagttcacattttgaatgcc

SEQ ID NO: 14660 - DNA, 1837 bp, Homo sapiens
agacggtgggagtggtggggagaggtcgcccgggtctggggagaccgatgcacaggtggagagatggtgcgggttctgtggattcggatccttacaacttcctcttccccgccccggtagatgggagctgctctccgcgggctgagcctgtcagcatcctcgacgcaccctggtccctgaagtcggagaagagcccctacccacccacacccccttgccccattttgggtcgcctgggtcctcagtcctagcggatcctcagtcctagcggccaccgggtctgaaaggagcaagacgatgatcctggcgtcggtgctgaggagcggtcccgggggcgggcttccgctccggcccctcctgggacccgcactcgcgctccgggcccgctcgacgtcggccaccgacacacaccacgtggagatggctcgggagcgctccaagaccgtcacctccttttacaaccagtcggccatcgacgcggcagcggagaagccctcagtccgcctaacgcccaccatgatgctctacgctggccgctctcaggacggcagccaccttctgaaaagtgctcggtacctgcagcaagaacttccagtgaggattgctcaccgcatcaagggcttccgctgccttcctttcatcattggctgcaaccccaccatactgcacgtgcatgagctatatatccgtgccttccagaagctgacagacttccctccgatcaaggaccaggcggacgaggcccagtactgccagctggtgcgacagctgctggatgaccacaaggatgtggtgaccctcttggcagagggcctacgtgagagccggaagcacatagaggatgaaaagctcgtccgctacttcttggacaagacgctgacttcgaggcttggaatccgcatgttggccacgcatcacctggcgctgcatgaggacaagcctgactttgtcggcatcatctgtactcgtctctcaccaaagaagattattgagaagtgggtggactttgccagacgcctgtgtgagcacaagtatggcaatgcgccccgtgtccgcatcaatggccatgtggctgcccggttccccttcatccctatgccactggactacatcctgccggagctgctcaagaatgccatgagagccacaatggagagtcacctagacactccctacaatgtcccagatgtggtcatcaccatcgccaacaatgatgtcgatctgatcatcaggatctcagaccgtggtggaggaatcgctcacaaagatctggaccgggtcatggactaccacttcactactgctgaggccagcacacaggacccccggatcagccccctctttggccatctggacatgcatagtggcgcccagtcaggacccatgcacggctttggcttcgggttgcccacgtcacgggcctacgcggagtacctcggtgggtctctgcagctgcagtccctgcagggcattggcacggacgtctacctgcggctccgccacatcgatggccgggaggaaagcttccggatctgaccccacagcctttggcctgctcacccgaccagcctgggccgcattccctgcaggacctcccgggtcaggcagggcggccccctgctccacacactgctgcatcttgggtctcagggacccagacagatggacttacatggagctgggcactgccctgcctcaacagggtccattgcctcctcgcctccagaacttggagcagggaagtgggcaccctgaggcctccagcaccagttccgtcattctcgttcctggggaacccccactctgacctgttattaaagttcacattttgaatgcc

SEQ ID NO: 14661 - DNA, 1793 bp, Homo sapiens
tggctagtagagcctggggttaatcggccgaggactgtcgagccttcgctgggagccgggcctggctcggcccgcgatgggagctgctctccgcgggctgagcctgtcagcatcctcgacgcaccctggtccctgaagtcggagaagagcccctacccacccacacccccttgccccattttgggtcgcctgggtcctcagtcctagcggatcctcagtcctagcggccaccgggtctgaaaggagcaagacgatgatcctggcgtcggtgctgaggagcggtcccgggggcgggcttccgctccggcccctcctgggacccgcactcgcgctccgggcccgctcgacgtcggccaccgacacacaccacgtggagatggctcgggagcgctccaagaccgtcacctccttttacaaccagtcggccatcgacgcggcagcggagaagccctcagtccgcctaacgcccaccatgatgctctacgctggccgctctcaggacggcagccaccttctgaaaagtgctcggtacctgcagcaagaacttccagtgaggattgctcaccgcatcaagggcttccgctgccttcctttcatcattggctgcaaccccaccatactgcacgtgcatgagctatatatccgtgccttccagaagctgacagacttccctccgatcaaggaccaggcggacgaggcccagtactgccagctggtgcgacagctgctggatgaccacaaggatgtggtgaccctcttggcagagggcctacgtgagagccggaagcacatagaggatgaaaagctcgtccgctacttcttggacaagacgctgacttcgaggcttggaatccgcatgttggccacgcatcacctggcgctgcatgaggacaagcctgactttgtcggcatcatctgtactcgtctctcaccaaagaagattattgagaagtgggtggactttgccagacgcctgtgtgagcacaagtatggcaatgcgccccgtgtccgcatcaatggccatgtggctgcccggttccccttcatccctatgccactggactacatcctgccggagctgctcaagaatgccatgagagccacaatggagagtcacctagacactccctacaatgtcccagatgtggtcatcaccatcgccaacaatgatgtcgatctgatcatcaggatctcagaccgtggtggaggaatcgctcacaaagatctggaccgggtcatggactaccacttcactactgctgaggccagcacacaggacccccggatcagccccctctttggccatctggacatgcatagtggcgcccagtcaggacccatgcacggctttggcttcgggttgcccacgtcacgggcctacgcggagtacctcggtgggtctctgcagctgcagtccctgcagggcattggcacggacgtctacctgcggctccgccacatcgatggccgggaggaaagcttccggatctgaccccacagcctttggcctgctcacccgaccagcctgggccgcattccctgcaggacctcccgggtcaggcagggcggccccctgctccacacactgctgcatcttgggtctcagggacccagacagatggacttacatggagctgggcactgccctgcctcaacagggtccattgcctcctcgcctccagaacttggagcagggaagtgggcaccctgaggcctccagcaccagttccgtcattctcgttcctggggaacccccactctgacctgttattaaagttcacattttgaatgcc

SEQ ID NO: 14662 - DNA, 2000 bp, Homo sapiens
gtggggcgaccccagcctactcagtccgcggaggccccgcggcgcacgtccgcagcctccatcacagcgcgggcgcgcagacggggctggcatctaccatatggggggcatccgggccgaaccaagtgacccgcgtggggggtcccgctggggactccgtgccgcaccctcccaagccggccccaggggcccagggctggtgtcgcacgttcgctggccgcgctcccagggcccgggtttgaaggcgctgggcaggcaggggcagccccgccccctgagaaggatgggagctgctctccgcgggctgagcctgtcagcatcctcgacgcaccctggtccctgaagtcggagaagagcccctacccacccacacccccttgccccattttgggtcgcctgggtcctcagtcctagcggatcctcagtcctagcggccaccgggtctgaaaggagcaagacgatgatcctggcgtcggtgctgaggagcggtcccgggggcgggcttccgctccggcccctcctgggacccgcactcgcgctccgggcccgctcgacgtcggccaccgacacacaccacgtggagatggctcgggagcgctccaagaccgtcacctccttttacaaccagtcggccatcgacgcggcagcggagaagccctcagtccgcctaacgcccaccatgatgctctacgctggccgctctcaggacggcagccaccttctgaaaagtgctcggtacctgcagcaagaacttccagtgaggattgctcaccgcatcaagggcttccgctgccttcctttcatcattggctgcaaccccaccatactgcacgtgcatgagctatatatccgtgccttccagaagctgacagacttccctccgatcaaggaccaggcggacgaggcccagtactgccagctggtgcgacagctgctggatgaccacaaggatgtggtgaccctcttggcagagggcctacgtgagagccggaagcacatagaggatgaaaagctcgtccgctacttcttggacaagacgctgacttcgaggcttggaatccgcatgttggccacgcatcacctggcgctgcatgaggacaagcctgactttgtcggcatcatctgtactcgtctctcaccaaagaagattattgagaagtgggtggactttgccagacgcctgtgtgagcacaagtatggcaatgcgccccgtgtccgcatcaatggccatgtggctgcccggttccccttcatccctatgccactggactacatcctgccggagctgctcaagaatgccatgagagccacaatggagagtcacctagacactccctacaatgtcccagatgtggtcatcaccatcgccaacaatgatgtcgatctgatcatcaggatctcagaccgtggtggaggaatcgctcacaaagatctggaccgggtcatggactaccacttcactactgctgaggccagcacacaggacccccggatcagccccctctttggccatctggacatgcatagtggcgcccagtcaggacccatgcacggctttggcttcgggttgcccacgtcacgggcctacgcggagtacctcggtgggtctctgcagctgcagtccctgcagggcattggcacggacgtctacctgcggctccgccacatcgatggccgggaggaaagcttccggatctgaccccacagcctttggcctgctcacccgaccagcctgggccgcattccctgcaggacctcccgggtcaggcagggcggccccctgctccacacactgctgcatcttgggtctcagggacccagacagatggacttacatggagctgggcactgccctgcctcaacagggtccattgcctcctcgcctccagaacttggagcagggaagtgggcaccctgaggcctccagcaccagttccgtcattctcgttcctggggaacccccactctgacctgttattaaagttcacattttgaatgcc

SEQ ID NO: 14663 - DNA, 1829 bp, Homo sapiens
acaactcccaggacccagcgggcgctgccgcccacgcgacgtcacggcggcggagggcgcaggcggctgggcgcctggcgagtggactgttcgagcccttccgctgggacccgggccctggctccggccccgcgatgggagctgctctccgcgggctgagcctgtcagcatcctcgacgcaccctggtccctgaagtcggagaagagcccctacccacccacacccccttgccccattttgggtcgcctgggtcctcagtcctagcggatcctcagtcctagcggccaccgggtctgaaaggagcaagacgatgatcctggcgtcggtgctgaggagcggtcccgggggcgggcttccgctccggccctccgggcccgctcgacgtcggccaccgacacacaccacgtggagatggctcgggagcgctccaagaccgtcacctccttttacaaccagtcggccatcgacgcggcagcggagaagccctcagtccgcctaacgcccaccatgatgctctacgctggccgctctcaggacggcagccaccttctgaaaagtgctcggtacctgcagcaagaacttccagtgaggattgctcaccgcatcaagggcttccgctgccttcctttcatcattggctgcaaccccaccatactgcacgtgcatgagctatatatccgtgccttccagaagctgacagacttccctccgatcaaggaccaggcggacgaggcccagtactgccagctggtgcgacagctgctggatgaccacaaggatgtggtgaccctcttggcagagggcctacgtgagagccggaagcacatagaggatgaaaagctcgtccgctacttcttggacaagacgctgacttcgaggcttggaatccgcatgttggccacgcatcacctggcgctgcatgaggacaagcctgactttgtcggcatcatctgtactcgtctctcaccaaagaagattattgagaagtgggtggactttgccagacgcctgtgtgagcacaagtatggcaatgcgccccgtgtccgcatcaatggccatgtggctgcccggttccccttcatccctatgccactggactacatcctgccggagctgctcaagaatgccatgagagccacaatggagagtcacctagacactccctacaatgtcccagatgtggtcatcaccatcgccaacaatgatgtcgatctgatcatcaggatctcagaccgtggtggaggaatcgctcacaaagatctggaccgggtcatggactaccacttcactactgctgaggccagcacacaggacccccggatcagccccctctttggccatctggacatgcatagtggcgcccagtcaggacccatgcacggctttggcttcgggttgcccacgtcacgggcctacgcggagtacctcggtgggtctctgcagctgcagtccctgcagggcattggcacggacgtctacctgcggctccgccacatcgatggccgggaggaaagcttccggatctgaccccacagcctttggcctgctcacccgaccagcctgggccgcattccctgcaggacctcccgggtcaggcagggcggccccctgctccacacactgctgcatcttgggtctcagggacccagacagatggacttacatggagctgggcactgccctgcctcaacagggtccattgcctcctcgcctccagaacttggagcagggaagtgggcaccctgaggcctccagcaccagttccgtcattctcgttcctggggaacccccactctgacctgttattaaagttcacattttgaatgcc

SEQ ID NO: 14664 - DNA, 1583 bp, Homo sapiens
acaactcccaggacccagcgggcgctgccgcccacgcgacgtcacggcggcggagggcgcaggcggctgggcgcctggcgagtggactgttcgagcccttccgctgggacccgggccctggctccggccccgcgatgggagctgctctccgcgggctgagcctgtcagcatcctcgacgcaccctggtccctgaagtcggagaagagcccctacccacccacacccccttgccccattttgggtcgcctgggtcctcagtcctagcggatcctcagtcctagcggccaccgggtctgaaaggagcaagacgatgatcctggcgtcggtgctgaggagcggtcccgggggcgggcttccgctccggcccctcctgggacccgcactcgcgctccgggcccgctcgacgtcggccaccgacacacaccacgtggagatggctcgggagcgctccaagaccgtcacctccttttacaaccagtcggccatcgacgcggcagcggagaagccctcagtccgcctaacgcccaccatgatgctctacgctggccgctctcaggacggcagccaccttctgaaaagtgctcggtacctgcagcaagaacttccagtgaggattgctcaccgcatcaagggcttccgctgccttcctttcatcattggctgcaaccccaccatactgcacgtgcatgagctatatatccgtgccttccagaagctgacagacttccctccgatcaaggaccaggcggacgaggcccagtactgccagctggtgcgacagctgctggatgaccacaaggatgtggtgaccctcttggcagagggcctacgtgagagccggaagcacatagaggatgaaaagctcgtccgctacttcttggacaagacgctgacttcgaggcttggaatccgcatgttggccacgcatcacctggcgctgcatgaggacaagcctgactttgtcggcatcatctgtactcgtctctcaccaaagaagattattgagaagtgggtggactttgccagacgcctgtgtgagcacaagtatggcaatgcgccccgtgtccgcatcaatggccatgtggctgcccggttccccttcatccctatgccactggactacatcctgccggagctgctcaagaatgccatgagagccacaatggagagtcacctagacactccctacaatgtcccagatgtggtcatcaccatcgccaacaatgatgtcgatctgatcatcagcacatcgatggccgggaggaaagcttccggatctgaccccacagcctttggcctgctcacccgaccagcctgggccgcattccctgcaggacctcccgggtcaggcagggcggccccctgctccacacactgctgcatcttgggtctcagggacccagacagatggacttacatggagctgggcactgccctgcctcaacagggtccattgcctcctcgcctccagaacttggagcagggaagtgggcaccctgaggcctccagcaccagttccgtcattctcgttcctggggaacccccactctgacctgttattaaagttcacattttgaatgcc

SEQ ID NO: 14665 - DNA, 1190 bp, Homo sapiens
acaactcccaggacccagcgggcgctgccgcccacgcgacgtcacggcggcggagggcgcaggcggctgggcgcctggcgagtggactgttcgagcccttccgctgggacccgggccctggctccggccccgcgatgggagctgctctccgcgggctgagcctgtcagcatcctcgacgcaccctggtccctgaagtcggagaagagcccctacccacccacacccccttgccccattttgggtcgcctgggtcctcagtcctagcggatcctcagtcctagcggccaccgggtctgaaaggagcaagacgatgatcctggcgtcggtgctgaggagcggtcccgggggcgggcttccgctccggcccctcctgggacccgcactcgcgctccgggcccgctcgacgtcggccaccgacacacaccacgtggagatggctcgggagcgctccaagaccgtcacctccttttacaaccagtcggccatcgacgcggcagcggagaagccctcagtccgcctaacgcccaccatgatgctctacgctggccgctctcaggacggcagccaccttctgaaaagtgctcggtacctgcagcaagaacttccagtgaggattgctcaccgcatcaagggcttccgctgccttcctttcatcattggctgcaaccccaccatactgcacgtgcatgagctatatatccgtgccttccagaagctgacagacttccctccgatcaaggaccaggcggacgaggcccagtactgccagctggtgcgacagctgctggatgaccacaaggatgtggtgaccctcttggcagagggcctacgtgagagccggaagcacatagaggatgaaaagctcgtccgctacttcttggacaagacgctgacttcgaggcttggaatccgcatgttggccacgcatcacctggcgctgcatgaggacaagcctgactttgtcggcatcatctgtactcgtctctcaccaaagaagattattgagaagtgggtggactttgccagacgcctgtgtgagcacaagtatggcaatgcgccccgtgtccgcatcaatggccatgtggctgcccggttcccgcaccctgaggcctccagcaccagttccgtcattctcgttcctggggaacccccactctgacctgttattaaagttcacattttgaatgcc

SEQ ID NO: 14666 - DNA, 1220 bp, Homo sapiens
acaactcccaggacccagcgggcgctgccgcccacgcgacgtcacggcggcggagggcgcaggcggctgggcgcctggcgagtggactgttcgagcccttccgctgggacccgggccctggctccggccccgcgatgggagctgctctccgcgggctgagcctgtcagcatcctcgacgcaccctggtccctgaagtcggagaagagcccctacccacccacacccccttgccccattttgggtcgcctgggtcctcagtcctagcggatcctcagtcctagcggccaccgggtctgaaaggagcaagacgatgatcctggcgtcggtgctgaggagcggtcccgggggcgggcttccgctccggcccctcctgggacccgcactcgcgctccgggcccgctcgacgtcggccaccgacacacaccacgtggagatggctcgggagcgctccaagaccgtcacctccttttacaaccagtcggccatcgacgcggcagcggagaagccctcagtccgcctaacgcccaccatgatgctctacgctggccgctctcaggacggcagccaccttctgaaaagtgctcggtacctgcagcaagaacttccagtgaggattgctcaccgcatcaagggcttccgctgccttcctttcatcattggctgcaaccccaccatactgcacgtgcatgagctatatatccgtgccttccagaagctgacagacttccctccgatcaaggaccaggcggacgaggcccagtactgccagctggtgcgacagctgctggatgaccacaaggatgtggtgaccctcttggcagagggcctacgtgagagccggaagcacatagaggatgaaaagctcgtccgctacttcttggacaagacgctgacttcgaggcttggaatccgcatgttggccacgcatcacctggcgctgcatgaggacaagcctgactttgtcggcatcatctgtactcgtctctcaccaaagaagattattgagaagtgggtggactttgccaggtgaggcaagaatggctcagggggtgggcagacatctggggcagggaaggcttgggtctgagcccttgcccggggcatgatctgcggggagcagggtttctcaaccatggcactattgacatttccagccagataattctttgtcataggggctgccccgtgcacgttaggaagttcagcagcatccctggcg

SEQ ID NO: 14667 - DNA, 1065 bp, Homo sapiens
acaactcccaggacccagcgggcgctgccgcccacgcgacgtcacggcggcggagggcgcaggcggctgggcgcctggcgagtggactgttcgagcccttccgctgggacccgggccctggctccggccccgcgatgggagctgctctccgcgggctgagcctgtcagcatcctcgacgcaccctggtccctgaagtcggagaagagcccctacccacccacacccccttcatccctatgccactggactacatcctgccggagctgctcaagaatgccatgagagccacaatggagagtcacctagacactccctacaatgtcccagatgtggtcatcaccatcgccaacaatgatgtcgatctgatcatcaggatctcagaccgtggtggaggaatcgctcacaaagatctggaccgggtcatggactaccacttcactactgctgaggccagcacacaggacccccggatcagccccctctttggccatctggacatgcatagtggcgcccagtcaggacccatgcacgggtgagaccctgccaggccaggatggaggggtgggggaccccaggagactcaagcctctgaagcctcctgtcctgtccccctgcccactttggcttcgggttgcccacgtcacgggcctacgcggagtacctcggtgggtctctgcagctgcagtccctgcagggcattggcacggacgtctacctgcggctccgccacatcgatggccgggaggaaagcttccggatctgaccccacagcctttggcctgctcacccgaccagcctgggccgcattccctgcaggacctcccgggtcaggcagggcggccccctgctccacacactgctgcatcttgggtctcagggacccagacagatggacttacatggagctgggcactgccctgcctcaacagggtccattgcctcctcgcctccagaacttggagcagggaagtgggcaccctgaggcctccagcaccagttccgtcattctcgttcctggggaacccccactctgacctgttattaaagttcacattttgaatgcc

SEQ ID NO: 14668 - DNA, 825 bp, Homo sapiens
acaactcccaggacccagcgggcgctgccgcccacgcgacgtcacggcggcggagggcgcaggcggctgggcgcctggcgagtggactgttcgagcccttccgctgggacccgggccctggctccggccccgcgatgggagctgctctccgcgggctgagcctgtcagcatcctcgacgcaccctggtccctgaagtcggagaagagcccctacccacccacacccccttgccccattttgggtcgcctgggtcctcagtcctagcggatcctcagtcctagcggccaccgggtctgaaaggagcaagacgatgatcctggcgtcggtgctgaggagcggtcccgggggcgggcttccgctccggcccctcctgggacccgcactcgcgctccgggcccgctcgacgtcggccaccgacacacaccacgtggagatggctcgggagcgctccaagaccgtcacctccttttacaaccagtcggccatcgacgcggcagcggagaagccctcagtccgcctaacgcccaccatgatgctctacgctggccgctctcaggacggcagccaccttctgaaaagtgctcggtacctgcagcaagaacttccagtgaggattgctcaccgcatcaagggcttccgctgccttcctttcatcattggctgcaaccccaccatactgcacgtgcatgagctatatatccgtgccttccagaagctgacagacttccctccggcaccctgaggcctccagcaccagttccgtcattctcgttcctggggaacccccactctgacctgttattaaagttcacattttgaatgcc

SEQ ID NO: 14669 - DNA, 737 bp, Homo sapiens
taggctagtcgaggcctggtggtgctgggcccggctcggccccgtgatgggagctgctctccgcgggctgagcctgtcagcatcctcgacgcaccctggtccctgaagtcggagaagagcccctacccacccacacccccttgccccattttgggtcgcctgggtcctcagtcctagcggatcctcagtcctagcggccaccgggtctgaaaggagcaagacgatgatcctggcgtcggtgctgaggagcggtcccgggggcgggcttccgctccggcccctcctgggacccgcactcgcgctccgggcccgctcgacgtcggccaccgacacacaccacgtggagatggctcgggagcgctccaagaccgtcacctccttttacaaccagtcggccatcgacgcggcagcggagaagccctcagtccgcctaacgcccaccatgatgctctacgctggccgctctcaggacggcagccaccttctgaaaagtgctcggtacctgcagcaagaacttccagtgaggattgctcaccgcatcaagggcttccgctgccttcctttcatcattggctgcaaccccaccatactgcacgtgcatgagctatatatccgtgccttccagaagctgacagacttccctccggcaccctgaggcctccagcaccagttccgtcattctcgttcctggggaacccccactctgacctgttattaaagttcacattttgaatgcc

SEQ ID NO: 14670 - DNA, 488 bp, Homo sapiens
ctcaaccatggcactattgacatttccagccagataattctttgtcataggggctgccccgtgcacgttaggaagttcagcagcatccctggcgccagcagtactgcctagttgtgacaaacaaaaatgtctctgcacattgccatatgttacttaggggggcagaattgtttccagttgcaaaccactggtggaggggcccctgactgaaccctcgctcctatccgcagacgcctgtgtgagcacaagtatggcaatgcgccccgtgtccgcatcaatggccatgtggctgcccggttccccttcatccctatgccactggactacatcctgccggagctgctcaagaatgccatgaggtggggtggcttgatgtgctggcttgggggcggacaggaaccggggtgcttgtacctactggtctttcccctctgcatagagccacaatggagagtcacctagacactccctacaatgtcccagatgtg

SEQ ID NO: 14671 - DNA, 377 bp, Homo sapiens
gggtccgggagcaagggcgtggcctggatgcgcgggcgcccgggacggcacgtcctcagaccaaactacaactcccaggacccagcgggcgctgccgcccacgcgacgtcacggcggcggagggcgcaggcggctgggcgcctggcgagtggactgttcgagcccttccgctgggacccgggccctggctccggccccgcggtaagtggggcgaccccagcctactcagtccgcggaggccccgcggcgcacgtccgcagcctccatcacagcgcgggcgcgcagacggggctggcatctaccatatggggggcatccgggccgaaccaagtgacccgcgtggggggtcccgctggggactccgtgccgcaccctcc

SEQ ID NO: 14672 - DNA, 1336 bp, Homo sapiens
taatgctaatttatttcacaggtatgatagtaaccaaaactcaggtaacaaccattagcttttgcaagaagtcaggttgactagcaaggagtctgcttctgctacttggagaagagatttagaattatgtatcttttgttacagatatacagatatacaaatatacagatatacaaataagttttttcaagggggaacatggcaaaggtgttcagtttcatccttgttaccaccgctctgacaatgggcagggaaatttcggcgctcgaggactgtgcccaggagcagatgcggctcagagcccaggtgcgcctgcttgagacccgggtcaaacagcaacaggtcaagatcaagcagcttttgcaggagaatgaagtccagttccttgataaaggagatgagaatactgtcgttgatcttggaagcaagaggcagtatgcagattgttcagagattttcaatgatgggtataagctcagtggattttacaaaatcaaacctctccagagcccagcagaattttctgtttattgtgacatgtccgatggaggaggatggactgtaattcagagacgatctgatggcagtgaaaactttaacagaggatggaaagactatgaaaatggctttggaaattttgtccaaaaacatggtgaatattggctgggcaataaaaatcttcacttcttgaccactcaagaagactacactttaaaaatcgaccttgcagattttgaaaaaaatagccgttatgcacaatataagaatttcaaagttggagatgaaaagaatttctacgagttgaatattggggaatattctggaacagctggagattcccttgcggggaattttcatcctgaggtgcagtggtgggctagtcaccaaagaatgaaattcagcacgtgggacagagatcatgacaactatgaagggaactgcgcagaagaagatcagtctggctggtggtttaacaggtgtcactctgcaaacctgaatggtgtatactacagcggcccctacacggctaaaacagacaatgggattgtctggtacacctggcatgggtggtggtattctctgaaatctgtggttatgaaaattaggccaaatgattttattccaaatgtaatttaattgctgctgttgggctttcgtttctgcaattcagctttgtttaaagtgatttgaaaaatactcattctgaacatatccatgcgcaatcatgataactgttgtgagtagtgcttttcattcttctcacttgcctttgttacttaatgtgctttcagtacagcagatatgcaatattcaccaaataaatgtagactgtgtt

SEQ ID NO: 14673 - DNA, 616 bp, Homo sapiens
  misc_feature (31)..(31): n is a, c, g, or t
  misc_feature (39)..(39): n is a, c, g, or t
  misc_feature (41)..(41): n is a, c, g, or t
  misc_feature (43)..(43): n is a, c, g, or t
  misc_feature (47)..(48): n is a, c, g, or t
  misc_feature (51)..(51): n is a, c, g, or t
  misc_feature (53)..(53): n is a, c, g, or t
  misc_feature (56)..(56): n is a, c, g, or t
  misc_feature (65)..(65): n is a, c, g, or t
ggaattcgcgccgggggagagagtgagcgtnatgcacantntnagannttnanagntggagatgnaaagaatttctacgagttgaatattggggaatattctggaacagctggagattcccttgcggggaattttcatcctgaggtgcagtggtgggctagtcaccaaagaatgaaattcagcacgtgggacagagatcatgacaactatgaagggaactgcgcagaagaagatcagtctggctggtggtttaacaggtgtcactctgcaaacctgaatggtgtatactacagcggcccctacacggctaaaacagacaatgggattgtctggtacacctggcatgggtggtggtattctctgaaatctgtggttatgaaaattaggccaaatgattttattccaaatgtaatttaattgctgctgttgggctttcgtttctgcaattcagctttgtttaaagtgatttgaaaaatactcattctgaacatatccatgcgcaatcatgataactgttgtgagtagtgcttttcattcttctcacttgcctttgttacttaatgtgctttcagtacagcagatatgcaatattcaccaaataaatgtagactgtgtt

SEQ ID NO: 14674 - DNA, 2302 bp, Homo sapiens
aagctgagcgtctcagagaaacaacagaagacggagaagacccgccaggctacaccaccgacatgagaacagataaagaagctgactcaaatggcagagggcagcctaaaggagaaacaactggcaattatcccgggtaatatgatcttggctgccttgatggtaattaccgcggcgtaaatcaacaggattacctttcccttaataatcttcaaaatgtccacgtgaaagacaggaagatgtttaatgggaagaccaaacatcgtcagtgctcaagtccagtagataacaaagaacagaaagaaaacaaaactttggtattttactggaatctgagtgaataaatagggaccacaggacaaatggcaaacaactgcttgagttacatcagaaggaaagaagaaatgatgaacccagatttccagtaagaaactgttacacaatatgattaatggagctaacaagtgcctattacacattagaaaatcttctagaggattttaaaacaaaaggaacaacttgtccagagtataatcgatgcttccagttaaatttcacaattttgcacctcagggaatacttttgtttttcttagagagcaaataaactgaccatttcaccttggcaattattaacctgccttgttttttataactaggaaaaatttggcttatctccatattttagttgagatgacatattaattcatatttttgtgggtaaaatgttattacccttaatacaaagcaaagtttcagctggacttcgtttttacttaatcttcaatggaacattactgaagttacagtacaaaaattctctgaatgaacataataataagttgtaaaatatatatatctttataaagatatattattggatctttcacaaaaagtcatacaagtggggaaaaaagaaaaatatcagagtattgggatttgtccttgaatcttctcttttagctttctttcagttaaacctgtgtccacatgtttgtttctggattgaagccagaatcaacattgtccctatttctaatcaaataatggagaaataattacaaattcccaatgcagttacaggatcctgggaagcagagtgtctggatggaacctgagctgggtctctgactcacttctgactttagttttttcaagggggaacatggcaaaggtgttcagtttcatccttgttaccaccgctctgacaatgggcagggaaatttcggcgctcgaggactgtgcccaggagcagatgcggctcagagcccaggtgcgcctgcttgagacccgggtcaaacagcaacaggtcaagatcaagcagcttttgcaggagaatgaagtccagttccttgataaaggagatgagaatactgtcgttgatcttggaagcaagaggcagtatgcagattgttcagagattttcaatgatgggtataagctcagtggattttacaaaatcaaacctctccagagcccagcagaattttctgtttattgtgacatgtccgatggaggaggatggactgtaattcagagacgatctgatggcagtgaaaactttaacagaggatggaaagactatgaaaatggctttggaaattttgtccaaaaacatggtgaatattggctgggcaataaaaatcttcacttcttgaccactcaagaagactacactttaaaaatcgaccttgcagattttgaaaaaaatagccgttatgcacaatataagaatttcaaagttggagatgaaaagaatttctacgagttgaatattggggaatattctggaacagctggagattcccttgcggggaattttcatcctgaggtgcagtggtgggctagtcaccaaagaatgaaattcagcacgtgggacagagatcatgacaactatgaagggaactgcgcagaagaagatcagtctggctggtggtttaacaggtgtcactctgcaaacctgaatggtgtatactacagcggcccctacacggctaaaacagacaatgggattgtctggtacacctggcatgggtggtggtattctctgaaatctgtggttatgaaaattaggccaaatgattttattccaaatgtaatttaattgctgctgttgggctttcgtttctgcaattcagctttgtttaaagtgatttgaaaaatactcattctgaacatatccatgcgcaatcatgataactgttgtgagtagtgcttttcattcttctcacttgcctttgttacttaatgtgctttcagtacagcagatatgcaatattcaccaaataaatgtagactgtgtt

SEQ ID NO: 14675 - DNA, 2558 bp, Homo sapiens
aagctgagcgtctcagagaaacaacagaagacggagaagacccgccaggctacaccaccgacatgagaacagataaagaagctgactcaaatggcagagggcagcctaaaggagaaacaactggcaattatcccgggtaatatgatcttggctgccttgatggtaattaccgcggcgtaaatcaacaggattacctttcccttaataatcttcaaaatgtccacgtgaaagacaggaagatgtttaatgggaagaccaaacatcgtcagtgctcaagtccagtagataacaaagaacagaaagaaaacaaaactttggtattttactggaatctgagtgaataaatagggaccacaggacaaatggcaaacaactgcttgagttacatcagaaggaaagaagaaatgatgaacccagatttccagtaagaaactgttacacaatatgattaatggagctaacaagtgcctattacacattagaaaatcttctagaggattttaaaacaaaaggaacaacttgtccagagtataatcgatgcttccagttaaatttcacaattttgcacctcagggaatacttttgtttttcttagagagcaaataaactgaccatttcaccttggcaattattaacctgccttgttttttataactaggaaaaatttggcttatctccatattttagttgagatgacatattaattcatatttttgtgggtaaaatgttattacccttaatacaaagcaaagtttcagctggacttcgtttttacttaatcttcaatggaacattactgaagttacagtacaaaaattctctgaatgaacataataataagttgtaaaatatatatatctttataaagatatattattggatctttcacaaaaagtcatacaagtggggaaaaaagaaaaatatcagagtattgggatttgtccttgaatcttctcttttagctttctttcagttaaacctgtgtccacatgtttgtttctggattgaagccagaatcaacattgtccctatttctaatcaaataatggagaaataattacaaattcccaatgcagttacaggatcctgggaagcagagtgtctggatggaacctgagctgggtctctgactcacttctgactttagttttttcaagggggaacatggcaaaggtgttcagtttcatccttgttaccaccgctctgacaatgggcagggaaatttcggcgctcgaggactgtgcccaggagcagatgcggctcagagcccaggtgcgcctgcttgagacccgggtcaaacagcaacaggtcaagatcaagcagcttttgcaggagaatgaagtccagttccttgataaaggagatgagaatactgtcgttgatcttggaagcaagaggcagtatgcagattgttcagagattttcaatgatgggtataagctcagtggattttacaaaatcaaacctctccagagcccagcagaattttctgtttattgtgacatgtccgatggaggaggatggactgtaattcagagacgatctgatggcagtgaaaactttaacagaggatggaaagactatgaaaatggctttggaaattttgtccaaaaacatggtgaatattggctgggcaataaaaatcttcacttcttgaccactcaagaagactacactttaaaaatcgaccttgcagattttgaaaaaaatagccgttatgcacaatataagaatttcaaagttggagatgaaaagaatttctacgagttgaatattggggaatattctggaacagctggagattcccttgcggggaattttcatcctgaggtgcagtggtgggctagtcaccaaagaatgaaattcagcacgtgggacagagatcatgacaactatgaagggaactgcgcagaagaagatcagtctggctggtggtttaacaggtgtcactctgcaaacctgaatggtgtatactacagcggcccctacacggctaaaacagacaatgggattgtctggtacacctggcatgggtggtggtattctctgaaatctgtggttatgaaaattaggccaaatgattttattccaaatgtaatttaattgctgctgttgggctttcgtttctgcaattcagctttgtttaaagtgatttgaaaaatactcattctgaacatatccatgcgcaatcatgataactgttgtgagtagtgcttttcattcttctcacttgcctttgttacttaatgtgctttcagtacagcagatatgcaatattcaccaaataaatgtagactgtgtttacaaaaaaaaaaaaacaaaacacttgtgcagacggcactaggacctcgaaaaagctcttaaaacccatcggtaggcacgcgcgggccccagaaggtacggtgaaacgaggggctaaaccggtcccaagagagaaccgggccagaataaggaggattctccccataaaaaccgcgggggaaacagacggttggaacaaaccaaagagaatccgagacaaacggatccaacacaggagtccagcaccaataatacga

SEQ ID NO: 14676 - DNA, 2338 bp, Homo sapiens
aagctgagcgtctcagagaaacaacagaagacggagaagacccgccaggctacaccaccgacatgagaacagataaagaagctgactcaaatggcagagggcagcctaaaggagaaacaactggcaattatcccgggtaatatgatcttggctgccttgatggtaattaccgcggcgtaaatcaacaggattacctttcccttaataatcttcaaaatgtccacgtgaaagacaggaagatgtttaatgggaagaccaaacatcgtcagtgctcaagtccagtagataacaaagaacagaaagaaaacaaaactttggtattttactggaatctgagtgaataaatagggaccacaggacaaatggcaaacaactgcttgagttacatcagaaggaaagaagaaatgatgaacccagatttccagtaagaaactgttacacaatatgattaatggagctaacaagtgcctattacacattagaaaatcttctagaggattttaaaacaaaaggaacaacttgtccagagtataatcgatgcttccagttaaatttcacaattttgcacctcagggaatacttttgtttttcttagagagcaaataaactgaccatttcaccttggcaattattaacctgccttgttttttataactaggaaaaatttggcttatctccatattttagttgagatgacatattaattcatatttttgtgggtaaaatgttattacccttaatacaaagcaaagtttcagctggacttcgtttttacttaatcttcaatggaacattactgaagttacagtacaaaaattctctgaatgaacataataataagttgtaaaatatatatatctttataaagatatattattggatctttcacaaaaagtcatacaagtggggaaaaaagaaaaatatcagagtattgggatttgtccttgaatcttctcttttagctttctttcagttaaacctgtgtccacatgtttgtttctggattgaagccagaatcaacattgtccctatttctaatcaaataatggagaaataattacaaattcccaatgcagttacaggatcctgggaagcagagtgtctggatggaacctgagctgggtctctgactcacttctgactttagttttttcaagggggaacatggcaaaggtgttcagtttcatccttgttaccaccgctctgacaatgggcagggaaatttcggcgctcgaggactgtgcccaggagcagatgcggctcagagcccaggtgcgcctgcttgagacccgggtcaaacagcaacaggtcaagatcaagcagcttttgcaggagaatgaagtccagttccttgataaaggagatgagaatactgtcgttgatcttggaagcaagaggcagtatgcagattgttcagagattttcaatgatgggtataagctcagtggattttacaaaatcaaacctctccagagcccagcagaattttctgtttattgtgacatgtccgatggaggaggatggactgtaattcagagacgatctgatggcagtgaaaactttaacagaggatggaaagactatgaaaatggctttggaaattttgtccaaaaacatggtgaatattggctgggcaataaaaatcttcacttcttgaccactcaagaagactacactttaaaaatcgaccttgcagattttgaaaaaaatagccgttatgcacaatataagaatttcaaagttggagatgaaaagaatttctacgagttgaatattggggaatattctggaacagctggagattcccttgcggggaattttcatcctgaggtgcagtggtgggctagtcaccaaagaatgaaattcagcacgtgggacagagatcatgacaactatgaagggaactgcgcagaagaagatcagtctggctggtggtttaacaggtgtcactctgcaaacctgaatggtgtatactacagcggcccctacacggctaaaacagacaatgggattgtctggtacacctggcatgggtggtggtattctctgaaatctgtggttatgaaaattaggccaaatgattttattccaaatgtaatttaattgctgctgttgctaaatccattagagaccgggtggacgccaataaagaagacacagagagaagaagtctgctggtgttgtggaagaacgcaggggattctcagaggcaagtctatggggaaaggtattccctcagcccagaaatacaatttaccccttggtcccggtcagcaaactggggtgaatgtgaagaaactgaattgtccacctgtttgaccacggttcttacaagaag

SEQ ID NO: 14677 - DNA, 2126 bp, Homo sapiens
aagctgagcgtctcagagaaacaacagaagacggagaagacccgccaggctacaccaccgacatgagaacagataaagaagctgactcaaatggcagagggcagcctaaaggagaaacaactggcaattatcccgggtaatatgatcttggctgccttgatggtaattaccgcggcgtaaatcaacaggattacctttcccttaataatcttcaaaatgtccacgtgaaagacaggaagatgtttaatgggaagaccaaacatcgtcagtgctcaagtccagtagataacaaagaacagaaagaaaacaaaactttggtattttactggaatctgagtgaataaatagggaccacaggacaaatggcaaacaactgcttgagttacatcagaaggaaagaagaaatgatgaacccagatttccagtaagaaactgttacacaatatgattaatggagctaacaagtgcctattacacattagaaaatcttctagaggattttaaaacaaaaggaacaacttgtccagagtataatcgatgcttccagttaaatttcacaattttgcacctcagggaatacttttgtttttcttagagagcaaataaactgaccatttcaccttggcaattattaacctgccttgttttttataactaggaaaaatttggcttatctccatattttagttgagatgacatattaattcatatttttgtgggtaaaatgttattacccttaatacaaagcaaagtttcagctggacttcgtttttacttaatcttcaatggaacattactgaagttacagtacaaaaattctctgaatgaacataataataagttgtaaaatatatatatctttataaagatatattattggatctttcacaaaaagtcatacaagtggggaaaaaagaaaaatatcagagtattgggatttgtccttgaatcttctcttttagctttctttcagttaaacctgtgtccacatgtttgtttctggattgaagccagaatcaacattgtccctatttctaatcaaataatggagaaataattacaaattcccaatgcagttacaggatcctgggaagcagagtgtctggatggaacctgagctgggtctctgactcacttctgactttagttttttcaagggggaacatggcaaaggtgttcagtttcatccttgttaccaccgctctgacaatgggcagggaaatttcggcgctcgaggactgtgcccaggagcagatgcggctcagagcccaggtgcgcctgcttgagacccgggtcaaacagcaacaggtcaagatcaagcagcttttgcaggagaatgaagtccagttccttgataaaggagatgagaatactgtcgttgatcttggaagcaagaggcagtatgcagattgttcagagattttcaatgatgggtataagctcagtggattttacaaaatcaaacctctccagagcccagcagaattttctgtttattgtgacatgtccgatggaggaggatggactgtaattcagagacgatctgatggcagtgaaaactttaacagaggatggaaagactatgaaaatggctttggaaattttgtccaaaaacatggtgaatattggctgggcaataaaaatcttcacttcttgaccactcaagaagactacactttaaaaatcgaccttgcagattttgaaaaaaatagccgttatgcacaatataagaatttcaaagttggagatgaaaagaatttctacgagttgaatattggggaatattctggaacagctggagattcccttgcggggaattttcatcctgaggtgcagtggtgggctagtcaccaaagaatgaaattcagcacgtgggacagagatcatgacaactatgaagggaactgcgcagaagaagatcagtctggctggtggtttaacaggtttgatgtcttatgagcatagttgtaatggagttgatgatatctcactgatagacattaattatcaatataatatgtatggtaatgttagtctttatttataatattagtattattaagtaatcattctcattagaattcttcagcaatgaagtcgttttgaggatttgttcattgtgtaca

SEQ ID NO: 14678 - DNA, 2429 bp, Homo sapiens
aagctgagcgtctcagagaaacaacagaagacggagaagacccgccaggctacaccaccgacatgagaacagataaagaagctgactcaaatggcagagggcagcctaaaggagaaacaactggcaattatcccgggtaatatgatcttggctgccttgatggtaattaccgcggcgtaaatcaacaggattacctttcccttaataatcttcaaaatgtccacgtgaaagacaggaagatgtttaatgggaagaccaaacatcgtcagtgctcaagtccagtagataacaaagaacagaaagaaaacaaaactttggtattttactggaatctgagtgaataaatagggaccacaggacaaatggcaaacaactgcttgagttacatcagaaggaaagaagaaatgatgaacccagatttccagtaagaaactgttacacaatatgattaatggagctaacaagtgcctattacacattagaaaatcttctagaggattttaaaacaaaaggaacaacttgtccagagtataatcgatgcttccagttaaatttcacaattttgcacctcagggaatacttttgtttttcttagagagcaaataaactgaccatttcaccttggcaattattaacctgccttgttttttataactaggaaaaatttggcttatctccatattttagttgagatgacatattaattcatatttttgtgggtaaaatgttattacccttaatacaaagcaaagtttcagctggacttcgtttttacttaatcttcaatggaacattactgaagttacagtacaaaaattctctgaatgaacataataataagttgtaaaatatatatatctttataaagatatattattggatctttcacaaaaagtcatacaagtggggaaaaaagaaaaatatcagagtattgggatttgtccttgaatcttctcttttagctttctttcagttaaacctgtgtccacatgtttgtttctggattgaagccagaatcaacattgtccctatttctaatcaaataatggagaaataattacaaattcccaatgcagttacaggatcctgggaagcagagtgtctggatggaacctgagctgggtctctgactcacttctgactttagggtgaagatggagggaatctgataaagacatcttataaattcaacagacacaaaagaatttgatctcccataagcaactgtgaaattacaataacagatcctgggaagttctacaattctaattcagttttttcaagggggaacatggcaaaggtgttcagtttcatccttgttaccaccgctctgacaatgggcagggaaatttcggcgctcgaggactgtgcccaggagcagatgcggctcagagcccaggtgcgcctgcttgagacccgggtcaaacagcaacaggtcaagatcaagcagcttttgcaggagaatgaagtccagttccttgataaaggagatgagaatactgtcgttgatcttggaagcaagaggcagtatgcagattgttcagagattttcaatgatgggtataagctcagtggattttacaaaatcaaacctctccagagcccagcagaattttctgtttattgtgacatgtccgatggaggaggatggactgtaattcagagacgatctgatggcagtgaaaactttaacagaggatggaaagactatgaaaatggctttggaaattttgtccaaaaacatggtgaatattggctgggcaataaaaatcttcacttcttgaccactcaagaagactacactttaaaaatcgaccttgcagattttgaaaaaaatagccgttatgcacaatataagaatttcaaagttggagatgaaaagaatttctacgagttgaatattggggaatattctggaacagctggagattcccttgcggggaattttcatcctgaggtgcagtggtgggctagtcaccaaagaatgaaattcagcacgtgggacagagatcatgacaactatgaagggaactgcgcagaagaagatcagtctggctggtggtttaacaggtgtcactctgcaaacctgaatggtgtatactacagcggcccctacacggctaaaacagacaatgggattgtctggtacacctggcatgggtggtggtattctctgaaatctgtggttatgaaaattaggccaaatgattttattccaaatgtaatttaattgctgctgttgggctttcgtttctgcaattcagctttgtttaaagtgatttgaaaaatactcattctgaacatatccatgcgcaatcatgataactgttgtgagtagtgcttttcattcttctcacttgcctttgttacttaatgtgctttcagtacagcagatatgcaatattcaccaaataaatgtagactgtgtt

SEQ ID NO: 14679 - DNA, 1485 bp, Homo sapiens
taatgctaatttatttcacaggtatgatagtaaccaaaactcaggtaacaaccattagcttttgcaagaagtcaggttgactagcaaggagtctgcttctgctacttggagaagagatttagaattatgtatcttttgttacagatatacagatatacaaatatacagatatacaaataagttatttttgttgttgctggaagggtgaagatggagggaatctgataaagacatcttataaattcaacagacacaaaagaatttgatctcccataagcaactgtgaaattacaataacagatcctgggaagttctacaattctaattcagttttttcaagggggaacatggcaaaggtgttcagtttcatccttgttaccaccgctctgacaatgggcagggaaatttcggcgctcgaggactgtgcccaggagcagatgcggctcagagcccaggtgcgcctgcttgagacccgggtcaaacagcaacaggtcaagatcaagcagcttttgcaggagaatgaagtccagttccttgataaaggagatgagaatactgtcgttgatcttggaagcaagaggcagtatgcagattgttcagagattttcaatgatgggtataagctcagtggattttacaaaatcaaacctctccagagcccagcagaattttctgtttattgtgacatgtccgatggaggaggatggactgtaattcagagacgatctgatggcagtgaaaactttaacagaggatggaaagactatgaaaatggctttggaaattttgtccaaaaacatggtgaatattggctgggcaataaaaatcttcacttcttgaccactcaagaagactacactttaaaaatcgaccttgcagattttgaaaaaaatagccgttatgcacaatataagaatttcaaagttggagatgaaaagaatttctacgagttgaatattggggaatattctggaacagctggagattcccttgcggggaattttcatcctgaggtgcagtggtgggctagtcaccaaagaatgaaattcagcacgtgggacagagatcatgacaactatgaagggaactgcgcagaagaagatcagtctggctggtggtttaacaggtgtcactctgcaaacctgaatggtgtatactacagcggcccctacacggctaaaacagacaatgggattgtctggtacacctggcatgggtggtggtattctctgaaatctgtggttatgaaaattaggccaaatgattttattccaaatgtaatttaattgctgctgttgggctttcgtttctgcaattcagctttgtttaaagtgatttgaaaaatactcattctgaacatatccatgcgcaatcatgataactgttgtgagtagtgcttttcattcttctcacttgcctttgttacttaatgtgctttcagtacagcagatatgcaatattcaccaaataaatgtagactgtgtt

SEQ ID NO: 14680 - DNA, 1401 bp, Homo sapiens
tgcaagaagtcaggttgactaggaaggagtctgcttctgctacttggagaagagatttagaattatgtatcttttgttacagatatacagatatacaaatatacagatatacaaataagggtgaagatggagggaatctgataaagacatcttataaattcaacagacacaaaagaatttgatctcccataagcaactgtgaaattacaataacagatcctgggaagttctacaattctaattcagttttttcaagggggaacatggcaaaggtgttcagtttcatccttgttaccaccgctctgataatgggcagggaaatttcggcgctcgaggactgtgcccaggagcagatgcggctcagagcccaggtgcgcctgcttgagacccgggtcaaacagcaacaggtcaagatcaagcagcttttgcaggagaatgaagtccagttccttgataaaggagatgagaatactgtcgttgatcttggaagcaagaggcagtatgcagattgttcagagattttcaatgatgggtataagctcagtggattttacaaaatcaaacctctccagagcccagcagaattttctgtttattgtgacatgtccgatggaggaggatggactgtaattcagagacgatctgatggcagtgaaaactttaacagaggatggaaagactatgaaaatggctttggaaattttgtccaaaaacatggtgaatattggctgggcaataaaaatcttcacttcttgaccactcaagaagactacactttaaaaatcgaccttgcagattttgaaaaaaatagccgttatgcacaatataagaatttcaaagttggagatgaaaagaatttctacgagttgaatattggggaatattctggaacagctggagattcccttgcggggaattttcatcctgaggtgcagtggtgggctagtcaccaaagaatgaaattcagcacgtgggacagagatcatgacaactatgaagggaactgcgcagaagaagatcagtctggctggtggtttaacaggtgtcactctgcaaacctgaatggtgtatactacagcggcccctacacggctaaaacagacaatgggattgtctggtacacctggcatgggtggtggtattctctgaaatctgtggttatgaaaattaggccaaatgattttattccaaatgtaatttaattgctgctgttgggctttcgtttctgcaattcagctttgtttaaagtgatttgaaaaatactcattctgaacatatccatgcgcaatcatgataactgttgtgagtagtgcttttcattcttctcacttgcctttgttacttaatgtgctttcagtacagcagatatgcaatattcaccaaataaatgtagactgtgtt

SEQ ID NO: 14681 - DNA, 1489 bp, Homo sapiens
  misc_feature (6)..(6): n is a, c, g, or t
caccgnctgagggcaacgagggccgattttttttttttcaaaaacctcatttattatggagatttacatgccaacagtacaattaacttctataaaccacattactgtttagaaaacacataagcaatgtcatatagagattgagagcacagtccttgaactgaatttgaatcccacctccgcttacccactgggcatcaagactgagccctttcctaccgcatggaattgttatgaggatcaaaggagacaactataaagctcctagcatagcgattccaattattttatattatttgatcttttgagtccaggagttttcgcataagccataatttccaattcttcaaatagtaggcattattagaacttttcaagccactttctctttggaataatattctgaaatgggaagcgctcgaggactgtgcccaggagcagatgcggctcagagcccaggtgcgcctgcttgagacccgggtcaaacagcaacaggtcaagatcaagcagcttttgcaggagaatgaagtccagttccttgataaaggagatgagaatactgtcgttgatcttggaagcaagaggcagtatgcagattgttcagagattttcaatgatgggtataagctcagtggattttacaaaatcaaacctctccagagcccagcagaattttctgtttattgtgacatgtccgatggaggaggatggactgtaattcagagacgatctgatggcagtgaaaactttaacagaggatggaaagactatgaaaatggctttggaaattttgtccaaaaacatggtgaatattggctgggcaataaaaatcttcacttcttgaccactcaagaagactacactttaaaaatcgaccttgcagattttgaaaaaaatagccgttatgcacaatataagaatttcaaagttggagatgaaaagaatttctacgagttgaatattggggaatattctggaacagctggagattcccttgcggggaattttcatcctgaggtgcagtggtgggctagtcaccaaagaatgaaattcagcacgtgggacagagatcatgacaactatgaagggaactgcgcagaagaagatcagtctggctggtggtttaacaggtgtcactctgcaaacctgaatggtgtatactacagcggcccctacacggctaaaacagacaatgggattgtctggtacacctggcatgggtggtggtattctctgaaatctgtggttatgaaaattaggccaaatgattttattccaaatgtaatttaattgctgctgttgggctttcgtttctgcaattcagctttgtttaaagtgatttgaaaaatactcattctgaacatatccatgcgcaatcatgataactgttgtgagtagtgcttttcattcttctcacttgcctttgttacttaatgtgctttcagtacagcagatatgcaatattcaccaaataaatgtagactgtgtt

SEQ ID NO: 14682 - DNA, 1188 bp, Homo sapiens
actagaaaacggcccgccagtgtggtggaattcttttttcaagggggaacatggcaaaggtgttcagtttcatccttgttaccaccgctctgataatgggcagggaaatttcggcgctcgaggactgtgcccaggagcagatgcggctcagagcccaggtgcgcctgcttgagacccgggtcaaacagcaacaggtcaagatcaagcagcttttgcaggagaatgaagtccagttccttgataaaggagatgagaatactgtcgttgatcttggaagcaagaggcagtatgcagattgttcagagattttcaatgatgggtataagctcagtggattttacaaaatcaaacctctccagagcccagcagaattttctgtttattgtgacatgtccgatggaggaggatggactgtaattcagagacgatctgatggcagtgaaaactttaacagaggatggaaagactatgaaaatggctttggaaattttgtccaaaaacatggtgaatattggctgggcaataaaaatcttcacttcttgaccactcaagaagactacactttaaaaatcgaccttgcagattttgaaaaaaatagccgttatgcacaatataagaatttcaaagttggagatgaaaagaatttctacgagttgaatattggggaatattctggaacagctggagattcccttgcggggaattttcatcctgaggtgcagtggtgggctagtcaccaaagaatgaaattcagcacgtgggacagagatcatgacaactatgaagggaactgcgcagaagaagatcagtctggctggtggtttaacaggtgtcactctgcaaacctgaatggtgtatactacagcggcccctacacggctaaaacagacaatgggattgtctggtacacctggcatgggtggtggtattctctgaaatctgtggttatgaaaattaggccaaatgattttattccaaatgtaatttaattgctgctgttgggctttcgtttctgcaattcagctttgtttaaagtgatttgaaaaatactcattctgaacatatccatgcgcaatcatgataactgttgtgagtagtgcttttcattcttctcacttgcctttgttacttaatgtgctttcagtacagcagatatgcaatattcaccaaataaatgtagactgtgtt

SEQ ID NO: 14683 - DNA, 1038 bp, Homo sapiens
acaagatgcaattttaaaacgctgatttctataccatgtgttatctgtctccagtgatactgagtagtctcattcagaggctccctaaggcggggggagaaaaagacacataatgaatgttacattaccttgttttaaaaacagattgttcagagattttcaatgatgggtataagctcagtggattttacaaaatcaaacctctccagagcccagcagaattttctgtttattgtgacatgtccgatggaggaggatggactgtaattcagagacgatctgatggcagtgaaaactttaacagaggatggaaagactatgaaaatggctttggaaattttgtccaaaaacatggtgaatattggctgggcaataaaaatcttcacttcttgaccactcaagaagactacactttaaaaatcgaccttgcagattttgaaaaaaatagccgttatgcacaatataagaatttcaaagttggagatgaaaagaatttctacgagttgaatattggggaatattctggaacagctggagattcccttgcggggaattttcatcctgaggtgcagtggtgggctagtcaccaaagaatgaaattcagcacgtgggacagagatcatgacaactatgaagggaactgcgcagaagaagatcagtctggctggtggtttaacaggtgtcactctgcaaacctgaatggtgtatactacagcggcccctacacggctaaaacagacaatgggattgtctggtacacctggcatgggtggtggtattctctgaaatctgtggttatgaaaattaggccaaatgattttattccaaatgtaatttaattgctgctgttgggctttcgtttctgcaattcagctttgtttaaagtgatttgaaaaatactcattctgaacatatccatgcgcaatcatgataactgttgtgagtagtgcttttcattcttctcacttgcctttgttacttaatgtgctttcagtacagcagatatgcaatattcaccaaataaatgtagactgtgtt

SEQ ID NO: 14684 - DNA, 1743 bp, Homo sapiens
aagctgagcgtctcagagaaacaacagaagacggagaagacccgccaggctacaccaccgacatgagaacagataaagaagctgactcaaatggcagagggcagcctaaaggagaaacaactggcaattatcccgggtaatatgatcttggctgccttgatggtaattaccgcggcgtaaatcaacaggattacctttcccttaataatcttcaaaatgtccacgtgaaagacaggaagatgtttaatgggaagaccaaacatcgtcagtgctcaagtccagtagataacaaagaacagaaagaaaacaaaactttggtattttactggaatctgagtgaataaatagggaccacaggacaaatggcaaacaactgcttgagttacatcagaaggaaagaagaaatgatgaacccagatttccagtaagaaactgttacacaatatgattaatggagctaacaagtgcctattacacattagaaaatcttctagaggattttaaaacaaaaggaacaacttgtccagagtataatcgatgcttccagttaaatttcacaattttgcacctcagggaatacttttgtttttcttagagagcaaataaactgaccatttcaccttggcaattattaacctgccttgttttttataactaggaaaaatttggcttatctccatattttagttgagatgacatattaattcatatttttgtgggtaaaatgttattacccttaatacaaagcaaagtttcagctggacttcgtttttacttaatcttcaatggaacattactgaagttacagtacaaaaattctctgaatgaacataataataagttgtaaaatatatatatctttataaagatatattattggatctttcacaaaaagtcatacaagtggggaaaaaagaaaaatatcagagtattgggatttgtccttgaatcttctcttttagctttctttcagttaaacctgtgtccacatgtttgtttctggattgaagccagaatcaacattgtccctatttctaatcaaataatggagaaataattacaaattcccaatgcagttacaggatcctgggaagcagagtgtctggatggaacctgagctgggtctctgactcacttctgactttagggtgaagatggagggaatctgataaagacatcttataaattcaacagacacaaaagaatttgatctcccataagcaactgtgaaattacaataacagatcctgggaagttctacaattctaattcaggtttacaagttttcttctcatctattcagtagatattttgtcgagtacctgtgctaggttcagctgtgcccccaaaacatgtacattcctaacttttattacctgtgaatgtgatctcatttgcaaatagggtctttgtacatgtaactgagttaagatgaggtcatactggattagggcagaccctaatccaatgaccgatgtccttatatgaagagggaaattagacacagagacacacagaggaaagacagctatgtgaagatggtatcagagaatagagtgatactgccacaagtcaaaggatgtcaagaattgctggcaaccaccaaatgctagaagagtccagaaaggattttctcttagagcctttgaaggaagtatggccctgttcttcttgattttggacttgtatcctccagaactgtgagataataaactcctgttgttttaggccactcagtttatg

SEQ ID NO: 14685 - DNA, 1091 bp, Homo sapiens
aagctgagcgtctcagagaaacaacagaagacggagaagacccgccaggctacaccaccgacatgagaacagataaagaagctgactcaaatggcagagggcagcctaaaggagaaacaactggcaattatcccgggtaatatgatcttggctgccttgatggtaattaccgcggcgtaaatcaacaggattacctttcccttaataatcttcaaaatgtccacgtgaaagacaggaagatgtttaatgggaagaccaaacatcgtcagtgctcaagtccagtagataacaaagaacagaaagaaaacaaaactttggtattttactggaatctgagtgaataaatagggaccacaggacaaatggcaaacaactgcttgagttacatcagaaggaaagaagaaatgatgaacccagatttccattacaggatcctgggaagcagagtgtctggatggaacctgagctgggtctctgactcacttctgactttagggtgaagatggagggaatctgataaagacatcttataaattcaacagacacaaaagaatttgatctcccataagcaactgtgaaattacaataacagatcctgggaagttctacaattctaattcaggtttacaagttttcttctcatctattcagtagatattttgtcgagtacctgtgctaggttcagctgtgcccccaaaacatgtacattcctaacttttattacctgtgaatgtgatctcatttgcaaatagggtctttgtacatgtaactgagttaagatgaggtcatactggattagggcagaccctaatccaatgaccgatgtccttatatgaagagggaaattagacacagagacacacagaggaaagacagctatgtgaagatggtatcagagaatagagtgatactgccacaagtcaaaggatgtcaagaattgctggcaaccaccaaatgctagaagagtccagaaaggattttctcttagagcctttgaaggaagtatggccctgttcttcttgattttggacttgtatcctccagaactgtgagataataaactcctgttgttttaggccactcagtttatg

SEQ ID NO: 14686 - DNA, 189 bp, Homo sapiens
gagggcagcctaaaggagaaacaactggcaattatcccgggtaatatgatcttggctgccttgatggtaattaccgcggcggtaagtctccctgctgtctggactgaagaaaattttacatactggcttctgttccatttcctcctttaattaggccagttacttggatggattcccctattgaagttt

SEQ ID NO: 14687 - DNA, 2364 bp, Homo sapiens
aagctgagcgtctcagagaaacaacagaagacggagaagacccgccaggctacaccaccgacatgagaacagataaagaagctgactcaaatggcagagggcagcctaaaggagaaacaactggcaattatcccgggtaatatgatcttggctgccttgatggtaattaccgcggcgtaaatcaacaggattacctttcccttaataatcttcaaaatgtccacgtgaaagacaggaagatgtttaatgggaagaccaaacatcgtcagtgctcaagtccagtagataacaaagaacagaaagaaaacaaaactttggtattttactggaatctgagtgaataaatagggaccacaggacaaatggcaaacaactgcttgagttacatcagaaggaaagaagaaatgatgaacccagatttccagtaagaaactgttacacaatatgattaatggagctaacaagtgcctattacacattagaaaatcttctagaggattttaaaacaaaaggaacaacttgtccagagtataatcgatgcttccagttaaatttcacaattttgcacctcagggaatacttttgtttttcttagagagcaaataaactgaccatttcaccttggcaattattaacctgccttgttttttataactaggaaaaatttggcttatctccatattttagttgagatgacatattaattcatatttttgtgggtaaaatgttattacccttaatacaaagcaaagtttcagctggacttcgtttttacttaatcttcaatggaacattactgaagttacagtacaaaaattctctgaatgaacataataataagttgtaaaatatatatatctttataaagatatattattggatctttcacaaaaagtcatacaagtggggaaaaaagaaaaatatcagagtattgggatttgtccttgaatcttctcttttagctttctttcagttaaacctgtgtccacatgtttgtttctggattgaagccagaatcaacattgtccctatttctaatcaaataatggagaaataattacaaattcccaatgcagttacaggatcctgggaagcagagtgtctggatggaacctgagctgggtctctgactcacttctgactttaggcaagttatttaatgtctctgcatttttgacatgcttgtaataatgctaatttatttcacagttttttcaagggggaacatggcaaaggtgttcagtttcatccttgttaccaccgctctgacaatgggcagggaaatttcggcgctcgaggactgtgcccaggagcagatgcggctcagagcccaggtgcgcctgcttgagacccgggtcaaacagcaacaggtcaagatcaagcagcttttgcaggagaatgaagtccagttccttgataaaggagatgagaatactgtcgttgatcttggaagcaagaggcagtatgcagattgttcagagattttcaatgatgggtataagctcagtggattttacaaaatcaaacctctccagagcccagcagaattttctgtttattgtgacatgtccgatggaggaggatggactgtaattcagagacgatctgatggcagtgaaaactttaacagaggatggaaagactatgaaaatggctttggaaattttgtccaaaaacatggtgaatattggctgggcaataaaaatcttcacttcttgaccactcaagaagactacactttaaaaatcgaccttgcagattttgaaaaaaatagccgttatgcacaatataagaatttcaaagttggagatgaaaagaatttctacgagttgaatattggggaatattctggaacagctggagattcccttgcggggaattttcatcctgaggtgcagtggtgggctagtcaccaaagaatgaaattcagcacgtgggacagagatcatgacaactatgaagggaactgcgcagaagaagatcagtctggctggtggtttaacaggtgtcactctgcaaacctgaatggtgtatactacagcggcccctacacggctaaaacagacaatgggattgtctggtacacctggcatgggtggtggtattctctgaaatctgtggttatgaaaattaggccaaatgattttattccaaatgtaatttaattgctgctgttgggctttcgtttctgcaattcagctttgtttaaagtgatttgaaaaatactcattctgaacatatccatgcgcaatcatgataactgttgtgagtagtgcttttcattcttctcacttgcctttgttacttaatgtgctttcagtacagcagatatgcaatattcaccaaataaatgtagactgtgtt

SEQ ID NO: 14688 - DNA, 1253 bp, Homo sapiens
aagcatggtatcaacccagagtgcccattacaggatcctgggaagcagagtgtctggatggaacctgagctgggtctctgactcacttctgactttagttttttcaagggggaacatggcaaaggtgttcagtttcatccttgttaccaccgctctgataatgggcagggaaatttcggcgctcgaggactgtgcccaggagcagatgcggctcagagcccaggtgcgcctgcttgagacccgggtcaaacagcaacaggtcaagatcaagcagcttttgcaggagaatgaagtccagttccttgataaaggagatgagaatactgtcgttgatcttggaagcaagaggcagtatgcagattgttcagagattttcaatgatgggtataagctcagtggattttacaaaatcaaacctctccagagcccagcagaattttctgtttattgtgacatgtccgatggaggaggatggactgtaattcagagacgatctgatggcagtgaaaactttaacagaggatggaaagactatgaaaatggctttggaaattttgtccaaaaacatggtgaatattggctgggcaataaaaatcttcacttcttgaccactcaagaagactacactttaaaaatcgaccttgcagattttgaaaaaaatagccgttatgcacaatataagaatttcaaagttggagatgaaaagaatttctacgagttgaatattggggaatattctggaacagctggagattcccttgcggggaattttcatcctgaggtgcagtggtgggctagtcaccaaagaatgaaattcagcacgtgggacagagatcatgacaactatgaagggaactgcgcagaagaagatcagtctggctggtggtttaacaggtgtcactctgcaaacctgaatggtgtatactacagcggcccctacacggctaaaacagacaatgggattgtctggtacacctggcatgggtggtggtattctctgaaatctgtggttatgaaaattaggccaaatgattttattccaaatgtaatttaattgctgctgttgggctttcgtttctgcaattcagctttgtttaaagtgatttgaaaaatactcattctgaacatatccatgcgcaatcatgataactgttgtgagtagtgcttttcattcttctcacttgcctttgttacttaatgtgctttcagtacagcagatatgcaatattcaccaaataaatgtagactgtgtt

SEQ ID NO: 14689 - DNA, 2429 bp, Homo sapiens
aagctgagcgtctcagagaaacaacagaagacggagaagacccgccaggctacaccaccgacatgagaacagataaagaagctgactcaaatggcagagggcagcctaaaggagaaacaactggcaattatcccgggtaatatgatcttggctgccttgatggtaattaccgcggcgtaaatcaacaggattacctttcccttaataatcttcaaaatgtccacgtgaaagacaggaagatgtttaatgggaagaccaaacatcgtcagtgctcaagtccagtagataacaaagaacagaaagaaaacaaaactttggtattttactggaatctgagtgaataaatagggaccacaggacaaatggcaaacaactgcttgagttacatcagaaggaaagaagaaatgatgaacccagatttccagtaagaaactgttacacaatatgattaatggagctaacaagtgcctattacacattagaaaatcttctagaggattttaaaacaaaaggaacaacttgtccagagtataatcgatgcttccagttaaatttcacaattttgcacctcagggaatacttttgtttttcttagagagcaaataaactgaccatttcaccttggcaattattaacctgccttgttttttataactaggaaaaatttggcttatctccatattttagttgagatgacatattaattcatatttttgtgggtaaaatgttattacccttaatacaaagcaaagtttcagctggacttcgtttttacttaatcttcaatggaacattactgaagttacagtacaaaaattctctgaatgaacataataataagttgtaaaatatatatatctttataaagatatattattggatctttcacaaaaagtcatacaagtggggaaaaaagaaaaatatcagagtattgggatttgtccttgaatcttctcttttagctttctttcagttaaacctgtgtccacatgtttgtttctggattgaagccagaatcaacattgtccctatttctaatcaaataatggagaaataattacaaattcccaatgcagttacaggatcctgggaagcagagtgtctggatggaacctgagctgggtctctgactcacttctgactttagggtgaagatggagggaatctgataaagacatcttataaattcaacagacacaaaagaatttgatctcccataagcaactgtgaaattacaataacagatcctgggaagttctacaattctaattcagttttttcaagggggaacatggcaaaggtgttcagtttcatccttgttaccaccgctctgataatgggcagggaaatttcggcgctcgaggactgtgcccaggagcagatgcggctcagagcccaggtgcgcctgcttgagacccgggtcaaacagcaacaggtcaagatcaagcagcttttgcaggagaatgaagtccagttccttgataaaggagatgagaatactgtcgttgatcttggaagcaagaggcagtatgcagattgttcagagattttcaatgatgggtataagctcagtggattttacaaaatcaaacctctccagagcccagcagaattttctgtttattgtgacatgtccgatggaggaggatggactgtaattcagagacgatctgatggcagtgaaaactttaacagaggatggaaagactatgaaaatggctttggaaattttgtccaaaaacatggtgaatattggctgggcaataaaaatcttcacttcttgaccactcaagaagactacactttaaaaatcgaccttgcagattttgaaaaaaatagccgttatgcacaatataagaatttcaaagttggagatgaaaagaatttctacgagttgaatattggggaatattctggaacagctggagattcccttgcggggaattttcatcctgaggtgcagtggtgggctagtcaccaaagaatgaaattcagcacgtgggacagagatcatgacaactatgaagggaactgcgcagaagaagatcagtctggctggtggtttaacaggtgtcactctgcaaacctgaatggtgtatactacagcggcccctacacggctaaaacagacaatgggattgtctggtacacctggcatgggtggtggtattctctgaaatctgtggttatgaaaattaggccaaatgattttattccaaatgtaatttaattgctgctgttgggctttcgtttctgcaattcagctttgtttaaagtgatttgaaaaatactcattctgaacatatccatgcgcaatcatgataactgttgtgagtagtgcttttcattcttctcacttgcctttgttacttaatgtgctttcagtacagcagatatgcaatattcaccaaataaatgtagactgtgtt

SEQ ID NO: 14690 - DNA, 1697 bp, Homo sapiens
aagctgagcgtctcagagaaacaacagaagacggagaagacccgccaggctacaccaccgacatgagaacagataaagaagctgactcaaatggcagagggcagcctaaaggagaaacaactggcaattatcccgggtaatatgatcttggctgccttgatggtaattaccgcggcgtaaatcaacaggattacctttcccttaataatcttcaaaatgtccacgtgaaagacaggaagatgtttaatgggaagaccaaacatcgtcagtgctcaagtccagtagataacaaagaacagaaagaaaacaaaactttggtattttactggaatctgagtgaataaatagggaccacaggacaaatggcaaacaactgcttgagttacatcagaaggaaagaagaaatgatgaacccagatttccattacaggatcctgggaagcagagtgtctggatggaacctgagctgggtctctgactcacttctgactttagggtgaagatggagggaatctgataaagacatcttataaattcaacagacacaaaagaatttgatctcccataagcaactgtgaaattacaataacagatcctgggaagttctacaattctaattcaggcgctcgaggactgtgcccaggagcagatgcggctcagagcccaggtgcgcctgcttgagacccgggtcaaacagcaacaggtcaagatcaagcagcttttgcaggagaatgaagtccagttccttgataaaggagatgagaatactgtcgttgatcttggaagcaagaggcagtatgcagattgttcagagattttcaatgatgggtataagctcagtggattttacaaaatcaaacctctccagagcccagcagaattttctgtttattgtgacatgtccgatggaggaggatggactgtaattcagagacgatctgatggcagtgaaaactttaacagaggatggaaagactatgaaaatggctttggaaattttgtccaaaaacatggtgaatattggctgggcaataaaaatcttcacttcttgaccactcaagaagactacactttaaaaatcgaccttgcagattttgaaaaaaatagccgttatgcacaatataagaatttcaaagttggagatgaaaagaatttctacgagttgaatattggggaatattctggaacagctggagattcccttgcggggaattttcatcctgaggtgcagtggtgggctagtcaccaaagaatgaaattcagcacgtgggacagagatcatgacaactatgaagggaactgcgcagaagaagatcagtctggctggtggtttaacaggtgtcactctgcaaacctgaatggtgtatactacagcggcccctacacggctaaaacagacaatgggattgtctggtacacctggcatgggtggtggtattctctgaaatctgtggttatgaaaattaggccaaatgattttattccaaatgtaatttaattgctgctgttgggctttcgtttctgcaattcagctttgtttaaagtgatttgaaaaatactcattctgaacatatccatgcgcaatcatgataactgttgtgagtagtgcttttcattcttctcacttgcctttgttacttaatgtgctttcagtacagcagatatgcaatattcaccaaataaatgtagactgtgtt

SEQ ID NO: 14691 - DNA, 2375 bp, Homo sapiens
aagctgagcgtctcagagaaacaacagaagacggagaagacccgccaggctacaccaccgacatgagaacagataaagaagctgactcaaatggcagagggcagcctaaaggagaaacaactggcaattatcccgggtaatatgatcttggctgccttgatggtaattaccgcggcgtaaatcaacaggattacctttcccttaataatcttcaaaatgtccacgtgaaagacaggaagatgtttaatgggaagaccaaacatcgtcagtgctcaagtccagtagataacaaagaacagaaagaaaacaaaactttggtattttactggaatctgagtgaataaatagggaccacaggacaaatggcaaacaactgcttgagttacatcagaaggaaagaagaaatgatgaacccagatttccagtaagaaactgttacacaatatgattaatggagctaacaagtgcctattacacattagaaaatcttctagaggattttaaaacaaaaggaacaacttgtccagagtataatcgatgcttccagttaaatttcacaattttgcacctcagggaatacttttgtttttcttagagagcaaataaactgaccatttcaccttggcaattattaacctgccttgttttttataactaggaaaaatttggcttatctccatattttagttgagatgacatattaattcatatttttgtgggtaaaatgttattacccttaatacaaagcaaagtttcagctggacttcgtttttacttaatcttcaatggaacattactgaagttacagtacaaaaattctctgaatgaacataataataagttgtaaaatatatatatctttataaagatatattattggatctttcacaaaaagtcatacaagtggggaaaaaagaaaaatatcagagtattgggatttgtccttgaatcttctcttttagctttctttcagttaaacctgtgtccacatgtttgtttctggattgaagccagaatcaacattgtccctatttctaatcaaataatggagaaataattacaaattcccaatgcagttacaggatcctgggaagcagagtgtctggatggaacctgagctgggtctctgactcacttctgactttagggtgaagatggagggaatctgataaagacatcttataaattcaacagacacaaaagaatttgatctcccataagcaactgtgaaattacaataacagatcctgggaagttctacaattctaattcagttttttcaagggggaacatggcaaaggtgttcagtttcatccttgttaccaccgctctgataatgggcagggaaatttcggcgctcgaggactgtgcccaggagcagatgcggctcagagcccaggtgcgcctgcttgagacccgggtcaaacagcaacaggtcaagatcaagcagcttttgcaggagaatgaagtccagttccttgataaaggagatgagaatactgtcgttgatcttggaagcaagaggcagtatgcagattgttcagagattttcaatgatgggtataagctcagtggattttacgatggaggaggatggactgtaattcagagacgatctgatggcagtgaaaactttaacagaggatggaaagactatgaaaatggctttggaaattttgtccaaaaacatggtgaatattggctgggcaataaaaatcttcacttcttgaccactcaagaagactacactttaaaaatcgaccttgcagattttgaaaaaaatagccgttatgcacaatataagaatttcaaagttggagatgaaaagaatttctacgagttgaatattggggaatattctggaacagctggagattcccttgcggggaattttcatcctgaggtgcagtggtgggctagtcaccaaagaatgaaattcagcacgtgggacagagatcatgacaactatgaagggaactgcgcagaagaagatcagtctggctggtggtttaacaggtgtcactctgcaaacctgaatggtgtatactacagcggcccctacacggctaaaacagacaatgggattgtctggtacacctggcatgggtggtggtattctctgaaatctgtggttatgaaaattaggccaaatgattttattccaaatgtaatttaattgctgctgttgggctttcgtttctgcaattcagctttgtttaaagtgatttgaaaaatactcattctgaacatatccatgcgcaatcatgataactgttgtgagtagtgcttttcattcttctcacttgcctttgttacttaatgtgctttcagtacagcagatatgcaatattcaccaaataaatgtagactgtgtt

SEQ ID NO: 14692 - DNA, 4169 bp, Homo sapiens
cggggtcagatacctgggggtggggaggggccacagaagacattgccagaccacgctgtcccggcagctttccctgcaactgacagtacctcagagggaaagagtgtgcgtcatcctaaaccatctacctcagaaagcaagcagagcactccctcagagacccaaacagtgggggcacatgtactgcaggtgtgcagtgagcacacatcacattccgcccatccagagcctgctctgaatttgactttggcatcgaaggaaatcccaagtaaactggaagcacaattaggtcagggaaagggagaggccaagctggatctgaaatatgttcctcccaggagagttgaacaggagggaaaggcagcccaggaagggtatctgggatgccacaaggaagagaatctgtcagccttggagggaagggatccatgtggggaagcacacccggaagccaccgatgcacttggccatctgctgaacagtgacctccaccaccttggggtgggaagaggcaactgtgaagagaagagaggagtcaacccaggggagcaggattctctccacaccacccccaaacagggctctgcttccttaggaggggctgataatcagcccactggcaaaatttcaccatgtgcaggtgagaagttgggtgaaaggacatccagcagcttttcaccaggtgacagtcatgtggcttttattcctaataatctgactgacagcaagcccttggatgtcattgaggaggaaaggcggttgggcagtgggaataaggacagtgttatggttttggtgttcaatccttctgttggagagaacaagacggaggtgcctgagcccctggaccctcaaagtggccgctcagaagcacgggaaagcaaagaggtcaccacatctgttgctgaaaacaggaaccttctagagaatgcagataagattgaaagcacctcagcaagagcagattcagttctcaatattccagcacccctccacccagagacaactgtgaacatgacctaccagcctacaacacccagtagcagttttcaggatgttagcgtgttcggtatggatgcggggtcccccttggtagttccaccccctactgatagtgcacgcttgttgaacacgtcccccaaagtgcctgacaagaacacttgccccagtgggatccccaagcctgtcttcacacattccaaggacacaccttcctcgcaggagggaatggagaactatcaggttgaaaaaacagaggagaggacagaaactaagcccatcattatgcccaagcccaagcatgtgaggcccaagatcatcacctacatcaggaggaatccccaggccctgggccaggtggacgcctcgctggttccagtggggcttccatatgccccgcccacatgtaccatgcctcttccccacgaagagaaggcagcaggtggtgacctgaagccatctgccaacctctatgagaaattcaagccagacctgcagaagccaagggtcttcagttccggattgatggtgtctggaatcaagcccccgggacatcctttcagtcaaatgagtgaaaagtttttgcaggaggttacagaccaccctggaaaagaagagttttgttctcctccctatgctcattatgaagtccctccaactttctatcggtcagccatgctccttaagccccagctaggattgggtgcaatgtcccgtttaccatctgcaaagagcaggattctgattgcaagtcagaggtcttcagcgagcgccatccacccaccaggacccataacaacagccaccagtctctacagttccgatccttcagatttaaagaaagcttccagttcaaatgctgcaaaatccaatctcccgaaatctggtctccgtcctcccggatactcacgtctcccggcagccaaactggcggcatttggctttgtccggagctccagcgtctcctcagtctccagcacccagtccggggacagtgcacagccagagcagggccggccagccacccgttcaacctttgggaatgaagaacagccagttctgaaggcatctctgccttctaaggacacacccaagggggccggccgggtggcccctccagcatcctccagtgtgacagcaccccgcaggagtttacttccagcgccaaaatccacttccacacccgctggaacaaagaaagatgctccgaaagatcaagatacgaataaacctgctgtttcatctcctaagagagtagcagcttcaaccaccaagcttcattcaccaggatacccaaagcagaggactgcggcagctcgaaatgggtttccgcccaagccggacccgcaggcccgtgaggctgagcggcagctggtgctgcggctgaaggagcggtgtgagcagcagaccagacagctgggcgttgcgcaaggggagctgaagagggccatctgcggctttgatgccctcgccgtggccacgcagcatttctttagaaagaatgaaagtgcccttgtgaaagaaaaagagctgtcaatcgaacttgcaaacatcagggatgaagttgccttccatacagcaaagtgcgagaaactacaaaaggagaaggaggagctggagaggcggttcgaggacgaggtgaagaggctgggctggcagcagcaggccgagctccaggagctggaggagcggctgcagctgcaattcgaggcggaaatggcgcgcctgcaggaggagcacggtgaccagctgctgagcatccggtgtcaacaccaggagcaggtggaagatctcaccgccagccatgatgctgctctcctagagatggaaaataaccacacagttgccatcacaatcctgcaggatgaccacgaccacaaagtccaagaattgatgtccactcatgagcttgaaaagaaagaattggaagaaaattttgaaaaactgcggctgtcattgcaggaccaggtggacacgctgaccttccagagccagtctctgcgggacagagcccgccgcttcgaagaggccttgaggaagaacacagaggagcagctggagattgcattggctccttatcagcacttggaagaagacatgaagagtctgaagcaggtattagaaatgaagaatcagcaaatacacgagcaagaaaagaagattcttgagctggaaaagctggcagaaaagaacattatcctagaagaaaagatccaggttctccaacagcagaacgaagacctcaaagcaaggattgaccaaaacacagttgtcaccagacagctgtcggaggaaaatgctaacctccaggaatatgttgagaaggaaacccaggagaagaagagattgagccgaaccaatgaagagctgctttggaagctccaaactggggacccgaccagtccgattaaactctcgcccacatctcccgtttaccgcggctcctcctcggggccctcctctccggccagagtcagcacaacacccagatgacgccactacacggcctgcgggagctccggcttctcgtcctccggtctccaccctgagggagcaccgacccggtgccgccggagctggccctgtgcgcatgctcagtagctgcgaatgcatcctaggcgcgtcctcctctgatccccgtgtaagactgccctggtgtcggcacttaggaatgtgtaaatggtaaagtctgatgtgcaaacgttttaccatagttagagccaaaagaaagacacttgcaattgttcttgagcaatgaactttcactgcagaatttcaggttagttacaaaaagctcagttttcaatatacattgaataatcattgtgtactgcaccgatatgtgtgtatatttagatatacgtatatacacatgctgcggttctgaatttcattttttataacatgaagtgctgacatattttagtgaaggtcagcagttttctaacttgtgcctaagaattattgggaaatgaaaatgcatttctatctagcttcccaggaatatttctacccaaaatagaaaaaggaaaaaaaaaaagatacagagaagaagcgcctttcaactcaccaccaagtggtactctctttaacacgaacaccagctatttgtgaacggtaactgcctttggaacaatcagcttctcagtcaacatgatgtgagatcacta

SEQ ID NO: 14693 - DNA, 1926 bp, Homo sapiens
gctgcctgctctcctcctcctctcattcctctgcctcctggattcctgaagtttaggagaaataaggtagccaagggaaccacatggaagttgtgacagctcccggcggcgcgcccctttcgtgtgtgccggtacctcggcttaggagttgcccgctgacaccttgaatgaaggaggtccccttgccagccagcctgccgggatgggccattgctgctgcaagccttataactgccttcagtgcctggacaagacgaatgaaagtgcccttgtgaaagaaaaagagctgtcaatcgaacttgcaaacatcagggatgaagttgccttccatacagcaaagtgcgagaaactacaaaaggagaaggaggagctggagaggcggttcgaggacgaggtgaagaggctgggctggcagcagcaggccgagctccaggagctggaggagcggctgcagctgcaattcgaggcggaaatggcgcgcctgcaggaggagcacggtgaccagctgctgagcatccggtgtcaacaccaggagcaggtggaagatctcaccgccagccatgatgctgctctcctagagatggaaaataaccacacagttgccatcacaatcctgcaggatgaccacgaccacaaagtccaagaattgatgtccactcatgagcttgaaaagaaagaattggaagaaaattttgaaaaactgcggctgtcattgcaggaccaggtggacacgctgaccttccagagccagtctctgcgggacagagcccgccgcttcgaagaggccttgaggaagaacacagaggagcagctggagattgcattggctccttatcagcacttggaagaagacatgaagagtctgaagcaggtattagaaatgaagaatcagcaaatacacgagcaagaaaagaagattcttgagctggaaaagctggcagaaaagaacattatcctagaagaaaagatccaggttctccaacagcagaacgaagacctcaaagcaaggattgaccaaaacacagttgtcaccagacagctgtcggaggaaaatgctaacctccaggaatatgttgagaaggaaacccaggagaagaagagattgagccgaaccaatgaagagctgctttggaagctccaaactggggacccgaccagtccgattaaactctcgcccacatctcccgtttaccgcggctcctcctcggggccctcctctccggccagagtcagcacaacacccagatgacgccactacacggcctgcgggagctccggcttctcgtcctccggtctccaccctgagggagcaccgacccggtgccgccggagctggccctgtgcgcatgctcagtagctgcgaatgcatcctaggcgcgtcctcctctgatccccgtgtaagactgccctggtgtcggcacttaggaatgtgtaaatggtaaagtctgatgtgcaaacgttttaccatagttagagccaaaagaaagacacttgcaattgttcttgagcaatgaactttcactgcagaatttcaggttagttacaaaaagctcagttttcaatatacattgaataatcattgtgtactgcaccgatatgtgtgtatatttagatatacgtatatacacatgctgcggttctgaatttcattttttataacatgaagtgctgacatattttagtgaaggtcagcagttttctaacttgtgcctaagaattattgggaaatgaaaatgcatttctatctagcttcccaggaatatttctacccaaaatagaaaaaggaaaaaaaaaaagatacagagaagaagcgcctttcaactcaccaccaagtggtactctctttaacacgaacaccagctatttgtgaacggtaactgcctttggaacaatcagcttctcagtcaacatgatgtgagatcacta

SEQ ID NO: 14694 - DNA, 569 bp, Homo sapiens
tacagttttccctgttaacatcttgcgtttgttacaattgatgaaccaacactggtttcactctgcagaaattcccttttaaaaacatcctgtgtattagtttcctgggctaacagagtactacgacctgtgtgggtaaaacaaccgaaatataatctcccagttctggaggccagaacgtccaaggggaaggcgtcggcagagctatgctctctgaaggccccaggggagagcctcttcctgccttctgcgtggcttcgggtactgccatagcccttggccctcccgggttcggagaccgtcgctgcactgtctgccactgtcttcccgtggcgtgtgtctgtgtgtcctcttcccttgttataaggatgctggtcattgggatttagggctcaccctaatttcgttgtgacttcagtgtaattcgattatctctgcaacccaccccatttccaaacaaggccacagtcgcaggtacggagccagggcttcagcatgtcttctcttctcggggacacagtgcagccaggacgcccgtcttgctctggtcattttggaatttatcctag

SEQ ID NO: 14695 - DNA, 389 bp, Homo sapiens
acaattcatttaacctctcaggacttaaccgttcttatcggtaaaacagggatagtgatgcctgcccagaaaattaacatgaaccacaaataagaatatatgtacacactttgtaaaactatcaagtactatataaatcaaaagttaaaatggttttgtttagcactaatctgtggtgtagattttgtgctgcagaagtcacggtaaataagaattctgactgggagagttcattaggaggtggatattgggaaaagaaatggtgaatagttagggagtaaagcaatagttatcaacgccaaataatctgtacaacaaacccccatgacacaagtttaccatataacaaacatggacatttactgcattggattgaatttttttaacct

SEQ ID NO: 14696 - DNA, 179 bp, Homo sapiens
gaaatgcaaagtcaagggccccattcaagacctactgaatcaaaaactaagagtggagcccattaatctctgttttaagaagccatccaggagattctgatacaagctaaagtttgagtcactattttagagcatacagtagatttttaattgcattgttcaaaatcctttactctttc

SEQ ID NO: 14697 - DNA, 531 bp, Homo sapiens
aaaaatgttgcctttattcagtattagtgcattatcagggattccagatctcagttaaaatgagagaatctgaatctctaggcaatgatgagtgtttctgaaattcagattcaccagaaagaaattgaaagcaaagagaagacagtgttgtcaaattatcatataattcagctaaaaaaaaaatcatggtacttaagtgggagctagagcacatcactgcctttaagaagatatttaggggaataaaagaggtctgggacctcggaggtgaaactgagagaaagacaaagggacttcaaatcaagcatttgaaagagccaatgaggggccagatgtggtgactcactcctgtaatcccagcactttaagacgccaaggcgggatcccatctcaaaaaaaaaaaaaaaaaaaaaaaaaggctgggcatgttagtcccagctgtttgggagggtgaggcaggaggatcacttgagcccagaaggctgagtcagcagtgagccatgattgcaccactgtactctagcctacgtg

SEQ ID NO: 14698 - DNA, 275 bp, Homo sapiens
cccatggtaacaagctgaactacattcaacgctcagtgttttatgtaaaagccaatgagtgcccatataacccacaagaagacaccagatatgatctgcctctagactggatgctgaggcggtttgcagcagcaagcgaggatgagggtgccctggagcagaggcaggggagcagcaaagccaggaccatgccctcaagtcaccccagactgagcaatctccgccatggggcgcaggcataccctgggaatcccacgtggagagttgctcctgac

SEQ ID NO: 14699 - DNA, 1209 bp, Homo sapiens
gacggtcccactgtggggtgtgaagtgtccgtagagctgtgagagaatgaagatgagctttgcgttgactttcaggtcagcaaaaggccgttggatcgcaaaccccagccagccgtgctcgaaagcctccattgggttatttgtgccagcaagtcctcctctggaccctgagaaggtcaaagagttacagcgcttcatcaccctttccaagagactccttgtgatgactggggcaggaatctccaccgaatcggggataccagactacaggtcagaaaaagtggggctttatgcccgcactgaccgcaggcccatccagcatggtgattttgtccggagtgccccaatccgccagcggtactgggcgagaaacttcgtaggctggcctcaattctcctcccaccagcctaaccctgcacactgggctttgagcacctgggagaaactcggaaagctgtactggttggtgacccaaaatgtggatgctttgcacaccaaggcggggagtcggcgcctgacagagctccacggatgcatggacagggtcctgtgcttggattgtggggaacagactccccggggggtgctgcaagagcgtttccaagtcctgaaccccacctggagtgctgaggcccatggcctggctcctgatggtgacgtctttctctcagaggagcaagtccggagctttcaggtcccaacctgcgttcaatgtggaggccatctgaaaccagatgtcgttttcttcggggacacagtgaaccctgacaaggttgattttgtgcacaagcgtgtaaaagaagccgactccctcttggtggtgggatcatccttgcaggtatactctggttacaggtttatcctcactgcctgggagaagaagctcccgattgcaatactgaacattgggcccacacggtcggatgacttggcgtgtctgaaactgaattctcgttgtggagagttgctgcctttgatagacccatgctgaccacagcctgatattccagaacctggaacagggactttcacttgaatcttgctgctaaatgtaaatgccttctcaaatgacagattccagttcccattcaacagagtagggtgcactgacaaagtatagaaggttctaggtatcttaatgtgtggatattcttaattaaaactcattttttttaaataaaaaattgttcagctttatatgaaatgctt

SEQ ID NO: 14700 - DNA, 808 bp, Homo sapiens
cccctgctcatcactcccaataaaccagcttcctatttcgcaaagaatgaagatgagctttgcgttgactttcaggtcagcaaaaggccgttggatcgcaaaccccagccagccgtgctcgaaagcctccattgggttatttgtgccagcaagtcctcctctggaccctgagaaggtcaaagagttacagcgcttcatcaccctttccaagagactccttgtgatgactggggcaggaatctccaccgaatcggggataccagactacagaggagcaagtccggagctttcaggtcccaacctgcgttcaatgtggaggccatctgaaaccagatgtcgttttcttcggggacacagtgaaccctgacaaggttgattttgtgcacaagcgtgtaaaagaagccgactccctcttggtggtgggatcatccttgcaggtatactctggttacaggtttatcctcactgcctgggagaagaagctcccgattgcaatactgaacattgggcccacacggtcggatgacttggcgtgtctgaaactgaattctcgttgtggagagttgctgcctttgatagacccatgctgaccacagcctgatattccagaacctggaacagggactttcacttgaatcttgctgctaaatgtaaatgccttctcaaatgacagattccagttcccattcaacagagtagggtgcactgacaaagtatagaaggttctaggtatcttaatgtgtggatattcttaattaaaactcattttttttaaataaaaaattgttcagctttatatgaaatgctt

SEQ ID NO: 14701 - DNA, 226 bp, Homo sapiens
tgaatatttattttataactagtgttctttctaaaaattttgttatctcttatagtttttcaattgatacttttttttaagagaaatcattttattgaatttttgctgcacaggacttcatgttttccatttggcttgattcctgcttccagcattttctcgttgagatttattccttaagtcttagtgttctcattgttggcaaactttgcttattatgcatcaa

SEQ ID NO: 14702 - DNA, 112 bp, Homo sapiens
gtaactaattgttattcatttaatgaattgatcaaaacttgatatttttgtacaaagaacatttatcgttcagtatcttctttcctgcatgcttttcagcaaatgagataaa

SEQ ID NO: 14703 - DNA, 678 bp, Homo sapiens
tcatccccaggctggtagctccctgcagagaggggccatgtctgatccacctctgttcccagaatcacgtgctcactccctgacctctttcacctccttttcaaacatcaccttctctgggaggacttccctgcttgcctccttaaaatcacaggccccaggtccctgtgttttgctgtgttttcccctatacttagcaactagaaagggagaggaaagtatgtttgctagagatgaaagttcaaggagccaacctaactgagtggagggagtgactcacattctccatgaaggaggtgggagcaggggcaccctctgagagcccagcttgtccccagagggaagctggtgtggacactttgtaatccacagtgttgtttacttattgattgctctggtgtctgtcgccccttctggaatttgagctccaggtgtgggggagacagtttgatgtggtcactgcttcctgagacagtgggtgcactactagaatagtgcagacctcagactccaagcccagcgcctgcgtccacttcctgctgtgtgaccttgaggaaattgcttcaccactctaagcctcatttttctactctgtacaatggggatgatggtactatctactttattgagttgtaatgaaaattaaataagcccttggaacagtgcctggcacacagt

SEQ ID NO: 14704 - DNA, 448 bp, Homo sapiens
attcagctcgtacccaataggaagtttggacttactttccaaagccctgctcaggtattagcataatatttaatatttcacgtgctgacatcattgatgtccttcttcatccattgaaggaaagtaatttgcagaagttataaaatctcagattgtacaaggaaaatttcaagaatgtttttggaatattctccaaaagtggtttagtgggaaactgagagcagatgaggggagatccccttcccaccaatcctgacagaccacagtgacgagggcggccctgaccccttccacgaggagctgtggcaaacagaagtcagagaaactgacactttgatgagtagatgaatctgtgtccctattttcagtctaaaaaaagaaatagcttggtgtgatggctcaagctggtagtctggaggattgcttaagcccaggagtttaagataaa

SEQ ID NO: 14705 - DNA, 393 bp, Homo sapiens
tgtaaattcctactgagaagccaccatcacacacctgtctgtgctctgattgggcatactgtgagcagtagatatgaaattgctgactgtggggtaggacaaattatatgtgaagattctaacatctcagacatcttattttctaaaaacagaaaacggacactgctaacctagctcatttttcttacaaaacaaaagcaagaactaagaagatctctcatagtaaataaaacatgcctggataaaataaataataagccttctggatttattagtcaaactcctaaaaacatggctgatgtttaagaccttccataattgggcagaaaaagtacactttcttctcctcacacacactctccccacaagtcatactaagtagcttcgctcttt

SEQ ID NO: 14706 - DNA, 426 bp, Homo sapiens
gggggccagagcttgagcttctaaggtgctcctgctctcgctgacagcctcagagggcctggggcagagaggccccctctgcttctcctgggctttctccctgagcttcttgcaacacctccctgtgagcacacagcttcctggtggggccccttctgcttccgctctaggggaggctctgtggcttgggtctgggggccaccgttggggatgcggatggccaggagtggggctgctgagcgcctgggctagtgacagcctgcctccacccactcccagaagccctgctggaatcccccacctcttccgaggctaggagcatctgcctctcctcaaacttcatacagtccccacccttggcccattgttcctgtcaccaaataaccttctcccccttccttgccagtcatttgaggttctgatagg

SEQ ID NO: 14707 - DNA, 351 bp, Homo sapiens
tccctacgtgtcgtgggaggaacccagtaagaggtaattgaatcatgggggcagttacccccatgttgctgttctcgtgatagtttccatgagatctgatggttttataaggggcttttccctcttttgcctggcacttctctatcctgccatcatgtgaagagggatgtgtttgcttcccctctgccatgattgtaagtttcctgaggcttccccagccatgcataactgtatgtcaactaaacctctttcctttataaattatcaagtcttgggcagtcctttatgtatagttctcactttacagaagtgagaacagactaatacagtaggttacagggcatagggtaa

SEQ ID NO: 14708 - DNA, 955 bp, Homo sapiens
  misc_feature (48)..(48): n is a, c, g, or t
  misc_feature (52)..(52): n is a, c, g, or t
  misc_feature (54)..(54): n is a, c, g, or t
cgtacgagaatcgctgtcctctccttgctcgagatccattgtgctctnaganangaaataaaggaggcacttcttgctcttgggtctctggaatcctggataactgcaggagaacatgcaaaagagggagaatgccctcccgataagaacccatgcaaagagctgtgccagggcgatgaattgtgtccggctgaacagaagtgctgcaccacaggctgtggtcggatctgccgagacattcctaaggggaggaaaagagattgccctagggttattcggaaacaatcctgtttgaaaaggtgcatcactgatgagacatgtccaggtgtaaagaaatgctgcacgcttggctgcaacaagagctgtgtagtcccaatctctaaacagaagctggcagagtttggtggtgaatgtcccgctgacccccttccgtgtgaggagctgtgtgatggggatgcatcctgtccccaggggcataaatgctgcagcaccggctgtggccgcacctgcctcggagacattgagggagggcggggcggtgattgtccaaaagttctggtgggcctgtgcattgttggctgtgtgatggatgagaattgtcaagctggagaaaaatgttgcaagtcaggctgtggccgcttctgtgtcccaccagtcctgcccccaaaactgaccatgaaccccaactggactgtgaggtctgattccgaattagagatcccggtgccctagctgtgctgatttgtctggagcttctttggtaattctggaagcttttcctggcagtcaagagagggtgacatcctggggcttgtgacatttccaggggcactcatggccctctctgctctgcttctcctcctgccgctgaccagagcatgggaaatagccctggattgggtagtgggtgtgtggtgcttctctttcccgataaaggctggtgctgacctcttgt

SEQ ID NO: 14709 - DNA, 794 bp, Homo sapiens
cgtccgcccggaagcgcgacgctggagctgcggggttaccatgggaaccgaaccgccgcgcctcgcccaggacagttacacttagaggccttcaaaagagggagaatgccctcccgataagaacccatgcaaagagctgtgccagggcgatgaattgtgtccggctgaacagaagtgctgcaccacaggctgtggtcggatctgccgagacattcctaaggggaggaaaagagattgccctagggttattcggaaacaatcctgtttgaaaaggtgcatcactgatgagacatgtccaggtgtaaagaaatgctgcacgcttggctgcaacaagagctgtgtagtcccaatctctaaacagaagctggggcggggcggtgattgtccaaaagttctggtgggcctgtgcattgttggctgtgtgatggatgagaattgtcaagctggagaaaaatgttgcaagtcaggctgtggccgcttctgtgtcccaccagtcctgcccccaaaactgaccatgaaccccaactggactgtgaggtctgattccgaattagagatcccggtgccctagctgtgctgatttgtctggagcttctttggtaattctggaagcttttcctggcagtcaagagagggtgacatcctggggcttgtgacatttccaggggcactcatggccctctctgctctgcttctcctcctgccgctgaccagagcatgggaaatagccctggattgggtagtgggtgtgtggtgcttctctttcccgataaaggctggtgctgacctcttgt

SEQ ID NO: 14710 - DNA, 323 bp, Homo sapiens
gcacttcttgctcttgggtctctggaatcctggataactgcaggagaacatggtgagctatcatttgggatccctggccaacagtaacagaaagtgactagaggagaggagaactcatcccctgccttctcccagagcaaggttgcttgtaagtggagatgatcatctctataggacaggactggatgaatagattctcaggatggcctgggtcattcttcctggctttctttaccctctctggacaaggagataggacttccagttgggcttactagaggttctagcttttccctagaactcattaaatgagaacaggatca

SEQ ID NO: 14711 - DNA, 943 bp, Homo sapiens
cgtccgcccggaagcgcgacgctggagctgcggggttaccatgggaaccgaaccgccgcgcctcgcccaggacagttacacttagaggccttcaaaagagggagaatgccctcccgataagaacccatgcaaagagctgtgccagggcgatgaattgtgtccggctgaacagaagtgctgcaccacaggctgtggtcggatctgccgagacattcctaagggtatgttggcatgaggggcaaaatctgggcatactctctgacattgcctctgggatagatggaagtagagagcttcccaccttctaggttgcctctggaagtctcccttgcctagagtacttcttctttactcttttagggtccctcctcctttaattattcagtgcccccagttgtttgccttccatcaggaaagagcgcaccattgattatctatgtcttttactttggactcaaagttcctgtgaaggctggagggaagagttgtaaagggaaggctgtgtaagataatgattaagagagtagaccctagagccaagcagacctttttaagccttaagccttagctctttataaatcttaagcttttagcctcagtttcctcatctataaaatggggataattgtgaggatcaaataagatgttcatggcacaaggtaaacgtcagtaaatgttacagtaaatatttgctattactattgttgttattattgtctctttgtcttagcaccagggttgagaggcttaaataaatctcaggacttcctttttctgtttttcccttctgctgtgcccgtgggtgttgccaggcactattttctctctctctctctcttttttttttgagacggagtttcgctcttgttgctcagactagaatgcagtggcgtgatctcggctcaccgcaacctctgcctcccgggttcaagtgattctcctg

SEQ ID NO: 14712 - DNA, 782 bp, Homo sapiens
cgtccgcccggaagcgcgacgctggagctgcggggttaccatgggaaccgaaccgccgcgcctcgcccaggacagttacacttagaggccttcaaaagagggagaatgccctcccgataagaacccatgcaaagagctgtgccagggcgatgaattgtgtccggctgaacagaagtgctgcaccacaggctgtggtcggatctgccgagacattcctaaggcagagtttggtggtgaatgtcccgctgacccccttccgtgtgaggagctgtgtgatggggatgcatcctgtccccaggggcataaatgctgcagcaccggctgtggccgcacctgcctcggagacattgagggagggcggggcggtgattgtccaaaagttctggtgggcctgtgcattgttggctgtgtgatggatgagaattgtcaagctggagaaaaatgttgcaagtcaggctgtggccgcttctgtgtcccaccagtcctgcccccaaaactgaccatgaaccccaactggactgtgaggtctgattccgaattagagatcccggtgccctagctgtgctgatttgtctggagcttctttggtaattctggaagcttttcctggcagtcaagagagggtgacatcctggggcttgtgacatttccaggggcactcatggccctctctgctctgcttctcctcctgccgctgaccagagcatgggaaatagccctggattgggtagtgggtgtgtggtgcttctctttcccgataaaggctggtgctgacctcttgt

SEQ ID NO: 14713 - DNA, 436 bp, Homo sapiens
ggcctaacagactggctacaatggaagttccaggaaagcagagattttgcctcttttctgcaaatgtatctcttgcgcttagagaagttgatagcacatggcaggttctcttgttgaatgaatgaattggagaataaaacccgtaacctaggtgacagtctgtcagctcagagtcaagaatccttgggttcactcacctgtcactacaaatggcatttgttagttattataagaataaatacttaaagaaaacctattcaagagaaagcagattcataaacttccaccatggatttcataagtaggtatatacatgcttatatgcatatgatcccacctagaaagctgctatcatatcatttcatttcattcctttttttttcaacaaatatttattgtagaggtatctctgtctttcaagccaaaaatcaggggg

SEQ ID NO: 14714 - DNA, 198 bp, Homo sapiens
gctacttagcactggatagattttttttttaatctgagtttctgtgtatgtaaacaggggaagtaatattaaacctggttgctattgtgatcatgggaagtaatagaagtatgtttctgagtatgtagtagtgtttcctgtgccaacagaagctatcacacaactgtgtaaacctatcattaaacattgatctgaaaa

SEQ ID NO: 14715 - DNA, 404 bp, Homo sapiens
ctagacttctcagggacccagactccttcagcctttttgcttggctagccgtccttagcaggtggcttgcacctcatgatctagtgtggcggcagccacatatcggctttctaaccagtaggaaggagaaaagggagatgaaggtcaggtcatacccttccctgttaaggacacttccctaagtcacacctgaaaattggcatacatgccattggccagaatttagtcacatttaatataatccttgctaaaaattaggggttttattactaaagaagaagaggaaaatagtcttggagaaaactagaagcttctgccgtactagtaataaaattttaagatacaataaatatttaatgtagatgttcaatttgttctttaaaatgtgatatttaaaaaccagc

SEQ ID NO: 14716 - DNA, 429 bp, Homo sapiens
aatccagccatcccacataatctgtgagatgatagactattgaaatcaagttatacagatgggacctatttcaatccatgctcatgtggctacttacttaatcagtttctttcagggatttgaaatctagggaagatttttgctgtatttgggaaaaatattgagggaactgtagaaattgatatcaaaaactgagggaggaggacttactaaagatagcagagctgaaatactccacaattgagactgagccgagttcttggcctgcaggccttaaagagttacaagttttcttcagtcttttgagtagaatttaaggtagacatgtggaaaattaggaggaaggatattagaccaagatatttttaatgttttgatgaaaaaagcaggagtgtagtatggtgaataatgggataattgcagagatta

SEQ ID NO: 14717 - DNA, 333 bp, Homo sapiens
gctatttgtggaagtagagaattgaaggcaacctaggtatttgtcactaagggaatgaacagtaaaatgtgataattacatcctgtggaaggaatactgtgcatcatttagaaacacatatttacatgtaaagatgtagttagagcaacatgggtagaactagaaaacagtgtttatatttaaaaagtaaaatatatggatctatagcataaaacatatgcttgtaataacaatatatattttaccagtaaatgtgtatatctgaggatatatcacattttagtatgaacttatgaaatggaggagaatgagaaagggattgggaatgagcaa

SEQ ID NO: 14718 - DNA, 347 bp, Homo sapiens
taatcctcaaaactgccacgtgaagtaggtgctcttgtttcccccattgcacaggtgagtcatcagaggtgcattctagggtcaatcagaggggtgagacaacagcaacgataaaccaattcatcttcaattaaggacaccatggacaaaaatatgacagactgggaaaagacattggcaatgtctttgactaccaagggattgtatttaggtaatatcaagaacatcagccaacaaagagccaagaaataacccaaatagaaaagagacaaagtgcatgaaataaaagaagaaattcaaaatgttcactaaaaaataaagagatgctcaaatccacaaaaaaaaaa

SEQ ID NO: 14719 - DNA, 187 bp, Homo sapiens
gctactcaggaggctgaggcacaagagttccttgaacctaggagatggaggttacagtgagcctagatcaccccactccactctagcctgagcaacagagagaagctgcgtctaaaaaaagataaaattccaatgttgggaccataaacatttcaatcactgtatttatttttattttcatttttat

SEQ ID NO: 14720 - DNA, 362 bp, Homo sapiens
cttaaaaattctgatacaaaattaatagtgcttaaatactacaacataaagtcaaaatatatcatgttgcatgataaagaaatgagagaaaagaaaacaaagatttttatatacatacatacaatgtatacataacaaaataaggagcaaatactcatggcaattacaattctgaaattgaccacatagccatagctggtatttatgactaccatcttccatcacccattctgtattccttttaccttcagcaagcacctcagctggtttacttggtggggttacccaaactttctgaactgggttgttgtagttttccactgaccttaatcactggatatggtaacattaaagacactgta

SEQ ID NO: 14721 - DNA, 388 bp, Homo sapiens
ttccaattttacagacctggtttatcagcaacatttataaaactagacctcaggaaagaactagttctggggatatatgcatggtcttaataaagtgaatggttagcctgtcctgactattacaaaatcaaaacagtgagaatatctgcagaatctatttgactctaaatgactttaagtactccctatcaagtaacgtatctttaacatctcaaacaaatcttcatttctatttttgtactctgcactctaaatctaaaagtttaatacttcttctctagagatatacatgtaagcttccatgttagtacccaaacagcctacctggcaaaagagccttagattaaaaaatgcactgttactgtaggcctaaattgatcaagtgaac

SEQ ID NO: 14722 - DNA, 182 bp, Homo sapiens
ttcctatggttcttactgtctcagggtctccttaaatatcaaaatgagtttgtaaagtctagtgttaccttatttgaacttcagggcaaatgactaaaagggacaaacctagaatagcaggttttaatcagttagcatattttccactgtaggtatcagaagactcaactacaaggagattc

SEQ ID NO: 14723 - DNA, 526 bp, Homo sapiens
taggaagattgcttgagccccagagattgaggctgcagtgagccgtgattgtgccactgcattccatcctgggcaacagagcaagaccttgtcttaaaaaaataaaaataaaaaaataaaaataaaaatctttttctttctgtttttaaaacttccattattttgagattcacaggctgcagcttattaagggaagaatttgataaaaagaaactgccaaacctctagagattgaatacatcttttactgtgtgaaatttattctaaagtattttatgttttgcccatcacttaaaaataaagaaaaaaattgaggcctagggtttttgaaatctggcaaatataaaggctaataatatagctactttgaaaatggaagtacagaacttccaaaagttaggcaatattgagaagcaaaggagactaagacaagttcagataatgatgcaataaatggtcaggagttcggtgtacaagagggaagggatgacacagagagagcctcttgctctcggctgcagactgt

SEQ ID NO: 14724 - DNA, 418 bp, Homo sapiens
ggtaagtcctcaaagagccattctgttcccatcctccccacttccccagtcttaggttggtttgatttttttcctccttgtaagatgtggtgagagtggaaagtaattcctccctggccttaagtcacctctgtgtactcaatcctgctgactggctcactggcatgatggcagcggctggtgctagggaggcctgggctggattgagccagcctggccctggtgactaagccatgagttttccagctctgggaatggtagctcttctcacgagaggggcagaagtagtagctgtttgtgcttggtggcagagaggactgctggacatacaccctccagactccaagatagaagggggaagacataagcccccagtatttgtggtgattgtaagaataaaatgctaatattacaaggg

SEQ ID NO: 14725 - DNA, 712 bp, Homo sapiens
aagcttgtgggcattcctggctagagattaatttggcactatttcaaactaatattcttgaaaattttaaagtatctgtcattaattgagcactacttgtgccaggctgtgttctgtgtactattatacgtaatatactattatatgtaacttactactatatcataacattctattatttgtactattatatgtactgttctatgtactgcatgagtacatttaaccttctcaacatttctattcataatgtacagttattttcagataaggaaataaaagcaatgagaagttaaattgtccagcaccctccctccctccctatgtggtcatgtgacccccagagattcccaactcaggcactcttagttctgctactctagtgaagggcagggaacgagtctcctgggaggtagttctaatgcctgtgctcctgggaacctaactgaagccctgccactgctcatttgtctcccctttctaaaatcatctattactccagcctgctttttttttcttagtgggtgaacagggtttctctaccaatttcccccaggggcttgttacatattccttttattatacttactattctctgaggtgacttctggtaaattcaactttcttcattccctaatattgccagtgaagctttcacaaaccgtatagtatagtattctgtgctgggttaaaaagctgccccccccccaaa

SEQ ID NO: 14726 - DNA, 487 bp, Homo sapiens
acagcttttaaaatcttgttctttcttctcggcgttgcatttaacattttcccctcagggataacgtgtcaccacagcatacagttctggtgtgactgtttcctgtgcagcagccgtgtccttactgctcagatcacgtgcggtgcattcccagcacctcagagggctcctcattctccgtccactcagtgcgtccttctcccggggaagccgctgtcactcagtgcatccttctcccggggaagccgctgtgcagacttccagctccacagctttgtttttggcattacatttacagcattttccttctacagcaaaacaccttttaatattccattttatgaccagcctggccaacatggtgaaaccccgtctctactaaaaatacaaaaattagccaggcatggtggtacatgcctataatcccagctactcaggaggtgaggcaggagaatcacttgaacccgggaggcagaaattgcaatga

SEQ ID NO: 14727 - DNA, 1277 bp, Homo sapiens
cagtgagtcaagggtgttgattggttgggtcggagatgaaatcataaggaattgaggtgtccttttgtgctaagtcagttccagggtgggggccacgagatcagatgagccagttaatcgatctgggtggtgccagctgatccgtcgagtgcaggtctgcaaaatatctcgagcaccgacataggagcagtttagggagggtcagaatcttgtagcttccagctacatgactcctgaaccataatttctaatcttgaggctaatttgttagtcctacaaaggaaatctagtccccagacaagaagggggtttgtcttgggaaagggctgttatcatctttgttttaaactataaactaaactaagtttctcccaaagttagttgagcctacacccaggaatgaacaaggacagcttggaggttagaagcaagatggagttggttaggtcagatctctttccccacctcagttacaattttgcaaaggcggtttcagaatcagagcacgaagtgttcctataaaaggaaaaaaaaaaaaaacctttcttaattatgctcatagttgtgtattgtcctgtcagcttgctcattgtgtaaaatgagcggacatgagaattcacgagcagagctttttacactgatatgtatgaaagcatcatttacgtcctgaaagccccagccgagcgatcactggcagtgccaacatttttgagtgtgggctccataggaagcactgttttccctattgagaattatagtgggtttttttcatttacgagtaatgtatacctagctccaagatcttggttgctaacaccattctccaataaaacgaaccagggatcgctggagaaatagctgattctaaaactagggcagaaagtatacaagatgagcctggagcatcttgtagagtcagagagcaaggcagaactttatacatacagtgatgtgagatgggcatgcagagggaagatgttcccagtggctgaagctgaaacagtgtgagcaacaaaataaagcagtgttggatcacaacccaaagaattgagtccaggcactgtggctcatgcctgtaatcctgcactttgggaggccaaggcgggtggatcacttgaggtcaggagttcgagaccagcctggccaacatggtgaaaccccgtctctactaaaaatacaaaaattagccaggcatggtggtacatgcctataatcccagctactcaggaggtgaggcaggagaatcacttgaacccgggaggcagaaattgcaatga

SEQ ID NO: 14728 - DNA, 445 bp, Homo sapiens
cagtgatgtgagatgggcatgcagagggaagatgttcccagtggctgaagctgaaacagtgtgagcaacaaaataaagcagtgttggatcacaacccaaagaataaaataaatatcctcgagcccacaccgatataaataaatgattgaatcaataaatgagtccaggcactgtggctcatgcctgtaatcctgcactttgggaggccaaggcgggtggatcacttgaggtcaggagttcgagaccagcctggccaacatggtgaaaccccgtctctactaaaaatacaaaaattagccaggcatggtggtacatgcctataatcccagctactcaggaggtgaggcaggagaatcacttgaacccgggaggcagaaattgcaatgagccaagattgcaggactgcactccagcctaggcgacagagtgagactccatctcaaaa

SEQ ID NO: 14729 - DNA, 755 bp, Homo sapiens
acttttgtagttaaaaaaaatttttactttaccagggcattgcaattcttttccatcagtgaatttcattctacagacttttcagagcatctcataatcagtcaacaaatctatttcaaatgtgtttgttactaagcaacggttgctaagagcttctgtaattaagatgaaagttccaaggtaacaatgcccaaacacagcaccattttcaccattttctgataatgcaggagtaggatggctaaaagtgaaagaagaatctactctatggaaagcatggcacctgaaatttctgaagatattggctgtcctctagcttatatgagagagagtgtttgtgctttactaatcaaccagtcatttttttcttgtgtggctgaaatgtacattccagacatgaacaggtagagtatgtgttgggggcaggtttatactgcatgggtgtgctgagacagggccacgtggtgatgtaaatgatgctgcctgacacgtgcagctgtaagaggggtgaacggagtaccctctgcatgaaataaacttcctttgcagttatcactgacctagattaagcagcgacgcaggcctgttctgtactttgtttaacaatgcacagtttctttttcttttggagatttgtaaaggaagactcaaatgaatttttccctattcatggtgcctggctcatagcgggcgcttaacaaatgctcctctttgccttcccactccattttgttccaggggcgaggagggggtta

SEQ ID NO: 14730 - DNA, 769 bp, Homo sapiens
acttttgtagttaaaaaaaatttttactttaccagggcattgcaattcttttccatcagtgaatttcattctacagacttttcagagcatctcataatcagtcaacaaatctatttcaaatgtgtttgttactaagcaacggttgctaagagcttctgtaattaagatgaaagttccaaggtaacaatgcccaaacacagcaccattttcaccattttctgataatgcaggagtaggatggctaaaagtgaaagaagaatctactctatggaaagcatggcacctgaaatttctgaagatattggctgtcctctagcttatatgagagagagtgtttgtgctttactaatcaaccagtcatttttttcttgtgtggctgaaatgtacattccagacatgaacaggcctggtaaggcagaacggagagccgagaagggcctgaggcctcccaggaagctggttggggagaccagaaggctgcaaagctggccaacgcttgccaggtggctgcggagagtcagcttcagtctctacaagccgcccatccaggcagctcctgaaccagatccaggcaactgggccaagtccccaaggctgtctctgggaccagaaggtataaccaaagggaagcatggatttaaattccagggcataaaagaaaagttcaacgtatctaagaaggtgctgaaaatgacttttttgtaaatgtctgaaggacactgtcttataccataccatatacaataaaattttaaatgagcctgagttc

SEQ ID NO: 14731 - DNA, 476 bp, Homo sapiens
gactctgtctgttggaccaatttgatgcctgtgcacgctcagggctctctgaaccccgctccttgactctcagggtcccctcttgcggaaagcccctcccgggaccaggagccaggctgggcagggaggtgacaccctgcctctcttttgcatttgcttggtgctggctgaagatgtgccaggaggaacagaccagctacatggtggtgcagacgagcgaggaggggctggcggctgacgccgagctcccgggaccgctcctgatgctggcccagaactgcgcagtcatgcacaacctgctgggccctgcctgcattttcctgcgcaagggcttcgctgagaacaggcagcctgtacgtaagttggcccagtggagcccgctgaacttggcttcacagggcgtgaggaggtgctgggatgaagaaggggtctatacagagctcacacccccaacttatgaatctgatccccaaagt

SEQ ID NO: 14732 - DNA, 597 bp, Homo sapiens
ccttgtttatttgcatgcatcactttatgttatgcataatgtctagaaggcatgctgttttattgcctgtttgcatttttcacccaaattgctggaaactaatgaacattttaaaggagccattcctttagctgcagtcatttctctaaattgatatctttttttgggggggaggcagtgaaatcattttaaacattactttttgaaagaaaaaattattagacaaaagttaatattttaaaataaatcttgagaaactagagattaaataacttaatgaaacatatttcagagttgaattttggcagcaattgtaaataatatttataatctggtgatattaaaagtgaaaagttacaagggggagaaggaatgctctcctttgaaaattagtggccacatttggtgatggatgagatgaagatgcatccttccataatcttgcctttttaaaaaaattataaagctcaaatgcattttgccagaaaaattgcatgaatcttcagcatgcattgttaactttttgtcttttcccctttctttctgctgttcattttcattcatatatttttgatttttggtttgccattgtttttt

SEQ ID NO: 14733 - DNA, 313 bp, Homo sapiens
attctcagcagcgtcgaccaaatcgcccacactttgttgctcttggaaaggcagtgtcccaccctccaggggcctgatgcaactggcccccactctgagaccccccagttacccttataaccacatctaccactggagctccatagccttccagtcaaaacccaccaaccagccaggcacagtggctcatgcctgtaatcccaacactttgggaggccgaggcaggcacatcacttgaggtcaggagtgcgagaccagcctgacccaacatggtgaaaccctgttacttaaaaaaaaaaaaaaaaaagccggg

SEQ ID NO: 14734 - DNA, 387 bp, Homo sapiens
tcccattaaaaagttcttggcctgcttctctattaatatagagtcccatatgcattttacattgttgacttctaggttgtcaattatttagaagtatttttggaaaaacctaccttatctgatttcagtttattagcacctttagttacagaaacatgaactctaacatacactcaaactgatcattttaatattttatccagtagtggaaaaagggtttactggaaaaggatgtcccaattatctagattgaatgaggtagtttttctctgtgcattacagctagcaatatttatacgagtaaatgatagagttattgagagcagaagcaatgtggtatttccagaaatgaagtcttcaatggagtcagtttactggataaatgtt

SEQ ID NO: 14735 - DNA, 490 bp, Homo sapiens
tgtaaagatataaacacagtaaacactggcattactgcttagaacttaatcaatttggtaatggctattactttgtcaagttggtagacagcagggacaatgataagagaagagaagggggaaaaaagagaagagatgagagaagactgtgtaaggacataccccgactcatttggaaagaaaatatgaaagcaacatcggggacaggtctatatctgagaagtgtatgagatgcttaacattttttacaaatttatattcattatgcattactcattggatattctgactaagaatgatttgccaaggccaagtttacagtgaaacaatgttttttcacaggatatataatattttatgggcagcactgaattcagtctttctgggtagttagatgatatatatttcctagcaggaaagagttattaaatgagaatgatgaatcagttgtgcttcagaagtcccattgtaaaaattaccagtttaagtc

SEQ ID NO: 14736 - DNA, 1490 bp, Homo sapiens
agtgataaaatatcactctccctccctggggcattagaggagtcctcacccacccacctcctacacaagtatcttttagggacagtggctcaccattgtggactttttgagtgtccacctgatattacaagttgcattgaccagaacacagattttgctcttctgtgtcaatacccatttcttttctgaaggtcagaagttggttaagggtttgggggaccagctagacactcttcttagtcccatggagctgactggaagttccatgaggggaggaaattgatgtcaaagtgtcattttaaagcttaagctgaaagtttattttttaaattctcattcattcatttagcatatattgattgagcatctacaatgtgccagttgtagaattccatctcagaagagacttgacttgtggatggtggaggggcagtcctgctcggaagcagatgatgtgaaatgttcctttccagtctggttcacgatgtttaacagatttgtcaggtcaccactgtgaccccaagctttgctggcagattgttatatagtatttactgagagccctgctatctggtaaaggcagttaaaaagcctgcaatctcgactcatttccagcatgaacagactggtccttgctgctttacacaataatcaaagctaccttttatggcgtgctcgccactcccaagcactgggcgaagtgctttacccgtcttcccctccgcgatgcctcatgcccactttagcagatagtactgttagcattcccattttacagtggaggaagctgaggctcagagaggttaagcaacttagctgaaggccacaccaccagcgaagtgcctgagccaagatttggactcgagtcatgggacccccacgctcgtgagctgactgctctgttccactgggtcccttcatgaggtcgtcccacagcactgctagttccagggcgagtgccagcacatggccccactgggagccggggcctgacttaggtctactggaaaaagtgtcacctttggggacactcaaggacaggctggttggtttcgttgtggattttatatactcatgccctaaccctgtgttcctggtttctataaggccccggggaaggtgcaaggaatttgcaaatagggcctgtatgacttatttcctaggacacgggaagcttttcttacctcctttctaccctcttctccaacctgaactcccaagtttcttctcctgaaggtctttgcactataagcgccaaggagcccgtgtgcgtggcaggggcggctgggagggtatctggagaaccttagtgaggcctctggcctagccagagaggcaataagcttggggacgttccgttctgggttctgacgttgttggttctgacgtcgttgtgctcttttgtaagaggaatttcataccttggagacgctttgtacatatttgtaatgactttattaaaaaactgattgtgcacttctaaaaaaaaa

SEQ ID NO: 14737 - DNA, 685 bp, Homo sapiens
aaaggtacttgaggatcttgtaataaccagcgaagtgcctgagccaagatttggactcgagtcatgggacccccacgctcgtgagctgactgctctgttccactgggtcccttcatgaggtcgtcccacagcactgctagttccagggcgagtgccagcacatggccccactgggagccggggcctgacttaggtctactggaaaaagtgtcacctttggggacactcaaggacaggctggttggtttcgttgtggattttatatactcatgccctaaccctgtgttcctggtttctataaggccccggggaaggtgcaaggaatttgcaaatagggcctgtatgacttatttcctaggacacgggaagcttttcttacctcctttctaccctcttctccaacctgaactcccaagtttcttctcctgaaggtctttgcactataagcgccaaggagcccgtgtgcgtggcaggggcggctgggagggtatctggagaaccttagtgaggcctctggcctagccagagaggcaataagcttggggacgttccgttctgggttctgacgttgttggttctgacgtcgttgtgctcttttgtaagaggaatttcataccttggagacgctttgtacatatttgtaatgactttattaaaaaactgattgtgcacttctaaaaaaaaa

SEQ ID NO: 14738 - DNA, 836 bp, Homo sapiens
gatagaaaagtatataaacttatctccaaactacagttcataaatcctgattgaaaatggtacctactgtcctgcaaaacctcatccctataccatcatcccaggtctcactttctctgctaactgtagtctaactgctgagcttggcaacagaacaatcccatgagtctgtggccctcaaatgagctgtgttctctggtgatttttgcacagatgattccccctattgggataacatttctttggcttgtcagcttggtgaattcctattaagtcctcctaaattctgctccaggcgtttctcctccaacaaaattccctctttgcccagtgaatcccccgcttttttggagagctgctgtgcactttatattgttttgtgatatatgtataaaaaatcagtttcttgtttgaaagacaaaaagactaatttatttttgtatcccaacaaagtggcagacagtgcatgtgaaatgtttgttgactgaacatagctcttcattcctgtctctgttgtcacacttatcaccatccacttaatattaattattcatgtatgtatctgtctctcttgcatggttttaagcttccggatgtcagagaccatgcctaattcctctaaatattccctcaaagcactcctaatatgcattgtgggagttagtactcaataaatacttgctgattaggagaatacttagaacaggggtgtctgatcttttgacttccctgggccacattggaagaagaagaattgtcttgagccacacacaaaatacactaatactaatgatagctaataagcttaaaaaaatttttttaaaaaatcacaaaag

SEQ ID NO: 14739 - DNA, 446 bp, Homo sapiens
catgcagtcatgaggatcactttgaaactagacatagtgccaagtgcttttcagaaaagtgaagaattagattgagcagaggaaatttacctatttgtgagtgaggatgatggaaggagtcttggagaggtagtactttttaccttctctgatcagtttcagggcttctcctgagcctactgaatctaggagaattatttacagattacccaacctcacatttgaagctcttagttttattttgtcatactactactccacttacatcattaacttgcttgggagagagacaacccattagtggctctgtgtgtgtggtttttgtttttctttttaggtttttttttttttttttttgagatggggtctcactatattgcccaggctggactcaaactcttgagcttaagtgattcctcctacctcagcctcccaaagtgctggga

SEQ ID NO: 14740 - DNA, 2957 bp, Homo sapiens
gcggcagcggcggcagcagaagctcggctcagcggctgggggtggccgctcgaatctgccagggcacctcgctccctcgcctctggcagcgggaccctgtgggcattgaaatccaactcactcggtgcttatttcctgtaatggacaaacttgatgctaatgtgagttctgaggagggtttcgggtcagtggagaaggtggtgctgctcacgtttctctcgacggttatcctgatggccatcttggggaacctgctggtgatggtggctgtgtgctgggacaggcagctcaggaaaataaaaacaaattatttcattgtatctcttgcttttgcggatctgctggtttcggtgctggtgatgccctttggtgccattgagctggttcaagacatctggatttatggggaggtgttttgtcttgttcggacatctctggacgtcctgctcacaacggcatcgatttttcacctgtgctgcatttctctggataggtattacgccatctgctgccagcctttggtctataggaacaagatgacccctctgcgcatcgcattaatgctgggaggctgctgggtcatccccacgtttatttcttttctccctataatgcaaggctggaataacattggcataattgatttgatagaaaagaggaagttcaaccagaactctaactctacgtactgtgtcttcatggtcaacaagccctacgccatcacctgctctgtggtggccttctacatcccatttctcctcatggtgctggcctattaccgcatctatgtcacagctaaggagcatgcccatcagatccagatgttacaacgggcaggagcctcctccgagagcaggcctcagtcggcagaccagcatagcactcatcgcatgaggacagagaccaaagcagccaagaccctgtgcatcatcatgggttgcttctgcctctgctgggcaccattctttgtcaccaatattgtggatcctttcatagactacactgtccctgggcaggtgtggactgctttcctctggctcggctatatcaattccgggttgaacccttttctctacgccttcttgaataagtcttttagacgtgccttcctcatcatcctctgctgtgatgatgagcgctaccgaagaccttccattctgggccagactgtcccttgttcaaccacaaccattaatggatccacacatgtactaagggatgcagtggagtgtggtggccagtgggagagtcagtgtcacccgccagcaacttctcctttggtggctgctcagcccagtgacacttaggcccctgggacaatgacccagaagacagccatgcctccgaaagagggccaggtcctaagctgctgcttgtgcgcgactgcacccggtattctcttcacctgaggctttccgtccgccagtgcaggaacccggtgctcgctgggcttttcctctgagattccagcaggtggcgctggagggagtcaggggacataatggcctccttgttcactttttatttcccaacactccctcttcccagattctctgcttttgccgcgtggtctctggtgtctctgacatgttcccgtcactcactgtgtctgatctgtctcactcacgttctaagcacgatagcttgctgcgtcctatctcggtcactgatgtctccaaatacgccttctttgctgtgtgggcttccagatatcaacaaaatactccctctctgttcctgtcttagccagaggcgtcgctcctgtcttgcttacttgcttggtcacgtccgtcacagccatgttcaagctatccctgcctcttcttcgccctgttctgtgccagacgctaacacacttttctccctgtgtctgggtccaaacgtgcatcctcttggttggcccccttgtcagtcccagacgtccacttgctcttccttatgtccaatgtctgtcctcctcttcaggacatgctccatttattttccatggaagacacagggtcagagatctgtcagaggaaaatggtctccacagcaactctggagggaagctgaagacagatagcttcctcctggtgtcctggccgctggcgtgtctgccctgagatgctcgctctcctgctgggctagaacgggacgtcttctaaaaagccttgggcagggctagcaacatcgtaggtgtttattaggcttcaggatctttcccatgaacttgtgatatcattttgaaacccttcaatctggctttgttgctgccaaaggagataactgttggaagttcacactggggaaactcattttcccctgcagctcccccaaggtgcaggagggcaggatccagcagcactggggatgccgaggcaatgctgtacttgaagccagaggacccaaattgccgccctggctgtgctgcaaacaagctgtgagatcttgaatagtgttctttcatctctggaccccactttccacatctgtgcactcaagcttggactagaggacctttaagttttctttctgtttctaagacaacagtatgctgctatagccgtctgctacctcgagaagccatggcctgcctgccttttggctttgtttcaaaggaacgaccctcctcatttgggccttttagacccctgacctttccagctttgtccttcagattaatctggatgtcttttattcaaagctgagtcagtggctcttgcgaatgccccatagcagaagtcccgggaaggtaaatgccaaacccagagccatgtgagattctgactttgatcttggctgtggtttaatagcatctcaggattatttatcatattctctttttttcttattgcttataaggtgtcagttattgtttccattgttgtttactttagttctggaactgaaaccgacaggaagaaactttggaataaggaagagaagattgaccaaaccatccaaatgccaaaaag

SEQ ID NO: 14741 - DNA, 1858 bp, Homo sapiens
  misc_feature (1843)..(1843): n is a, c, g, or t
  misc_feature (1856)..(1857): n is a, c, g, or t
gctagaggacccggctcatgtcagttcttaagagtttactagattctcaaaagaatctgtgatttcctacccttaaaatgatttaaacatttttttaaaatcctcataggaacaaaatggccattttgggcaatatactattttaagcataagaatgtagctacctatcttcactaattactgtcctaatgcagatcataaaaataagccatgtttctggaaagaacataaataacaataaatggagcaaaaagaagcacccatatgttttaatcacaaagcgatcagtagggtgtaaataaaccttttgtgacactcggctgtaccatacgtcaatatgccacaagctttttgctttagtattgtttattaaatatttccacaaaacaagtcataataggaagcaatagttatttgagttttttaaaacaaggacttgtatttttcaatgctgctttcttttataacatctttttacttcccccattttaggaccctgtgggcattgaaatccaactcactcggtgcttatttcctgtaatggacaaacttgatgctaatgtgagttctgaggagggtttcgggtcagtggagaaggtggtgctgctcacgtttctctcgacggttatcctgatggccatcttggggaacctgctggtgatggtggctgtgtgctgggacaggcagctcaggaaaataaaaacaaattatttcattgtatctcttgcttttgcggatctgctggtttcggtgctggtgatgccctttggtgccattgagctggttcaagacatctggatttatggggaggtgttttgtcttgttcggacatctctggacgtcctgctcacaacggcatcgatttttcacctgtgctgcatttctctggataggtattacgccatctgctgccagcctttggtctataggaacaagatgacccctctgcgcatcgcattaatgctgggaggctgctgggtcatccccacgtttatttcttttctccctataatgcaaggctggaataacattggcataattgatttgatagaaaagaggaagttcaaccagaactctaactctacgtactgtgtcttcatggtcaacaagccctacgccatcacctgctctgtggtggccttctacatcccatttctcctcatggtgctggcctattaccgcatctatgtcacagctaaggagcatgcccatcagatccagatgttacaacgggcaggagcctcctccgagagcaggcctcagtcggcagaccagcatagcactcatcgcatgaggacagagaccaaagcagccaagaccctgtgcatcatcatgggttgcttctgcctctgctgggcaccattctttgtcaccaatattgtggatcctttcatagactacactgtccctgggcaggtgtggactgctttcctctggctcggctatatcaattccgggttgaacccttttctctacgccttcttgaataagtcttttagacgtgccttcctcatcatcctctgctgtgatgatgagcgctaccgaagaccttccattctgggccagactgtcccttgttcaaccacaaccattaatggatccacacatgtactaaggtacaccgttctgcacaggggacatcatcaggaactcgagaaactgcccatacacaatgacccagaatccctggaatcatgcttctgattgaggacatggctcacaacttagccattcattcgcattcatgtttgcatgaacaggtcaccctggcatcacttctgaacctcatcaccaccagtgaggcatcaggtagtaggctgagagcccagaggaggtacatggnggacagtgttggnng

SEQ ID NO: 14742 - DNA, 1755 bp, Homo sapiens
gctagaggacccggctcatgtcagttcttaagagtttactagattctcaaaagaatctgtgatttcctacccttaaaatgatttaaacatttttttaaaatcctcataggaacaaaatggccattttgggcaatatactattttaagcataagaatgtagctacctatcttcactaattactgtcctaatgcagatcataaaaataagccatgtttctggaaagaacataaataacaataaatggagcaaaaagaagcacccatatgttttaatcacaaagcgatcagtagggtgtaaataaaccttttgtgacactcggctgtaccatacgtcaatatgccacaagctttttgctttagtattgtttattaaatatttccacaaaacaagtcataataggaagcaatagttatttgagttttttaaaacaaggacttgtatttttcaatgctgctttcttttataacatctttttacttcccccattttaggaccctgtgggcattgaaatccaactcactcggtgcttatttcctgtaatggacaaacttgatgctaatgtgagttctgaggagggtttcgggtcagtggagaaggtggtgctgctcacgtttctctcgacggttatcctgatggccatcttggggaacctgctggtgatggtggctgtgtgctgggacaggcagctcaggaaaataaaaacaaattatttcattgtatctcttgcttttgcggatctgctggtttcggtgctggtgatgccctttggtgccattgagctggttcaagacatctggatttatggggaggtgttttgtcttgttcggacatctctggacgtcctgctcacaacggcatcgatttttcacctgtgctgcatttctctggataggtattacgccatctgctgccagcctttggtctataggaacaagatgacccctctgcgcatcgcattaatgctgggaggctgctgggtcatccccacgtttatttcttttctccctataatgcaaggctggaataacattggcataattgatttgatagaaaagaggaagttcaaccagaactctaactctacgtactgtgtcttcatggtcaacaagccctacgccatcacctgctctgtggtggccttctacatcccatttctcctcatggtgctggcctattaccgcatctatgtcacagctaaggagcatgcccatcagatccagatgttacaacgggcaggagcctcctccgagagcaggcctcagtcggcagaccagcatagcactcatcgcatgaggacagagaccaaagcagccaagaccctgtgcatcatcatgggttgcttctgcctctgctgggcaccattctttgtcaccaatattgtggatcctttcatagactacactgtccctgggcaggtgtggactgctttcctctggctcggctatatcaattccgggttgaacccttttctctacgccttcttgaataagtcttttagacgtgccttcctcatcatcctctgctgtgatgatgagcgctaccgaagaccttccattctgggccagactgtcccttgttcaaccacaaccattaatggatccacacatgtactaaggtgagtatactaagggagttcattgatttggttgatttgtattactcagaaggggtaatgctccagttttctgtttccaaaggggttatccctgaaacctgcatagagtttgcaaagattataaaagattctactatct

SEQ ID NO: 14743 - DNA, 1694 bp, Homo sapiens
gctagaggacccggctcatgtcagttcttaagagtttactagattctcaaaagaatctgtgatttcctacccttaaaatgatttaaacatttttttaaaatcctcataggaacaaaatggccattttgggcaatatactattttaagcataagaatgtagctacctatcttcactaattactgtcctaatgcagatcataaaaataagccatgtttctggaaagaacataaataacaataaatggagcaaaaagaagcacccatatgttttaatcacaaagcgatcagtagggtgtaaataaaccttttgtgacactcggctgtaccatacgtcaatatgccacaagctttttgctttagtattgtttattaaatatttccacaaaacaagtcataataggaagcaatagttatttgagttttttaaaacaaggacttgtatttttcaatgctgctttcttttataacatctttttacttcccccattttaggaccctgtgggcattgaaatccaactcactcggtgcttatttcctgtaatggacaaacttgatgctaatgtgagttctgaggagggtttcgggtcagtggagaaggtggtgctgctcacgtttctctcgacggttatcctgatggccatcttggggaacctgctggtgatggtggctgtgtgctgggacaggcagctcaggaaaataaaaacaaattatttcattgtatctcttgcttttgcggatctgctggtttcggtgctggtgatgccctttggtgccattgagctggttcaagacatctggatttatggggaggtgttttgtcttgttcggacatctctggacgtcctgctcacaacggcatcgatttttcacctgtgctgcatttctctggataggtattacgccatctgctgccagcctttggtctataggaacaagatgacccctctgcgcatcgcattaatgctgggaggctgctgggtcatccccacgtttatttcttttctccctataatgcaaggctggaataacattggcataattgatttgatagaaaagaggaagttcaaccagaactctaactctacgtactgtgtcttcatggtcaacaagccctacgccatcacctgctctgtggtggccttctacatcccatttctcctcatggtgctggcctattaccgcatctatgtcacagctaaggagcatgcccatcagatccagatgttacaacgggcaggagcctcctccgagagcaggcctcagtcggcagaccagcatagcactcatcgcatgaggacagagaccaaagcagccaagaccctgtgcatcatcatgggttgcttctgcctctgctgggcaccattctttgtcaccaatattgtggatcctttcatagactacactgtccctgggcaggtgtggactgctttcctctggctcggctatatcaattccgggttgaacccttttctctacgccttcttgaataagtcttttagacgtgccttcctcatcatcctctgctgtgatgatgagcgctaccgaagaccttccattctgggccagactgtcccttgttcaaccacaaccattaatggatccacacatgtactaagttctggaactgaaaccgacaggaagaaactttggaataaggaagagaagattgaccaaaccatccaaatgccaaaaag

SEQ ID NO: 14744 - DNA, 3357 bp, Homo sapiens
gctagaggacccggctcatgtcagttcttaagagtttactagattctcaaaagaatctgtgatttcctacccttaaaatgatttaaacatttttttaaaatcctcataggaacaaaatggccattttgggcaatatactattttaagcataagaatgtagctacctatcttcactaattactgtcctaatgcagatcataaaaataagccatgtttctggaaagaacataaataacaataaatggagcaaaaagaagcacccatatgttttaatcacaaagcgatcagtagggtgtaaataaaccttttgtgacactcggctgtaccatacgtcaatatgccacaagctttttgctttagtattgtttattaaatatttccacaaaacaagtcataataggaagcaatagttatttgagttttttaaaacaaggacttgtatttttcaatgctgctttcttttataacatctttttacttcccccattttaggaccctgtgggcattgaaatccaactcactcggtgcttatttcctgtaatggacaaacttgatgctaatgtgagttctgaggagggtttcgggtcagtggagaaggtggtgctgctcacgtttctctcgacggttatcctgatggccatcttggggaacctgctggtgatggtggctgtgtgctgggacaggcagctcaggaaaataaaaacaaattatttcattgtatctcttgcttttgcggatctgctggtttcggtgctggtgatgccctttggtgccattgagctggttcaagacatctggatttatggggaggtgttttgtcttgttcggacatctctggacgtcctgctcacaacggcatcgatttttcacctgtgctgcatttctctggataggtattacgccatctgctgccagcctttggtctataggaacaagatgacccctctgcgcatcgcattaatgctgggaggctgctgggtcatccccacgtttatttcttttctccctataatgcaaggctggaataacattggcataattgatttgatagaaaagaggaagttcaaccagaactctaactctacgtactgtgtcttcatggtcaacaagccctacgccatcacctgctctgtggtggccttctacatcccatttctcctcatggtgctggcctattaccgcatctatgtcacagctaaggagcatgcccatcagatccagatgttacaacgggcaggagcctcctccgagagcaggcctcagtcggcagaccagcatagcactcatcgcatgaggacagagaccaaagcagccaagaccctgtgcatcatcatgggttgcttctgcctctgctgggcaccattctttgtcaccaatattgtggatcctttcatagactacactgtccctgggcaggtgtggactgctttcctctggctcggctatatcaattccgggttgaacccttttctctacgccttcttgaataagtcttttagacgtgccttcctcatcatcctctgctgtgatgatgagcgctaccgaagaccttccattctgggccagactgtcccttgttcaaccacaaccattaatggatccacacatgtactaagggatgcagtggagtgtggtggccagtgggagagtcagtgtcacccgccagcaacttctcctttggtggctgctcagcccagtgacacttaggcccctgggacaatgacccagaagacagccatgcctccgaaagagggccaggtcctaagctgctgcttgtgcgcgactgcacccggtattctcttcacctgaggctttccgtccgccagtgcaggaacccggtgctcgctgggcttttcctctgagattccagcaggtggcgctggagggagtcaggggacataatggcctccttgttcactttttatttcccaacactccctcttcccagattctctgcttttgccgcgtggtctctggtgtctctgacatgttcccgtcactcactgtgtctgatctgtctcactcacgttctaagcacgatagcttgctgcgtcctatctcggtcactgatgtctccaaatacgccttctttgctgtgtgggcttccagatatcaacaaaatactccctctctgttcctgtcttagccagaggcgtcgctcctgtcttgcttacttgcttggtcacgtccgtcacagccatgttcaagctatccctgcctcttcttcgccctgttctgtgccagacgctaacacacttttctccctgtgtctgggtccaaacgtgcatcctcttggttggcccccttgtcagtcccagacgtccacttgctcttccttatgtccaatgtctgtcctcctcttcaggacatgctccatttattttccatggaagacacagggtcagagatctgtcagaggaaaatggtctccacagcaactctggagggaagctgaagacagatagcttcctcctggtgtcctggccgctggcgtgtctgccctgagatgctcgctctcctgctgggctagaacgggacgtcttctaaaaagccttgggcagggctagcaacatcgtaggtgtttattaggcttcaggatctttcccatgaacttgtgatatcattttgaaacccttcaatctggctttgttgctgccaaaggagataactgttggaagttcacactggggaaactcattttcccctgcagctcccccaaggtgcaggagggcaggatccagcagcactggggatgccgaggcaatgctgtacttgaagccagaggacccaaattgccgccctggctgtgctgcaaacaagctgtgagatcttgaatagtgttctttcatctctggaccccactttccacatctgtgcactcaagcttggactagaggacctttaagttttctttctgtttctaagacaacagtatgctgctatagccgtctgctacctcgagaagccatggcctgcctgccttttggctttgtttcaaaggaacgaccctcctcatttgggccttttagacccctgacctttccagctttgtccttcagattaatctggatgtcttttattcaaagctgagtcagtggctcttgcgaatgccccatagcagaagtcccgggaaggtaaatgccaaacccagagccatgtgagattctgactttgatcttggctgtggtttaatagcatctcaggattatttatcatattctctttttttcttattgcttataaggtgtcagttattgtttccattgttgtttactttagttctggaactgaaaccgacaggaagaaactttggaataaggaagagaagattgaccaaaccatccaaatgccaaaaag

SEQ ID NO: 14745 - DNA, 1934 bp, Homo sapiens
  misc_feature (1919)..(1919): n is a, c, g, or t
  misc_feature (1932)..(1933): n is a, c, g, or t
gctagaggacccggctcatgtcagttcttaagagtttactagattctcaaaagaatctgtgatttcctacccttaaaatgatttaaacatttttttaaaatcctcataggaacaaaatggccattttgggcaatatactattttaagcataagaatgtagctacctatcttcactaattactgtcctaatgcagatcataaaaataagccatgtttctggaaagaacataaataacaataaatggagcaaaaagaagcacccatatgttttaatcacaaagcgatcagtagggtgtaaataaaccttttgtgacactcggctgtaccatacgtcaatatgccacaagctttttgctttagtattgtttattaaatatttccacaaaacaagtcataataggaagcaatagttatttgagttttttaaaacaaggacttgtatttttcaatgctgctttcttttataacatctttttacttcccccattttaggaccctgtgggcattgaaatccaactcactcggtgcttatttcctgtaatggacaaacttgatgctaatgtgagttctgaggagggtttcgggtcagtggagaaggtggtgctgctcacgtttctctcgacggttatcctgatggccatcttggggaacctgctggtgatggtggctgtgtgctgggacaggcagctcaggaaaataaaaacaaattatttcattgtatctcttgcttttgcggatctgctggtttcggtgctggtgatgccctttggtgccattgagctggttcaagacatctggatttatggggaggtgttttgtcttgttcggacatctctggacgtcctgctcacaacggcatcgatttttcacctgtgctgcatttctctggataggtattacgccatctgctgccagcctttggtctataggaacaagatgacccctctgcgcatcgcattaatgctgggaggctgctgggtcatccccacgtttatttcttttctccctataatgcaaggctggaataacattggcataattgatttgatagaaaagaggaagttcaaccagaactctaactctacgtactgtgtcttcatggtcaacaagccctacgccatcacctgctctgtggtggccttctacatcccatttctcctcatggtgctggcctattaccgcatctatgtcacagctaaggagcatgcccatcagatccagatgttacaacgggcaggagcctcctccgagagcaggcctcagtcggcagaccagcatagcactcatcgcatgaggacagagaccaaagcagccaagaccctgtgcatcatcatgggttgcttctgcctctgctgggcaccattctttgtcaccaatattgtggatcctttcatagactacactgtccctgggcaggtgtggactgctttcctctggctcggctatatcaattccgggttgaacccttttctctacgccttcttgaataagtcttttagacgtgccttcctcatcatcctctgctgtgatgatgagcgctaccgaagaccttccattctgggccagactgtcccttgttcaaccacaaccattaatggatccacacatgtactaagtggctgttcccctgtctccagcttcctcctgctcttctgcaatagaccagttcctgtctaactctgaaagtgctctgtacaccgttctgcacaggggacatcatcaggaactcgagaaactgcccatacacaatgacccagaatccctggaatcatgcttctgattgaggacatggctcacaacttagccattcattcgcattcatgtttgcatgaacaggtcaccctggcatcacttctgaacctcatcaccaccagtgaggcatcaggtagtaggctgagagcccagaggaggtacatggnggacagtgttggnng

SEQ ID NO: 14746 - DNA, 1730 bp, Homo sapiens
  misc_feature (1690)..(1690): n is a, c, g, or t
  misc_feature (1692)..(1692): n is a, c, g, or t
  misc_feature (1726)..(1730): n is a, c, g, or t
gctagaggacccggctcatgtcagttcttaagagtttactagattctcaaaagaatctgtgatttcctacccttaaaatgatttaaacatttttttaaaatcctcataggaacaaaatggccattttgggcaatatactattttaagcataagaatgtagctacctatcttcactaattactgtcctaatgcagatcataaaaataagccatgtttctggaaagaacataaataacaataaatggagcaaaaagaagcacccatatgttttaatcacaaagcgatcagtagggtgtaaataaaccttttgtgacactcggctgtaccatacgtcaatatgccacaagctttttgctttagtattgtttattaaatatttccacaaaacaagtcataataggaagcaatagttatttgagttttttaaaacaaggacttgtatttttcaatgctgctttcttttataacatctttttacttcccccattttaggaccctgtgggcattgaaatccaactcactcggtgcttatttcctgtaatggacaaacttgatgctaatgtgagttctgaggagggtttcgggtcagtggagaaggtggtgctgctcacgtttctctcgacggttatcctgatggccatcttggggaacctgctggtgatggtggctgtgtgctgggacaggcagctcaggaaaataaaaacaaattatttcattgtatctcttgcttttgcggatctgctggtttcggtgctggtgatgccctttggtgccattgagctggttcaagacatctggatttatggggaggtgttttgtcttgttcggacatctctggacgtcctgctcacaacggcatcgatttttcacctgtgctgcatttctctggataggtattacgccatctgctgccagcctttggtctataggaacaagatgacccctctgcgcatcgcattaatgctgggaggctgctgggtcatccccacgtttatttcttttctccctataatgcaaggctggaataacattggcataattgatttgatagaaaagaggaagttcaaccagaactctaactctacgtactgtgtcttcatggtcaacaagccctacgccatcacctgctctgtggtggccttctacatcccatttctcctcatggtgctggcctattaccgcatctatgtcacagctaaggagcatgcccatcagatccagatgttacaacgggcaggagcctcctccgagagcaggcctcagtcggcagaccagcatagcactcatcgcatgaggacagagaccaaagcagccaagaccctgtgcatcatcatgggttgcttctgcctctgctgggcaccattctttgtcaccaatattgtggatcctttcatagactacactgtccctgggcaggtgtggactgctttcctctggctcggctatatcaattccgggttgaacccttttctctacgccttcttgaataagtcttttagacgtgccttcctcatcatcctctgctgtgatgatgagcgctaccgaagaccttccattctgggccagactgtcccttgttcaaccacaaccattaatggatccacacatgtactaagattttgagctccttgaggactgtggccaattcttattgctcattttttttcttagtgcccaacacaggtttttntncactgaagttatcaaataaattcattggatgtannnnn

SEQ ID NO: 14747 - DNA, 532 bp, Homo sapiens
tctccctactgtatcctacacgaggctactttggtgctgtaggttgggaacagttgcagagggcttttaataccaaacagcatgcaagtgtcctcgtgcaggaaaaggggggatggtgctgaaggagtcttaaacgtggtagctctgtgctagagagtggtaacctgatggctcccggaggaggtggtattaatccttagcatcagggcaaatcttgagactctgtcctctctttatggccaactggagggtatgaaggactctttccctagggtacatagctcacaggatagatgtgtgttttatagtattaagccacaaagtaattaataaacatagccacaatgtgctgcaaatagaaggcaaaagagccaaaggaggagagactacagacacggcactgtccgttcttacgcagccggtgctggcatgcacctctgtgaacaaagagcatgtgttccagtgacatgcttctttgtcaggggcttcactgccagaggcataaataacacaggcagagcaggaaaaaaat

SEQ ID NO: 14748 - DNA, 692 bp, Homo sapiens
atccaacccaaggttcaggacatctctacagtggggactaggcagctcctctgttagacctaagaaaactcgggttgtctgcccaacatcccacctgataagcaacaggaatcattagaacagggaggaatgtgaaaccttgccattcctggcccgtagcaattccaaaatcccagtaggcagccactgtggggccacttcacctaggctggcagatgttgcttgtttaggactgggttccattctttagcaggggtctccccattccattgtcctctgtggcctctggcttcaccctctgctaggttctttcatttccattatcctccctttccatcctccttttcggccacacccaaaagagacattcaagaatttcttggaggttgtgcagccttctcaatcctcatcctctaggcgattggagacccaaggaatattttaagttttgaacagacacttctggaacctgggcttgtgagtttgttttatttttgtcagaataagcttcaaaaatgtagtaggaattttacctgattgattgcaatcagtaacatgggccagaagccacactcagttcttttttgtgactcagttctcaaatctgctgtatttcttcactcccttacccttatgcctctctagatttaaactttgagtctagatttaaacctgtggggcttctgtgcaaa

SEQ ID NO: 14749 - DNA, 782 bp, Homo sapiens
atcccatgaaactgcaccctaacatctactggccatagataaggcaagctctgtagattaaaggaccccaaaaccactgctgcctttctgaattctctgactcagatccctcacacttaactgctgaatgccatcccctaggcacttaagccccctctcaggttcccctctttactgagagtttccttgccctcctccccatctggtggtagccttgcagctgctgtctctggaaggtcacctgctatgaaggaccacccctatcaggcaaccctttccaaacactgctcgataaagcctgttctgtggtacattttcttgatcagctcggaagtcctggaactcacaactggtattacatttcctttctttttagctatttgtttttgttctagagttcttggcttccccatctcacataccccacacatccctttaaattacctgcctttgtcttctcctcaagcttttttaagttatcaagggttacattaaatggtccttctgttccctgtggaactgtttgctgcacaggttgctttccagcttttatcttgagacttccctttcctgtgttctcagctagggtcctgcgtggtcctcccatggtttcctttttctttgtcctccctgcccccgctaactgcctaagtaaagaaagtaactgcctaagaaaagtaatttgtttgaatgcttaaatgccttaaaatgatttttttgtcttttattctttcttgataattaggctgaggatagaattttaggttgaaaattatttccct

SEQ ID NO: 14750 - DNA, 658 bp, Homo sapiens
cagatcatcggtcccccgcccccaactcttgtatttttccagtaaagttctgtatcctgtgaagatacagaaagatcacgtatgtattagactttgggccacttgaaagctacgtctgtgtttactgatcccctggcctctaacatagcacttcatgagttttgaatcaatgaagggactaacagaaggagaaggttatttctgtttcctattggaaatcccttggaaatatctcttgtggtcgcatttctatcaggatggctacactttgcatctggcttcctaggagaagggtttatttggggctcctttttcagcaccacctggcagagctgcttgtgcttgctgtgcttagaggttttgctgcagtctgtccctgaatgggaaggatgggaatcgtggctgaacgcagctggggtttccttctctcccagatttacagctttaaaggcaccctgagaaagcatgactcatcaagtcacagtcttggaggctcttgggaccaatcagggcagctggcatgaggacaacgtgtccagctttagagtcagtggtggggtcaccttccagaattccccagtgcagctcagaaatctggctcttttggaatgttttttcttacttttggttgtattttgtaaagctgtaccattttatt

SEQ ID NO: 14751 - DNA, 471 bp, Homo sapiens
cacacagacacaaacagcacctccacagcctcgcagcgtcatggggtgggaacggtgagaaggtttaaaaagctccgcagggggccagtcatggaagtggccaggaaaccctggtctcctgccgcctgcgtgtggccagccgtgcttccggggcgactgtggtgcggctccttggggtgatgtctcctggcaggcgtgaggccaggactgcatgtgttcagactccacgtcctgggctgagctgggctcttccggggctctgtcaaggcagaaagtgtggcccaaggaagcagcggcactctcagtcggaaacgtattcctaacaggtgtcgggcagaaagtgtggcccaaggaagcagcggctctctccgttggagacgtgtcaccaacaggaatattcacagtgggtgtttaatttgtgtgcttaaaaagaaaaattagctttggattgactacacacattgcatgaca

SEQ ID NO: 14752 - DNA, 426 bp, Homo sapiens
atacattcaatcattttttttaaaactttgactgaatgcttaccagatgtataccagatccagagaatacaaaaatgagtcagaattgtccttaagaaaattttctgcatcggaattataaaattataaaacttggaattacaggctgggtgcagtggctcatgcctgtaatcccagcactttgggaggccgaggcaggtggatcacttgaggtcaggagttcgagaccagcctggccaacatggcaaaaccctgtctctactaaaaatacaaaaattagccagtcatggtggcaggcgcctataatcccagctactctggaggctgaggcaggagaattgctcaaacctgggaggcggaggttgcagtgagctgagatcgcatcactgcactccagcctgggcgacagagtgagactccgcctcc

SEQ ID NO: 14753 - DNA, 283 bp, Homo sapiens
aataaccaataatcaaaacctgtgagcttagacctgaggtcaaatcctagtttattcacatactaatagcgggtaatttttggcaagttgttaaatattttgtgcctctgtttcctcatttaataaagactgtactcgagaacaattaaatcacaattcccagcctggtgtgcactggttcacacctgtaatccaggcactttgggaggcagaggtgggcagatcgcttgagctcaggagttagagaccagcctgagcaacatggcgaaaccctgtctccaca

SEQ ID NO: 14754 - DNA, 277 bp, Homo sapiens
gatgtcagacccctcctagttgtataaacaccttctcatgatacttctggtatgatcagtaaagtaacagcatcaaaatgtctttgatttgataaaaagtagttttaaaaaattaaggcttaaaaatttgccttgcgtgattgtgaatttgttaataatatgccttctttatgtgttatacaaaactgagacatgagttttaagatgatagatcattataattttattagtactcataaaagattaatgtcaatacattaaattaatcaaaactttg

SEQ ID NO: 14755 - DNA, 290 bp, Homo sapiens
tgtagacatccaattgatcaatagctggtcagaaaccatcgtatttttttagcacatatattcagcctaacatttttctaaaagtcataataaatagttttccttctactggagaaaattagacatttagcatactttcactttctcctcgctcctttcctgcccaattctcaccactgccatgttaagatcctactttttagtataaaaatatgttcctagttttatatattttacctagaaatcaatttacaattaactacaacattctgctgtttcttttcttgtca

SEQ ID NO: 14756 - DNA, 449 bp, Homo sapiens
attaaccatggcagcatagaagtctctgactggaccaaatggactggtgataaagcctaaggtccagctctgtgatcttggataaatggttcaacccctcatgacctccgtcccttatctaaaatgcaggttagactcagtgattggtaaaggctctcatagttcctttttctctgactctgtacccagactcagggagcaaaactgtcatttgccttggtaggctttttgatatctcctgaaaaagcagcttcgggaggggatttagcttctgctaattcttcttcacaaagacagtgaccatttctgaatgtctggctttaaaaagtgtaacaggtggttggactctgcagagacctcgggttagtctggcactgccccttaccacctatatgaccctgggggaattattcacctctctgctcccaagttttgtatattaagggtaa

SEQ ID NO: 14757 - DNA, 392 bp, Homo sapiens
ccaacagaacagactgaactgtatgcatggagtcaaacccacagacgtgcagggttgccaactgaacaggccatttattgcaagaccacaggtaagaacaatttggaggccaagagagaagtcacaacacgatgagctcagccaagagaaggcagtaaaggagtcaaaagaaggtgtttgtggctcccaagactattgctccaaaaggaagctcacctgggcacacctttgtcagcccctccttttcttctttcctggggagtttgagtaagctctttcctccactgggaatgttatctcctcttttcttcatttggttcatggctactgatttttcaaatctcagctcaattgccacttcctccaggaagctctccctgaccccctaactt

SEQ ID NO: 14758 - DNA, 435 bp, Homo sapiens
agacagagtcttgctgtgttgcccaggccggtctcaaattccagggctcaagtgatcctcctgcctccggttcccaagtagctggaactacaggttcacatggtgcccaacttgtcattgaattttctattctcactatttcactttacaagggtaatttttcctaagccatcactatgagcattgtatcacttaacttaatggctttcactttctggaaaaaaatgtattttatatgctttgatatgatttttccatagtgataatatcatggcacaatagtctcagtaaaatctaagtagttaatacaaagaactatacttcaagccaggcatctgtaatcccagcacttttggagaccaaggtaggaggatggccagaggccaggagttcaagaaacctgggcaacatagtacgaccccatctctaggaaaa

SEQ ID NO: 14759 - DNA, 539 bp, Homo sapiens
ggcataaaaagaatgatagtaagtagcataaaatatgaaaaagccatcttttcttgaccttttggctaagatcaagtagagtaaaatatgaaatatctagctgccaaagatgaagacttttagaacaaaatctcaaatctcattttttatttcatcatgcataccaacaaagtagatatttttgcatgaaaagcttattattctattccttttagatctcctatttttctaactatattttttgaaactgcatataattaaaactgctttataagttctgatgtgtcaatgttcagaggctggttgccctcaaggattcacccaaagataaaaagagaattcagcctggcacagtggctcatgcctgtaatcccagcactttgggaggccaaggtgcttgaggccaggatcacttgagtcccggagtttgagaccagcctggccaacatggcgaaaccctgtttctgccaaaaaacacaaattagccaggcataaagaacaaaacaaaaattagctgggcatggtggcacatgcctgta

SEQ ID NO: 14760 - DNA, 294 bp, Homo sapiens
gctgccgcctactactactaaattcgcggccgctcgaccaggcgcctgccaacatgcccagctaatttttgtatttttagtagagatggggtttcaccgtgttggtcaggctggtctcaaactcctgacctcatggtctgcccacctcagcctcccaaagtgttgggattacaggcatgagccaccatgcctggccgatgtctttcttctaacactacatctgtagagtttgaggaatacaaagcaattctccaacaccaactagttgtttaacattttaaatctcacaccacc

SEQ ID NO: 14761 - DNA, 1400 bp, Homo sapiens
agtagggttggttacagctgagcatttgccttatttgaacctggtttgaagagttggctgcctgtggttggctgaagttcagctgctgtgattggctgagactcactacttgttacaagagtaggttacatatcaagttttacatatcaagttgaaatatagttttttatgtactgggaaacctttagggtaaacttaaaatatgtaaggaggcagctttaggccacaatgaatttaacaattcctccttttggtcaacctgtcaattttgagaggatgattaattttgaggttgcccaaaactttagacattgacatcactttttatcatcataaatagagttatttggtctctaatcccattggaaaatagcagaacactggattttgtaaggtgggaacaaggaaacagtatagaaaaaaaaactgattggttaacatcagattacttttttatttttttgccactgcactccagcctcggcaacagagcaagactccatctcaaaaagaaaaaagaaataaaaataaaaagtcatgcccagctattttgggagaactgaaattacaactctatctgagaaaataaaatgacaggactccacagaatccatagataaaaacttaactgaagaggaatatggaacagactaaaggaaaaattttatcaagctgtaatctttatacttgtgcctaaggccagaacttgaaactgctgaagacagtgtttctctacaaatgcacacaggcaccccattttgatgcacagataggtgtttatttcttttaagaatagcagctttattgagataaatttcacatatgatacaattcaccaatttaaagtgtacaagtcaatggttttcagtataatcagagttgtactaccatcaccataatcaattttagaacattttcatcaccgcccaaaaaccactgtagtctctccccagtcctccactcctgggaaccattaatgtactttctgtctctatagatttgcctattttggttattttatataaatggaatcatacaacatgtggtcttttgtgaatagcttttttcacttaccataatgttttcaagattgattcattttgtagcaggtatcagtcctttttcctgtttattgccaaataattttccattgtacggatagatcatattttgtttatccatttgtcacattttggttgtctatcagttgatagatatttgtggtgcatttaatttttggccaatgtgtaaaacttattttgctctcattgaggctacatactgttacaacaatgctatttggtcaacttgactgagctggcctcataggttacaggttgttcattgttagagatgagactttagaccagactggacaacatagtgagaccctgtctcta

SEQ ID NO: 14762 - DNA, 1240 bp, Homo sapiens
ttaaaaaggcattttcaatttaacaatttaacaatttaaccctcttataagttaaaaaaaaaaaaaaagcccggcacagtggctcacgcctgtaatcccagctctttaggaggctgaggtggatggatcaggaggtcaggagttcaagaccagcctggctaacgtggtgaaacctcgtctctactaaaaatacaaaaattagctgggggtggtggtgcatacctgtaatcccagctactcaggaagctgaggcaggagaatcgcttgaacccggaggcagaggttgcagtgagccaagatcgtgccactgcactccagcctcggcaacagagcaagactccatctcaaaaagaaaaaagaaataaaaataaaaagtcatgcccagctattttgggagaactgaaattacaactctatctgagaaaataaaatgacaggactccacagaatccatagataaaaacttaactgaagaggaatatggaacagactaaaggaaaaattttatcaagctgtaatctttatacttgtgcctaaggccagaacttgaaactgctgaagacagtgtttctctacaaatgcacacaggcaccccattttgatgcacagataggtgtttatttcttttaagaatagcagctttattgagataaatttcacatatgatacaattcaccaatttaaagtgtacaagtcaatggttttcagtataatcagagttgtactaccatcaccataatcaattttagaacattttcatcaccgcccaaaaaccactgtagtctctccccagtcctccactcctgggaaccattaatgtactttctgtctctatagatttgcctattttggttattttatataaatggaatcatacaacatgtggtcttttgtgaatagcttttttcacttaccataatgttttcaagattgattcattttgtagcaggtatcagtcctttttcctgtttattgccaaataattttccattgtacggatagatcatattttgtttatccatttgtcacattttggttgtctatcagttgatagatatttgtggtgcatttaatttttggccaatgtgtaaaacttattttgctctcattgaggctacatactgttacaacaatgctatttggtcaacttgactgagctggcctcataggttacaggttgttcattgttagagatgagactttagaccagactggacaacatagtgagaccctgtctcta

SEQ ID NO: 14763 - DNA, 438 bp, Homo sapiens
agaaggtgtaagtatatgattttcaaattgaaggtcagaattttttgctccatttataattagaagaatctttgcaagccctactattgggcagacagtaggttgtcagtaaggccttgctggaggaaaaagctgaaactgtatcatcctcattgttgctgtgaataatccattgcagatcaacctgaaacatctttcaccactgtttcttgggccccacctcctgtttgtgacagcagagagtgtgggtcctcattcatcagaaacaatttgatcaagtatccctgaatccattgtctttatacgtcagatatgtttttttttcaagaaccctacttgtaactctgactaaaattattattagcaagcgaaaatgaaaagatttctcaaatccccgtccattatcatcattaattaaacatcacttcaggcgtgttg

SEQ ID NO: 14764 - DNA, 338 bp, Homo sapiens
aatcagtctagtactttcactgcagtattccctgttcttattcagattctcaaactactgacctcaaacccatttttacatatttcataattttcctcatcttcctttacctccattcttaccaaacttaaattccatgatccattattgcgagtattctcttgggaatattgccaatttctttttacttttctccctgaatcatgtttattgggaaaaactttacttcgaaatgaacccaactacctatcttttctataactgcattagagcagctaaagtagatggagaaaattttaaatgctggtaggtagctggtagcataagccttcatcatt

SEQ ID NO: 14765 - DNA, 370 bp, Homo sapiens
gcaaaggctagattagaagatctttatgtctgtgtagctctaaaaatactaaagcttggtcctaaaatttaaccacataattttgtttcaaatgacacaaagcactagaacagttcattgaaaagattacaactgagttcttctgactgcaagaagacataatgagtcttcataatgagcaagaagacagagtcccatctaccacgcctccccctgagttcctatagtggccccaaagtactgtatttctagcagaacccttggcttcatggatcagtgggaccaaggttctgctataaatacagattagtggctctctcacttgagagccactaataaaggtttattattgttgttgccttgaatttat

SEQ ID NO: 14766 - DNA, 1160 bp, Homo sapiens
atggtcagttgtgcccatgcgagataatttttttgtgcttgtagctaattccagtaaagaagtagatgttttagagggtaacgttaaaggggtcagctgcaaagagtccttttcctcctcctcactgttacaaaaggtgacttgtggttcttccctaattgagagcaatggcaacgccataggtgattactcattttgtaaaactctaattacaagtaggttgcttctgtgttcaacataaaaattagaagtgacttgcaaagatgagatactgcagggaggcttacaatcttgttttcagtgttagtgtttcagtacctggaacaaaatgtgatttacagccatcctttctaagaaaattgtcatcattaccaacatattgctactgataccagtccttaatgtgcttcataaaaaactcaataatttcataacccgttaaaaccggaaagaaatggagggaagaaaaataagacacttttagcgtagtcataatcttctctgccatattgtgttagaatcgatgatacccaaatgagaagatgtctgttctctgtcactgattccagtagaataaaattattgtttaaaagtaagcacatccgctgcactccagcctgggcaacagagtgggaccctgtctcaaaaaaataaaaataaaagtgagcacacgattgcaagatctatctggttttgggggcttattgtcatctttggttgttaaaaaaatacttggatattattggttattggtctagtggaataagccattaccgatttgagtacaacagtggtgtatttagatacttgctcctaattttctgttcttcaagaagggattgtacttcagaaaccagagatatcagggtagttttgattgagccataaattctaaattctgattgaaatgggtattgtaataaatggcataatcttttatttaatctagccaattgtgcctgtccagaggaactggacatttcttccttatgttcatttattcagcaactattcgttgtacccctgctgatggctaggctctttgctactgtggaaggcatcgttggggcagagcagacagcattttacctcctgggagactggcagatttttgaagcctttgttgcagatatagattttcacggtcaccactcttgccc

SEQ ID NO: 14767 - DNA, 418 bp, Homo sapiens
tattacatgttagattcttggatgctttcctattgtaaaatgtgaatgaggtcttttatctaggggaaagataatagcaaatgaaatttctgtttatgatattataggtagcctcaagtgcagtggctcatgcctataatgccagcatgttggcaggccgaggcaggtggattgcttgagctcaggagttcaagaccagcttgggtaacatgacaaaaccctggctgtacaaagaatacaaaaattagctgagcgtgatggcatgtgcttgttgtcccagccactttggagacttaggccagaggatctcttgagccttgtacattgaggctcagtgagtcgtgatcatgctattgcactccagcctgggtgacagagcgagaccctgtctcaaaaaccaacaaacaaaaaacaaaaa

SEQ ID NO: 14768 - DNA, 443 bp, Homo sapiens
ttccacttacatttttcgtagtaaatttagtcttgttaatattgcattaaaatgaacctttgaaggcaaagatgagcacataaagcagccctaatcttgtccagtttgctttctattttctccccatgggtagaagttcacctgcatggccctggcatttctattttgtgattagaaaatcacaccagccatacatgatgtttcacttctgtaatccccgcactttgagaggccaaggcgagagaatcacttgaggccaggagtttgagaccagcctgggcaacatagtaagacctcatctctatgaaaagttttttaaaaaattggctggatgttgtggtacacacctgtaatcccagttcttcaggggcctgaggtgggaggatcacttgagtccaggagtttgaggctgcagtgagcagtcatgccactgcactccagtc

SEQ ID NO: 14769 - DNA, 600 bp, Homo sapiens
  misc_feature (594)..(597): n is a, c, g, or t
  misc_feature (599)..(600): n is a, c, g, or t
gaagaatctttcttagtccagaacaaaatggagtctcctatgtctacttctttctagacagacacagtgacgatctgatctctctttcttttccccacatttcccccttttcttttcaacaaaaccacccacgaatggttatcttacgactgttacgttacattgtccgcctggtgtggagaatgcattgacaggttctttgcggagccgagataccatgcagacattttgcttgttcaaaccaacaagacccagcaccgcggtctcctggtgccattattatgcagccagcggttctcttgtggagggggcaggtgacgtttcagaagacaccgagctggatgggactacctttctgttcatcaccacacagcagaatttctaatggaagtttgttgtgaatgtaaaggagggagcattctttgctttttaatatacaaaccatggttttttggagcaggattttgtgtaagaatggtgtttacatgcagtgtgttttccccctcaccttcaataaggtttttcaaaaaggaaatggaaactttttaaccaatttgtgaataacttttgtattaaaattttaagaacctaaannnnann

SEQ ID NO: 14770 - DNA, 907 bp, Homo sapiens
tggggatggccctgcgggtccgggcgcggcgcaagtcctgctttgtctccaggtgactggctgtccaggacggcgggagctgctaaggcttgtgtccggaaggagcacagggatgggcagggtggccgggccagccggccctcaaatcctccgacgaagcggcagccgccacgaccacggccagagcagcgctcggaggcgagtttgtcaacaatcgcctcgcctttggcggcctgacccgtaggcgccgcccccaccgcggctgccgattggctgcggcgcggagcgaccgcgcgcggaccaattgggaacgcgggcacccggcgccagcggcgcggggaggtcggcggtgccggcggcggcgggcgcagagcgcgaggggaggagcgggaggaggcggaggatgttcccggcggctgcggccggggcagcgcgggccagaggcgcggcgtgcggagccctcggctgcccggcggagcgcggcggcgggctggcgggaaggcgcgggctttgcgctgcgccggggactctgaacccgagtcccgggctttgtctcctgcgctgctttcgtggtgacggtcagggggcgcccggtcggcgaagggcgcgggccggacgccgcggggcttggtccctggcccggacgctgcgctctgaagggaaggcgcggacgtgagtttcggtgtgattgccttctgaggggagggtctgtgggatgaaggcggcgcggcgcgcaccggtgtcgcctagcctgcggacctagttgtagaccttgcaggcgttcgcttcgtcgccctccgcccgtgctccctccctcccgctcccgtaccgcacgccgcaccgaatcagacagaacttctctgaggtgcacaccgtgaggtgcacatctctaaatggggagggggcg

SEQ ID NO: 14771 - DNA, 404 bp, Homo sapiens
gatatatacttggaagtggaattgctggatcatatggtaattctatttttaattttttggggaaccatcatgctgttctccatagaggctgtgccattttacattcccaccaacagggcacaagggttccagtttctccacatacttaccaacacttttttttttttttttttaacagtagtcatcctagaggatataggtgatctttcactgtgctttggatttatatttactggcttagatttgtatggccaccaccatagtcaagatacagaacaactcaaccacaaggatttctcatgatacctttttatagccacagccacctctctccctcttccttgagcattttgtcatatggtcattggtgattaaataaaatgtattttaatattgacaaaaaa

SEQ ID NO: 14772 - DNA, 1125 bp, Homo sapiens
tggggatggccctgcgggtccgggcgcggcgcaagtcctgctttgtctccaggtgactggctgtccaggacggcgggagctgctaaggcttgtgtccggaaggagcacagggatgggcagggtggccgggccagccggccctcaaatcctccgacgaagcggcagccgccacgaccacggccagagcagcgctcggaggcgagtttgtcaacaatcgcctcgcctttggcggcctgacccgtaggcgccgcccccaccgcggctgccgattggctgcggcgcggagcgaccgcgcgcggaccaattgggaacgcgggcacccggcgccagcggcgcggggaggtcggcggtgccggcggcggcgggcgcagagcgcgaggggaggagcgggaggaggcggaggatgttcccggcggctgcggccggggcagcgcgggccagaggcgcggcgtgcggagccctcggctgcccggcggagcgcggcggcgggctggcgggaaggcgcgggctttgcgctgcgccggggactctgaacccgagtcccgggctttgtctcctgcgctgctttcgtggtgacggtcagggggcgcccggtcggcgaagggcgcgggccggacgccgcggggcttggtccctggcccggacgctgcgctctgaagggaaggcgcggacaaaaaaagaccaaatggcaaagcaaccttctgatgtaagttctgagtgtgaccgagaaggtagacaattgcagcctgcggagaggcctccccagctcagacctggggcccctacctccctacagacagagccacaagacaggagcccagcacccatgagttgtgacaaatcaacacaaaccccaagtcctccttgccaggccttcaaccactatctcagtgcaatggtagtcatcctagaggatataggtgatctttcactgtgctttggatttatatttactggcttagatttgtatggccaccaccatagtcaagatacagaacaactcaaccacaaggatttctcatgatacctttttatagccacagccacctctctccctcttccttgagcattttgtcatatggtcattggtgattaaataaaatgtattttaatattgacaaaaaa

SEQ ID NO: 14773 - DNA, 1099 bp, Homo sapiens
  misc_feature (1093)..(1096): n is a, c, g, or t
  misc_feature (1098)..(1099): n is a, c, g, or t
gccgcctggtctgcagtttgttggagctctgcgtccagcgccgctgccgctgccgccgccgccgccgccgccgccgccgccgccgccgccgccactaccaccacttgattcttgcagccaccctgcgaaccctgccacactgcgatcgcatcatcgcggtattcggttcgctgcgttcccgccgccaccgcctcggcgccctttcttggcccttgttcccccaaatgtctgactctgactctcggactgagaaacgcaagaaaaaaagaccaaatggcaaagcaaccttctgatgtaagttctgagtgtgaccgagaaggtagacaattgcagcctgcggagaggcctccccagctcagacctggggcccctacctccctacagacagagccacaagacaggagcccagcacccatgagttgtgacaaatcaacacaaaccccaagtcctccttgccaggccttcaaccactatctcagtgcaatggcttccatgaggcaggctgaacctgcagatatgcgcccagagatatggatcgcccaagagttgcggcgtatcggagacgagtttaacgcttactatgcaaggagggtatttttgaataattaccaagcagccgaagaccacccacgaatggttatcttacgactgttacgttacattgtccgcctggtgtggagaatgcattgacaggttctttgcggagccgagataccatgcagacattttgcttgttcaaaccaacaagacccagcaccgcggtctcctggtgccattattatgcagccagcggttctcttgtggagggggcaggtgacgtttcagaagacaccgagctggatgggactacctttctgttcatcaccacacagcagaatttctaatggaagtttgttgtgaatgtaaaggagggagcattctttgctttttaatatacaaaccatggttttttggagcaggattttgtgtaagaatggtgtttacatgcagtgtgttttccccctcaccttcaataaggtttttcaaaaaggaaatggaaactttttaaccaatttgtgaataacttttgtattaaaattttaagaacctaaannnnann

SEQ ID NO: 14774 - DNA, 1279 bp, Homo sapiens
  misc_feature (1273)..(1276): n is a, c, g, or t
  misc_feature (1278)..(1279): n is a, c, g, or t
gccgcctggtctgcagtttgttggagctctgcgtccagcgccgctgccgctgccgccgccgccgccgccgccgccgccgccgccgccgccgccactaccaccacttgattcttgcagccaccctgcgaaccctgccacactgcgatcgcatcatcgcggtattcggttcgctgcgttcccgccgccaccgcctcggcgccctttcttggcccttgttcccccaaatgtctgactctgactctcggactgagaaacgcaagaaaaaaagaccaaatggcaaagcaaccttctgatgtaagttctgagtgtgaccgagaaggtagacaattgcagcctgcggagaggcctccccagctcagacctggggcccctacctccctacagacagagccacaaggtaatcctgaaggcaatcacggaggtgaaggggacagctgcccccacggcagccctcagggcccgctggccccacctgccagccctggcccttttgctaccagatccccgcttttcatctttatgagaagatcctccctgctgtctcgatcctccagtgggtatttctcttttgacacagacaggagcccagcacccatgagttgtgacaaatcaacacaaaccccaagtcctccttgccaggccttcaaccactatctcagtgcaatggcttccatgaggcaggctgaacctgcagatatgcgcccagagatatggatcgcccaagagttgcggcgtatcggagacgagtttaacgcttactatgcaaggagggtatttttgaataattaccaagcagccgaagaccacccacgaatggttatcttacgactgttacgttacattgtccgcctggtgtggagaatgcattgacaggttctttgcggagccgagataccatgcagacattttgcttgttcaaaccaacaagacccagcaccgcggtctcctggtgccattattatgcagccagcggttctcttgtggagggggcaggtgacgtttcagaagacaccgagctggatgggactacctttctgttcatcaccacacagcagaatttctaatggaagtttgttgtgaatgtaaaggagggagcattctttgctttttaatatacaaaccatggttttttggagcaggattttgtgtaagaatggtgtttacatgcagtgtgttttccccctcaccttcaataaggtttttcaaaaaggaaatggaaactttttaaccaatttgtgaataacttttgtattaaaattttaagaacctaaannnnann

SEQ ID NO: 14775 - DNA, 943 bp, Homo sapiens
gccgcctggtctgcagtttgttggagctctgcgtccagcgccgctgccgctgccgccgccgccgccgccgccgccgccgccgccgccgccgccactaccaccacttgattcttgcagccaccctgcgaaccctgccacactgcgatcgcatcatcgcggtattcggttcgctgcgttcccgccgccaccgcctcggcgccctttcttggcccttgttcccccaaatgtctgactctgactctcggactgagaaacgcaagaaaaaaagaccaaatggcaaagcaaccttctgatgtaagttctgagtgtgaccgagaaggtagacaattgcagcctgcggagaggcctccccagctcagacctggggcccctacctccctacagacagagccacaagacaggagcccagcacccatgagttgtgacaaatcaacacaaaccccaagtcctccttgccaggccttcaaccactatctcagtgcaatggatgactccgctggatcctccctcagaattgcccttcatagggaagttcagtggccactcaagtggttagcaaaatcaagctaactgggactagaaacagctccatcacccagtaaagagaaagaaaacatggatctgcctaggaagtcacctctgcctgagtctgctacttgcaggattggagcttttgctgcagattacagctttgaagtcactttacctcaagagcagtttatattttattgtgctttaaaaaaaaaatttagtgccaggtttatggagtgaagtgctttcataaatgctgaaactacattttctgtgggtaaaaatgcagctcatcagaatttcccctttgaagaattttttatgttcacataaaattgccaagttaaaaatttgatctccctacagagtaagagctttcatttcaaataaaaccattttatagaccaggtat

SEQ ID NO: 14776 - DNA, 1363 bp, Homo sapiens
aaacaggaaataaatacgaatgaaactgagctctaagcagcatgtaacctggcctgcatccaggaaatagaggacttcggatccttctaaccctaccacccaactggccccagtacattcattctctcaggaaaaaaaacaaggtccccacagcaaagaaaaggaataggatcaagagatacgtggctgctggcagagcaagcatgaattcgatgacttcagcagttccggtggccaattctgtgttggtggtggcaccccacaatggttatcctgtgaccccaggaattatgtctcacgtgcccctgtatccaaacagccagccgcaagtccacctagttcctgggaacccacctagtttggtgtcgaatgtgaatgggcagcctgtgcagaaagctctgaaagaaggcaaaaccttgggggccatccagatcatcattggcctggctcacatcggcctcggctccatcatggcgacggttctcgtaggggaatacctgtctatttcattctacggaggctttcccttctggggaggcttgtggtttatcatttcaggatctctctccgtggcagcagaaaatcagccatattcttattgcctgctgtctggcagtttgggcttgaacatcgtcagtgcaatctgctctgcagttggagtcatactcttcatcacagatctaagtattccccacccatatgcctaccccgactattatccttacgcctggggtgtgaaccctggaatggcgatttctggcgtgctgctggtcttctgcctcctggagtttggcatcgcatgcgcatcttcccactttggctgccagttggtctgctgtcaatcaagcaatgtgagtgtcatctatccaaacatctatgcagcaaacccagtgatcaccccagaaccggtgacctcaccaccaagttattccagtgagatccaagcaaataagtaaggctacagattctggaagcatctttcactgggaccaaaagaagtcctcctccctttctgggcttccataacccaggtcgttcctgttctgacagctgaggaaacgtctctcccactgtttgtactctcaccttcattcttcaattcagtctaggaaaccatgctgtttctctatcaagaagaagacagagattttaaacagatgttaaccaagagggactccctagggcacatgcatcagcacatatgtgggcatccagcctctggggccttggcacacacacattcgtgtgctctgctgcatgtgagcttgtgggttagaggaacaaatatctagacattcaatcttcactctttcaattgtgcattcatttaataaatagatactgagcattcaaaaaaaaaaag

SEQ ID NO: 14777 - DNA, 860 bp, Homo sapiens
aaacaggaaataaatacgaatgaaactgagctctaagcagcatgtaacctggcctgcatccaggaaatagaggacttcggatccttctaaccctaccacccaactggccccagtacattcattctctcaggaaaaaaaacaaggtccccacagcaaagaaaaggaataggatcaagagatacgtggctgctggcagagcaagcatgaattcgatgacttcagcagttccggtggccaattctgtgttggtggtggcaccccacaatggttatcctgtgaccccaggaattatgtctcacgtgcccctgtatccaaacagccagccgcaagtccacctagttcctgggaacccacctagtttggtgtcgaatgtgaatgggcagcctgtgcagaaagctctgaaagaaggcaaaaccttgggggccatccagatcatcattggcctggctcacatcggcctcggctccatcatggcgacggttctcgtaggggaatacctgtctatttcattctacggaggctttcccttctggggaggcttgtggtttatcatttcaggatctctctccgtggcagcagaaaatcagccatattcttattgcctgctgtctggcagtttgggcttgaacatcgtcagtgcaatctgctctgcagttggagtcatactcttcatcacagatctaagtattccccacccatatgcctaccccgactattatccttacgcctggggtgtgattgtgcctctcaggatgcatttcttagccgcttctaccaagcagatgtttaataaccacttgctaaatggagaggaaggagaagaaaaggggctaaggagaggcctctccagaagagagaat

SEQ ID NO: 14778 - DNA, 1304 bp, Homo sapiens
aaacaggaaataaatacgaatgaaactgagctctaagcagcatgtaacctggcctgcatccaggaaatagaggacttcggatccttctaaccctaccacccaactggccccagtacattcattctctcaggaaaaaaaacaagcatgaattcgatgacttcagcagttccggtggccaattctgtgttggtggtggcaccccacaatggttatcctgtgaccccaggaattatgtctcacgtgcccctgtatccaaacagccagccgcaagtccacctagttcctgggaacccacctagtttggtgtcgaatgtgaatgggcagcctgtgcagaaagctctgaaagaaggcaaaaccttgggggccatccagatcatcattggcctggctcacatcggcctcggctccatcatggcgacggttctcgtaggggaatacctgtctatttcattctacggaggctttcccttctggggaggcttgtggtttatcatttcaggatctctctccgtggcagcagaaaatcagccatattcttattgcctgctgtctggcagtttgggcttgaacatcgtcagtgcaatctgctctgcagttggagtcatactcttcatcacagatctaagtattccccacccatatgcctaccccgactattatccttacgcctggggtgtgaaccctggaatggcgatttctggcgtgctgctggtcttctgcctcctggagtttggcatcgcatgcgcatcttcccactttggctgccagttggtctgctgtcaatcaagcaatgtgagtgtcatctatccaaacatctatgcagcaaacccagtgatcaccccagaaccggtgacctcaccaccaagttattccagtgagatccaagcaaataagtaaggctacagattctggaagcatctttcactgggaccaaaagaagtcctcctccctttctgggcttccataacccaggtcgttcctgttctgacagctgaggaaacgtctctcccactgtttgtactctcaccttcattcttcaattcagtctaggaaaccatgctgtttctctatcaagaagaagacagagattttaaacagatgttaaccaagagggactccctagggcacatgcatcagcacatatgtgggcatccagcctctggggccttggcacacacacattcgtgtgctctgctgcatgtgagcttgtgggttagaggaacaaatatctagacattcaatcttcactctttcaattgtgcattcatttaataaatagatactgagcattcaaaaaaaaaaag

SEQ ID NO: 14779 - DNA, 341 bp, Homo sapiens
ctaatcagttcaatcccagactagaactatttttaaataattttatataaatcacgtgaagtcacatggctttaggtgacccgcccctactctaactggttgccaaatacaaaaattacttctctctgaaggcagataacattacccagaacctctgtaatttttcataaataatcatggcatctgatcaaaaattatgatgctagaaaggaagatcaagtgactacaaattaagagaaaaaatagattacagaatgacacccataggcaacccaaatattgaaattatcagatatgtaattcaggataactctgattggtatgttaagaaaataggtgac

SEQ ID NO: 14780 - DNA, 355 bp, Homo sapiens
catcacacattaaccaggcccccttctagaaccacagtacaaaagcctggatacatgcaacacattccactttgccattagacagtaaactatggggcggaaaggaaaaagttcgacaaaacgcacaaacaaagcaagcaaggaaggaagggatttattgaaaatgaaagtacactccacagtgtgggagcgggcccaagcataggggcttaagggctccattactgattttttgggagtttaaataccctccagaggattctattggttacctggggtacaccctatgtaaatgaggaggatgaagtaaagttacaaagtcatttacttggcctacatcctgtagagaggatat

SEQ ID NO: 14781 - DNA, 226 bp, Homo sapiens
gctggaaaaggtgaggaagcaaatgctcctctgcaacttccagaaggaatgcagccctgctgatgccttgatcttagatttcagactccagaactgcaggagaatagatttgtgttgtttgaagcctctaagtctgtggtaatttattacagcagcagcaggaaattcatacaaaggtattcgggggaaaaatgttccagacagtgctggtgaattcaggtgggct

SEQ ID NO: 14782 - DNA, 279 bp, Homo sapiens
tgagaatttaagtctttattaaaggttttttaaaaatcaaatgtatttatatatactgacaatgaacaatgggaaaccaaaatttaaaatacagaactaccaaaaacatgaaatatgtataaatttatcaaaatacatacaagatctgtatgctaaaaagtagaaacaccaataaaaaaataaataaatggagagatataccattattcatggactgaaacaatactgtgaagatgtcaaatcactcaaaatttataatcccagttaaaatctcagtag

SEQ ID NO: 14783 - DNA, 414 bp, Homo sapiens
ccttttggaggacttcctgctagttaagcatctggggacttagctccccatgccctatttcttctcaagggcctcagaaatcaaatccactctcctggtctttttaaagctgtcatcatctactgctctcttaggggtcctgtttccccaagaatgactgaaaaggacacaagctctctggtttctcgcttagtatcttctttcctgttcaacacccccccaaaaaaattacatcagcccttaatatttcaaaagttttatttctaatcactaccagcaaacagatgagataacaaatacaacagtttttgcaattgacaaagtttcctgagatttttctgaatgattatctcctgaaacaaaagaaaatactcaattgtgaactctacttatctttgctctcatcccaccccc

SEQ ID NO: 14784 - DNA, 791 bp, Homo sapiens
agagaaggtgtatttcactggtgcaatggcttggcacctccggggcctgggaggacctcagacctccccagccctgggtttctccgtcttcaagaccaactaggaagggtcaagcggggagagggagtggagggtcaggtgagatctcagagctgccccggccggcccccgtctctttctacctcctcttccagagaaccagcggctcacacccttctcaacgcaggacatcctcggcggctcctggggtttgaagagcaaacgtttttccctgggctcagtgcgttttgtcccaacttcatctgtttctgaaatgttctcacttggcagtgtctagtcaaggagtcggctttcaggttcctgacggccaggcagggatgctaaggtgtggctcagccgtcactgtctgtgtcactgcagtggtgcggtcctcaggcttttctgcctgtctttcccccttccttctcacctgacagcgagggagagggaagcctcttagggctggaagccaccacgctggccctctccttccccgaacacagcacacggtcaactccgcgggacacgaggacacgggacggcgtctccagaattgcttgttacgtaggaagcgtgcattgttaaccagagtatttttaaaatctttttatctttttttaaactatgtcacatgaaatgaatgcgtctttgctgtctccaggtgcctttttattaattgttcagctttgtacatgggaaagatgaaaagcaacagtgtctgcaaataaagcaaaacagctctgagaacacac

SEQ ID NO: 14785 - DNA, 306 bp, Homo sapiens
gccgtcaggaacctgaaagccgactccttgactagacactgccaagtgagaacatttcacacggtcaactccgcgggacacgaggacacgggacggcgtctccagaattgcttgttacgtaggaagcgtgcattgttaaccagagtatttttaaaatctttttatctttttttaaactatgtcacatgaaatgaatgcgtctttgctgtctccaggtgcctttttattaattgttcagctttgtacatgggaaagatgaaaagcaacagtgtctgcaaataaagcaaaacagctctgagaacacac

SEQ ID NO: 14786 - DNA, 565 bp, Homo sapiens
cagttgctctagaaaatactaaagcaaggccgggcccaatggctcatgcctgtaatccccatattttgggaggccaagccgtgaagattgcttggacccagaagttcaagaccagtctgggcaacatggcaagacctcatccctacaaaaaatcaaaatgaaaataaattagctgcgtatggtggcatgcgctttatagtcccagctacttgggaggctgcagtgagaggatcccttgaagcccattagtttgaggcttcagtgagccatatttgagccactgtactccagcctaggtgtgacagcgagatcgtgtctcaaaaaaaaagaaaaaatattaaagcatttcttgataacatgtttcttaccaggaagtcaggcagaactatatattataagtagttgaatctgttgcaacaccatctttttgatactctttacttttggtcccaaggagaaatgaaaaggtatgaggcacatgtgttttacttaaaatctcttactacccattctaatacacatttttcatggcttccttccctgtagagactgcagcactgtttta

SEQ ID NO: 14787 - DNA, 419 bp, Homo sapiens
tgcactggggtctctggacatgcgcacttgttgtcttcctcccagataccaacaagccctctcccggcacctgcagaaaaagtggggaaaatccccgaagaggcagaaacaaaacctagtgagctgaaggatgaggctgctgaagagcctgagctcacttgttgtggcctttgtacttatgctggaaatccctaaagattcatccggaagggccgccagccagtggatttcccgggcccctcagccctctggagtgtacgagttttggagaaacctcttcctctgtatatgcttttgactttcctggactgatgtaaaaatactcttttctttgacctgtttatttttaagacacgacgtgattgtgtcagcttatattttattgctgaagtaaattttcaaatgttttattagttatt

SEQ ID NO: 14788 - DNA, 1830 bp, Homo sapiens
ccccagcgcccactggggatggcaaagacgacatccggtgcgccgaggctgctcacaaaatcactcacctgtggcgcccttggccgctcagtcaaggctctgaatatcctgagactgccccactgcttggaagccccggacaccagagagtttcctgtaggtcctccagccgagcccgatgaccccggcaggcccgggagtgatgtccccctctggatgatcccaaccccttgctgtggattcagccccagccgttgttgtgtcttttggggaccttgtcagttgccttccaagtgctaattctcatgacgagataagaatggctatgactgggtgttgattgatgagtcgaacacattgaatcctggagtttgaggttatcagaactccccacttagaaaatcatcctttatattttagaaaatcatcattgtatgttgaacatacaatgcttcttttttcttcatctccagtgcactggtctagagagcggcagttggaccccagagtgtggcacgtgttcctgtgttcatttgaacattctctgatgacctgtcgctgaggtcctgtgatgatgcgtatcctgtcttccaccccaactgccactgtgtttcaactgtcgctggctgtgtttcaactgccgctgtgttggaactgccagctagactgctcaccaaaatgggaggcagcctctgctgctgtggtgaaggtgaaggcttcttctaccgccagaattggcggtttctctcgctggattcttgggacctgatccaggcagcacactcgacacactcagcgattcagctctacagtatgcactctgggatctcccatttgctaaggaaggatcttagctttgagaaaggtgtcaagcctgtggcagcagagcttcctggggagtcctcagagcaagtcattgccattgtcgaagtgtcttctaggctttattttggggccattacctcgagcactgtttcttgtctggtttcctaatgtcagcaactgaagaaaagacctgtatacacaggacacagcatggtctgacgctcacagtgttttcctttctctctgcagagggattcagcactttgggcaagtggttgcacagaggatcccgtggaagaattcatatatgaatcagatgagaatgccccaggaccatcgtaggtcaggccacctgcttttgtcaaagaaaaaagataacccctatttgaattaaaatatgagaatctgaccatatgtatcataggtgacttacacagtgtccttggtaaggagaatttagagtgagagtctgttccccactgaggtttgatttaagatggcagaagaaaatgacatcatcagccactcagcagcttgattctctccttggggcaaaatcacttaattgccaagcaacatggacttacaggaaacatcctccaataaaaacttaggtttttagcatgattcgataccaacaagccctctcccggcacctgcagaaaaagtggggaaaatccccgaagaggcagaaacaaaacctagtgagctgaaggatgaggctgctgaagagcctgagctcacttgttgtggcctttgtacttatgctggaaatccctaaagattcatccggaagggccgccagccagtggatttcccgggcccctcagccctctggagtgtacgagttttggagaaacctcttcctctgtatatgcttttgactttcctggactgatgtaaaaatactcttttctttgacctgtttatttttaagacacgacgtgattgtgtcagcttatattttattgctgaagtaaattttcaaatgttttattagttatt

SEQ ID NO: 14789 - DNA, 1637 bp, Homo sapiens
ccccagcgcccactggggatggcaaagacgacatccggtgcgccgaggctgctcacaaaatcactcacctgtggcgcccttggccgctcagtcaaggctctgaatatcctgagactgccccactgcttggaagccccggacaccagagagtttcctgtaggtcctccagccgagcccgatgaccccggcaggcccgggagtgatgtccccctctggatgatcccaaccccttgctgtggattcagccccagccgttgttgtgtcttttggggaccttgtcagttgccttccaagtgctaattctcatgacgagataagaatggctatgactgggtgttgattgatgagtcgaacacattgaatcctggagtttgaggttatcagaactccccacttagaaaatcatcctttatattttagaaaatcatcattgtatgttgaacatacaatgcttcttttttcttcatctccagtgcactggtctagagagcggcagttggaccccagagtgtggcacgtgttcctgtgttcatttgaacattctctgatgacctgtcgctgaggtcctgtgatgatgcgtatcctgtcttccaccccaactgccactgtgtttcaactgtcgctggctgtgtttcaactgccgctgtgttggaactgccagctagactgctcaccaaaatgggaggcagcctctgctgctgtggtgaaggtgaaggcttcttctaccgccagaattggcggtttctctcgctggattcttgggacctgatccaggcagcacactcgacacactcagcgattcagctctacagtatgcactctgggatctcccatttgctaaggaaggatcttagctttgagaaagtggcaagagatcccctcttgaggagactccgcaggaacaccagagatgatagtgacacacaacaactgaaggcagaggtacaggctgaggagaaaggtgtcaagcctgtggcagcagagcttcctggggagtcctcagagcaagtcattgccattgtcgaagtgtcttctaggctttattttggggccattacctcgagcactgtttcttgtctggtttcctaatgtcagcaactgaagaaaagacctgtatacacaggacacagcatggtctgacgctcacagtgttttcctttctctctgcagagggattcagcactttgggcaagtggttgcacagaggatcccgtggaagaattcatatatgaatcagatgagaatgccccaggaccatcgtagataccaacaagccctctcccggcacctgcagaaaaagtggggaaaatccccgaagaggcagaaacaaaacctagtgagctgaaggatgaggctgctgaagagcctgagctcacttgttgtggcctttgtacttatgctggaaatccctaaagattcatccggaagggccgccagccagtggatttcccgggcccctcagccctctggagtgtacgagttttggagaaacctcttcctctgtatatgcttttgactttcctggactgatgtaaaaatactcttttctttgacctgtttatttttaagacacgacgtgattgtgtcagcttatattttattgctgaagtaaattttcaaatgttttattagttatt

SEQ ID NO: 14790 - DNA, 711 bp, Homo sapiens
aagcgattctcctgcctcagcctcccgagtagctgggactggaggcacgtgccaccatgctcagctaattttttgtatttttagtagagatgggtttcaccgtgttagccaggatggtctccatctcctgacctcatgatctgcacacttcagcctcccaaagtgctgggattacaggtatgagctaccacacccggccgatttgcaaataatttctcccattatgtaggttgtcttttgattttgttaatagtggcctttggtgcacaagtttttacttttgataaggttcaatttttctgtcttttgttgtgtgttctctggtgtcacatccatgaaatctgccaaatccaatgtcatgaagcccttctcttttttcttctaagggtttttagttttagctcttatttgtatgtttttgatccatttttgagactatttttgtataatagtaaaggtccaacttcattcttttgtgtaattcatttttaataggatagtagtgtaccatatacgctgagattcgttatctggcttttttcactcaataatgtgtctcagccccagtgtttttttttcatcctgtcctccagtagcctgttgagtggtgtgagtcaatatgtaggaaagcttttgaacatggctcccttcactaacagttaaaattaaaagaaaatcaagtaggattgttaaaccgaggaatgaaaagtg

SEQ ID NO: 14791 - DNA, 418 bp, Homo sapiens
gagtctcctatgtctgtctactttctacacagacacagtaacaatctgatctctcttgcttttccccacactgggcgtcctgtctgcacagtgacccagtgatggtcccctggcctggaggcctctctgggcagctctgcagccgcagcgccttgtctctggccaattgtgcagggaccatgggagggtagtcaggggagaatcccgactcgggtgagggttcatgaatgggaagagttttggtcggtggggttcctagtccctcttttcatctattaaaaatttatggagtcaccgcaaaaagattaaagaatttaatcaaagagtggctcaaaaattgtagagtacccagctatgggttttagtttgtggttcatgggaggaacttgaaggaaagacttttataaggtccatgatt

SEQ ID NO: 14792 - DNA, 553 bp, Homo sapiens
tgcctatgctactatgtacttgcattttactacttctgaattcattaattttcttgctaaaataaatagtcgtattagcatggttctactgggggttggggaagaatgaatcataaatgccttcctttatatttactcttaagataattgtttagttcaatataaaataataaatccaaagtcttttttctttagcagtttgaaaaagttactacactgtcttctggcctccagtgttgctgatgagaagtctgagctcatgctttttttttcctttgttaattacttttattagtagttagttatgtttttgttattttactttttttttttttcttaagagatgtggtcctcaagcttggccaacatggtgaaaccccgtgtctattaaaaatataaaaattagccaggtgtggtgccacatatctgtagtcccagctactcgggaggttgaggtgggagaatcgcttgaatccgggaggcagaggttgcagtgagctgaaatcgtgacactacactctagcctgggtggacagggtgagaccctgtctca

SEQ ID NO: 14793 - DNA, 404 bp, Homo sapiens
gaaattattttttaaaatctcgtcttgctggtagacaggttttttagagacagggaccgcatcttctttaatctttgctgtatcccttgttcccagcatattgtctggcacagagtatttaatacattaagtgggtgaataaaaaagtgaatggcgccgggcgtggtgtctcacgcctgtaatcccagcactttgggaggccgaggcaggcagattacctgaggtcaggagttcaagaccagcctggccaacatggcaaaaccctgtctctactgaaaaatacaaaaattagccaggtgtggtggtgggcacctgtaatcccagctacttgggaggctgaggtaggagaattgcttgaacccgggaggcagaggttgcagtgagctgagatcccgccactgcac

SEQ ID NO: 14794 - DNA, 477 bp, Homo sapiens
taagggaaaaacgcctcaagtgagcatgtgcacagcttcagtaaacacactgcacatgcggctcctcccaagtgctggcaggccagtgcgaatgcagacagcccaccccaaaggaagaactgggagaagagatgttacccactggaagcatgccagtgtataaagccccgagtcaaaggtcaaactgtacacttgaatctttcacgttacctgcttggccctcttccaagtgtacttttttaaaattcctgctctaaaactttttaaagactttcactcctgctctaaaacttgcctcagtctctccctctgccttatgcccctcagtcaagttctttcttctgaggtggcaagaattgaggctgctgcagacctgtacagattcactgctgctaacactttcacattccactgatcaggactcagttgcatggccacagctaacttaagtgaagatggaaaatgtggtttaactgt

SEQ ID NO: 14795 - DNA, 408 bp, Homo sapiens
ctgcggaggactcctgggttcctggctgggacaccgcctgggcagggaaggcagagaagatggagaacctggtctcaggtggcatcagaacccagcatccgcatcaccaggattgcaggagcagcagcgtctcaggccctgggtgtgtcagagcccccaggccacgtggaagtatgagacgtgctgggctgcaggggaaacaatggaaatgaggttggaggcccgagaagacccactgcaggaaaagggtggagtgggggaaaagcaggctgggggcagtggctggcctgcaacaaaagcattgtagaatgcaggcgtgagccaccgcgcccggccaaggcgggcagatcatgaggtcaggagatcgcgaccatcctggctaatgcggtgaaaccccgtctcttctaa

SEQ ID NO: 14796 - DNA, 598 bp, Homo sapiens
aagccccgcctctccacaccctgtcctattctttcccccaggttgctgggagaaaaacggcaggagctgctggcccaagccaataaactgcggacaggcttgttcaagatcgacgaaactagggaaaaggtgcaagtgatgtcgttggagctggaggatgccaagaagaaggtggctgagttccagaagcagtgtgaggagtacctggtcatcattgtgcagcagaagcgggaggcagatgagcagcagaaggtccagggcccacgcccaccccccgtgccccactcccaccagtgccggctactgcgtcagggaacccatgttccccccttcttaaattttctttagtgactgggtgcagtggctcacgcctgtaatcccagcactttgggaggctgaggcaggaggatcacctgaggtcaggagttcgagaccaacttggccaacatggtgaaaccctgtctctactaaaaatacaaagattagctgggcgtggtggcgggtgcctgtaatcccagctactcgggaggctgaggcaggagaatcgcttaaaccctgggggcggaggttgcagtgaactgagattgcaccactgcac

SEQ ID NO: 14797 - DNA, 675 bp, Homo sapiens
ttcagcactgtcggcagtcccctccacgctgccccagaatagggccggatagtcatccctaggaagggactacttaaataggggacccaaccctgatgagtagaattgacatctgggtttaaatttctgtattttagggaccgtttgctaagcagagagcgaacactggcagaaaagcttaccgtccagtgccctcccttggcaagctgcccatgcctggacagaagcctaatggtgaaaatgacatctgtgaactttatttttagcccagtggtgttcatgtgcagccatatgaaaatctgcccgtgtgcctttactgtgattggtctgggatgcctagacagttcacttatcttttttctgaagaccaatctcatgctttaggttgaaaagttgggaatccagaataatatttgttcattctcacttccaactcccaccatcaccgaggcgggcaaatcacaaggtcaggagttcgagaccagcctggccaatatggtgaaaccctgtctctactaaaagtacaaaaattagctgggcgtggtagtaggcgccggtagtcccagctacttgggaggctaaagcaggagaatcgcttgaacccgggagacagaggttgcagtgaaccgaaatcgtaccactgcactcactccagcctgggtgacagagcgagac

SEQ ID NO: 14798 - DNA, 422 bp, Homo sapiens
ggtacaaagagagtctatgtctcagatggaaaaatcaagacaaagggtaactgtgatttgcacacaatcaactacaacatgaaagagcattggactcaaagctcgatgtggctatagtgacccctgctggagcctatcttttaaactaaaaacctaagtcagggcttccatgagaataactaaaattttcatagaaaaactgattttgagagctgggagaacgcttagaggacatttagcataacctccttacttcataattgatgaaacaggcctttggcccagagaggttaaatgacttgctttaggtcacacagctgggattaccagaatgtaaagatgtctcctcaattcttgggcctgtttccatcagtggagttttctgttacaactaataaaagtatctataacacacaaaatga

SEQ ID NO: 14799 - DNA, 490 bp, Homo sapiens
gcacatcttgatcaaatttggatacgtttttgccttttttttacagcctcaaactctttaggttaatgcgtagttttcaaatttcttttctcatgttcaaatagcctgtttccttcaagcaggacagtctttcccttatattttcagttccagatttcctcattggattattagaggttaaaaaaattatagacattgcaaaaagggaaaaggggaaaccaacttacgtctatactactttatcttctgatttccgaaagggaaaagaagtttgttgcaatcttctgtgtttcttattaagcctctgaattttttcactgctctgtcttatagttttagtatgcttagcctggtgtgtactagacattgcctctggcactacaccacatgcatttagtgtgggcctatataaacttagtcaagcaactgtgttagaaaaaaattttattctgtggtgaaataaatcttagaatttgaatttacaaacttg

SEQ ID NO: 14800 - DNA, 3593 bp, Homo sapiens
gggcgggcgagtcgggcgcccgctctgagagtcggtttcttttccccctcttgcgtggggcggggtggtgcgttccgagttcccaggagttcgacgcgggcgggtgccgaggggaggggagtggcggcggcggcgggcggctcccgcttcagcctccgcccagagcctgaggcgccggggccgggggagccggggggcgggcgggcgagcgggccggggggagggtgggggatggcgcggaccctgcggccgtccccgctgtgtcctggaggcggcaaagcacaactttcctccgcttctctcctcggagccgggctcctgctgcagcccccgacgccacctccgctgctgctgctgctcttcccgctgctgctcttctccaggctctgtggtgccttagctggaccaattattgtggagccacatgtcacagcagtatggggaaagaatgtttcattaaagtgtttaattgaagtaaatgaaaccataacacagatttcatgggagaagatacatggcaaaagttcacagactgttgcagttcaccatccccaatatggattctctgttcaaggagaatatcagggaagagtcttgtttaaaaattactcacttaatgatgcaacaattactctgcataacataggattctctgattctggaaaatacatctgcaaagctgttacattcccgcttggaaatgcccagtcctctacaactgtaactgtgttagttgaacccactgtgagcctgataaaagggccagattctttaattgatggaggaaatgaaacagtagcagccatttgcatcgcagccactggaaaacccgttgcacatattgactgggaaggtgatcttggtgaaatggaatccactacaacttcttttccaaatgaaacggcaacgattatcagccagtacaagctatttccaaccagatttgctagaggaaggcgaattacttgtgttgtaaaacatccagccttggaaaaggacatccgatactctttcatattagacatacagtatgctcctgaagtttcggtaacaggatatgatggaaattggtttgtaggaagaaaaggtgttaatctcaaatgtaatgctgatgcaaatccaccacccttcaaatctgtgtggagcaggttggatggacaatggcctgatggtttattggcttcagacaatactcttcattttgtccatccattgactttcaattattctggtgtttatatctgtaaagtgaccaattcccttggtcaaagaagtgaccaaaaagtcatctacatttcagatcctcctactactaccacccttcagcctacaattcagtggcatccctcaactgctgacatcgaggatctagcaacagaacctaaaaaattgcccttcccattgtcaactttggcaacaattaaggatgacacaattgccacgatcattgctagtgtagtgggtggggctctcttcatagtacttgtaagtgttttggctggaatattctgctataggagaagacggacgtttcgtggagactactttgccaagaactacattccaccatcagatatgcaaaaagaatcacaaatagatgttcttcaacaagatgagcttgattcttacccagacagtgtaaaaaaagaaaacaaaaatccagtgaacaatctaatacgtaaagactatttagaagagcctgaaaaaactcagtggaacaatgtagaaaatctcaataggtttgaaagaccaatggattattatgaagatctaaaaatgggaatgaagtttgtcagtgatgaacattatgatgaaaacgaagatgacttagtttcacatgtagatggttccgtaatttccaggagggagtggtatgtttagcaaccactgaatgtgacttaactatgtacaatgttcattcacactagttgatcattttcagattgttcatactttttcttgaggaagaataagctttttcaagttgattttcaagcttactttttatattctaatctgacaaatgaaaatgtaaaatctgagttcagtgtatctaagctgctttacaattttttttcaatgctgtactactgtctcaagatttaaattttaatgcagagtactttattggtgtgaggcacacaggtaagaagaaatgtcaacattaaatgtatgacttacttggtacaaaaattttttaaaaagggaactaccttgacattgtgtattaaatgtttacctaagactataatctcaagtatgatgtttgtttaacatatacctctcaaaatttatcaccactcaatgacactgcatcaaaattgactataaaactaattcaagaaatatttatatatattttttaatatacaaaaaatatttagcctgatggaatggctttccttttcaaacattattttctaagtttctatacaaatgaaatctttacctctgcatattaatgagccttgccataattactgtagagtggcttttcaaagatattttgttgcactaaaactgtggtagtaaactcagtgaacatgatgtgtggaagagcataattagctggtcaatatttttgtccaaaatacctgcaagagtaataaaatacatacctttcaaacatgataattattagtttttttttttcctttctggaacatggattttggtacattagcagtagccttattttaatgctttatgtcctaaacatactaatagaaatgaaaagacgcagagagagcatttcggaatactgaagtactagttttagaaatgagactttcagccaacaatctatagaaagaattttatggaccatcttgttttagttatttaatgttgatgttgttcaaatgggtaaatgtacagaaagaaaattttagagtaaacttggaactttggatataactagaaaaaactagattatagaattagtcggtaacacttgctaatggacattggcattcatctcctttttcctcctaagtgtatgtatgtgttttaagatttctgtttttacgattaaaactggaaacatgaggttttttgtttttgtttttttacataattacatatattccttctgaatcatttatcttttgagaaagaaatgttacctaaacttcaaatgtgctttttgtttgtgaggtaattaaattgcttctacagtggaggcttacaaaattattgtgacaactattttgaagctgaaaggatagtttttctattgctaagtcatttgaaaaagtgaccattttgccagtgaaatgaagtggaagttagtaggagaatcataaattaaatatattattttgttaataaaaaggcaaagtagtaggtactttttaaaccctcccaaccagccctttctcaatattcatcaaatctaaaacatttagggggcaaaattctaacatgttcatggtatcttgcaaatagtgaaagctttattctgaaggattataaactagttttcttcattttaactagcactattttgtggaaattagaaacctcttttatttctcttcccaaaagtaatacttaaggatacagataaataaagttcacttatatcttcttac

SEQ ID NO: 14801 - DNA, 4928 bp, Homo sapiens
gggcgggcgagtcgggcgcccgctctgagagtcggtttcttttccccctcttgcgtggggcggggtggtgcgttccgagttcccaggagttcgacgcgggcgggtgccgaggggaggggagtggcggcggcggcgggcggctcccgcttcagcctcggcagtggcgtcggcgacggcggtgtcgaggcagccgccagcgttcggccaagtgtcagccggcagcgacggcgctagagctgggagctggggacgcgcgcgccggaccttccacagcctccgcccagagcctgaggcgccggggccgggggagccggggggcgggcgggcgagcgggccggggggagggtgggggatggcgcggaccctgcggccgtccccgctgtgtcctggaggcggcaaagcacaactttcctccgcttctctcctcggagccgggctcctgctgcagcccccgacgccacctccgctgctgctgctgctcttcccgctgctgctcttctccaggctctgtggtgccttagctggaccaattattgtggagccacatgtcacagcagtatggggaaagaatgtttcattaaagtgtttaattgaagtaaatgaaaccataacacagatttcatgggagaagatacatggcaaaagttcacagactgttgcagttcaccatccccaatatggattctctgttcaaggagaatatcagggaagagtcttgtttaaaaattactcacttaatgatgcaacaattactctgcataacataggattctctgattctggaaaatacatctgcaaagctgttacattcccgcttggaaatgcccagtcctctacaactgtaactgtgttagttgaacccactgtgagcctgataaaagggccagattctttaattgatggaggaaatgaaacagtagcagccatttgcatcgcagccactggaaaacccgttgcacatattgactgggaaggtgatcttggtgaaatggaatccactacaacttcttttccaaatgaaacggcaacgattatcagccagtacaagctatttccaaccagatttgctagaggaaggcgaattacttgtgttgtaaaacatccagccttggaaaaggacatccgatactctttcatattagacatacagtatgctcctgaagtttcggtaacaggatatgatggaaattggtttgtaggaagaaaaggtgttaatctcaaatgtaatgctgatgcaaatccaccacccttcaaatctgtgtggagcaggttggatggacaatggcctgatggtttattggcttcagacaatactcttcattttgtccatccattgactttcaattattctggtgtttatatctgtaaagtgaccaattcccttggtcaaagaagtgaccaaaaagtcatctacatttcagatcctcctactactaccacccttcagcctacaattcagtggcatccctcaactgctgacatcgaggatctagcaacagaacctaaaaaattgcccttcccattgtcaactttggcaacaattaaggatgacacaattgccacgatcattgctagtgtagtgggtggggctctcttcatagtacttgtaagtgttttggctggaatattctgctataggagaagacggacgtttcgtggagactactttgccaagaactacattccaccatcagatatgcaaaaagaatcacaaatagatgttcttcaacaagatgagcttgattcttacccagacagtgtaaaaaaagaaaacaaaaatccagtgaacaatctaatacgtaaagactatttagaagagcctgaaaaaactcagtggaacaatgtagaaaatctcaataggtttgaaagaccaatggattattatgaagatctaaaaatgggaatgaagtttgtcagtgatgaacattatgatgaaaacgaagatgacttagtttcacatgtagatggttccgtaatttccaggagggagtggtatgtttagcaaccactgaatgtgacttaactatgtacaatgttcattcacactagttgatcattttcagattgttcatactttttcttgaggaagaataagctttttcaagttgattttcaagcttactttttatattctaatctgacaaatgaaaatgtaaaatctgagttcagtgtatctaagctgctttacaattttttttcaatgctgtactactgtctcaagatttaaattttaatgcagagtactttattggtgtgaggcacacaggtaagaagaaatgtcaacattaaatgtatgacttacttggtacaaaaattttttaaaaagggaactaccttgacattgtgtattaaatgtttacctaagactataatctcaagtatgatgtttgtttaacatatacctctcaaaatttatcaccactcaatgacactgcatcaaaattgactataaaactaattcaagaaatatttatatatattttttaatatacaaaaaatatttagcctgatggaatggctttccttttcaaacattattttctaagtttctatacaaatgaaatctttacctctgcatattaatgagccttgccataattactgtagagtggcttttcaaagatattttgttgcactaaaactgtggtagtaaactcagtgaacatgatgtgtggaagagcataattagctggtcaatatttttgtccaaaatacctgcaagagtaataaaatacatacctttcaaacatgataattattagtttttttttttcctttctggaacatggattttggtacattagcagtagccttattttaatgctttatgtcctaaacatactaatagaaatgaaaagacgcagagagagcatttcggaatactgaagtactagttttagaaatgagactttcagccaacaatctatagaaagaattttatggaccatcttgttttagttatttaatgttgatgttgttcaaatgggtaaatgtacagaaagaaaattttagagtaaacttggaactttggatataactagaaaaaactagattatagaattagtcggtaacacttgctaatggacattggcattcatctcctttttcctcctaagtgtatgtatgtgttttaagatttctgtttttacgattaaaactggaaacatgaggttttttgtttttgtttttttacataattacatatattccttctgaatcatttatcttttgagaaagaaatgttacctaaacttcaaatgtgctttttgtttgtgaggtaattaaattgcttctacagtggaggcttacaaaattattgtgacaactattttgaagctgaaaggatagtttttctattgctaagtcatttgaaaaagtgaccattttgccagtgaaatgaagtggaagttagtaggagaatcataaattaaatatattattttgttaataaaaaggcaaagtagtaggtactttttaaaccctcccaaccagccctttctcaatattcatcaaatctaaaacatttagggggcaaaattctaacatgttcatggtatcttgcaaatagtgaaagctttattctgaaggattataaactagttttcttcattttaactagcactattttgtggaaattagaaacctcttttatttctcttcccaaaagtaatacttattataaggctgtagtatcaggttaaggatacagataaataaagttcacttatatcttcttacaaatgtctgggttttaatatggttaatcacttatatacaaatattacaactttttagtgcaagtttttggaagaaaactttttgataaaacactgtgattgatgtgactttatttttaatttaaacgatgaggtggccagaagaaagatgggtctaaaatttctccccatgaaagatgtaaaactatggctttttttaaaatcaaaatttcatcttttaaaataatggtttgaaatactgtatggatctgaacagaataatcacatttaggattctatataaatctcaactggagtataatctgaaggaaattagcagtgtattttaagaaatatatttcaaaaatataaatactgattatgaacttccttttacattgtggttatttgtgcgattaggtttttttgtttgtttcttttgtgtttgtttggcgggagagggtgacctggaaagccacaagtgagtatttgacatattctgtatccttaatccaatcatttggcaaactaaaaggtttctgtgttgtaagaatctgatactagtgcttaagactttgggaagcattgcactgttgtttattagaactttatgtatatttactgtacatagagacttgtttgaaaacatgaatagtcattaaataaagacattgttaaattagtttttgaataccagtgatattcataactacttgacaggtatatatgaaaattctactatcgtgaaaaaaaatgaatatttgtactatttttggccatatttatatttatttctttcatatggtttgaactgttttagcattttgtaaattcacttgagagttttctttcatactggttaaaatatttcaatgatataatgaagatgaatgcaactcttatttttctgccattttttattaaaatacattgaaactaaagtaggctcggggttaactttaaaagtgatatttgagaagtgctttagagttgaaagatttagtattttaccacgtgcctagtagggttctatttgctaactctaatattgaggaaactattaaggttttcagtagtaagtgttgcttctaatagccatatacaggaaagttttataagataacccacggctaaatattttgcattaaggagctgtaggagtacagtgtataagtacaggaaattgagaggaaatgtagtcattttatatgt

SEQ ID NO: 14802 - DNA, 2744 bp, Homo sapiens
gggcgggcgagtcgggcgcccgctctgagagtcggtttcttttccccctcttgcgtggggcggggtggtgcgttccgagttcccaggagttcgacgcgggcgggtgccgaggggaggggagtggcggcggcggcgggcggctcccgcttcagcctcggcagtggcgtcggcgacggcggtgtcgaggcagccgccagcgttcggccaagtgtcagccggcagcgacggcgctagagctgggagctggggacgcgcgcgccggaccttccacagcctccgcccagagcctgaggcgccggggccgggggagccggggggcgggcgggcgagcgggccggggggagggtgggggatggcgcggaccctgcggccgtccccgctgtgtcctggaggcggcaaagcacaactttcctccgcttctctcctcggagccgggctcctgctgcagcccccgacgccacctccgctgctgctgctgctcttcccgctgctgctcttctccaggctctgtggtgccttagctggaccaattattgtggagccacatgtcacagcagtatggggaaagaatgtttcattaaagtgtttaattgaagtaaatgaaaccataacacagatttcatgggagaagatacatggcaaaagttcacagactgttgcagttcaccatccccaatatggattctctgttcaaggagaatatcagggaagagtcttgtttaaaaattactcacttaatgatgcaacaattactctgcataacataggattctctgattctggaaaatacatctgcaaagctgttacattcccgcttggaaatgcccagtcctctacaactgtaactgtgttagttgaacccactgtgagcctgataaaagggccagattctttaattgatggaggaaatgaaacagtagcagccatttgcatcgcagccactggaaaacccgttgcacatattgactgggaaggtgatcttggtgaaatggaatccactacaacttcttttccaaatgaaacggcaacgattatcagccagtacaagctatttccaaccagatttgctagaggaaggcgaattacttgtgttgtaaaacatccagccttggaaaaggacatccgatactctttcatattagacatacagtatgctcctgaagtttcggtaacaggatatgatggaaattggtttgtaggaagaaaaggtgttaatctcaaatgtaatgctgatgcaaatccaccacccttcaaatctgtgtggagcaggttggatggacaatggcctgatggtttattggcttcagacaatactcttcattttgtccatccattgactttcaattattctggtgtttatatctgtaaagtgaccaattcccttggtcaaagaagtgaccaaaaagtcatctacatttcagatcctcctactactaccacccttcagcctacaattcagtggcatccctcaactgctgacatcgaggatctagcaacagaacctaaaaaattgcccttcccattgtcaactttggcaacaattaaggatgacacaattgccacgatcattgctagtgtagtgggtggggctctcttcatagtacttgtaagtgttttggctggaatattctgctataggagaagacggacgtttcgtggagactactttgccaagaactacattccaccatcagatatgcaaaaagaatcacaaatagatgttcttcaacaagatgagcttgattcttacccagacagtgtaaaaaaagaaaacaaaaatccagtgaacaatctaatacgtaaagactatttagaagagcctgaaaaaactcagtggaacaatgtagaaaatctcaataggtttgaaagaccaatggattattatgaagatctaaaaatgggaatgaagtttgtcagtgatgaacattatgatgaaaacgaagatgacttagtttcacatgtagatggttccgtaatttccaggagggagtggtatgtttagcaaccactgaatgtgacttaactatgtacaatgttcattcacactagttgatcattttcagattgttcatactttttcttgaggaagaataagctttttcaagttgattttcaagcttactttttatattctaatctgacaaatgaaaatgtaaaatctgagttcagtgtatctaagctgctttacaattttttttcaatgctgtactactgtctcaagatttaaattttaatgcagagtactttattggtgtgaggcacacaggtaagaagaaatgtcaacattaaatgtatgacttacttggtacaaaaattttttaaaaagggaactaccttgacattgtgtattaaatgtttacctaagactataatctcaagtatgatgtttgtttaacatatacctctcaaaatttatcaccactcaatgacactgcatcaaaattgactataaaactaattcaagaaatatttatatatattttttaatatacaaaaaatatttagcctgatggaatggctttccttttcaaacattattttctaagtttctatacaaatgaaatctttacctctgcatattaatgagccttgccataattactgtagagtggcttttcaaagatattttgttgcactaaaactgtggtagtaaactcagtgaacatgatgtgtggaagagcataattagctggtcaatatttttgtccaaaatacctgcaagagtaataaaatacatacctttc

SEQ ID NO: 14803 - DNA, 3318 bp, Homo sapiens
cgcggccgcgcgggtcgccgtgcggatggccgagggttggcgatggtgcttcgtgcgccgaactccgggtttgctccggggaccgttacttcctcgctcattctctgggaaccctcgtgccttagctggaccaattattgtggagccacatgtcacagcagtatggggaaagaatgtttcattaaagtgtttaattgaagtaaatgaaaccataacacagatttcatgggagaagatacatggcaaaagttcacagactgttgcagttcaccatccccaatatggattctctgttcaaggagaatatcagggaagagtcttgtttaaaaattactcacttaatgatgcaacaattactctgcataacataggattctctgattctggaaaatacatctgcaaagctgttacattcccgcttggaaatgcccagtcctctacaactgtaactgtgttagttgaacccactgtgagcctgataaaagggccagattctttaattgatggaggaaatgaaacagtagcagccatttgcatcgcagccactggaaaacccgttgcacatattgactgggaaggtgatcttggtgaaatggaatccactacaacttcttttccaaatgaaacggcaacgattatcagccagtacaagctatttccaaccagatttgctagaggaaggcgaattacttgtgttgtaaaacatccagccttggaaaaggacatccgatactctttcatattagacatacagtatgctcctgaagtttcggtaacaggatatgatggaaattggtttgtaggaagaaaaggtgttaatctcaaatgtaatgctgatgcaaatccaccacccttcaaatctgtgtggagcaggttggatggacaatggcctgatggtttattggcttcagacaatactcttcattttgtccatccattgactttcaattattctggtgtttatatctgtaaagtgaccaattcccttggtcaaagaagtgaccaaaaagtcatctacatttcagatcctcctactactaccacccttcagcctacaattcagtggcatccctcaactgctgacatcgaggatctagcaacagaacctaaaaaattgcccttcccattgtcaactttggcaacaattaaggatgacacaattgccacgatcattgctagtgtagtgggtggggctctcttcatagtacttgtaagtgttttggctggaatattctgctataggagaagacggacgtttcgtggagactactttgccaagaactacattccaccatcagatatgcaaaaagaatcacaaatagatgttcttcaacaagatgagcttgattcttacccagacagtgtaaaaaaagaaaacaaaaatccagtgaacaatctaatacgtaaagactatttagaagagcctgaaaaaactcagtggaacaatgtagaaaatctcaataggtttgaaagaccaatggattattatgaagatctaaaaatgggaatgaagtttgtcagtgatgaacattatgatgaaaacgaagatgacttagtttcacatgtagatggttccgtaatttccaggagggagtggtatgtttagcaaccactgaatgtgacttaactatgtacaatgttcattcacactagttgatcattttcagattgttcatactttttcttgaggaagaataagctttttcaagttgattttcaagcttactttttatattctaatctgacaaatgaaaatgtaaaatctgagttcagtgtatctaagctgctttacaattttttttcaatgctgtactactgtctcaagatttaaattttaatgcagagtactttattggtgtgaggcacacaggtaagaagaaatgtcaacattaaatgtatgacttacttggtacaaaaattttttaaaaagggaactaccttgacattgtgtattaaatgtttacctaagactataatctcaagtatgatgtttgtttaacatatacctctcaaaatttatcaccactcaatgacactgcatcaaaattgactataaaactaattcaagaaatatttatatatattttttaatatacaaaaaatatttagcctgatggaatggctttccttttcaaacattattttctaagtttctatacaaatgaaatctttacctctgcatattaatgagccttgccataattactgtagagtggcttttcaaagatattttgttgcactaaaactgtggtagtaaactcagtgaacatgatgtgtggaagagcataattagctggtcaatatttttgtccaaaatacctgcaagagtaataaaatacatacctttcaaacatgataattattagtttttttttttcctttctggaacatggattttggtacattagcagtagccttattttaatgctttatgtcctaaacatactaatagaaatgaaaagacgcagagagagcatttcggaatactgaagtactagttttagaaatgagactttcagccaacaatctatagaaagaattttatggaccatcttgttttagttatttaatgttgatgttgttcaaatgggtaaatgtacagaaagaaaattttagagtaaacttggaactttggatataactagaaaaaactagattatagaattagtcggtaacacttgctaatggacattggcattcatctcctttttcctcctaagtgtatgtatgtgttttaagatttctgtttttacgattaaaactggaaacatgaggttttttgtttttgtttttttacataattacatatattccttctgaatcatttatcttttgagaaagaaatgttacctaaacttcaaatgtgctttttgtttgtgaggtaattaaattgcttctacagtggaggcttacaaaattattgtgacaactattttgaagctgaaaggatagtttttctattgctaagtcatttgaaaaagtgaccattttgccagtgaaatgaagtggaagttagtaggagaatcataaattaaatatattattttgttaataaaaaggcaaagtagtaggtactttttaaaccctcccaaccagccctttctcaatattcatcaaatctaaaacatttagggggcaaaattctaacatgttcatggtatcttgcaaatagtgaaagctttattctgaaggattataaactagttttcttcattttaactagcactattttgtggaaattagaaacctcttttatttctcttcccaaaagtaatacttaaggatacagataaataaagttcacttatatcttcttac

SEQ ID NO: 14804 - DNA, 2855 bp, Homo sapiens
agtgccatagctgttccagagtgaatcgtgatcctgcatagttggagaaatgaaacagtagcagccatttgcatcgcagccactggaaaacccgttgcacatattgactgggaaggtgatcttggtgaaatggaatccactacaacttcttttccaaatgaaacggcaacgattatcagccagtacaagctatttccaaccagatttgctagaggaaggcgaattacttgtgttgtaaaacatccagccttggaaaaggacatccgatactctttcatattagacatacagtatgctcctgaagtttcggtaacaggatatgatggaaattggtttgtaggaagaaaaggtgttaatctcaaatgtaatgctgatgcaaatccaccacccttcaaatctgtgtggagcaggttggatggacaatggcctgatggtttattggcttcagacaatactcttcattttgtccatccattgactttcaattattctggtgtttatatctgtaaagtgaccaattcccttggtcaaagaagtgaccaaaaagtcatctacatttcagatcctcctactactaccacccttcagcctacaattcagtggcatccctcaactgctgacatcgaggatctagcaacagaacctaaaaaattgcccttcccattgtcaactttggcaacaattaaggatgacacaattgccacgatcattgctagtgtagtgggtggggctctcttcatagtacttgtaagtgttttggctggaatattctgctataggagaagacggacgtttcgtggagactactttgccaagaactacattccaccatcagatatgcaaaaagaatcacaaatagatgttcttcaacaagatgagcttgattcttacccagacagtgtaaaaaaagaaaacaaaaatccagtgaacaatctaatacgtaaagactatttagaagagcctgaaaaaactcagtggaacaatgtagaaaatctcaataggtttgaaagaccaatggattattatgaagatctaaaaatgggaatgaagtttgtcagtgatgaacattatgatgaaaacgaagatgacttagtttcacatgtagatggttccgtaatttccaggagggagtggtatgtttagcaaccactgaatgtgacttaactatgtacaatgttcattcacactagttgatcattttcagattgttcatactttttcttgaggaagaataagctttttcaagttgattttcaagcttactttttatattctaatctgacaaatgaaaatgtaaaatctgagttcagtgtatctaagctgctttacaattttttttcaatgctgtactactgtctcaagatttaaattttaatgcagagtactttattggtgtgaggcacacaggtaagaagaaatgtcaacattaaatgtatgacttacttggtacaaaaattttttaaaaagggaactaccttgacattgtgtattaaatgtttacctaagactataatctcaagtatgatgtttgtttaacatatacctctcaaaatttatcaccactcaatgacactgcatcaaaattgactataaaactaattcaagaaatatttatatatattttttaatatacaaaaaatatttagcctgatggaatggctttccttttcaaacattattttctaagtttctatacaaatgaaatctttacctctgcatattaatgagccttgccataattactgtagagtggcttttcaaagatattttgttgcactaaaactgtggtagtaaactcagtgaacatgatgtgtggaagagcataattagctggtcaatatttttgtccaaaatacctgcaagagtaataaaatacatacctttcaaacatgataattattagtttttttttttcctttctggaacatggattttggtacattagcagtagccttattttaatgctttatgtcctaaacatactaatagaaatgaaaagacgcagagagagcatttcggaatactgaagtactagttttagaaatgagactttcagccaacaatctatagaaagaattttatggaccatcttgttttagttatttaatgttgatgttgttcaaatgggtaaatgtacagaaagaaaattttagagtaaacttggaactttggatataactagaaaaaactagattatagaattagtcggtaacacttgctaatggacattggcattcatctcctttttcctcctaagtgtatgtatgtgttttaagatttctgtttttacgattaaaactggaaacatgaggttttttgtttttgtttttttacataattacatatattccttctgaatcatttatcttttgagaaagaaatgttacctaaacttcaaatgtgctttttgtttgtgaggtaattaaattgcttctacagtggaggcttacaaaattattgtgacaactattttgaagctgaaaggatagtttttctattgctaagtcatttgaaaaagtgaccattttgccagtgaaatgaagtggaagttagtaggagaatcataaattaaatatattattttgttaataaaaaggcaaagtagtaggtactttttaaaccctcccaaccagccctttctcaatattcatcaaatctaaaacatttagggggcaaaattctaacatgttcatggtatcttgcaaatagtgaaagctttattctgaaggattataaactagttttcttcattttaactagcactattttgtggaaattagaaacctcttttatttctcttcccaaaagtaatacttaaggatacagataaataaagttcacttatatcttcttac

SEQ ID NO: 14805 - DNA, 1927 bp, Homo sapiens
gggcgggcgagtcgggcgcccgctctgagagtcggtttcttttccccctcttgcgtggggcggggtggtgcgttccgagttcccaggagttcgacgcgggcgggtgccgaggggaggggagtggcggcggcggcgggcggctcccgcttcagcctcggcagtggcgtcggcgacggcggtgtcgaggcagccgccagcgttcggccaagtgtcagccggcagcgacggcgctagagctgggagctggggacgcgcgcgccggaccttccacagcctccgcccagagcctgaggcgccggggccgggggagccggggggcgggcgggcgagcgggccggggggagggtgggggatggcgcggaccctgcggccgtccccgctgtgtcctggaggcggcaaagcacaactttcctccgcttctctcctcggagccgggctcctgctgcagcccccgacgccacctccgctgctgctgctgctcttcccgctgctgctcttctccaggctctgtggtgccttagctggaccaattattgtggagccacatgtcacagcagtatggggaaagaatgtttcattaaagtgtttaattgaagtaaatgaaaccataacacagatttcatgggagaagatacatggcaaaagttcacagactgttgcagttcaccatccccaatatggattctctgttcaaggagaatatcagggaagagtcttgtttaaaaattactcacttaatgatgcaacaattactctgcataacataggattctctgattctggaaaatacatctgcaaagctgttacattcccgcttggaaatgcccagtcctctacaactgtaactgtgttagttgaacccactgtgagcctgataaaagggccagattctttaattgatggaggaaatgaaacagtagcagccatttgcatcgcagccactggaaaacccgttgcacatattgactgggaaggtgatcttggtgaaatggaatccactacaacttcttttccaaatgaaacggcaacgattatcagccagtacaagctatttccaaccagatttgctagaggaaggcgaattacttgtgttgtaaaacatccagccttggaaaaggacatccgatactctttcatattagacatacagtatgctcctgaagtttcggtaacaggatatgatggaaattggtttgtaggaagaaaaggtgttaatctcaaatgtaatgctgatgcaaatccaccacccttcaaatctgtgtggagcaggttggatggacaatggcctgatggtttattggcttcagacaatactcttcattttgtccatccattgactttcaattattctggtgtttatatctgtaaagtgaccaattcccttggtcaaagaagtgaccaaaaagtcatctacatttcagatcctcctactactaccacccttcagcctacaattcagtggcatccctcaactgctgacatcgaggatctagcaacagaacctaaaaaattgcccttcccattgtcaactttggcaacaattaaggatgacacaattgccacgatcattgctagtgtagtgggtggggctctcttcatagtacttgtaagtgttttggctggaatattctgctataggagaagacggacgtttcgtggagactactttgccaagaactacattccaccatcagatatgcaaaaagaatcacaaatagatgttcttcaacaagatgagcttgattcttacccagacagtgtaaaaaaagaaaacaaaaactcgactcgtgccgaattcggcacgagcaggactctgcagataacccccagtaccagcctggaactgggaagattcgctgggtggctagacccagaagagagacaacaatcactgcaagtttggctcataggaagccacatccatagg

SEQ ID NO: 14806 - DNA, 1283 bp, Homo sapiens
  misc_feature (1243)..(1243): n is a, c, g, or t
  misc_feature (1277)..(1277): n is a, c, g, or t
gggcgggcgagtcgggcgcccgctctgagagtcggtttcttttccccctcttgcgtggggcggggtggtgcgttccgagttcccaggagttcgacgcgggcgggtgccgaggggaggggagtggcggcggcggcgggcggctcccgcttcagcctcggcagtggcgtcggcgacggcggtgtcgaggcagccgccagcgttcggccaagtgtcagccggcagcgacggcgctagagctgggagctggggacgcgcgcgccggaccttccacagcctccgcccagagcctgaggcgccggggccgggggagccggggggcgggcgggcgagcgggccggggggagggtgggggatggcgcggaccctgcggccgtccccgctgtgtcctggaggcggcaaagcacaactttcctccgcttctctcctcggagccgggctcctgctgcagcccccgacgccacctccgctgctgctgctgctcttcccgctgctgctcttctccaggctctgtggtgccttagctggaccaattattgtggagccacatgtcacagcagtatggggaaagaatgtttcattaaagtgtttaattgaagtaaatgaaaccataacacagatttcatgggagaagatacatggcaaaagttcacagactgttgcagttcaccatccccaatatggattctctgttcaaggagaatatcagggaagagtcttgtttaaaaattactcacttaatgatgcaacaattactctgcataacataggattctctgattctggaaaatacatctgcaaagctgttacattcccgcttggaaatgcccagtcctctacaactgtaactgtgttagttgaacccactgtgagcctgataaaagggccagattctttaattgatggaggaaatgaaacagtagcagccatttgcatcgcagccactggaaaacccgttgcacatattgactgggaaggtgatcttggtgaaatggaatccactacaacttcttttccaaatgaaacggcaacgattatcagccagtacaagctatttccaaccagatttgctagaggaaggcgaattacttgtgttgtaaaacatccagccttggaaaaggacatccgatactctttcatattagacatacagtatgctcctgaagtttcggtaacaggatatgatggaaattggtttgtaggaagaaaaggtgttaatctcagcactttgggagaccaagcgcgncagatcacgaggtccgattgagaccatgagcccnacatgg

SEQ ID NO: 14807 - DNA, 674 bp, Homo sapiens
cgcggccgcgcgggtcgccgtgcggatggccgagggttggcgatggtgcttcgtgcgccgaactccgggtttgctccggggaccgttacttcctcgctcattctctgggaaccctcgtaggttaaggtgccgggatgcacgtttgccgctttttttcccggtgaaacttgagctgtgagcccagaaaccctagggaccggagcccgatggaatgaagcctccgggtccacttctcatggccttccaccctggagaaggcaccattttagcccacccagccgcagaatcccctacagctagttttcttctgtcttgtgcccactcccccggctctgccctgacagcttctggagctctctagattgaccctcgtccctgccctccagcttgtgggacgtctctcacactgcccgtgcttattttaccaaaccgcaggaacaagatttacgtgttaaatacctgatttcatggactgtgtgccccggctgttctaaccaaaacagtcacgcgcctgtttcccatctcttgaccctcgtgttatgttactgttttcctgtcatatttgggagttagtctctgagttttcttcccaggtatgccagactagaagcctgcttattaaggactgtgctaaaaaaaaaaaaaaaaaaaaagtctgcctcatgcaagagaaa

SEQ ID NO: 14808 - DNA, 1137 bp, Homo sapiens
ggaagaatttctatttaaatgttgtagtagagaagctatttttagtgcactttgtattaaatgtgcatgaattaagggaaattttgtgcaagtcctgttttaatattaatatttaaaaatatttttcaaattttacagtgtccaatgtcatttttttttgatctgggatgttttctgttttgcacttgaagtttttcaattttgttaataaatttttttattttaatagaataaaagtgctaaatgtctgtattactggtcgtttatattagagaatattgatttttaaaattaccttttagagtacaaacttaaaattactttcatctttttctctctcttcttctccaggtactctttacatatcgagaatatattctcttggtgatgtttggggatatttacataatttttaaaaagttaagctgaggtattaaagtaatataagaaagaaggaagggttttagcataatgccactaaacctaatgaatgaaatttggggtcctctaacctggctcttggataacatacttcagtcaaatagtttgcacattgtagaaaaggtatgcaatttcaagaattatttttaagattatttgaaaagcctaatttttgttactttacagatgttccatttaagcagacctcttccatagctgtagctggagcggtaattggagctgttcttgcccttttcatcattgctatctttgtgactgtgctgctgactcctcgaaaaaaaagaccatcctatcttgacaaagtgatgaccttccacccacacataaaccacctcctctgtatgaagaacgatccccaccttggcctcagaaagacctatttcagcctgaacacttgccttgcagactcagtgtcaaagaaagagacagttggcaatcttcagcactctaatggactaaatagcaggagtttgactatgaagatgagaatccagttggggaagatggcattcagcagatgtacccccctttacaaatcaaatgtgctaccaagaacggagccctggaaaactcagtcaaaattacgaccctaagagagtctaatcggaccacgaggaacttatgggtggttttctccttttcaggggggtctacaaggtttatctagatggggaa

SEQ ID NO: 14809 - DNA, 3714 bp, Homo sapiens
gggcgggcgagtcgggcgcccgctctgagagtcggtttcttttccccctcttgcgtggggcggggtggtgcgttccgagttcccaggagttcgacgcgggcgggtgccgaggggaggggagtggcggcggcggcgggcggctcccgcttcagcctcggcagtggcgtcggcgacggcggtgtcgaggcagccgccagcgttcggccaagtgtcagccggcagcgacggcgctagagctgggagctggggacgcgcgcgccggaccttccacagcctccgcccagagcctgaggcgccggggccgggggagccggggggcgggcgggcgagcgggccggggggagggtgggggatggcgcggaccctgcggccgtccccgctgtgtcctggaggcggcaaagcacaactttcctccgcttctctcctcggagccgggctcctgctgcagcccccgacgccacctccgctgctgctgctgctcttcccgctgctgctcttctccaggctctgtggtgccttagctggaccaattattgtggagccacatgtcacagcagtatggggaaagaatgtttcattaaagtgtttaattgaagtaaatgaaaccataacacagatttcatgggagaagatacatggcaaaagttcacagactgttgcagttcaccatccccaatatggattctctgttcaaggagaatatcagggaagagtcttgtttaaaaattactcacttaatgatgcaacaattactctgcataacataggattctctgattctggaaaatacatctgcaaagctgttacattcccgcttggaaatgcccagtcctctacaactgtaactgtgttagttgaacccactgtgagcctgataaaagggccagattctttaattgatggaggaaatgaaacagtagcagccatttgcatcgcagccactggaaaacccgttgcacatattgactgggaaggtgatcttggtgaaatggaatccactacaacttcttttccaaatgaaacggcaacgattatcagccagtacaagctatttccaaccagatttgctagaggaaggcgaattacttgtgttgtaaaacatccagccttggaaaaggacatccgatactctttcatattagacatacagtatgctcctgaagtttcggtaacaggatatgatggaaattggtttgtaggaagaaaaggtgttaatctcaaatgtaatgctgatgcaaatccaccacccttcaaatctgtgtggagcaggttggatggacaatggcctgatggtttattggcttcagacaatactcttcattttgtccatccattgactttcaattattctggtgtttatatctgtaaagtgaccaattcccttggtcaaagaagtgaccaaaaagtcatctacatttcagatcctcctactactaccacccttcagcctacaattcagtggcatccctcaactgctgacatcgaggatctagcaacagaacctaaaaaattgcccttcccattgtcaactttggcaacaattaaggatgacacaattgccacgatcattgctagtgtagtgggtggggctctcttcatagtacttgtaagtgttttggctggaatattctgctataggagaagacggacgtttcgtggagactactttgccaagaactacattccaccatcagatatgcaaaaagaatcacaaatagatgttcttcaacaagatgagcttgattcttacccagacagtgtaaaaaaagaaaacaaaaatccagtgaacaatctaatacgtaaagactatttagaagagcctgaaaaaactcagtggaacaatgtagaaaatctcaataggtttgaaagaccaatggattattatgaagatctaaaaatgggaatgaagtttgtcagtgatgaacattatgatgaaaacgaagatgacttagtttcacatgtagatggttccgtaatttccaggagggagtggtatgtttagcaaccactgaatgtgacttaactatgtacaatgttcattcacactagttgatcattttcagattgttcatactttttcttgaggaagaataagctttttcaagttgattttcaagcttactttttatattctaatctgacaaatgaaaatgtaaaatctgagttcagtgtatctaagctgctttacaattttttttcaatgctgtactactgtctcaagatttaaattttaatgcagagtactttattggtgtgaggcacacaggtaagaagaaatgtcaacattaaatgtatgacttacttggtacaaaaattttttaaaaagggaactaccttgacattgtgtattaaatgtttacctaagactataatctcaagtatgatgtttgtttaacatatacctctcaaaatttatcaccactcaatgacactgcatcaaaattgactataaaactaattcaagaaatatttatatatattttttaatatacaaaaaatatttagcctgatggaatggctttccttttcaaacattattttctaagtttctatacaaatgaaatctttacctctgcatattaatgagccttgccataattactgtagagtggcttttcaaagatattttgttgcactaaaactgtggtagtaaactcagtgaacatgatgtgtggaagagcataattagctggtcaatatttttgtccaaaatacctgcaagagtaataaaatacatacctttcaaacatgataattattagtttttttttttcctttctggaacatggattttggtacattagcagtagccttattttaatgctttatgtcctaaacatactaatagaaatgaaaagacgcagagagagcatttcggaatactgaagtactagttttagaaatgagactttcagccaacaatctatagaaagaattttatggaccatcttgttttagttatttaatgttgatgttgttcaaatgggtaaatgtacagaaagaaaattttagagtaaacttggaactttggatataactagaaaaaactagattatagaattagtcggtaacacttgctaatggacattggcattcatctcctttttcctcctaagtgtatgtatgtgttttaagatttctgtttttacgattaaaactggaaacatgaggttttttgtttttgtttttttacataattacatatattccttctgaatcatttatcttttgagaaagaaatgttacctaaacttcaaatgtgctttttgtttgtgaggtaattaaattgcttctacagtggaggcttacaaaattattgtgacaactattttgaagctgaaaggatagtttttctattgctaagtcatttgaaaaagtgaccattttgccagtgaaatgaagtggaagttagtaggagaatcataaattaaatatattattttgttaataaaaaggcaaagtagtaggtactttttaaaccctcccaaccagccctttctcaatattcatcaaatctaaaacatttagggggcaaaattctaacatgttcatggtatcttgcaaatagtgaaagctttattctgaaggattataaactagttttcttcattttaactagcactattttgtggaaattagaaacctcttttatttctcttcccaaaagtaatacttaaggatacagataaataaagttcacttatatcttcttac

SEQ ID NO: 14810 - DNA, 4984 bp, Homo sapiens
gggcgggcgagtcgggcgcccgctctgagagtcggtttcttttccccctcttgcgtggggcggggtggtgcgttccgagttcccaggagttcgacgcgggcgggtgccgaggggaggggagtggcggcggcggcgggcggctcccgcttcagcctcggcagtggcgtcggcgacggcggtgtcgaggcagccgccagcgttcggccaagtgtcagccggcagcgacggcgctagagctgggagctggggacgcgcgcgccggaccttccacagcctccgcccagagcctgaggcgccggggccgggggagccggggggcgggcgggcgagcgggccggggggagggtgggggatggcgcggaccctgcggccgtccccgctgtgtcctggaggcggcaaagcacaactttcctccgcttctctcctcggagccgggctcctgctgcagcccccgacgccacctccgctgctgctgctgctcttcccgctgctgctcttctccaggctctgtggtgccttagctggaccaattattgtggagccacatgtcacagcagtatggggaaagaatgtttcattaaagtgtttaattgaagtaaatgaaaccataacacagatttcatgggagaagatacatggcaaaagttcacagactgttgcagttcaccatccccaatatggattctctgttcaaggagaatatcagggaagagtcttgtttaaaaattactcacttaatgatgcaacaattactctgcataacataggattctctgattctggaaaatacatctgcaaagctgttacattcccgcttggaaatgcccagtcctctacaactgtaactgtgttagttgaacccactgtgagcctgataaaagggccagattctttaattgatggaggaaatgaaacagtagcagccatttgcatcgcagccactggaaaacccgttgcacatattgactgggaaggtgatcttggtgaaatggaatccactacaacttcttttccaaatgaaacggcaacgattatcagccagtacaagctatttccaaccagatttgctagaggaaggcgaattacttgtgttgtaaaacatccagccttggaaaaggacatccgatactctttcatattagacatacagtatgctcctgaagtttcggtaacaggatatgatggaaattggtttgtaggaagaaaaggtgttaatctcaaatgtaatgctgatgcaaatccaccacccttcaaatctgtgtggagcaggttggatggacaatggcctgatggtttattggcttcagacaatactcttcattttgtccatccattgactttcaattattctggtgtttatatctgtaaagtgaccaattcccttggtcaaagaagtgaccaaaaagtcatctacatttcagatcctcctactactaccacccttcagcctacaattcagtggcatccctcaactgctgacatcgaggatctagcaacagaacctaaaaaattgcccttcccattgtcaactttggcaacaattaaggatgacacaattgccacgatcattgctagtgtagtgggtggggctctcttcatagtacttgtaagtgttttggctggaatattctgctataggagaagacggacgtttcgtggagactactttgccaagaactacattccaccatcagatatgcaaaaagaatcacaaatagatgttcttcaacaagatgagcttgattcttacccagacagtgtaaaaaaagaaaacaaaaatccagtgaacaatctaatacgtaaagactatttagaagagcctgaaaaaactcagtggaacaatgtagaaaatctcaataggtttgaaagaccaatggattattatgaagatctaaaaatgggaatgaagtttgtcagtgatgaacattatgatgaaaacgaagatgacttagtttcacatgtagatggttccgtaatttccaggagggagtggtatgtttagcaaccactgaatgtgacttaactatgtacaatgttcattcacactagttgatcattttcagattgttcatactttttcttgaggaagaataagctttttcaagttgattttcaagcttactttttatattctaatctgacaaatgaaaatgtaaaatctgagttcagtgtatctaagctgctttacaattttttttcaatgctgtactactgtctcaagatttaaattttaatgcagagtactttattggtgtgaggcacacaggtaagaagaaatgtcaacattaaatgtatgacttacttggtacaaaaattttttaaaaagggaactaccttgacattgtgtattaaatgtttacctaagactataatctcaagtatgatgtttgtttaacatatacctctcaaaatttatcaccactcaatgacactgcatcaaaattgactataaaactaattcaagaaatatttatatatattttttaatatacaaaaaatatttagcctgatggaatggctttccttttcaaacattattttctaagtttctatacaaatgaaatctttacctctgcatattaatgagccttgccataattactgtagagtggcttttcaaagatattttgttgcactaaaactgtggtagtaaactcagtgaacatgatgtgtggaagagcataattagctggtcaatatttttgtccaaaatacctgcaagagtaataaaatacatacctttcaaacatgataattattagtttttttttttcctttctggaacatggattttggtacattagcagtagccttattttaatgctttatgtcctaaacatactaatagaaatgaaaagacgcagagagagcatttcggaatactgaagtactagttttagaaatgagactttcagccaacaatctatagaaagaattttatggaccatcttgttttagttatttaatgttgatgttgttcaaatgggtaaatgtacagaaagaaaattttagagtaaacttggaactttggatataactagaaaaaactagattatagaattagtcggtaacacttgctaatggacattggcattcatctcctttttcctcctaagtgtatgtatgtgttttaagatttctgtttttacgattaaaactggaaacatgaggttttttgtttttgtttttttacataattacatatattccttctgaatcatttatcttttgagaaagaaatgttacctaaacttcaaatgtgctttttgtttgtgaggtaattaaattgcttctacagtggaggcttacaaaattattgtgacaactattttgaagctgaaaggatagtttttctattgctaagtcatttgaaaaagtgaccattttgccagtgaaatgaagtggaagttagtaggagaatcataaattaaatatattattttgttaataaaaaggcaaagtagtaggtactttttaaaccctcccaaccagccctttctcaatattcatcaaatctaaaacatttagggggcaaaattctaacatgttcatggtatcttgcaaatagtgaaagctttattctgaaggattataaactagttttcttcattttaactagcactattttgtggaaattagaaacctcttttatttctcttcccaaaagtaatacttattataaggctgtagtatcaggttaaggatacagataaataaagttcacttatatcttcttacaaatgtctgggttttaatatggttaatcacttatatacaaatattacaactttttagtgcaagtttttggaagaaaactttttgataaaacactgtgattgatgtgactttatttttaatttaaacgatgaggtggccagaagaaagatgggtctaaaatttctccccatgaaagatgtaaaactatggctttttttaaaatcaaaatttcatcttttaaaataatggtttgaaatactgtatggatctgaacagaataatcacatttaggattctatataaatctcaactggagtataatctgaaggaaattagcagtgtattttaagaaatatatttcaaaaatataaatactgattatgaacttccttttacattgtggttatttgtgcgattaggtttttttgtttgtttcttttgtgtttgtttggcgggagagggtgacctggaaagccacaagtgagtatttgacatattctgtatccttaatccaatcatttggcaaactaaaaggtttctgtgttgtaagaatctgatactagtgcttaagactttgggaagcattgcactgttgtttattagaactttatgtatatttactgtacatagagacttgtttgaaaacatgaatagtcattaaataaagacattgttaaattagtttttgaataccagtgatattcataactacttgacaggtatatatgaaaattctactatcgtgaaaaaaaatgaatatttgtactatttttggccatatttatatttatttctttcatatggtttgaactgttttagcattttgtaaattcacttgagagttttctttcatactggttaaaatatttcaatgatataatgaagatgaatgcaactcttatttttctgccattttttattaaaatacattgaaactaaagtaggctcggggttaactttaaaagtgatatttgagaagtgctttagagttgaaagatttagtattttaccacgtgcctagtagggttctatttgctaactctaatattgaggaaactattaaggttttcagtagtaagtgttgcttctaatagccatatacaggaaagttttataagataacccacggctaaatattttgcattaaggttttcagtagtaagtgttgcttctaatagccatatacaggaaagttttattaaggtaacccacggctaaaattagtttgccttaagggagctgttagggagtaccgtgtattaagtac

SEQ ID NO: 14811 - DNA, 3738 bp, Homo sapiens
gggcgggcgagtcgggcgcccgctctgagagtcggtttcttttccccctcttgcgtggggcggggtggtgcgttccgagttcccaggagttcgacgcgggcgggtgccgaggggaggggagtggcggcggcggcgggcggctcccgcttcagcctcggcagtggcgtcggcgacggcggtgtcgaggcagccgccagcgttcggccaagtgtcagccggcagcgacggcgctagagctgggagctggggacgcgcgcgccggaccttccacagcctccgcccagagcctgaggcgccggggccgggggagccggggggcgggcgggcgagcgggccggggggagggtgggggatggcgcggaccctgcggccgtccccgctgtgtcctggaggcggcaaagcacaactttcctccgcttctctcctcggagccgggctcctgctgcagcccccgacgccacctccgctgctgctgctgctcttcccgctgctgctcttctccaggctctgtggtgccttagctggaccaattattgtggagccacatgtcacagcagtatggggaaagaatgtttcattaaagtgtttaattgaagtaaatgaaaccataacacagatttcatgggagaagatacatggcaaaagttcacagactgttgcagttcaccatccccaatatggattctctgttcaaggagaatatcagggaagagtcttgtttaaaaattactcacttaatgatgcaacaattactctgcataacataggattctctgattctggaaaatacatctgcaaagctgttacattcccgcttggaaatgcccagtcctctacaactgtaactgtgttagttgaacccactgtgagcctgataaaagggccagattctttaattgatggaggaaatgaaacagtagcagccatttgcatcgcagccactggaaaacccgttgcacatattgactgggaaggtgatcttggtgaaatggaatccactacaacttcttttccaaatgaaacggcaacgattatcagccagtacaagctatttccaaccagatttgctagaggaaggcgaattacttgtgttgtaaaacatccagccttggaaaaggacatccgatactctttcatattagacatacagtatgctcctgaagtttcggtaacaggatatgatggaaattggtttgtaggaagaaaaggtgttaatctcaaatgtaatgctgatgcaaatccaccacccttcaaatctgtgtggagcaggttggatggacaatggcctgatggtttattggcttcagacaatactcttcattttgtccatccattgactttcaattattctggtgtttatatctgtaaagtgaccaattcccttggtcaaagaagtgaccaaaaagtcatctacatttcagatcctcctactactaccacccttcagcctacaattcagtggcatccctcaactgctgacatcgaggatctagcaacagaacctaaaaaattgcccttcccattgtcaactttggcaacaattaaggatgacacaattgccacgatcattgctagtgtagtgggtggggctctcttcatagtacttgtaagtgttttggctggaatattctgctataggagaagacggacgtttcgtggagactactttgccaagaactacattccaccatcagatatgcaaaaagaatcacaaatagatgttcttcaacaagatgagcttgattcttacccagacagtgtaaaaaaagaaaacaaaaatccagtgaacaatctaatacgtaaagactatttagaagagcctgaaaaaactcagtggaacaatgtagaaaatctcaataggtttgaaagaccaatggattattatgaagatctaaaaatgggaatgaagtttgtcagtgatgaacattatgatgaaaacgaagatgacttagtttcacatgtagatggttccgtaatttccaggagggagtggtatgtttagcaaccactgaatgtgacttaactatgtacaatgttcattcacactagttgatcattttcagattgttcatactttttcttgaggaagaataagctttttcaagttgattttcaagcttactttttatattctaatctgacaaatgaaaatgtaaaatctgagttcagtgtatctaagctgctttacaattttttttcaatgctgtactactgtctcaagatttaaattttaatgcagagtactttattggtgtgaggcacacaggtaagaagaaatgtcaacattaaatgtatgacttacttggtacaaaaattttttaaaaagggaactaccttgacattgtgtattaaatgtttacctaagactataatctcaagtatgatgtttgtttaacatatacctctcaaaatttatcaccactcaatgacactgcatcaaaattgactataaaactaattcaagaaatatttatatatattttttaatatacaaaaaatatttagcctgatggaatggctttccttttcaaacattattttctaagtttctatacaaatgaaatctttacctctgcatattaatgagccttgccataattactgtagagtggcttttcaaagatattttgttgcactaaaactgtggtagtaaactcagtgaacatgatgtgtggaagagcataattagctggtcaatatttttgtccaaaatacctgcaagagtaataaaatacatacctttcaaacatgataattattagtttttttttttcctttctggaacatggattttggtacattagcagtagccttattttaatgctttatgtcctaaacatactaatagaaatgaaaagacgcagagagagcatttcggaatactgaagtactagttttagaaatgagactttcagccaacaatctatagaaagaattttatggaccatcttgttttagttatttaatgttgatgttgttcaaatgggtaaatgtacagaaagaaaattttagagtaaacttggaactttggatataactagaaaaaactagattatagaattagtcggtaacacttgctaatggacattggcattcatctcctttttcctcctaagtgtatgtatgtgttttaagatttctgtttttacgattaaaactggaaacatgaggttttttgtttttgtttttttacataattacatatattccttctgaatcatttatcttttgagaaagaaatgttacctaaacttcaaatgtgctttttgtttgtgaggtaattaaattgcttctacagtggaggcttacaaaattattgtgacaactattttgaagctgaaaggatagtttttctattgctaagtcatttgaaaaagtgaccattttgccagtgaaatgaagtggaagttagtaggagaatcataaattaaatatattattttgttaataaaaaggcaaagtagtaggtactttttaaaccctcccaaccagccctttctcaatattcatcaaatctaaaacatttagggggcaaaattctaacatgttcatggtatcttgcaaatagtgaaagctttattctgaaggattataaactagttttcttcattttaactagcactattttgtggaaattagaaacctcttttatttctcttcccaaaagtaatacttattataaggctgtagtatcaggttaaggatacagataaataaagttcacttatatcttcttac

SEQ ID NO: 14812 - DNA, 3795 bp, Homo sapiens
cgcggccgcgcgggtcgccgtgcggatggccgagggttggcgatggtgcttcgtgcgccgaactccgggtttgctccggggaccgttacttcctcgctcattctctgggaaccctcgtaggttaaggtgccgggatgcacgtttgccgctttttttcccggtgaaacttgagctgtgagcccagaaaccctagggaccggagcccgatggaatgaagcctccgggtccacttctcatggccttccaccctggagaaggcaccattttagcccacccagccgcagaatcccctacagctagttttcttctgtcttgtgcccactcccccggctctgccctgacagcttctggagctctctagattgaccctcgtccctgccctccagcttgtgggacgtctctcacactgcccgtgcttattttaccaaaccgcaggaacaagatttacgtgttaaatacctgatttcatggactgtgtgccccggctgttctaaccaaaacagtcacgcgcctgtttcccatctcttgaccctcgtgttatgttactgttttcctgtcatatttgggagttagtctctgagttttcttcccaggtgccttagctggaccaattattgtggagccacatgtcacagcagtatggggaaagaatgtttcattaaagtgtttaattgaagtaaatgaaaccataacacagatttcatgggagaagatacatggcaaaagttcacagactgttgcagttcaccatccccaatatggattctctgttcaaggagaatatcagggaagagtcttgtttaaaaattactcacttaatgatgcaacaattactctgcataacataggattctctgattctggaaaatacatctgcaaagctgttacattcccgcttggaaatgcccagtcctctacaactgtaactgtgttagttgaacccactgtgagcctgataaaagggccagattctttaattgatggaggaaatgaaacagtagcagccatttgcatcgcagccactggaaaacccgttgcacatattgactgggaaggtgatcttggtgaaatggaatccactacaacttcttttccaaatgaaacggcaacgattatcagccagtacaagctatttccaaccagatttgctagaggaaggcgaattacttgtgttgtaaaacatccagccttggaaaaggacatccgatactctttcatattagacatacagtatgctcctgaagtttcggtaacaggatatgatggaaattggtttgtaggaagaaaaggtgttaatctcaaatgtaatgctgatgcaaatccaccacccttcaaatctgtgtggagcaggttggatggacaatggcctgatggtttattggcttcagacaatactcttcattttgtccatccattgactttcaattattctggtgtttatatctgtaaagtgaccaattcccttggtcaaagaagtgaccaaaaagtcatctacatttcagatcctcctactactaccacccttcagcctacaattcagtggcatccctcaactgctgacatcgaggatctagcaacagaacctaaaaaattgcccttcccattgtcaactttggcaacaattaaggatgacacaattgccacgatcattgctagtgtagtgggtggggctctcttcatagtacttgtaagtgttttggctggaatattctgctataggagaagacggacgtttcgtggagactactttgccaagaactacattccaccatcagatatgcaaaaagaatcacaaatagatgttcttcaacaagatgagcttgattcttacccagacagtgtaaaaaaagaaaacaaaaatccagtgaacaatctaatacgtaaagactatttagaagagcctgaaaaaactcagtggaacaatgtagaaaatctcaataggtttgaaagaccaatggattattatgaagatctaaaaatgggaatgaagtttgtcagtgatgaacattatgatgaaaacgaagatgacttagtttcacatgtagatggttccgtaatttccaggagggagtggtatgtttagcaaccactgaatgtgacttaactatgtacaatgttcattcacactagttgatcattttcagattgttcatactttttcttgaggaagaataagctttttcaagttgattttcaagcttactttttatattctaatctgacaaatgaaaatgtaaaatctgagttcagtgtatctaagctgctttacaattttttttcaatgctgtactactgtctcaagatttaaattttaatgcagagtactttattggtgtgaggcacacaggtaagaagaaatgtcaacattaaatgtatgacttacttggtacaaaaattttttaaaaagggaactaccttgacattgtgtattaaatgtttacctaagactataatctcaagtatgatgtttgtttaacatatacctctcaaaatttatcaccactcaatgacactgcatcaaaattgactataaaactaattcaagaaatatttatatatattttttaatatacaaaaaatatttagcctgatggaatggctttccttttcaaacattattttctaagtttctatacaaatgaaatctttacctctgcatattaatgagccttgccataattactgtagagtggcttttcaaagatattttgttgcactaaaactgtggtagtaaactcagtgaacatgatgtgtggaagagcataattagctggtcaatatttttgtccaaaatacctgcaagagtaataaaatacatacctttcaaacatgataattattagtttttttttttcctttctggaacatggattttggtacattagcagtagccttattttaatgctttatgtcctaaacatactaatagaaatgaaaagacgcagagagagcatttcggaatactgaagtactagttttagaaatgagactttcagccaacaatctatagaaagaattttatggaccatcttgttttagttatttaatgttgatgttgttcaaatgggtaaatgtacagaaagaaaattttagagtaaacttggaactttggatataactagaaaaaactagattatagaattagtcggtaacacttgctaatggacattggcattcatctcctttttcctcctaagtgtatgtatgtgttttaagatttctgtttttacgattaaaactggaaacatgaggttttttgtttttgtttttttacataattacatatattccttctgaatcatttatcttttgagaaagaaatgttacctaaacttcaaatgtgctttttgtttgtgaggtaattaaattgcttctacagtggaggcttacaaaattattgtgacaactattttgaagctgaaaggatagtttttctattgctaagtcatttgaaaaagtgaccattttgccagtgaaatgaagtggaagttagtaggagaatcataaattaaatatattattttgttaataaaaaggcaaagtagtaggtactttttaaaccctcccaaccagccctttctcaatattcatcaaatctaaaacatttagggggcaaaattctaacatgttcatggtatcttgcaaatagtgaaagctttattctgaaggattataaactagttttcttcattttaactagcactattttgtggaaattagaaacctcttttatttctcttcccaaaagtaatacttaaggatacagataaataaagttcacttatatcttcttac

SEQ ID NO: 14813 - DNA, 1931 bp, Homo sapiens
gggcgggcgagtcgggcgcccgctctgagagtcggtttcttttccccctcttgcgtggggcggggtggtgcgttccgagttcccaggagttcgacgcgggcgggtgccgaggggaggggagtggcggcggcggcgggcggctcccgcttcagcctcggcagtggcgtcggcgacggcggtgtcgaggcagccgccagcgttcggccaagtgtcagccggcagcgacggcgctagagctgggagctggggacgcgcgcgccggaccttccacagcctccgcccagagcctgaggcgccggggccgggggagccggggggcgggcgggcgagcgggccggggggagggtgggggatggcgcggaccctgcggccgtccccgctgtgtcctggaggcggcaaagcacaactttcctccgcttctctcctcggagccgggctcctgctgcagcccccgacgccacctccgctgctgctgctgctcttcccgctgctgctcttctccaggctctgtggtgccttagctggaccaattattgtggagccacatgtcacagcagtatggggaaagaatgtttcattaaagtgtttaattgaagtaaatgaaaccataacacagatttcatgggagaagatacatggcaaaagttcacagactgttgcagttcaccatccccaatatggattctctgttcaaggagaatatcagggaagagtcttgtttaaaaattactcacttaatgatgcaacaattactctgcataacataggattctctgattctggaaaatacatctgcaaagctgttacattcccgcttggaaatgcccagtcctctacaactgtaactgtgttagttgaacccactgtgagcctgataaaagggccagattctttaattgatggaggaaatgaaacagtagcagccatttgcatcgcagccactggaaaacccgttgcacatattgactgggaaggtgatcttggtgaaatggaatccactacaacttcttttccaaatgaaacggcaacgattatcagccagtacaagctatttccaaccagatttgctagaggaaggcgaattacttgtgttgtaaaacatccagccttggaaaaggacatccgatactctttcatattagacatacagtatgctcctgaagtttcggtaacaggatatgatggaaattggtttgtaggaagaaaaggtgttaatctcaaatgtaatgctgatgcaaatccaccacccttcaaatctgtgtggagcaggttggatggacaatggcctgatggtttattggcttcagacaatactcttcattttgtccatccattgactttcaattattctggtgtttatatctgtaaagtgaccaattcccttggtcaaagaagtgaccaaaaagtcatctacatttcagatgttccatttaagcagacctcttccatagctgtagctggagcggtaattggagctgttcttgcccttttcatcattgctatctttgtgactgtgctgctgactcctcgaaaaaaaagaccatcctatcttgacaaagtgatgaccttccacccacacataaaccacctcctctgtatgaagaacgatccccaccttggcctcagaaagacctatttcagcctgaacacttgccttgcagactcagtgtcaaagaaagagacagttggcaatcttcagcactctaatggactaaatagcaggagtttgactatgaagatgagaatccagttggggaagatggcattcagcagatgtacccccctttacaaatcaaatgtgctaccaagaacggagccctggaaaactcagtcaaaattacgaccctaagagagtctaatcggaccacgaggaacttatgggtggttttctccttttcaggggggtctacaaggtttatctagatggggaa

SEQ ID NO: 14814 - DNA, 237 bp, Homo sapiens
tcactttattgctgtttgggagagactttagatatacttcaccattctgagagtgcaaagattttcctacattttctttatttacctttaaccttttacctttcacatttagatgtcaccacagtttgttttgcttatgatactgggaaaatcgacgagattaaagcgtgttttgttctctccttccaaggcttctgcttctatgtcagtattgcactgttttgattaatagagtct

SEQ ID NO: 14815 - DNA, 449 bp, Homo sapiens
cccaatggaggcagaagtcttaccacacccaatcactcacagatctcagcagcctcctgcctgaagaaagtaacatgaaatcgggagtgaaagctaagagaggtacagatgggttgcctgactatacaacatattcaccacattgttaccaacaataggccggaagtgggaattttgcaatttgcactttcatggcagtgcttcctaataggtgtttatgaatagattccaaatgtgcttcagccctagaaatggcaatgaaagtcttcaaactagaagatgccttgtcagggacatgacgtaaaggtaagtcccatagtttcttctgattcacctggcacctgctgctctgccaagtggtaggaatgagaccaaggaggtttgaatatctactcagcgttactagcaccatgctgtaaccaactgagctaatcagccacccattgatt

SEQ ID NO: 14816 - DNA, 570 bp, Homo sapiens
ttagaactggaggcgagagttgtagacaaccatagtagatggaaactggtggtgatagtggtgagggttagagaaaggaggcggcaggcacaaagggagatcccctaagtctatataaattcttcccaaatctctggtttgtccctgaactactgaaacacagggtggactccaggtagcctaataggggaaaaatctgaacagatttcagttgcttaccatctggggagacagagcttatagttttgagttcagattctgactgcctgctaaaacaaaaaatctatattctctttttttgggggatggagtctcactctgtcgccaggctggagtgcagtggcacgatcttggctcactgcaacctccgactccctggttcaggcaattctcctgtctcggcctccagagtagctgggcgtggtggtgcaccctgtagtcccggcttctcgggcggctgaggtagggggatggtttgggcccgggaggcggaggctgcagtgagccaagattgcaccgctgcactccaacctgggtgatagaaccagaccttgtctcaaaaaaaaaaaa

SEQ ID NO: 14817 - DNA, 546 bp, Homo sapiens
aagcaatacttccagccatggggaagcatcggtgttctgtgttattaaagtgactccagtgcaaaggcacatatatcgtattggagtaatttgccctgactaggttagaagccaggagatggttcttcacaggtattcctgagtggcccaaggtctaagtcagctctcgtttagacaaatcctatctctgctgatcatctacctctcaccaaatgcagccatcaccatgcacagcacatgcgctcctcttgatgatcttcacagagtgcagagtcttcaggaagttctttcctcagtggaacctttgggatttctaggagaggggcaggggaatatctggaatcagaggtgaacactttacagcagcctctaaactacttctaattacgttcacctgactaaactgccaggtgataaacgttttatataaaagtaattcactatggaaagttctggatgttttccccaatgggtacctcaaaacagggtacaagatggaaacctgctcaagaaacagcaaaatgtaaactggataatggtgatgat

SEQ ID NO: 14818 - DNA, 892 bp, Homo sapiens
ggtggaaggacagtccagagcccttgtcatcgcacaggaactgctatcttcagagaaagcatacgtggagatgctccagcacttaaatctggatttccatggagctgtcatgagggccttggatgacatggaccatgaaggcagagacacattggcccgggaggagctgaggcagggcctgagtgaactcccagccatccacgaccttcatcaaggcatcctggaggagctggaggaaaggctgtcaaattgggagagccagcagaaggtagctgacgtcttccttgcccgggagcaggggtttgatcaccacgccactcacatcctgcagttcgacaggtacctaggtctgctcagtgagaattgcctccactctccccggctggcagctgctgtccgtgaatttgagcagagtgtacaaggaggcagccagactgcgaagcatcggctgctgcgggtggttcaacgcctcttccagtaccaagtgctcctcacagactatttaaacaacctttgtccggactccgccgagtacgacaacacacagggtgcactgagcctcatctccaaagtcacagaccgtgccaacgacagcatggagcaaggggaaaacctgcagaagctggtccacattgagcacagcgtccggggccaaggggatctcctccagccaggaagggagtttctgaaggaagggacgctgatgaaagtaacagggaaaaacagacggccccggcacctatttctgatgaacgatgtgctcctgtacacctatccccagaaggatgggaagtaccggctgaagaacacattggctgtggccaacatgaaggtcagccgccctgtgatgagaaagtgccccctacgctctaaagattgagacttccgagtc

SEQ ID NO: 14819 - DNA, 1095 bp, Homo sapiens
agtatatcagggtgtggaaacagctctgcaccccttcttgattgctgaacactatgatgtgaatatttctacatagccaccacctttatcatttttagtgacagcttaatataccatagggtggatgcctataatttccttagacttcgttttgaaacaacatagctcatgaacctcttcaaagatgaataatgagaaagcaaaaccttctgcttcgttatagaaggaattacccaatctctcccctatcttgaaaaagaagagtgttcaccacgtggccacaacgagaggagagatttccatggagctgtcatgagggccttggatgacatggaccatgaaggcagagacacattggcccgggaggagctgaggcagggcctgagtgaactcccagccatccacgaccttcatcaaggcatcctggaggagctggaggaaaggctgtcaaattgggagagccagcagaaggtagctgacgtcttccttgcccgggagcaggggtttgatcaccacgccactcacatcctgcagttcgacaggtacctaggtctgctcagtgagaattgcctccactctccccggctggcagctgctgtccgtgaatttgagcagagtgtacaaggaggcagccagactgcgaagcatcggctgctgcgggtggttcaacgcctcttccagtaccaagtgctcctcacagactatttaaacaacctttgtccggactccgccgagtacgacaacacacagggtgcactgagcctcatctccaaagtcacagaccgtgccaacgacagcatggagcaaggggaaaacctgcagaagctggtccacattgagcacagcgtccggggccaaggggatctcctccagccaggaagggagtttctgaaggaagggacgctgatgaaagtaacagggaaaaacagacggccccggcacctatttctgatgaacgatgtgctcctgtacacctatccccagaaggatgggaagtaccggctgaagaacacattggctgtggccaacatgaaggtcagccgccctgtgatgagaaagtgccccctacgctctaaagattgagacttccgagtc

SEQ ID NO: 14820 - DNA, 413 bp, Homo sapiens
aatgttaaggattttagacttctgagatttagactttagggattatgatattcagggtggtgtctttcaggactatgatccaagccctgctctagcatatacagcacctctctcatgagcagggatttatctgctagctgctctcgggttctctgggaggctttatgatttaagtttccactcaggggcctcccctgcacccttgtctgggattgatttaagtttccactcaggggcctcccctgcacccttgtctgggattcagggggcatcagcctgaccgccaagttctgcttctctccccacaggagtttctgaaggaagggacgctgatgaaagtaacagggaaaaacagacggccccggcacctatttctggtaagtgcccggtccccaagcccagctcaggaactg

SEQ ID NO: 14821 - DNA, 758 bp, Homo sapiens
gctttgtgcctgccccgtatctatccacccaacttctggcagcaatccctccaggacccacctctgtcttcatggtttgtgtgttctgatcctgctccttggccccagaatacaccctccacatctaagctatgcagtgcctcatccccacagctgcagcgattggtttaggaatgggaaaataatccaatcaaagtaagattgtctaatatctgatcccgcttaccccggagccagaagtcccacctttccaggctcctccatgttcctttctggagcaatgaggaggaaggttcattcccttctcagggaacttgctgcggtgtcccagtcctgactgtcccctctctacccctgcctgtggctctcccgtctcctggcattctaacctgccactgaattcttcccacgccaaacgcaggttaggaacctaagctcggatgaaatgctggcttagacctcattgctactgagaagcagaaaccacactttttagttggtagaggtggatgtggattggggccataaagtttcctcaatcattgaataaggatttcattatttggactaactaaatacattagattatttatactaactaaataaattagatttatttttcgaagtttaaaatcattttcaatagtgacgaaaaaggctgtagatgagatgggagaatctttcgacgccaaattcttcccatctcctgcctagtatgtatcactacaccttgcccagagagggtccaggggtgctca

SEQ ID NO: 14822 - DNA, 258 bp, Homo sapiens
aataaaatattttccaattttttcaagaatgttgagcttacttctttgaaaataattgtctttgaaataactgtctatatgcttgaaagaactatatgccattccagatcaagatgtttaatgatgatctcttgatgttcttgttggttattagtaacaagaagttttactcaaactaagaggtaaaaattgttttaaccttttttacaaccattttaaatttattaagcattttacagccaacagaaatacggcaat

SEQ ID NO: 14823 - DNA, 395 bp, Homo sapiens
atgaatagttagtatgcattcatatgcaaatttgtactattattctacaactattagtgaagttacaaatttagtgtcattatattagccccattctaacttatttaaattcttttcttttttggggggggaatcattgcttgaaaatagttactaatggtattattatatagaaaatgaagagtttaatacgcctgtaatcccagtactttgggaggccgaggtgggctgatcacgaggtcaagagatagagaccatcctggccaacatggtgaaaccctgtctctactaaaaatacaaaaattagccgggtgtggtggcgcacacctgtagtcccagctactcgggaggctgaggcaggagaattgcttgaatccaggaagcggaggttgcgg

SEQ ID NO: 14824 - DNA, 842 bp, Homo sapiens
gggtgggtagggtgagcaaagtgagaaatggagtattattgtttctctttaacaagtgaggtgtctaacgttcagagagggtaagtgaatcatccaaagcctctcagccaggaagtggtagagctcagacgtgaaccaagatcctcttatgtccaaacgcaatatttccatcatccaagggaccgccatcttccacaagaacttgcaagtggtgcctctgtgttttggatgtcatcgggtgacttgaacaacacagtttagtactccttccctgaatgaaggagctttaaaaggaaacatacttgtgggaatgaggtgctcttaccttcctaaaagtcatcactgggctcagtctttatctgcttggcttttatctattttgtcaggttatcttgggtgctcagggcatagggtattggtcacagggttagtcctgagagtcctgcacccacttgatctgtaccgtggggccatctaggcagaagatcttgtgcatccttggatgaggagggcctaacacagtacctggtacatagtaggtgcacagtcattgctaagtgaacgaatgaataaataataagacaggataaggcagtgttagaatacagacttgggattcaagcatacctagactgaaatcctaggaacgattcactcctttgtgaccttgctcaagctaatatctaagcttctatttccttgcctctaaaatagagataataaggcagagcccagtggctcacgcttgtaatcccaacactttgggaggccaaggtgggaggatcacttgagaccagcagttcctgaccagcttgggcaacagtgagaccccatctccacca

SEQ ID NO: 14825 - DNA, 338 bp, Homo sapiens
caatgctgcaagtagaaaatagtattttaagaatactgttatcaaaatattacaaaaagcttaggaaattggaaaggaataaaaatccatagtcaaatcaccgagacaactattatagcattttgtatgtttcctctgtcctgtctagatctaaaaaatagttgtatactgtttttctacctcatacaagctagcacttccctttaatataaaacctcaaatatataatctcatcaagtaaatattatataacttaaatcattctctgctgtgggacatttagactgtttttattcctttgcaattagaaataaaactgtaatgttgtgcttataata

SEQ ID NO: 14826 - DNA, 737 bp, Homo sapiens
cagtagtaagaaatttgaattaaggaatcgtaagggaatcgagattatctagtttcccctcgacattttataactgaataaacaataaaaaacaagagaagtgacagctttatagcatctgattggggaaaaacacatcttttctggggctagacagtccataaataggacttggaaatggaagtgtagggggagatcccattgtacttcagtggaaaactatgcattgtctggaatctagactctggacaaagacccttccttcctggctgtttgattttgattctatgggagctatcttgcaactctgtaagctgtaggtaactgatagcagagcaaaataattcttgtctatagacgtgtacattgtgtcttagcgtagattcacccgacctccttccccagttttgcttctattagcacatttatttcagtaattttgatctttggattctccttggacattcctcactgaaaaatgaaataaaatttttggcatgtgctcttcttttgcatctgtttgagagctgcaatttttaccttcgtttcaaaattatcctttaaccaaagggacggtggtgaactaggcaggcggagctgcccactccaggtggttgttaccaggggagggcgctggccagtgttgccagatctccactttttcaagggaagctgaaaaatctcatttttgtcaatatgtgaaacttctttatgtttcaatattggcaactaattga

SEQ ID NO: 14827 - DNA, 4992 bp, Homo sapiens
ctctttttattgatacttaaaatacctttactaaaaaaatgaagccttccatttccattcccttatatttacatgaagataaaaatacttactaagtcgttgtatttgtccattctggcagtgctataaagacatacctgagcgtgggtcatttctgaagaaaagaggtttaattggctcatggttttatgggctgtacaggcttctgttctgggggaggcctcaggaaacttacaatcagcagaaggcaaagggaaagcaagcccatcttacatggcaggagcaagaggaagagagcaaagggggaggggttacacacttttctttccttttttttttttaagatggagtctcactgtcacccaggctggagtgcagtgatgagatctcagctcactgcaacctctgcctcccgagttcaagcgattcttctgcctcagcctcccaagtagctgggactacaggcatgtgccactatacccgggtaatttttgtattttcagtagatacaaagttttctcatattggccaagctggtctggaactcctgacttcaggtgcctcagcctcccaaagtgctgggattacaggcaagagccaccttgctcggctggggttacacacttttaaacaaccagatctcgtgagaactcagtcatgaggcagtactagggggatggtgcttaaccacctatgatgcaatcacctcccaccaggccccacctccaacactggggattacaattcaacatgggatttgggtggagacacagagccaaaccgtatcagtcatttttcttttactgaaggaaaattttggttgtggggttagtactaaagatagcccatgtagactttttctgaagataccccaagtggagagatttttaattaggcatttatttggcacctattgcattctaggcattgtgataggagctgggggataaaaaggtgacacagattgggtccctcttatggactcgttttttgtctcagaagacaagtctgggtgagaaagaaatttaaaatttaagttgtggaaataacacgtgtgggggaaactccttgcaattcagcacagtttggtattcagccccagcctcaacatgcagatggcactgttggatgaagccacaccatcttttttcctgggagccccacactcttcccagcctgccttctagctcagggacaacacattttgaaaaacaaagtataaatcgattatgttgcaacaatgaacttcacgttttgcctcttctcatgttaaaagagccagtatcatgaaagcctcaacagtgagctttatgaatcaaatatctgttatttctaaacaatctgtttacattatgaccaaataattagagcctatctagacttaccaaaataagatagggcataagcgatttattggtgcatcagcctttgtttgctttttaaggttcctttatgttttaaagggatttgaacaaaagacatcaggagcttacaaaggaaaaatagcttcattttggttatgagataccagagtcagaaatgacattagattgtatagaaaagacttctaattgtgtgcttacttcccacatgattataataaactatatattaacaaccttgggatcgtactcaggttgtcaattacacggatgcatctttcacttttttctttcccaagagtgagagaaagagtgaggttgtgcttaaggcagtgtggaattctacagaagctcttcttggaaaaggagttcaggcacttgtgttgtagactgcagtctgattctgttcttacttcctctcagcataagggagctttgaaaagaaaactcagacttgtatccgacttgaccagaagcaaaataacttgatcattgaagccactatttctgtgtatttgatcaagtcctcctctggaatccaatgcagccatattcatatttcggtctctcttaatggaccttgctggaaagaacattctgtgctaagaaaatggaaaataaacgtgagaaaactttaagaatgagccttcacacctcctgcagcaggtgatagctctgtacttcagagcttgtctccaggttgagaattacctgttttccactctgaggggattagaaagatactgttttaatgggttataaaacttgtgtgaagaagattggccttctccacctctcctgtgaaataaattgtttgaaaactctttgaagagaaatggcttcagtatattgttctatctctgctaccccaaagcccagagaacaaatattaagtataaattgctaggctaggtatgtcatatgtggcagctttgacatgtaaaccaaaagactgagccaagtctcaatcaatgtacaggttattttgccgaggttgaagacacactagggaaaagagacacaagctacagtatgatctatggcccctactttctccaaagaggattttgagggcttcagtatttaaaggggaaaagtaggcaggaggagaaaggaggaaagaacaaaaaaaagagggagagcatggtcacattcttaggaggctttgattcacactcactgaatccatgtgttgcacgtggcaaggaatgggtagaggaacagtcgattatgtatgtcccctgctcagtaaaactgcactttacaaaagataaacagaataggggaagaagtcaaatatgcatttatctcaggctgggcagtggggatggtttgtactctcctcttgtcccatacttggggaggccacctggggagacatggcctcttgtagctatctgtttaggaacaaaaggaaagacagtgttctgtgacccagcttccaagcttaacttttccctttggtatagtgagtttggggtcccaagatgttcttttcctttcacagatgtatgacacttcagcagaagggtgaaggctgtagaagggagagaaaaccctcttcctgtatggctattgattgactttgacttttaactgattatgtcatctgaggagtctgtgaaggtttatgaagaatgaattcaccatacaacctcccctcagatggaaatgtgtacataatgtagaagaataaggggctgtgagtttcgggggtaagaggaggggaataaagttaagactcctaatactgcttagcttctagccttgggtcttgccgcaacgcctgcccaacacctgtgtgtgtgtgctttgcaaggttagctgggacttaggtagaccccactttgtctgtcgctgacaggaaacctacacattctctgctctttctgctgtttccctgacctcgctctcccatggaattttagattcaattcagtggagttcaggttccagtgtgggttgatcaccagccgatgcaatccccctagcatatgggaaagcaaaggatcaggaggcatgagatcctagttcagtcctggcctttgcttcctggtttgcctaagtcagatgttggacatagtattggggtagggtgctgatgagtggtagttggtgaaggggccattttccacacaagtccccaagggagacagaccaattggcaaaacaatggaaagtatataatcttagctacttaaatcataagtagttctgggatactaggctctactgttctatttattccccacaacatttcctaacatttcctaggcatgaaagatgacgctgaagacatgagaaaaacaagcatcccctgacagccaggggctagcctgagacagccgccctctgatgttgtcaggaggcatcctggcgttcatcactgggctgtggtgtttcttgttccacgtaaatcgcacagaacaccaccctcagacaaggtcatgccgtgactgtgatgaagttagacaaaaaacaagaccacttaataattatcccagcatagacaaacacaaggtcactatgtaaaccacgaaatcacaaactcttcatccgagtgcctgctgcccttcaccagttcccattttagctttgctctcatctgtgctacatgagatttactaccatctcaatcagataatctcccccacttcctgacaacacccaatccaaagcacacccctattcgtggaacactcccacgaatgacctaagcaaggcctccatcctcaaagttcttctgacagctgcttactgagatgccccacagtcccccagtgtgtggtctcccaatgcactgagcatttgttcaaccacagttgttttcctaatggtctggctggaaagtgctagactgagaagtcatttcctgaggtctgctgttctcatgagggcaagggggaaaggagcgtcatacacacaaacaggatggctactggtgtgctggcacctcattgatctgcagcaactcgtcctgcccacggggttggtggttttggcccagacaccaaagaaggcttcttacaagtaactggagaaatctagacttcagtttttcctaacctgtaaaacaaggtcaaagcagttttgtaataaatagaaatgctggaaagcatgtagtgtgatggtgggcaagacatgctttgctcattgttcatagttcctggcacctccacacctccccttagagtccctcaggctcaggtgtgtctgtgtctcgagcccttgctttcctgagggatcagaacccctatttgaggcagggccttaaaccgaggagatgcggactgagctccctctgtatggagggttcaatcaatttcaggaattccaatttgctccagcagagaaggtccaagttctgtctggatcctgttatgtgtgctgaagagctttccagagtcatagggctggggtggggaggggtcatcctggtgtggacagggcatgtggcagtagagacgactgaagatgcagggacagggtccagtgccctctagtgggaagggccccccagacacctcctgattgtcctcaaaagagctgctgcacaagtcttgctcttactttgtttgcattacttgtctatgtgttttgtttttttttt

SEQ ID NO: 14828 - DNA, 996 bp, Homo sapiens
aacacctgcctcattggggcactataacaagtgaaggacttaggaaaacatctggagtatagcgcctggcacccaggagatgcttaataaatgggaaccaggattctttttcttttcttttttcttttcttttttttttttttttgagacagagcctcaatctgtcacctgggctggagtgcagtggcacgctcacagctcgctgcagccttgaactcctgggctcaagggatgctccctcctcagcctccagagtagctgggactacaggtatgtgtcacctcaccaggctaatttttttattttttatttttgtagagatggggtctcgctgtgttgcccaggctggtcttgaacccctggcctcaagtgatccttctgctttggcctcccaaagtgctgggattacaggcatggactatggtgcccagcctaggagccaacattattattattataggcttttttttcaattgcaagatagacatttcttcacattttaatgattctgaaatcagaacatatcttgcaattgatgggttcattaatataattgtagttctttacttcctctcaaaaacttgtgatcttataattgatggcatcttggaaacaaggtaataaatctctattctgttaaagaaagtgacacactttgacatttaacctcaaattttaggagtctctccctcttggggtcagaaatcccttctgaggccaggtgtcgtggctcatgcctgtaatcccagcactttgggaggctgaggcaggcgggtcacttgaggtcaggagtttgagaccagcctggccaacatggcaaaaccctgtctctactaataatacaaaatttagctgggcatggtggcatgcacctgtaatcccactactagggaggctgtggcatgagaatcacttgaacctggaaggcagaggttgcagtgagccaagatcgtgccactgcactccagcctgggcaacagagtgaaactgcatctc

SEQ ID NO: 14829 - DNA, 324 bp, Homo sapiens
tggaattgaactttcttgcgccgtaagcaattgctggtcatattctgctgctaaaagtctctttgttgtgccaagagaaataatgcagaacaaatgttatttaatttttatttactttcagcaaacacatgaatgaaagaggtcaggtaggctgtcctgggcattctgggcctggctgcggcacaccctccttcacttggcccctgccaggcaagaaactttctattcagtctttgctatctttcataaattgtatcattgctcttctgctgttcatatcatcttagttattcacaaagtctacttgataaaatggctcaaggg

SEQ ID NO: 14830 - DNA, 293 bp, Homo sapiens
ggactaaggactatggaggcttcccctctgacccatatggactaagaactgagcaccatatggaattaaatacagagggagagaccaagaaagaaagcagtttcttcagaaggaaccatagagttcaaatgacagggtgttgtccatcatgataaagactttgcctctatctctaaggcaacttattttcccaaagaactctctcatctgcagagagtttcccactttatttatttatttattttgagacggagttttgttctgtccacccaggctggagtgcagtggcatga

SEQ ID NO: 14831 - DNA, 262 bp, Homo sapiens
gatggagaaaatcatagtggaaagagggatctgaccagcactagtgagagggtccctggacctggggcacaaagtatggccaacacgtgtcagtggctctcaagaaggggtttgatggaaacctggggggtcttttggttgtcacaatgactttggggcaatactggtatttgatgggcagggaccagggataggagatgtccagcaaatgcaaggaccagtcttgaaacacaaaaacttctcacgactttcacatccaacc

SEQ ID NO: 14832 - DNA, 338 bp, Homo sapiens
atggcccaatgcagggaatttgtgttatacagtcaacgaaccctgaatctgagaaacctcaactttgcccgagagagagacattgtccttactattctcaacaacagacaaacctgcctctcctccaaatggaaatacaatctttattatgtttcaaggctgtttgctatacaaatatctttgaaaagatagtctggaacgaaagctgtcaatgcttctgctcagaaaacatatggaaacccaacattcataaagagttgtctccaacagcagcggacaccaatgagcaaattgaattattttctggacaatataataagtaactcttgataagaaaa

SEQ ID NO: 14833 - DNA, 430 bp, Homo sapiens
aaaaaaacaaaaaacaaaaaaaaaaacagatcttgcaagcactcactcactatcagagcaccaaggggaaatctgccaccatgatccaatcacctcccaccaggctccacttccaacattggcgattataattcaacttgagatttgggtgaggacatagatcccaaaccatgtcaactactattaaactttataaatgtatatctgctttttcttgaatcatttgattcatcaaatttttgaaatagcaatgtttctatttgtatttcttaatgtagaagagaacagctctttatgtgaatgagaagatcaatccccagtgctgggaatcaaataagcattacttagcctttttttttttttttttttttttttttttttttttttttgatttttactttttgcttataggttcaacgtgcatatgttt

SEQ ID NO: 14834 - DNA, 981 bp, Homo sapiens
tctataggaaatgaatcctcctgataacatcaaggatacaaaaagtgacatcatattctttcagagaagtgtcccaggacatgataataagatgcaatttgaatcttcatcatacgaaggatactttctagcttgtgaaaaagagagagacctttttaaactcattttgaaaaaagaggatgaattgggggatagatctataatgttcactgttcaaaacgaagactagctattaaaatttcatgccgggcgcagtggctcacgcctgtaatcccagccctttgggaggctgaggcgggcagatcaccagaggtcaggtgttcaagaccagcctgaccaacatggtgaaacctcatctctactaaaaatacaaaaaattagctgagtgtagtgacccatgccctcaatcccagctactcaagaggctgaggcaggagaatcacttgcactccggaggtggaggttgtggtgagccgagattgcaccattgcgctctagcctgggcaacaacagcaaaactccatctcaaaaaataaaataaataaataaacaaataaaaaattcaaaaaaaaaaaaaaaaaaaaagaaaaaaaaaagaaaaaaaaaacaaaaaaaaaacacgagacaaagaaagaaaaaaaaaagaaaaagaaaaaaaaaaagaaacaaaaaacaaaaatagaggggggaggggcggcgagaatcaaatacccagggcgacagagaaacaggacgacacacaacaccttgtgagagagagaaccaaccacgacgggaggagtggaaaataaagacgggacgcgcgcaaacgacgaggtggggataagacaaacgaggacgtgcgttgtgtgaggaaagaaccccctctgggggtgggaacaatgcggggacacccccacgcaaggaaggagggggaggaaaaaaacgctggtgaggtacgatccacccacgtcgttcgcgcggtaacgcgggaagatacaa

SEQ ID NO: 14835 - DNA, 485 bp, Homo sapiens
  misc_feature (451)..(451): n is a, c, g, or t
actttattgtttcaaggtgatggttgactagcgaacatactgagggtcacatgccaaacaccattttgagtgttttacatgtaatttttttccttggtcatcttagcaattctatgactaattaataatatttgttgttatttattgtacagatgaggaaactgaagagttttagtaacttttttaagattacacaataaacaatgatgaatcaagctttgaagccaacctcaccaaccacaagatcaaccaacactcttcaccaatgtgtaatataaccacgttaatattcaacatagtacgtactgctgaaagaagttgatacttattcatattaaccccgtagttttgtgtttcctcatctgtaaaagtatgtattataacaccttctctccaccttacagcgtgtgaggttcaaatgaccattcattggaagatattttttatatcntataatgcattataaaaataaatcatttttccta

SEQ ID NO: 14836 - DNA, 504 bp, Homo sapiens
catggcactccagcctgggcacctgggtgagagtgagactctgtaaataaataaataaataaataaataaatttgtatgtgtacatagcttatctcccaaattagacctttggttccttaaggagaaagaccatgtcatatactactgtcagaatatacaactgagtattccacctaccaccagtgttacttcttactagttttgttaccttgaacaaatcatttaacatctaagcctgtgcctcattgaaaaacatgaaaaaaaatacaagagtttagtggtactttgggaggctgaggcaggtggatcatgaggtcaggagatccagaccatcctggctaacacagtgaaaccctgtctgtactaaagatagaaaaaaattatccaggcgtggtggtgggtgcctgtagtcccagctcctggggatgctgaggcaggagaatggcatgaacccgggaggcggagcttgcagtgagccaagatagcaccactacactccagcc

SEQ ID NO: 14837 - DNA, 473 bp, Homo sapiens
gtaaatttcaacattatcagtccccacttttagtcaagatgaacttactgaacaactaagatgtcttactgaacaactaagaggcaatcatagacctcccgaatggggtgaaacagggtctaaaaaaatagtctctcatgaattgtttttttgtattattcctgtaaaacttgttgaaccatctgttgagagtctgtagcaaagattagaactctacagggtcttggccgggcgcggtggctcaagcctgtaatcctagcactttgggcggctgaggcaggctgatcacttgaggttgggaatttgagaccactgtggccaacctgctgaaaccccatctctacaaaaaatacaaaaattagcagggcatggtgtggtgggcacctgtaatctggaggtggaggcaggagaattgcttgaacctgggcagtggaggtttcagtgagctgagatcgcgcctttgcactccagcc

SEQ ID NO: 14838 - DNA, 712 bp, Homo sapiens
gacctttgggtcgtgtttagctcatgggggcagagctctcataagaggccagagagagacctctcatcctttccaccagaggttaaattgagaatgctgtctatgaggaagtgggtcagtcactgaatctgccattatcttgatcttagattgcccagcttccagattgttagaaatgcatttctgttatttgtaagccacccagtctatggcattttattacagcagtcctggcagactaatacaggtaccaattcctgtgaatttctctcaaaacccattatttgtcccatgaggcccttgtccttcattttccaggaaagctacatctctgtcagcatcccatactcatcactaaaactgtcaaactctgtgaagggcctgaaattttaccctccttgcaaactaacaaattagcctgccatagcttcaagatgttggcagaagatatgagtctcctggatcagagacaaaggactttattactcatggcaacagcagaagccacagtattgacatctgcactgtctccctgagccccaattcctacagagcaatactggcacatgtagtgcattgtggtacaagaaagaatcctgggtttagtgaaactggagtttttataatgggcagtaagtgtgcctgccccttgctcctgagagaggcactagctccatctgccatggctgttggctatgcaaacatctgtgaa

SEQ ID NO: 14839 - DNA, 969 bp, Homo sapiens
ccacggcctcctggttgcagctaagtggcccgtggaggggtaggagaggcctgggtgcagtggcgtgggtgtcacgcagggccgaggcagaaccaggacgacgggcacttcctggccttgtcgagtcagcaggagggctgggggtgccctgccgggtcgtgctctcctgtgctgcccacctgcggcctggtcactggggacgggagcaggtatgcctggtccctgtgctgggccccacgggatgtaaagaagggccacctgggcacggcggggcctgcggtgcgggctggcctgggaggaggacaggaagaggggagcagagcttcagtggaatttgagggctgacctaggcgtgcccccaggaggaccaagctgagcagagttgagcgtggaaaggcagggggttcgagtccgaagtaagtggaggtcctgttgggaaggatgcggtgcttcacaggtggtcttacttgagaccctgttccatccagctgcaggcagaccctgcctgggacagtcagggtgcaccggttctgtggctccggctcttaagcactgctctggaccactcctagcttgagggggttgggggaggtcaccacaggctggcggattgcttgggcagagtcagaggtaggattgggcttgggaagaaaggtgcagggtgcctgaagcaggggcagccaggcagtgtggaaccagggggctctgaggacagcgtccactctcttggcagaagtgtgcaggtcctgctgtgtctgtcccgtccctcctcccatccacctcctacttcattgggcaaactgtttccttctttggctcactcgggatcccccagcaatgtcctttgttctcgaactcccagtgactcgaggggtgtcctctgattgctcacctcaggtggagcctcgaaaggatggcgctgctgttcctacctcgggtctccccagtgcacggcatccttacctgtgg

SEQ ID NO: 14840 - DNA, 472 bp, Homo sapiens
ttcgagaccagcctcacatggtgaaacccgtctcttaataaaaatataaaaaattagccgggcgtggtggcaccatgcctgtaatcccagtcactcaggagactgaggcaggagaatcccttgaacccaggaggtaggattgggcttgggaagaaaggtgcagggtgcctgaagcaggggcagccaggcagtgtggaaccagggggctctgaggacagcgtccactctcttggcagaagtgtgcaggtcctgctgtgtctgtcccgtccctcctcccatccacctcctacttcattgggcaaactgtttccttctttggctcactcgggatcccccagcaatgtcctttgttctcgaactcccagtgactcgaggggtgtcctctgattgctcacctcaggtggagcctcgaaaggatggcgctgctgttcctacctcgggtctccccagtgcacggcatccttacctgtgg

SEQ ID NO: 14841 - DNA, 418 bp, Homo sapiens
tgaaatgctccttcaaacgttttactcattcatcaaccatattctctatactatgtgtagacgttacttgtagtctatgtgctttataaatcttctttcctgatctctgacctctataaacataactttttattgtaatcagaacaaaataatgaatatgtactttgctgcgtagtgatttttgtatccttcagaaaatctttgacaactgtaacatcaaaatgcattttagtatgttttttgctgcaacattattttatatgttacagtagttctatgatgaatctcaaataaattattttgtattttgtgaggaagaatatgagactcatttatttttccatatggatatgcacttgatctgccatcatttatttcaaagaacattctttccagaatggccccttttagttaaatc

SEQ ID NO: 14842 - DNA, 489 bp, Homo sapiens
cccgggccccactcctgagattggcggttaggcaggctgcaagtactatgccagtagtgacttaagaattggtctggaaaaagaataaaatgagtgtccttggtagagaaaagggaagagctcccagcagcatgcaacccagagcttctcttcccctctctcccaccgcgctatagcacacagcacccgaggacccacaggttagctgatggaccgcttcagttagatggcagggaaggtgatgagggcgctggcttaggtctatcctagcgttgggtgtattttacccacacacagaaggctgcacctcaacggaaggcctgatcctccttcccagcaggtgagagtgtgggagctagttcaggtcaagtgcacagtgggtaacagggtggctcacacctgtaatcccagcacttgcctcgacctcccaaagtgctagaattacaggtgtgagcctccgcgcccagccagttcttctgtttttaaagt

SEQ ID NO: 14843 - DNA, 267 bp, Homo sapiens
aagctaacaaattggtctaggtctagaatggcacttaagggaattagctttatgtttacagtgatttatcctgtcagctgttcttcattttcctactaagacctacttgccctctgcttcttgctctttgctggttgataccattttttaaaaaggttgctaaagttgtaatgtctggcgaccccccagccctcagataacatgcttctctacgagcaagaccctcagtgtctgcaccacagcattttagaggctctggcttgtggg

SEQ ID NO: 14844 - DNA, 743 bp, Homo sapiens
ctaagttttcggaggcctccccagccatgtggaactgtgtgtgagttaaacctctttcctttgcaaattacctagtctcaggtagttctttatagcagtgcaaaaatggacgtaataagtcttatgtacttattggtgagagagaaaatccgtgcattgttttcaaaagaattcattaacgtatcaattcaatttctataacctttgaagtggcagtaaatatgtagtaattgatacttgggagatagttgcccacttgggcaaaaacgcatgcagaaggtggagtttttaaatttaaaacatttttaaaatagcaaatgttaatattccagtttccattggtaggaaattttttagataagttcaggcatatgtatgcaatggaaagccactagaaatcttcaggcacacagataatgacaatgcaggttgctcatgaagtatttagtgaaccaggagagttttagaacaacaattatagcatgaccccattttgttagtatgtttttctgtgtgtatgtttagagcaacagagaaaaaaagatgtgggagaggacatataactacttatctctagtggtgggattctgaatgtataatacatatgttgtacttttatgtattttactttgtaacaaagtatctttcagttttataataacagtagagctattttttataaattagcctgatggaacaatcccttatgattaaagattcatgttgtaacctctaaaaaaaat

SEQ ID NO: 14845 - DNA, 482 bp, Homo sapiens
gctccccaggagtcactgggggccagaaatgagtccagtgtgctctaaccccacacaagttcccagcttcctcccccttcagcccagcttctgtgtcttctgtctactcgcagtgtcttccctctgaagatctgctaggagcgtgccagtcatcctggttccttggtggcagctgttccacccggctgcatgtagtcagctgtcttgcccaaatctcccccaacactgtgaagcctaggcgggaagatcgcttgagcccaggagttcatgaccagctgggcgacaaagtgagaccaccccccgccccagctctacaaaataaaagtataaaaaccagccaggcatggtggcttgtgttgtagtcacagtacttgggaggctgaggcaggaagattgcttgagcctgggaggttgaggctggagtgagccatgattatgtcactgcactccaacctgggtgacagaaggacaccctgtctcac

SEQ ID NO: 14846 - DNA, 467 bp, Homo sapiens
tcttcagttaaagaggcaacagcactggagagaaagccagtcagtctcaggcacggtggggcccagcgtagatcctagggtacattgaaaactaactatgaaaagctggtccctggctcagcagcattagcaaatgccggacaggacagaaatcatgtagacctcacttttaggatggcttatgctcccagctccttgctcctcactccaccagagctgtgggattcctgaaatgataatctagaactacatcacatggttctacggtttatgatctgactggcagatgctgacagcatttctaagaacggtaaaagacctaacgaaaacccactcacactacttttgccaaacatctgcctcagacagatttattctcaattagggataaatagacttgacctgttctttgaacaaattacacagcaaaaatgaaaagaatatgcatagctctaatgggttagtgg

SEQ ID NO: 14847 - DNA, 266 bp, Homo sapiens
aaaaaaatgctttatatgtagtaaaatgtgtagatcttatgatacatgtatatagtcattgtaactgattgcagtcaaggtgtagaacacatccatcactccagcaattttttcgcagtattccattcagttaatatcatctcccatgagaggcaccattgttataatttctgccactatatattagttatattagttttactttttttgaatattgtaagtagaattctgattccatttattaatgattcttttttgtgtatacc

SEQ ID NO: 14848 - DNA, 412 bp, Homo sapiens
cagtctggacaacagagcaaggctctgtctcaaaaaacaaaaaacaaacaaaaaaaagatcaagttgtattaaaaaaataaaaaaatacaaatgaatgttgtctagtggagaataaaactctttgtaagtcaaattctcatttgaattgacttatttcatttatattcacattaatcagtgagttaaataaaatgaatgacatatgtttattttatatttacagagtcacagttttgccattttgaaaattatgcattttcaatgtaattaatgaccagatataaaacctagaattaaaaaaaaaaaaattataggctgaactttgggagaatcccagaatttttggaggctgaggtaagcagatagcttgagcaggaatttaacaacaacctgggcaatatggcaaaaccc

SEQ ID NO: 14849 - DNA, 441 bp, Homo sapiens
tcataccttctccttctatgagtgctaagaaatccaataggaattttattcacaaggaacaatccctcctgccccaacccaaggcttcctggattctgtgctagagaaaagactgagaaaacaccaaacagtcctatgatataatgtgaggagcttcttcttaagatatcattgcttttaaagttttcatatgatgctgattttgttttttgtgtttgtgtgtatgtgtgttagaatgtggttagttctgtaagtggttaagctgctagatgatggaaactagacagtggaggagagaaatgcatttagctatctctaagagatcctattgccatgaggacatatactgtcaaagggtcatcctagcacaccagagaagtgacatttcagctgagtcagttgtgtagagacttggggaaagatcctgacacatttggatta

SEQ ID NO: 14850 - DNA, 385 bp, Homo sapiens
tttttgtagagacagggttttgctatgttgtccaggctggaatctctggacttttcagagaataaacccatgtaattttaagcctcccacaacctcctggggtatttattaaatgcagattctagcagtccaggaatcttttttttttttttttaacaggatcttgctctgtcacttaggctggagtgctggagtgcagtggcatgatcttgactcactgcaatctctgcctcctgtgttcaagcaattctcctgcctcagtctcccaaatagctgggattataggcatgcaccaccacagcctgagtaatttttgtatttttagtagagatggggtttcaccatattggccaggctggtcttgaactcctgacctcaggtgatc

SEQ ID NO: 14851 - DNA, 516 bp, Homo sapiens
cctcagcctcccaaagtgctgggattacaggtgtgtgccactgtgcctggctgtaggcttgttttatgagtctgggagtaaaatacttcttaaaattgtccaattagaatgaaagtctgttttaatgtttttatgcagtttagcttaggtggaataaactgcatgaaaacattaaaccttttccataggtcaggcagccattgtactaaagttcatgaaccctttcattttcccttcacaagataaaaaacaagggaccgcaactttgagggaaatctagaaaggtaggagactggactttggagttgtcagattaggacaggtgaaaagcagatattctaggctcctaaaataatgtgggaacaggcccagagcaactttggacatggtgtgtttgggtgcactggatgcttttcttttgagaaggaagctccatgaagtacagactcatgggcagagtttgagtgaaggtagtcggtagtctggtctagaaattggtgaattagctggcttggg

SEQ ID NO: 14852 - DNA, 455 bp, Homo sapiens
gtaggatgatgggatatggggagaacagaaagtggttttatgcctgctctcctttccttcctcaggtttaggtattgattgggaaagggctgccaggagctcagtttctttgagaaacagcattaggaaacttgttgttgttgttaatttaatttttttatttcttacatgtcacagcttttgataatctgatatctctactgacctgttatagtagtcatggacaaaattagacctgtatagtagaatcaactaggaagaatggccatatgtgtttattagatttggggagccttccactgcagacttcatttgctggtgaaagtatcaccaccttaacccagagcttgccattcaggtttttttcccttcaactgtctttacattttaatgacagcaccataagggtctgttcttagagcaggaatatcaatataatcttcatttcattcttg

SEQ ID NO: 14853 - DNA, 278 bp, Homo sapiens
ggcagctgctgtgaagcgggatatggacctggtgggagcagacagcagcgtgggcagggctgcagtggcaggtgggccctgtgagaacacgcactcggatgcactggcagctgctaaggctttcgggagcagccggagagccagcagtgtccccacgcttaacccctggtacctgtgtgaaatgtgggtgacaccaaggccaaacagctgttcccccggttctggccagtagctcagccttgggctcaggtagcttctcccagaaacgagggtcacag

SEQ ID NO: 14854 - DNA, 212 bp, Homo sapiens
ggcagctgctgtgaagcgggatatggacctggtgggagcagacagcagcgtgggcagggctgcagtggcaggtgggccctgtgagaacacgcactcggatgcactggcagctgctaaggctttcgggagcagctgtttggccttggtgtcacccacatttcacacaggtaccaggggttatgcgtggggacactgctggctctccggctgct

SEQ ID NO: 14855 - DNA, 774 bp, Homo sapiens
ggcaggtattattagccctatgacttgccgagctatacagcaagtaaaggtagactcaggaatgaaaacccagactcctggcttcttgtcagtgttctgcccatggctctcatcactagaccatatttcctaattcatatttggaaagtcactaataaaattaatggtaggaactgtaactcacaacatcatacattattataatttatacattcatatcttaaagaccattttggttttcgtgttaaaacacataggtaattggatttcacattttggttgcattcatttttcgcccccctcaacctttacaggttattttcttttatttgagctgtgttccaaagacccagcattccaaaaccttggaacggttttgttcagttatgccagctaattctggacttgcattgaggttacttcaacatgaatgggaagaaagcaatgttcagattctgaaacttcaagccaagatgtttacatataatatcccaacatgcctggccacctggaaaatgtaatgcaacaatcatgtacatgtttttatagctattgcttttatttataaggtttgctccagacaggtaaatctgaaatgacatctatatatatatatatatatatatatatagaataaaacctggagaaaacgcaacacaacaaaacaacggacaaaacgcacacacagagagatcaaagagagcgagtacacaatgaacagcaccaaaagacaaaaagcgaagacaaaacaacctcgaaggacaaataaagaaa

SEQ ID NO: 14856 - DNA, 553 bp, Homo sapiens
ccctttcaaatgccataggtgttattgactagtaccatataatcgcctttaattcttaaactagttcacgtcatacattttaattatcctagtctctgtaattgatatttatcatgaagattgcattgctcttatttcagaaaaatatgttgagaaactttttggagtaaacaaagatcgaatgtcaatggaccagatggctgttctccttgttagcaatatcaatgaaagtaaaggtcatagtaagcacacacacacactctgacattttattacaagctgcatgtcctgaccctctttgaattaagtggactgtggcatgacattctgcaatactttgctgaattgaacactattgtgtcttaaatacttgcactaaatagtgcactgcaagaccagaaaattttacaatattttttctttacaatatgttctgtagtatgtttaccctctttatgaagtgaattaccaatgctttgaataatgttcacttatacattcctgtacagaaattacgattttgtgattacagtaataaaatgatattccttgt

SEQ ID NO: 14857 - DNA, 5997 bp, Homo sapiens
tgtattcaaaagctgacagcctaaaacagctgattttaaaaaccaccacaggcattacagagaaggttttgcatggtcaggagatttctgtagatgtggattttgtcacagcacaaagtaaaacaatggaagtgaagccatgtccttttagaccctaccatagtcctcttctagtttttaagtcctacagatttagtccatattatcgaaccaaggaaaaacttcccctgagctcagtatcatacagtaatatgattgaaccggatcagtgtttctgccgttttgatttaacaggaacatgtaatgatgatgattgtcaatggcagcatatacaagactatacacttagccgaaaacagttattccaggacattctgtcatataatctgtctttgattggttgtgcagagacaagtactaatgaagaaattactgcttcagcagaaaaatatgttgagaaactttttggagtaaacaaagatcgaatgtcaatggaccagatggctgttctccttgttagcaatatcaatgaaagtaaaggtcatactcctccatttacaacctacaaagataaaagaaagtggaagccaaagttttggagaaaacctatttcagataatagcttcagtagtgatgaggaacagtctacaggaccaattaagtatgctttccagccagagaaccaaataaatgttccagctctggatacagttgtcactccagatgatgtcagatactttacaaatgagactgatgacatcgctaatttagaagcaagtgtgcttgaaaatccttctcatgtacaactttggctcaagcttgcgtacaagtacttgaatcaaaatgagggggagtgctcagaatccttggattctgctttaaatgttctggcgcgagcattggaaaataacaaagacaatccagaaatttggtgccattacctcagattgttctcaaaaagaggaaccaaggacgaggtgcaggaaatgtgtgaaacagctgttgaatatgctccagattatcaaagcttttggacttttctacacctagaaagtacctttgaagaaaaggattacgtatgtgagagaatgttggagtttctgatgggagcagccaagcaggaaacatccaatattttgtcctttcagcttttagaggctcttttgtttagagttcagctgcacatatttactggaagatgccaaagtgcactggcaattttacagaatgcattgaaatctgctaatgatggaatagtagctgaataccttaaaaccagtgatcgatgtttggcatggttggcctacatacatcttattgaattcaacattctcccttcaaaattttatgatccatctaatgataatccttcaagaattgttaacactgaatcatttgtaatgccatggcaagctgttcaagatgtaaagactaatcctgacatgttgttagcagtttttgaagatgcagtgaaagcttgcacagatgagagccttgctgttgaggaaagaatagaggcctgccttccactttacacaaacatgattgctctgcaccaactcctggagaggtatgaggctgcaatggagctttgtaaatctttattggaatcatgtcctattaactgccagttgctggaagctcttgttgcattatatttgcaaacaaatcagcatgacaaagccagagcagtgtggcttactgcatttgaaaaaaatcctcagaatgcagaggttttttatcatatgtgcaaattcttcatcttacagaatcgaggcgataatcttcttccatttttgcggaaatttattgcatccttctttaaaccggggtttgagaagtataataacttggatctgtttcggtatctcttaaatattccaggaccaattgacattccatctcgtttatgtaaagggaattttgatgatgatatgtttaaccaccaagttccttatttgtggctgatttactgcctttgtcatcctcttcaatcaagtattaaagaaacagtggaggcatatgaggcagcattaggggtggctatgagatgtgatatagtacagaagatatggatggattatcttgtctttgcaaataatagagctgctggatccagaaacaaagttcaagaattcaaattttttactgatttagtgaatagatgtttggttacagtccctgcccgataccccattccttttagcagtgctgattactggtccaactatgaatttcataatagggttattttcttttatttgagctgtgttccaaagacccagcattccaaaaccttggaacggttttgttcagttatgccagctaattctggacttgcattgaggtaagaaaaacttaacattcttttggtcctctgcctaatggaataggctctttatataagattattcttgaaaacttgataaaaatagtctgttgttccactatgtcctcatgaatatatactgcttaatttcagagttgttaagccaatatttagctattcattcaaaagtcagtgtaaaaattctggtcgcttcagaaaacttcaggttacaaaggggcaaataattccattcaagtaaagttcatctgtgttccctaaacacacaccatctgtccttagcatgtgcattataagcagtaagcttgttttccacggcaagggaatattatttaagatgttttcatattttcacctaggtcagttgctctcaaatattggcaaacattagaatctcctgggatgctcatttaaaatgtagattcctgaccttgagccctcacactacatttttgaagcactgattagggatttcatatattcgatcagaacgagatttctcagcctttctttgtagtttctctgctctgatacagcaaatccactttcatccgcaagaattatgctttttaattcaaaaaggtaccctgcatgctaatgcactggcttccacgtttgcagtcattcccactgcatcagttgtatcttaatgttttatggatcataagatgcctaaaatatttatgaaatgttcccttatgttttaaaggatttacatttcatttagcatgtatgtggggaaaatcgtataaaagtttaaaaactaaagttgagacaaacataatggtagtattttacagttttcttagcaagcctgccaatctgtagaagctcattacagaaatgttaattatgaaacacctttgataaaacgtgaaatagaaaatgtcatattttgacatgattttctattgtgataggcattttagaatataggtagtttacttgtttattttgttggtaaatccctacatctgtgttttgatacttatttcctctggtcatccctgttctttttttccaggagaataaagaactttaatagttactatacatgcattttagttcaagaaacattcaagactgatcatactctaagaaagaaaaataccaggaaattgcattactatcaagccattactttaaaaaaaaattggggtgggaaacagggactgttatttggcgggaatgctttcatgtcctatagaaatacatggaccttagtgtagtttggtaagatgagcatagatcttgacttgacctcttcgtagtttgcacattcctgtcccagggtaatttttgtaagaggcattctaaaatatttgctgggtagtcttgatggaatttaactaatcaaaatttatacttcgtcattgtgctcatagagcacatttggggttcgttacacttgcaatgctttgttcattttcctgaatgtactttacaggttacttcaacatgaatgggaagaaagcaatgttcagattctgaaacttcaagccaagatgtttacatataatatcccaacatgcctggccacctggaaaatgtaatgcaacaatcatgtacatgtttttatagctattgcttttatttataaggtttgctccagacaggtaaatctgaaatgacatctatatatatatatatatatatatttttttttttttttttcctggacagattgctattcttaatttagatttgtttttagcatttactgaggtttaatgagagtgagtactcattgaatagcctctaaaagcaaaaagcgtagacttttaattttctttgaaggacaacatttaggtgacagtactgttatcaaacaaatctgctacagacattttaagaccacctcttgaaatggtggtgtgtcacctgttgtagtctgatttcttctttcttttaaaggtgttagtgctaggtatttttgactagtaattatgaggtgttttttttttgttgttgttgttgttttttttttctcctgtgaacgttatttatgttcaaaacactggtctgcttttttcttgtaaagttgataaaaattgttgaatttttcttttcactataggttttcctccttggaagtttagcctgttaactttcaggaagttttgtactcagattcccacagtcagtattctgccagtggtggtgtttcattttgttcaaagatatataaatttttcttttcctttttctatatttctttttttttttttttctcttagagccattgctgctgagattgttctaaagggacaaagagaggtaagccatggttgaatctcagatgggtcacttttaaaaagtttttctgtctcttttgttgacttctcaatttaaaagaattaaagcacagaagttaacatttcatgcacactaagaaccaagtggggaaacaaaagtagttaacattttaagagtaccaaatattcggaaactccaaaactcagcataaccattttgtctcagatgttattgtgaattaccattctttaaacagatggaattatgaaggtgtttttcattatattttctgatggaattgtgtgtatatctatcttacaggtccaccgtttatatcagagagccttacagaagttacctctttgtgcatcactgtggaaagatgtaatgctttttatcttttattttatctcgatgttttcctgtaaattttctgcatgtgccatatccattgatgtggtaatgctcaaactctagctaagtcttacttctatgcttccctgtcttttacagcaactcttgtttgaagcatcagaaggaggtaaaactgataacctgagaaaactagtttccaagtgccaagagattggagtcagcctaaatgagctcttaaatttaaacagtaacaaaacagaaagcaagaatcactgaacactgggtgcagtcagttctaagtccttataataattgccaaaattatttgaatgattcttcaagattaggctgatccctggctaaggtctgtgtaaggcagacaagcgttattgatcatatcaagttccctacaatatcctgtcctcaaaaccggaagcaatgaacatgatcctcttcggttggataaatgaacttcctgtttggcctgcttctaggccctgccagattctcataacatcatatacgtaagtatagttcctcaaagtgactgacatttattttaattttgctttgtttttttttattttctcccccattcctttattttgtgttattcctgactcacttgacactctctgatgcctgagagattcctgtttgggatttaatatccagggctgtgtttacagtaaaaaaagcaggcagtcccttttagtttttcctttttaaatttttttgagattcttcatttcaggatttaaaactatagcagtccatcttaaggaaagtgtaactgccatggccacaagtctgctagttgcacttgaatgctctatcagggttgtttattaccctttctacgttctggactccttgccgagactgtttaacttgaagattaaagaaactattgcaaatgccagtgcatcagaacctaagagtggtcaaatattatgtgcaatttttttgtaaagaaattttaatttataataaagtttaacagtttaaagaacagttaa

SEQ ID NO: 14858 - DNA, 4550 bp, Homo sapiens
tgtattcaaaagctgacagcctaaaacagctgattttaaaaaccaccacaggcattacagagaaggttttgcatggtcaggagatttctgtagatgtggattttgtcacagcacaaagtaaaacaatggaagtgaagccatgtccttttagaccctaccatagtcctcttctagtttttaagtcctacagatttagtccatattatcgaaccaaggaaaaacttcccctgagctcagtatcatacagtaatatgattgaaccggatcagtgtttctgccgttttgatttaacaggaacatgtaatgatgatgattgtcaatggcagcatatacaagactatacacttagccgaaaacagttattccaggacattctgtcatataatctgtctttgattggttgtgcagagacaagtactaatgaagaaattactgcttcagcagaaaaatatgttgagaaactttttggagtaaacaaagatcgaatgtcaatggaccagatggctgttctccttgttagcaatatcaatgaaagtaaaggtcatactcctccatttacaacctacaaagataaaagaaagtggaagccaaagttttggagaaaacctatttcagataatagcttcagtagtgatgaggaacagtctacaggaccaattaagtatgctttccagccagagaaccaaataaatgttccagctctggatacagttgtcactccagatgatgtcagatactttacaaatgagactgatgacatcgctaatttagaagcaagtgtgcttgaaaatccttctcatgtacaactttggctcaagcttgcgtacaagtacttgaatcaaaatgagggggagtgctcagaatccttggattctgctttaaatgttctggcgcgagcattggaaaataacaaagacaatccagaaatttggtgccattacctcagattgttctcaaaaagaggaaccaaggacgaggtgcaggaaatgtgtgaaacagctgttgaatatgctccagattatcaaagcttttggacttttctacacctagaaagtacctttgaagaaaaggattacgtatgtgagagaatgttggagtttctgatgggagcagccaagcaggaaacatccaatattttgtcctttcagcttttagaggctcttttgtttagagttcagctgcacatatttactggaagatgccaaagtgcactggcaattttacagaatgcattgaaatctgctaatgatggaatagtagctgaataccttaaaaccagtgatcgatgtttggcatggttggcctacatacatcttattgaattcaacattctcccttcaaaattttatgatccatctaatgataatccttcaagaattgttaacactgaatcatttgtaatgccatggcaagctgttcaagatgtaaagactaatcctgacatgttgttagcagtttttgaagatgcagtgaaagcttgcacagatgagagccttgctgttgaggaaagaatagaggcctgccttccactttacacaaacatgattgctctgcaccaactcctggagaggtatgaggctgcaatggagctttgtaaatctttattggaatcatgtcctattaactgccagttgctggaagctcttgttgcattatatttgcaaacaaatcagcatgacaaagccagagcagtgtggcttactgcatttgaaaaaaatcctcagaatgcagaggttttttatcatatgtgcaaattcttcatcttacagaatcgaggcgataatcttcttccatttttgcggaaatttattgcatccttctttaaaccggggtttgagaagtataataacttggatctgtttcggtatctcttaaatattccaggaccaattgacattccatctcgtttatgtaaagggaattttgatgatgatatgtttaaccaccaagttccttatttgtggctgatttactgcctttgtcatcctcttcaatcaagtattaaagaaacagtggaggcatatgaggcagcattaggggtggctatgagatgtgatatagtacagaagatatggatggattatcttgtctttgcaaataatagagctgctggatccagaaacaaagttcaagaattcaaattttttactgatttagtgaatagatgtttggttacagtccctgcccgataccccattccttttagcagtgctgattactggtccaactatgaatttcataatagggttattttcttttatttgagctgtgttccaaagacccagcattccaaaaccttggaacggttttgttcagttatgccagctaattctggacttgcattgaggttacttcaacatgaatgggaagaaagcaatgttcagattctgaaacttcaagccaagatgtttacatataatatcccaacatgcctggccacctggaaaatgtaatgcaacaatcatgtacatgtttttatagctattgcttttatttataaggtttgctccagacaggtaaatctgaaatgacatctatatatatatatatatatatatttttttttttttttttcctggacagattgctattcttaatttagatttgtttttagcatttactgaggtttaatgagagtgagtactcattgaatagcctctaaaagcaaaaagcgtagacttttaattttctttgaaggacaacatttaggtgacagtactgttatcaaacaaatctgctacagacattttaagaccacctcttgaaatggtggtgtgtcacctgttgtagtctgatttcttctttcttttaaaggtgttagtgctaggtatttttgactagtaattatgaggtgttttttttttgttgttgttgttgttttttttttctcctgtgaacgttatttatgttcaaaacactggtctgcttttttcttgtaaagttgataaaaattgttgaatttttcttttcactataggttttcctccttggaagtttagcctgttaactttcaggaagttttgtactcagattcccacagtcagtattctgccagtggtggtgtttcattttgttcaaagatatataaatttttcttttcctttttctatatttctttttttttttttttctcttagagccattgctgctgagattgttctaaagggacaaagagaggtaagccatggttgaatctcagatgggtcacttttaaaaagtttttctgtctcttttgttgacttctcaatttaaaagaattaaagcacagaagttaacatttcatgcacactaagaaccaagtggggaaacaaaagtagttaacattttaagagtaccaaatattcggaaactccaaaactcagcataaccattttgtctcagatgttattgtgaattaccattctttaaacagatggaattatgaaggtgtttttcattatattttctgatggaattgtgtgtatatctatcttacaggtccaccgtttatatcagagagccttacagaagttacctctttgtgcatcactgtggaaagatgtaatgctttttatcttttattttatctcgatgttttcctgtaaattttctgcatgtgccatatccattgatgtggtaatgctcaaactctagctaagtcttacttctatgcttccctgtcttttacagcaactcttgtttgaagcatcagaaggaggtaaaactgataacctgagaaaactagtttccaagtgccaagagattggagtcagcctaaatgagctcttaaatttaaacagtaacaaaacagaaagcaagaatcactgaacactgggtgcagtcagttctaagtccttataataattgccaaaattatttgaatgattcttcaagattaggctgatccctggctaaggtctgtgtaaggcagacaagcgttattgatcatatcaagttccctacaatatcctgtcctcaaaaccggaagcaatgaacatgatcctcttcggttggataaatgaacttcctgtttggcctgcttctaggccctgccagattctcataacatcatatacgtaagtatagttcctcaaagtgactgacatttattttaattttgctttgtttttttttattttctcccccattcctttattttgtgttattcctgactcacttgacactctctgatgcctgagagattcctgtttgggatttaatatccagggctgtgtttacagtaaaaaaagcaggcagtcccttttagtttttcctttttaaatttttttgagattcttcatttcaggatttaaaactatagcagtccatcttaaggaaagtgtaactgccatggccacaagtctgctagttgcacttgaatgctctatcagggttgtttattaccctttctacgttctggactccttgccgagactgtttaacttgaagattaaagaaactattgcaaatgccagtgcatcagaacctaagagtggtcaaatattatgtgcaatttttttgtaaagaaattttaatttataataaagtttaacagtttaaagaacagttaa

SEQ ID NO: 14859 - DNA, 3433 bp, Homo sapiens
tgtattcaaaagctgacagcctaaaacagctgattttaaaaaccaccacaggcattacagagaaggttttgcatggtcaggagatttctgtagatgtggattttgtcacagcacaaagtaaaacaatggaagtgaagccatgtccttttagaccctaccatagtcctcttctagtttttaagtcctacagatttagtccatattatcgaaccaaggaaaaacttcccctgagctcagtatcatacagtaatatgattgaaccggatcagtgtttctgccgttttgatttaacaggaacatgtaatgatgatgattgtcaatggcagcatatacaagactatacacttagccgaaaacagttattccaggacattctgtcatataatctgtctttgattggttgtgcagagacaagtactaatgaagaaattactgcttcagcagaaaaatatgttgagaaactttttggagtaaacaaagatcgaatgtcaatggaccagatggctgttctccttgttagcaatatcaatgaaagtaaaggtcatactcctccatttacaacctacaaagataaaagaaagtggaagccaaagttttggagaaaacctatttcagataatagcttcagtagtgatgaggaacagtctacaggaccaattaagtatgctttccagccagagaaccaaataaatgttccagctctggatacagttgtcactccagatgatgtcagatactttacaaatgagactgatgacatcgctaatttagaagcaagtgtgcttgaaaatccttctcatgtacaactttggctcaagcttgcgtacaagtacttgaatcaaaatgagggggagtgctcagaatccttggattctgctttaaatgttctggcgcgagcattggaaaataacaaagacaatccagaaatttggtgccattacctcagattgttctcaaaaagaggaaccaaggacgaggtgcaggaaatgtgtgaaacagctgttgaatatgctccagattatcaaagcttttggacttttctacacctagaaagtacctttgaagaaaaggattacgtatgtgagagaatgttggagtttctgatgggagcagccaagcaggaaacatccaatattttgtcctttcagcttttagaggctcttttgtttagagttcagctgcacatatttactggaagatgccaaagtgcactggcaattttacagaatgcattgaaatctgctaatgatggaatagtagctgaataccttaaaaccagtgatcgatgtttggcatggttggcctacatacatcttattgaattcaacattctcccttcaaaattttatgatccatctaatgataatccttcaagaattgttaacactgaatcatttgtaatgccatggcaagctgttcaagatgtaaagactaatcctgacatgttgttagcagtttttgaagatgcagtgaaagcttgcacagatgagagccttgctgttgaggaaagaatagaggcctgccttccactttacacaaacatgattgctctgcaccaactcctggagaggtatgaggctgcaatggagctttgtaaatctttattggaatcatgtcctattaactgccagttgctggaagctcttgttgcattatatttgcaaacaaatcagcatgacaaagccagagcagtgtggcttactgcatttgaaaaaaatcctcagaatgcagaggttttttatcatatgtgcaaattcttcatcttacagaatcgaggcgataatcttcttccatttttgcggaaatttattgcatccttctttaaaccggggtttgagaagtataataacttggatctgtttcggtatctcttaaatattccaggaccaattgacattccatctcgtttatgtaaagggaattttgatgatgatatgtttaaccaccaagttccttatttgtggctgatttactgcctttgtcatcctcttcaatcaagtattaaagaaacagtggaggcatatgaggcagcattaggggtggctatgagatgtgatatagtacagaagatatggatggattatcttgtctttgcaaataatagagctgctggatccagaaacaaagttcaagaattcaaattttttactgatttagtgaatagatgtttggttacagtccctgcccgataccccattccttttagcagtgctgattactggtccaactatgaatttcataatagggttattttcttttatttgagctgtgttccaaagacccagcattccaaaaccttggaacggttttgttcagttatgccagctaattctggacttgcattgaggttacttcaacatgaatgggaagaaagcaatgttcagattctgaaacttcaagccaagatgtttacatataatatcccaacatgcctggccacctggaaaatagccattgctgctgagattgttctaaagggacaaagagaggtccaccgtttatatcagagagccttacagaagttacctctttgtgcatcactgtggaaagatcaactcttgtttgaagcatcagaaggaggtaaaactgataacctgagaaaactagtttccaagtgccaagagattggagtcagcctaaatgagctcttaaatttaaacagtaacaaaacagaaagcaagaatcactgaacactgggtgcagtcagttctaagtccttataataattgccaaaattatttgaatgattcttcaagattaggctgatccctggctaaggtctgtgtaaggcagacaagcgttattgatcatatcaagttccctacaatatcctgtcctcaaaaccggaagcaatgaacatgatcctcttcggttggataaatgaacttcctgtttggcctgcttctaggccctgccagattctcataacatcatatacgtaagtatagttcctcaaagtgactgacatttattttaattttgctttgtttttttttattttctcccccattcctttattttgtgttattcctgactcacttgacactctctgatgcctgagagattcctgtttgggatttaatatccagggctgtgtttacagtaaaaaaagcaggcagtcccttttagtttttcctttttaaatttttttgagattcttcatttcaggatttaaaactatagcagtccatcttaaggaaagtgtaactgccatggccacaagtctgctagttgcacttgaatgctctatcagggttgtttattaccctttctacgttctggactccttgccgagactgtttaacttgaagattaaagaaactattgcaaatgccagtgcatcagaacctaagagtggtcaaatattatgtgcaatttttttgtaaagaaattttaatttataataaagtttaacagtttaaagaacagttaa

SEQ ID NO: 14860 - DNA, 4121 bp, Homo sapiens
tgtattcaaaagctgacagcctaaaacagctgattttaaaaaccaccacaggcattacagagaaggttttgcatggtcaggagatttctgtagatgtggattttgtcacagcacaaagtaaaacaatggaagtgaagccatgtccttttagaccctaccatagtcctcttctagtttttaagtcctacagatttagtccatattatcgaaccaaggaaaaacttcccctgagctcagtatcatacagtaatatgattgaaccggatcagtgtttctgccgttttgatttaacaggaacatgtaatgatgatgattgtcaatggcagcatatacaagactatacacttagccgaaaacagttattccaggacattctgtcatataatctgtctttgattggttgtgcagagacaagtactaatgaagaaattactgcttcagcagaaaaatatgttgagaaactttttggagtaaacaaagatcgaatgtcaatggaccagatggctgttctccttgttagcaatatcaatgaaagtaaaggtcatactcctccatttacaacctacaaagataaaagaaagtggaagccaaagttttggagaaaacctatttcagataatagcttcagtagtgatgaggaacagtctacaggaccaattaagtatgctttccagccagagaaccaaataaatgttccagctctggatacagttgtcactccagatgatgtcagatactttacaaatgagactgatgacatcgctaatttagaagcaagtgtgcttgaaaatccttctcatgtacaactttggctcaagcttgcgtacaagtacttgaatcaaaatgagggggagtgctcagaatccttggattctgctttaaatgttctggcgcgagcattggaaaataacaaagacaatccagaaatttggtgccattacctcagattgttctcaaaaagaggaaccaaggacgaggtgcaggaaatgtgtgaaacagctgttgaatatgctccagattatcaaagcttttggacttttctacacctagaaagtacctttgaagaaaaggattacgtatgtgagagaatgttggagtttctgatgggagcagccaagcaggaaacatccaatattttgtcctttcagcttttagaggctcttttgtttagagttcagctgcacatatttactggaagatgccaaagtgcactggcaattttacagaatgcattgaaatctgctaatgatggaatagtagctgaataccttaaaaccagtgatcgatgtttggcatggttggcctacatacatcttattgaattcaacattctcccttcaaaattttatgatccatctaatgataatccttcaagaattgttaacactgaatcatttgtaatgccatggcaagctgttcaagatgtaaagactaatcctgacatgttgttagcagtttttgaagatgcagtgaaagcttgcacagatgagagccttgctgttgaggaaagaatagaggcctgccttccactttacacaaacatgattgctctgcaccaactcctggagaggtatgaggctgcaatggagctttgtaaatctttattggaatcatgtcctattaactgccagttgctggaagctcttgttgcattatatttgcaaacaaatcagcatgacaaagccagagcagtgtggcttactgcatttgaaaaaaatcctcagaatgcagaggttttttatcatatgtgcaaattcttcatcttacagaatcgaggcgataatcttcttccatttttgcggaaatttattgcatccttctttaaaccggggtttgagaagtataataacttggatctgtttcggtatctcttaaatattccaggaccaattgacattccatctcgtttatgtaaagggaattttgatgatgatatgtttaaccaccaagttccttatttgtggctgatttactgcctttgtcatcctcttcaatcaagtattaaagaaacagtggaggcatatgaggcagcattaggggtggctatgagatgtgatatagtacagaagatatggatggattatcttgtctttgcaaataatagagctgctggatccagaaacaaagttcaagaattcaaattttttactgatttagtgaatagatgtttggttacagtccctgcccgataccccattccttttagcagtgctgattactggtccaactatgaatttcataatagggttattttcttttatttgagctgtgttccaaagacccagcattccaaaaccttggaacggttttgttcagttatgccagctaattctggacttgcattgaggttacttcaacatgaatgggaagaaagcaatgttcagattctgaaacttcaagccaagatgtttacatataatatcccaacatgcctggccacctggaaaatgtaatgcaacaatcatgtacatgtttttatagctattgcttttatttataaggtttgctccagacaggtaaatctgaaatgacatctatatatatatatatatatatatttttttttttttttttcctggacagattgctattcttaatttagatttgtttttagcatttactgaggtttaatgagagtgagtactcattgaatagcctctaaaagcaaaaagcgtagacttttaattttctttgaaggacaacatttaggtgacagtactgttatcaaacaaatctgctacagacattttaagaccacctcttgaaatggtggtgtgtcacctgttgtagtctgatttcttctttcttttaaaggtgttagtgctaggtatttttgactagtaattatgaggtgttttttttttgttgttgttgttgttttttttttctcctgtgaacgttatttatgttcaaaacactggtctgcttttttcttgtaaagttgataaaaattgttgaatttttcttttcactataggttttcctccttggaagtttagcctgttaactttcaggaagttttgtactcagattcccacagtcagtattctgccagtggtggtgtttcattttgttcaaagatatataaatttttcttttcctttttctatatttctttttttttttttttctcttagagccattgctgctgagattgttctaaagggacaaagagaggtccaccgtttatatcagagagccttacagaagttacctctttgtgcatcactgtggaaagatcaactcttgtttgaagcatcagaaggaggtaaaactgataacctgagaaaactagtttccaagtgccaagagattggagtcagcctaaatgagctcttaaatttaaacagtaacaaaacagaaagcaagaatcactgaacactgggtgcagtcagttctaagtccttataataattgccaaaattatttgaatgattcttcaagattaggctgatccctggctaaggtctgtgtaaggcagacaagcgttattgatcatatcaagttccctacaatatcctgtcctcaaaaccggaagcaatgaacatgatcctcttcggttggataaatgaacttcctgtttggcctgcttctaggccctgccagattctcataacatcatatacgtaagtatagttcctcaaagtgactgacatttattttaattttgctttgtttttttttattttctcccccattcctttattttgtgttattcctgactcacttgacactctctgatgcctgagagattcctgtttgggatttaatatccagggctgtgtttacagtaaaaaaagcaggcagtcccttttagtttttcctttttaaatttttttgagattcttcatttcaggatttaaaactatagcagtccatcttaaggaaagtgtaactgccatggccacaagtctgctagttgcacttgaatgctctatcagggttgtttattaccctttctacgttctggactccttgccgagactgtttaacttgaagattaaagaaactattgcaaatgccagtgcatcagaacctaagagtggtcaaatattatgtgcaatttttttgtaaagaaattttaatttataataaagtttaacagtttaaagaacagttaa

SEQ ID NO: 14861 - DNA, 4492 bp, Homo sapiens
tgtattcaaaagctgacagcctaaaacagctgattttaaaaaccaccacaggcattacagagaaggttttgcatggtcaggagatttctgtagatgtggattttgtcacagcacaaagtaaaacaatggaagtgaagccatgtccttttagaccctaccatagtcctcttctagtttttaagtcctacagatttagtccatattatcgaaccaaggaaaaacttcccctgagctcagtatcatacagtaatatgattgaaccggatcagtgtttctgccgttttgatttaacaggaacatgtaatgatgatgattgtcaatggcagcatatacaagactatacacttagccgaaaacagttattccaggacattctgtcatataatctgtctttgattggttgtgcagagacaagtactaatgaagaaattactgcttcagcagaaaaatatgttgagaaactttttggagtaaacaaagatcgaatgtcaatggaccagatggctgttctccttgttagcaatatcaatgaaagtaaaggtcatactcctccatttacaacctacaaagataaaagaaagtggaagccaaagttttggagaaaacctatttcagataatagcttcagtagtgatgaggaacagtctacaggaccaattaagtatgctttccagccagagaaccaaataaatgttccagctctggatacagttgtcactccagatgatgtcagatactttacaaatgagactgatgacatcgctaatttagaagcaagtgtgcttgaaaatccttctcatgtacaactttggctcaagcttgcgtacaagtacttgaatcaaaatgagggggagtgctcagaatccttggattctgctttaaatgttctggcgcgagcattggaaaataacaaagacaatccagaaatttggtgccattacctcagattgttctcaaaaagaggaaccaaggacgaggtgcaggaaatgtgtgaaacagctgttgaatatgctccagattatcaaagcttttggacttttctacacctagaaagtacctttgaagaaaaggattacgtatgtgagagaatgttggagtttctgatgggagcagccaagcaggaaacatccaatattttgtcctttcagcttttagaggctcttttgtttagagttcagctgcacatatttactggaagatgccaaagtgcactggcaattttacagaatgcattgaaatctgctaatgatggaatagtagctgaataccttaaaaccagtgatcgatgtttggcatggttggcctacatacatcttattgaattcaacattctcccttcaaaattttatgatccatctaatgataatccttcaagaattgttaacactgaatcatttgtaatgccatggcaagctgttcaagatgtaaagactaatcctgacatgttgttagcagtttttgaagatgcagtgaaagcttgcacagatgagagccttgctgttgaggaaagaatagaggcctgccttccactttacacaaacatgattgctctgcaccaactcctggagaggtatgaggctgcaatggagctttgtaaatctttattggaatcatgtcctattaactgccagttgctggaagctcttgttgcattatatttgcaaacaaatcagcatgacaaagccagagcagtgtggcttactgcatttgaaatcgaggcgataatcttcttccatttttgcggaaatttattgcatccttctttaaaccggggtttgagaagtataataacttggatctgtttcggtatctcttaaatattccaggaccaattgacattccatctcgtttatgtaaagggaattttgatgatgatatgtttaaccaccaagttccttatttgtggctgatttactgcctttgtcatcctcttcaatcaagtattaaagaaacagtggaggcatatgaggcagcattaggggtggctatgagatgtgatatagtacagaagatatggatggattatcttgtctttgcaaataatagagctgctggatccagaaacaaagttcaagaattcaaattttttactgatttagtgaatagatgtttggttacagtccctgcccgataccccattccttttagcagtgctgattactggtccaactatgaatttcataatagggttattttcttttatttgagctgtgttccaaagacccagcattccaaaaccttggaacggttttgttcagttatgccagctaattctggacttgcattgaggttacttcaacatgaatgggaagaaagcaatgttcagattctgaaacttcaagccaagatgtttacatataatatcccaacatgcctggccacctggaaaatgtaatgcaacaatcatgtacatgtttttatagctattgcttttatttataaggtttgctccagacaggtaaatctgaaatgacatctatatatatatatatatatatatttttttttttttttttcctggacagattgctattcttaatttagatttgtttttagcatttactgaggtttaatgagagtgagtactcattgaatagcctctaaaagcaaaaagcgtagacttttaattttctttgaaggacaacatttaggtgacagtactgttatcaaacaaatctgctacagacattttaagaccacctcttgaaatggtggtgtgtcacctgttgtagtctgatttcttctttcttttaaaggtgttagtgctaggtatttttgactagtaattatgaggtgttttttttttgttgttgttgttgttttttttttctcctgtgaacgttatttatgttcaaaacactggtctgcttttttcttgtaaagttgataaaaattgttgaatttttcttttcactataggttttcctccttggaagtttagcctgttaactttcaggaagttttgtactcagattcccacagtcagtattctgccagtggtggtgtttcattttgttcaaagatatataaatttttcttttcctttttctatatttctttttttttttttttctcttagagccattgctgctgagattgttctaaagggacaaagagaggtaagccatggttgaatctcagatgggtcacttttaaaaagtttttctgtctcttttgttgacttctcaatttaaaagaattaaagcacagaagttaacatttcatgcacactaagaaccaagtggggaaacaaaagtagttaacattttaagagtaccaaatattcggaaactccaaaactcagcataaccattttgtctcagatgttattgtgaattaccattctttaaacagatggaattatgaaggtgtttttcattatattttctgatggaattgtgtgtatatctatcttacaggtccaccgtttatatcagagagccttacagaagttacctctttgtgcatcactgtggaaagatgtaatgctttttatcttttattttatctcgatgttttcctgtaaattttctgcatgtgccatatccattgatgtggtaatgctcaaactctagctaagtcttacttctatgcttccctgtcttttacagcaactcttgtttgaagcatcagaaggaggtaaaactgataacctgagaaaactagtttccaagtgccaagagattggagtcagcctaaatgagctcttaaatttaaacagtaacaaaacagaaagcaagaatcactgaacactgggtgcagtcagttctaagtccttataataattgccaaaattatttgaatgattcttcaagattaggctgatccctggctaaggtctgtgtaaggcagacaagcgttattgatcatatcaagttccctacaatatcctgtcctcaaaaccggaagcaatgaacatgatcctcttcggttggataaatgaacttcctgtttggcctgcttctaggccctgccagattctcataacatcatatacgtaagtatagttcctcaaagtgactgacatttattttaattttgctttgtttttttttattttctcccccattcctttattttgtgttattcctgactcacttgacactctctgatgcctgagagattcctgtttgggatttaatatccagggctgtgtttacagtaaaaaaagcaggcagtcccttttagtttttcctttttaaatttttttgagattcttcatttcaggatttaaaactatagcagtccatcttaaggaaagtgtaactgccatggccacaagtctgctagttgcacttgaatgctctatcagggttgtttattaccctttctacgttctggactccttgccgagactgtttaacttgaagattaaagaaactattgcaaatgccagtgcatcagaacctaagagtggtcaaatattatgtgcaatttttttgtaaagaaattttaatttataataaagtttaacagtttaaagaacagttaa

SEQ ID NO: 14862 - DNA, 4495 bp, Homo sapiens
tgtattcaaaagctgacagcctaaaacagctgattttaaaaaccaccacaggcattacagagaaggttttgcatggtcaggagatttctgtagatgtggattttgtcacagcacaaagtaaaacaatggaagtgaagccatgtccttttagaccctaccatagtcctcttctagtttttaagtcctacagatttagtccatattatcgaaccaaggaaaaacttcccctgagctcagtatcatacagtaatatgattgaaccggatcagtgtttctgccgttttgatttaacaggaacatgtaatgatgatgattgtcaatggcagcatatacaagactatacacttagccgaaaacagttattccaggacattctgtcatataatctgtctttgattggttgtgcagagacaagtactaatgaagaaattactgcttcagcagaaaaatatgttgagaaactttttggagtaaacaaagatcgaatgtcaatggaccagatggctgttctccttgttagcaatatcaatgaaagtaaaggtcatactcctccatttacaacctacaaagataaaagaaagtggaagccaaagttttggagaaaacctatttcagataatagcttcagtagtgatgaggaacagtctacaggaccaattaagtatgctttccagccagagaaccaaataaatgttccagctctggatacagttgtcactccagatgatgtcagatactttacaaatgagactgatgacatcgctaatttagaagcaagtgtgcttgaaaatccttctcatgtacaactttggctcaagcttgcgtacaagtacttgaatcaaaatgagggggagtgctcagaatccttggattctgctttaaatgttctggcgcgagcattggaaaataacaaagacaatccagaaatttggtgccattacctcagattgttctcaaaaagaggaaccaaggacgaggtgcaggaaatgtgtgaaacagctgttgaatatgctccagattatcaaagcttttggacttttctacacctagaaagtacctttgaagaaaaggattacgtatgtgagagaatgttggagtttctgatgggagcagccaagcaggaaacatccaatattttgtcctttcagcttttagaggctcttttgtttagagttcagctgcacatatttactggaagatgccaaagtgcactggcaattttacagaatgcattgaaatctgctaatgatggaatagtagctgaataccttaaaaccagtgatcgatgtttggcatggttggcctacatacatcttattgaattcaacattctcccttcaaaattttatgatccatctaatgataatccttcaagaattgttaacactgaatcatttgtaatgccatggcaagctgttcaagatgtaaagactaatcctgacatgttgttagcagtttttgaagatgcagtgaaagcttgcacagatgagagccttgctgttgaggaaagaatagaggcctgccttccactttacacaaacatgattgctctgcaccaactcctggagaggtatgaggctgcaatggagctttgtaaatctttattggaatcatgtcctattaactgccagttgctggaagctcttgttgcattatatttgcaaacaaatcagcatgacaaagccagagcagtgtggcttactgcatttgaaaaaaatcctcagaatgcagaggttttttatcatatgtgcaaattcttcatcttacagaatcgaggcgataatcttcttccatttttgcggaaatttattgcatccttctttaaaccggggtttgagaagtataataacttggatctgtttcggtatctcttaaatattccaggaccaattgacattccatctcgtttatgtaaagggaattttgatgatgatatgtttaaccaccaagttccttatttgtggctgatttactgcctttgtcatcctcttcaatcaagtattaaagaaacagtggaggcatatgaggcagcattaggggtggctatgagatgtgatatagtacagaagatatggatggattatcttgtctttgcaaataatagagctgctggatccagaaacaaagttcaagaattcaaattttttactgatttagtgaatagatgtttggttacagtccctgcccgataccccattccttttagcagtgctgattactggtccaactatgaatttcataatagggttattttcttttatttgagctgtgttccaaagacccagcattccaaaaccttggaacggttttgttcagttatgccagctaattctggacttgcattgaggttacttcaacatgaatgggaagaaagcaatgttcagattctgaaacttcaagccaagatgtttacatataatatcccaacatgcctggccacctggaaaatgtaatgcaacaatcatgtacatgtttttatagctattgcttttatttataaggtttgctccagacaggtaaatctgaaatgacatctatatatatatatatatatatatttttttttttttttttcctggacagattgctattcttaatttagatttgtttttagcatttactgaggtttaatgagagtgagtactcattgaatagcctctaaaagcaaaaagcgtagacttttaattttctttgaaggacaacatttaggtgacagtactgttatcaaacaaatctgctacagacattttaagaccacctcttgaaatggtggtgtgtcacctgttgtagtctgatttcttctttcttttaaaggtgttagtgctaggtatttttgactagtaattatgaggtgttttttttttgttgttgttgttgttttttttttctcctgtgaacgttatttatgttcaaaacactggtctgcttttttcttgtaaagttgataaaaattgttgaatttttcttttcactataggttttcctccttggaagtttagcctgttaactttcaggaagttttgtactcagattcccacagtcagtattctgccagtggtggtgtttcattttgttcaaagatatataaatttttcttttcctttttctatatttctttttttttttttttctcttagagccattgctgctgagattgttctaaagggacaaagagaggtaagccatggttgaatctcagatgggtcacttttaaaaagtttttctgtctcttttgttgacttctcaatttaaaagaattaaagcacagaagttaacatttcatgcacactaagaaccaagtggggaaacaaaagtagttaacattttaagagtaccaaatattcggaaactccaaaactcagcataaccattttgtctcagatgttattgtgaattaccattctttaaacagatggaattatgaaggtgtttttcattatattttctgatggaattgtgtgtatatctatcttacaggtccaccgtttatatcagagagccttacagaagttacctctttgtgcatcactgtggaaagatgtaatgctttttatcttttattttatctcgatgttttcctgtaaattttctgcatgtgccatatccattgatgtggtaatgctcaaactctagctaagtcttacttctatgcttccctgtcttttacagcaactcttgtttgaagcatcagaaggaggtaaaactgataacctgagaaaactagtttccaagtgccaagagattggagtcagcctaaatgagctcttaaatttaaacagtaacaaaacagaaagcaagaatcactgaacactgggtgcagtcagttctaagtccttataataattgccaaaattatttgaatgattcttcaagattaggctgatccctggctaaggtctgtgtaaggcagacaagcgttattgatcatatcaagttccctacaatatcctgtcctctggcctgcttctaggccctgccagattctcataacatcatatacgtaagtatagttcctcaaagtgactgacatttattttaattttgctttgtttttttttattttctcccccattcctttattttgtgttattcctgactcacttgacactctctgatgcctgagagattcctgtttgggatttaatatccagggctgtgtttacagtaaaaaaagcaggcagtcccttttagtttttcctttttaaatttttttgagattcttcatttcaggatttaaaactatagcagtccatcttaaggaaagtgtaactgccatggccacaagtctgctagttgcacttgaatgctctatcagggttgtttattaccctttctacgttctggactccttgccgagactgtttaacttgaagattaaagaaactattgcaaatgccagtgcatcagaacctaagagtggtcaaatattatgtgcaatttttttgtaaagaaattttaatttataataaagtttaacagtttaaagaacagttaa

SEQ ID NO: 14863 - DNA, 2618 bp, Homo sapiens
ggcaggtattattagccctatgacttgccgagctatacagcaagtaaaggtagactcaggaatgaaaacccagactcctggcttcttgtcagtgttctgcccatggctctcatcactagaccatatttcctaattcatatttggaaagtcactaataaaattaatggtaggaactgtaactcacaacatcatacattattataatttatacattcatatcttaaagaccattttggttttcgtgttaaaacacataggtaattggatttcacattttggttgcattcatttttcgcccccctcaacctttacaggttattttcttttatttgagctgtgttccaaagacccagcattccaaaaccttggaacggttttgttcagttatgccagctaattctggacttgcattgaggttacttcaacatgaatgggaagaaagcaatgttcagattctgaaacttcaagccaagatgtttacatataatatcccaacatgcctggccacctggaaaatgtaatgcaacaatcatgtacatgtttttatagctattgcttttatttataaggtttgctccagacaggtaaatctgaaatgacatctatatatatatatatatatatatttttttttttttttttcctggacagattgctattcttaatttagatttgtttttagcatttactgaggtttaatgagagtgagtactcattgaatagcctctaaaagcaaaaagcgtagacttttaattttctttgaaggacaacatttaggtgacagtactgttatcaaacaaatctgctacagacattttaagaccacctcttgaaatggtggtgtgtcacctgttgtagtctgatttcttctttcttttaaaggtgttagtgctaggtatttttgactagtaattatgaggtgttttttttttgttgttgttgttgttttttttttctcctgtgaacgttatttatgttcaaaacactggtctgcttttttcttgtaaagttgataaaaattgttgaatttttcttttcactataggttttcctccttggaagtttagcctgttaactttcaggaagttttgtactcagattcccacagtcagtattctgccagtggtggtgtttcattttgttcaaagatatataaatttttcttttcctttttctatatttctttttttttttttttctcttagagccattgctgctgagattgttctaaagggacaaagagaggtaagccatggttgaatctcagatgggtcacttttaaaaagtttttctgtctcttttgttgacttctcaatttaaaagaattaaagcacagaagttaacatttcatgcacactaagaaccaagtggggaaacaaaagtagttaacattttaagagtaccaaatattcggaaactccaaaactcagcataaccattttgtctcagatgttattgtgaattaccattctttaaacagatggaattatgaaggtgtttttcattatattttctgatggaattgtgtgtatatctatcttacaggtccaccgtttatatcagagagccttacagaagttacctctttgtgcatcactgtggaaagatgtaatgctttttatcttttattttatctcgatgttttcctgtaaattttctgcatgtgccatatccattgatgtggtaatgctcaaactctagctaagtcttacttctatgcttccctgtcttttacagcaactcttgtttgaagcatcagaaggaggtaaaactgataacctgagaaaactagtttccaagtgccaagagattggagtcagcctaaatgagctcttaaatttaaacagtaacaaaacagaaagcaagaatcactgaacactgggtgcagtcagttctaagtccttataataattgccaaaattatttgaatgattcttcaagattaggctgatccctggctaaggtctgtgtaaggcagacaagcgttattgatcatatcaagttccctacaatatcctgtcctcaaaaccggaagcaatgaacatgatcctcttcggttggataaatgaacttcctgtttggcctgcttctaggccctgccagattctcataacatcatatacgtaagtatagttcctcaaagtgactgacatttattttaattttgctttgtttttttttattttctcccccattcctttattttgtgttattcctgactcacttgacactctctgatgcctgagagattcctgtttgggatttaatatccagggctgtgtttacagtaaaaaaagcaggcagtcccttttagtttttcctttttaaatttttttgagattcttcatttcaggatttaaaactatagcagtccatcttaaggaaagtgtaactgccatggccacaagtctgctagttgcacttgaatgctctatcagggttgtttattaccctttctacgttctggactccttgccgagactgtttaacttgaagattaaagaaactattgcaaatgccagtgcatcagaacctaagagtggtcaaatattatgtgcaatttttttgtaaagaaattttaatttataataaagtttaacagtttaaagaacagttaa

SEQ ID NO: 14864 - DNA, 4753 bp, Homo sapiens
tgtattcaaaagctgacagcctaaaacagctgattttaaaaaccaccacaggcattacagagaaggttttgcatggtcaggagatttctgtagatgtggattttgtcacagcacaaagtaaaacaatggaagtgaagccatgtccttttagaccctaccatagtcctcttctagtttttaagtcctacagatttagtccatattatcgaaccaaggaaaaacttcccctgagctcagtatcatacagtaatatgattgaaccggatcagtgtttctgccgttttgatttaacaggaacatgtaatgatgatgattgtcaatggcagcatatacaagactatacacttagccgaaaacagttattccaggacattctgtcatataatctgtctttgattggttgtgcagagacaagtactaatgaagaaattactgcttcagcagaaaaatatgttgagaaactttttggagtaaacaaagatcgaatgtcaatggaccagatggctgttctccttgttagcaatatcaatgaaagtaaaggtcatactcctccatttacaacctacaaagataaaagaaagtggaagccaaagttttggagaaaacctatttcagataatagcttcagtagtgatgaggaacagtctacaggaccaattaagtatgctttccagccagagaaccaaataaatgttccagctctggatacagttgtcactccagatgatgtcagatactttacaaatgagactgatgacatcgctaatttagaagcaagtgtgcttgaaaatccttctcatgtacaactttggctcaagcttgcgtacaagtacttgaatcaaaatgagggggagtgctcagaatccttggattctgctttaaatgttctggcgcgagcattggaaaataacaaagacaatccagaaatttggtgccattacctcagattgttctcaaaaagaggaaccaaggacgaggtgcaggaaatgtgtgaaacagctgttgaatatgctccagattatcaaagcttttggacttttctacacctagaaagtacctttgaagaaaaggattacgtatgtgagagaatgttggagtttctgatgggagcagccaagcaggaaacatccaatattttgtcctttcagcttttagaggctcttttgtttagagttcagctgcacatatttactggaagatgccaaagtgcactggcaattttacagaatgcattgaaatctgctaatgatggaatagtagctgaataccttaaaaccagtgatcgatgtttggcatggttggcctacatacatcttattgaattcaacattctcccttcaaaattttatgatccatctaatgataatccttcaagaattgttaacactgaatcatttgtaatgccatggcaagctgttcaagatgtaaagactaatcctgacatgttgttagcagtttttgaagatgcagtgaaagcttgcacagatgagagccttgctgttgaggaaagaatagaggcctgccttccactttacacaaacatgattgctctgcaccaactcctggagaggtatgaggctgcaatggagctttgtaaatctttattggaatcatgtcctattaactgccagttgctggaagctcttgttgcattatatttgcaaacaaatcagcatgacaaagccagagcagtgtggcttactgcatttgaaaaaaatcctcagaatgcagaggttttttatcatatgtgcaaattcttcatcttacagaatcgaggcgataatcttcttccatttttgcggaaatttattgcatccttctttaaaccggggtttgagaagtataataacttggatctgtttcggtatctcttaaatattccaggaccaattgacattccatctcgtttatgtaaagggaattttgatgatgatatgtttaaccaccaagttccttatttgtggctgatttactgcctttgtcatcctcttcaatcaagtattaaagaaacagtggaggcatatgaggcagcattaggggtggctatgagatgtgatatagtacagaagatatggatggattatcttgtctttgcaaataatagagctgctggatccagaaacaaagttcaagaattcaaattttttactgatttagtgaatagatgtttggttacagtccctgcccgataccccattccttttagcagtgctgattactggtccaactatgaatttcataatagggttattttcttttatttgagctgtgttccaaagacccagcattccaaaaccttggaacggttttgttcagttatgccagctaattctggacttgcattgaggttacttcaacatgaatgggaagaaagcaatgttcagattctgaaacttcaagccaagatgtttacatataatatcccaacatgcctggccacctggaaaatgtaatgcaacaatcatgtacatgtttttatagctattgcttttatttataaggtttgctccagacaggtaaatctgaaatgacatctatatatatatatatatatatatttttttttttttttttcctggacagattgctattcttaatttagatttgtttttagcatttactgaggtttaatgagagtgagtactcattgaatagcctctaaaagcaaaaagcgtagacttttaattttctttgaaggacaacatttaggtgacagtactgttatcaaacaaatctgctacagacattttaagaccacctcttgaaatggtggtgtgtcacctgttgtagtctgatttcttctttcttttaaaggtgttagtgctaggtatttttgactagtaattatgaggtgttttttttttgttgttgttgttgttttttttttctcctgtgaacgttatttatgttcaaaacactggtctgcttttttcttgtaaagttgataaaaattgttgaatttttcttttcactataggttttcctccttggaagtttagcctgttaactttcaggaagttttgtactcagattcccacagtcagtattctgccagtggtggtgtttcattttgttcaaagatatataaatttttcttttcctttttctatatttctttttttttttttttctcttagagccattgctgctgagattgttctaaagggacaaagagaggtaagccatggttgaatctcagatgggtcacttttaaaaagtttttctgtctcttttgttgacttctcaatttaaaagaattaaagcacagaagttaacatttcatgcacactaagaaccaagtggggaaacaaaagtagttaacattttaagagtaccaaatattcggaaactccaaaactcagcataaccattttgtctcagatgttattgtgaattaccattctttaaacagatggaattatgaaggtgtttttcattatattttctgatggaattgtgtgtatatctatcttacaggtccaccgtttatatcagagagccttacagaagttacctctttgtgcatcactgtggaaagatgtaatgctttttatcttttattttatctcgatgttttcctgtaaattttctgcatgtgccatatccattgatgtggtaatgctcaaactctagctaagtcttacttctatgcttccctgtcttttacagcaactcttgtttgaagcatcagaaggaggtaaaactgataacctgagaaaactagtttccaagtgccaagagattggagtcagcctaaatgagctcttaaatttaaacagtaacaaaacagaaagcaagaatcactgaacactgggtgcagtcagttctaagtccttataataattgccaaaattatttgaatgattcttcaagattaggctgatccctggctaaggtctgtgtaaggcagacaagcgttattgatcatatcaagttccctacaatatcctgtcctcaaaaccggaagcaatgaacatgatcctcttcggttggataaatgaacttcctgtttggcctgcttctaggccctgccagattctcataacatcatatacgtaagtatagttcctcaaagtgactgacatttattttaattttgctttgtttttttttattttctcccccattcctttattttgtgttattcctgactcacttgacactctctgatgcctgagagattcctgtttgggatttaatatccagggctgtgtttacagtaaaaaaagcaggcagtcccttttagtttttcctttttaaatttttttgagattcttcatttcaggatttaaaactatagcagtccatcttaaggaaagtgtaactgccatggccacaagtctgctagttgcacttgaatgctctatcagggttgtttattaccctttctacgttctggactccttgccgagactgtttaacttgaagattaaagaaactattgcaaatgccagtgcatcagaacctaagagtggtcaaatattatgtgcaatttttttgtaaagaaattttaatttataataaagtttaacagtttaaagaacagttaatatttgaactgctttgtattgaaatactactttgtagtattgaaattgtttatatacttttttaatataagttaactttctaaaaactcttgctgtctttattcacttttcacactggtgggaaagggttgaagtcggagatacggatattcaccataacttatagcaatacttttttatcttgaaactgctttcccattaaa

SEQ ID NO: 14865 - DNA, 903 bp, Homo sapiens
catttaacttgttttaatgggtctcgggagttctgtgagcgagtgtgtgttggtcaaggttgtttgccagggtgggaagtagcgtgattttaaaaactaataacttaaaactgccacacgcaaaaaagaaaaccaaagtggtccacttacattctcctttccttctgaaggttttacgatgcattgttatcatgaaccagtcttttactactaaacttaaatggccaattgaaacaaacctggctaaggtctgtgtaaggcagacaagcgttattgatcatatcaagttccctacaatatcctgtcctcaaaaccggaagcaatgaacatgatcctcttcggttggataaatgaacttcctgtttggcctgcttctaggccctgccagattctcataacatcatatacgtaagtatagttcctcaaagtgactgacatttattttaattttgctttgtttttttttattttctcccccattcctttattttgtgttattcctgactcacttgacactctctgatgcctgagagattcctgtttgggatttaatatccagggctgtgtttacagtaaaaaaagcaggcagtcccttttagtttttcctttttaaatttttttgagattcttcatttcaggatttaaaactatagcagtccatcttaaggaaagtgtaactgccatggccacaagtctgctagttgcacttgaatgctctatcagggttgtttattaccctttctacgttctggactccttgccgagactgtttaacttgaagattaaagaaactattgcaaatgccagtgcatcagaacctaagagtggtcaaatattatgtgcaatttttttgtaaagaaattttaatttataataaagtttaacagtttaaagaacagttaa

SEQ ID NO: 14866 - DNA, 4740 bp, Homo sapiens
  misc_feature (4573)..(4573): n is a, c, g, or t
tgtattcaaaagctgacagcctaaaacagctgattttaaaaaccaccacaggcattacagagaaggttttgcatggtcaggagatttctgtagatgtggattttgtcacagcacaaagtaaaacaatggaagtgaagccatgtccttttagaccctaccatagtcctcttctagtttttaagtcctacagatttagtccatattatcgaaccaaggaaaaacttcccctgagctcagtatcatacagtaatatgattgaaccggatcagtgtttctgccgttttgatttaacaggaacatgtaatgatgatgattgtcaatggcagcatatacaagactatacacttagccgaaaacagttattccaggacattctgtcatataatctgtctttgattggttgtgcagagacaagtactaatgaagaaattactgcttcagcagaaaaatatgttgagaaactttttggagtaaacaaagatcgaatgtcaatggaccagatggctgttctccttgttagcaatatcaatgaaagtaaaggtcatactcctccatttacaacctacaaagataaaagaaagtggaagccaaagttttggagaaaacctatttcagataatagcttcagtagtgatgaggaacagtctacaggaccaattaagtatgctttccagccagagaaccaaataaatgttccagctctggatacagttgtcactccagatgatgtcagatactttacaaatgagactgatgacatcgctaatttagaagcaagtgtgcttgaaaatccttctcatgtacaactttggctcaagcttgcgtacaagtacttgaatcaaaatgagggggagtgctcagaatccttggattctgctttaaatgttctggcgcgagcattggaaaataacaaagacaatccagaaatttggtgccattacctcagattgttctcaaaaagaggaaccaaggacgaggtgcaggaaatgtgtgaaacagctgttgaatatgctccagattatcaaagcttttggacttttctacacctagaaagtacctttgaagaaaaggattacgtatgtgagagaatgttggagtttctgatgggagcagccaagcaggaaacatccaatattttgtcctttcagcttttagaggctcttttgtttagagttcagctgcacatatttactggaagatgccaaagtgcactggcaattttacagaatgcattgaaatctgctaatgatggaatagtagctgaataccttaaaaccagtgatcgatgtttggcatggttggcctacatacatcttattgaattcaacattctcccttcaaaattttatgatccatctaatgataatccttcaagaattgttaacactgaatcatttgtaatgccatggcaagctgttcaagatgtaaagactaatcctgacatgttgttagcagtttttgaagatgcagtgaaagcttgcacagatgagagccttgctgttgaggaaagaatagaggcctgccttccactttacacaaacatgattgctctgcaccaactcctggagaggtatgaggctgcaatggagctttgtaaatctttattggaatcatgtcctattaactgccagttgctggaagctcttgttgcattatatttgcaaacaaatcagcatgacaaagccagagcagtgtggcttactgcatttgaaaaaaatcctcagaatgcagaggttttttatcatatgtgcaaattcttcatcttacagaatcgaggcgataatcttcttccatttttgcggaaatttattgcatccttctttaaaccggggtttgagaagtataataacttggatctgtttcggtatctcttaaatattccaggaccaattgacattccatctcgtttatgtaaagggaattttgatgatgatatgtttaaccaccaagttccttatttgtggctgatttactgcctttgtcatcctcttcaatcaagtattaaagaaacagtggaggcatatgaggcagcattaggggtggctatgagatgtgatatagtacagaagatatggatggattatcttgtctttgcaaataatagagctgctggatccagaaacaaagttcaagaattcaaattttttactgatttagtgaatagatgtttggttacagtccctgcccgataccccattccttttagcagtgctgattactggtccaactatgaatttcataatagggttattttcttttatttgagctgtgttccaaagacccagcattccaaaaccttggaacggttttgttcagttatgccagctaattctggacttgcattgaggttacttcaacatgaatgggaagaaagcaatgttcagattctgaaacttcaagccaagatgtttacatataatatcccaacatgcctggccacctggaaaatgtaatgcaacaatcatgtacatgtttttatagctattgcttttatttataaggtttgctccagacaggtaaatctgaaatgacatctatatatatatatatatatatatttttttttttttttttcctggacagattgctattcttaatttagatttgtttttagcatttactgaggtttaatgagagtgagtactcattgaatagcctctaaaagcaaaaagcgtagacttttaattttctttgaaggacaacatttaggtgacagtactgttatcaaacaaatctgctacagacattttaagaccacctcttgaaatggtggtgtgtcacctgttgtagtctgatttcttctttcttttaaaggtgttagtgctaggtatttttgactagtaattatgaggtgttttttttttgttgttgttgttgttttttttttctcctgtgaacgttatttatgttcaaaacactggtctgcttttttcttgtaaagttgataaaaattgttgaatttttcttttcactataggttttcctccttggaagtttagcctgttaactttcaggaagttttgtactcagattcccacagtcagtattctgccagtggtggtgtttcattttgttcaaagatatataaatttttcttttcctttttctatatttctttttttttttttttctcttagagccattgctgctgagattgttctaaagggacaaagagaggtaagccatggttgaatctcagatgggtcacttttaaaaagtttttctgtctcttttgttgacttctcaatttaaaagaattaaagcacagaagttaacatttcatgcacactaagaaccaagtggggaaacaaaagtagttaacattttaagagtaccaaatattcggaaactccaaaactcagcataaccattttgtctcagatgttattgtgaattaccattctttaaacagatggaattatgaaggtgtttttcattatattttctgatggaattgtgtgtatatctatcttacaggtccaccgtttatatcagagagccttacagaagttacctctttgtgcatcactgtggaaagatgtaatgctttttatcttttattttatctcgatgttttcctgtaaattttctgcatgtgccatatccattgatgtggtaatgctcaaactctagctaagtcttacttctatgcttccctgtcttttacagcaactcttgtttgaagcatcagaaggaggtaaaactgataacctgagaaaactagtttccaagtgccaagagattggagtcagcctaaatgagctcttaaatttaaacagtaacaaaacagaaagcaagaatcactgaacactgggtgcagtcagttctaagtccttataataattgccaaaattatttgaatgattcttcaagattaggctgatccctggctaaggtctgtgtaaggcagacaagcgttattgatcatatcaagttccctacaatatcctgtcctcaaaaccggaagcaatgaacatgatcctcttcggttggataaatgaacttcctgtttggcctgcttctaggccctgccagattctcataacatcatatacgtaagtatagttcctcaaagtgactgacatttattttaattttgctttgtttttttttattttctcccccattcctttattttgtgttattcctgactcacttgacactctctgatgcctgagagattcctgtttgggatttaatatccagggctgtgtttacagtaaaaaaagcaggcagtcccttttagtttttcctttttaaatttttttgagattcttcatttcaggatttaaaactatagcagtccatcttaaggaaagtgtaactgccatggccacaagtctgctagttgcacttgaatgctctatcagggttgtttattaccctttctacgttctggactccttgccgagactgtttaacttgaagattaaagaaactattgcaaatgccagtgcatcagaacctaagagtggtcaaatattatgtgcaatttttttgtaaagaaattttaatttataataaagtttaacagtttaaagaacagttaaaaaaaaaaaacaaaaaaaaaaanaaaaaaacaaaaaaaaaaacaaacaaacaaaaaaaaaacaaaaaaaaaaaacaaacagcacaaacacaaaacaaaaaacacaaaaacgggggacacgacaacaaaaaacacaaacaaaacaaaactggtggggggccgcccgcgcacgcgagaagagtacttacccg

SEQ ID NO: 14867 - DNA, 3582 bp, Homo sapiens
tgtattcaaaagctgacagcctaaaacagctgattttaaaaaccaccacaggcattacagagaaggttttgcatggtcaggagatttctgtagatgtggattttgtcacagcacaaagtaaaacaatggaagtgaagccatgtccttttagaccctaccatagtcctcttctagtttttaagtcctacagatttagtccatattatcgaaccaaggaaaaacttcccctgagctcagtatcatacagtaatatgattgaaccggatcagtgtttctgccgttttgatttaacaggaacatgtaatgatgatgattgtcaatggcagcatatacaagactatacacttagccgaaaacagttattccaggacattctgtcatataatctgtctttgattggttgtgcagagacaagtactaatgaagaaattactgcttcagcagaaaaatatgttgagaaactttttggagtaaacaaagatcgaatgtcaatggaccagatggctgttctccttgttagcaatatcaatgaaagtaaaggtcatactcctccatttacaacctacaaagataaaagaaagtggaagccaaagttttggagaaaacctatttcagataatagcttcagtagtgatgaggaacagtctacaggaccaattaagtatgctttccagccagagaaccaaataaatgttccagctctggatacagttgtcactccagatgatgtcagatactttacaaatgagactgatgacatcgctaatttagaagcaagtgtgcttgaaaatccttctcatgtacaactttggctcaagcttgcgtacaagtacttgaatcaaaatgagggggagtgctcagaatccttggattctgctttaaatgttctggcgcgagcattggaaaataacaaagacaatccagaaatttggtgccattacctcagattgttctcaaaaagaggaaccaaggacgaggtgcaggaaatgtgtgaaacagctgttgaatatgctccagattatcaaagcttttggacttttctacacctagaaagtacctttgaagaaaaggattacgtatgtgagagaatgttggagtttctgatgggagcagccaagcaggaaacatccaatattttgtcctttcagcttttagaggctcttttgtttagagttcagctgcacatatttactggaagatgccaaagtgcactggcaattttacagaatgcattgaaatctgctaatgatggaatagtagctgaataccttaaaaccagtgatcgatgtttggcatggttggcctacatacatcttattgaattcaacattctcccttcaaaattttatgatccatctaatgataatccttcaagaattgttaacactgaatcatttgtaatgccatggcaagctgttcaagatgtaaagactaatcctgacatgttgttagcagtttttgaagatgcagtgaaagcttgcacagatgagagccttgctgttgaggaaagaatagaggcctgccttccactttacacaaacatgattgctctgcaccaactcctggagaggtatgaggctgcaatggagctttgtaaatctttattggaatcatgtcctattaactgccagttgctggaagctcttgttgcattatatttgcaaacaaatcagcatgacaaagccagagcagtgtggcttactgcatttgaaaaaaatcctcagaatgcagaggttttttatcatatgtgcaaattcttcatcttacagaatcgaggcgataatcttcttccatttttgcggaaatttattgcatccttctttaaaccggggtttgagaagtataataacttggatctgtttcggtatctcttaaatattccaggaccaattgacattccatctcgtttatgtaaagggaattttgatgatgatatgtttaaccaccaagttccttatttgtggctgatttactgcctttgtcatcctcttcaatcaagtattaaagaaacagtggaggcatatgaggcagcattaggggtggctatgagatgtgatatagtacagaagatatggatggattatcttgtctttgcaaataatagagctgctggatccagaaacaaagttcaagaattcaaattttttactgatttagtgaatagatgtttggttacagtccctgcccgataccccattccttttagcagtgctgattactggtccaactatgaatttcataatagggttattttcttttatttgagctgtgttccaaagacccagcattccaaaaccttggaacggttttgttcagttatgccagctaattctggacttgcattgaggttacttcaacatgaatgggaagaaagcaatgttcagattctgaaacttcaagccaagatgtttacatataatatcccaacatgcctggccacctggaaaatagccattgctgctgagattgttctaaagggacaaagagaggtccaccgtttatatcagagagccttacagaagttacctctttgtgcatcactgtggaaagatcaactcttgtttgaagcatcagaaggaggtaaaactgataacctgagaaaactagtttccaagtgccaagagattggagtcagcctaaatgagctcttaaatttaaacagtaacaaaacagaaagcaagaatcactgaacactgggtgcagtcagttctaagtccttataataattgccaaaattatttgaatgattcttcaagattaggctgatccctggctaaggtctgtgtaaggcagacaagcgttattgatcatatcaagttccctacaatatcctgtcctcaaaaccggaagcaatgaacatgatcctcttcggttggataaatgaacttcctgtttggcctgcttctaggccctgccagattctcataacatcatatacgtaagtatagttcctcaaagtgactgacatttattttaattttgctttgtttttttttattttctcccccattcctttattttgtgttattcctgactcacttgacactctctgatgcctgagagattcctgtttgggatttaatatccagggctgtgtttacagtaaaaaaagcaggcagtcccttttagtttttcctttttaaatttttttgagattcttcatttcaggatttaaaattgcacttgaatgctctatcagggttgtttattaccctttctacgttctggactccttgccgagactgtttaacttgaagattaaagaaactattgcaaatgccagtgcatcagaacctaagagtggtcaaatattatgtgcaatttttttgtaaagaaattttaatttataataaagtttaacagtttaaagaacagttaatatttgaactgctttgtattgaaatactactttgtagtattgaaattgtttatatacttttttaatataagttaactttctaaaaactcttgctgtctttattcacttttcacactggtgggaaagggttgaagtcggagatacggatattcaccataacttatagcaatacttttttatcttgaaactgctttcccattaaa

SEQ ID NO: 14868 - DNA, 611 bp, Homo sapiens
gcggtcctcctgcctcagcctcccaagtagctgggactacaggcatgcaccaccgtgcctggctaaattttgtatttttagtacagatggggtttcaccatattggccaggctggtctcaaactcacgtgatccacccaccttggcctccctaagtgctgggattacaggcatgagccatcgcgtccagcacatttctaatacaaatctattctcaaaacttttatacagtcacacacctaagcaacacaaattgtatgtgataataaatgtgtacttttggatattcatcatgatcttgctgcgatttaccttttaagtcagggaaaagagaaatgaaattgcttcagtgatatctctaagagtatatctgtattgttttagttttcatctgattccacttttcgatatgtgatagaagagggagtctaggttgtagtactagaagatggagttatacatttttacagtaatcctttttgcagaagttgaagatttactatgagatggtttcttaatgaaatgtgaaaagtctgtagttttggtttattcctgaaaggcaacattaataatataaaggccctttgggcagtttctacacctagaaagtac

SEQ ID NO: 14869 - DNA, 322 bp, Homo sapiens
atgggtgtggtttaaaagattttttttctttttactgttttgtctttgtcttattagattttaagtatcaggacacttaaaatgtacaaataaatgtgacctttttattatttcataaactttagcatagtaaaaattatgttaatctggtactgacatctctaatttttttatcaaaaaattttaaattttgcctagaatgcattgaaatctgctaatgatggaatagtagctgaataccttaaaaccagtgatcgatgtttggcatggttggcctacatacatcttattgaattcaacattctcccttcaaaattttatg

SEQ ID NO: 14870 - DNA, 4594 bp, Homo sapiens
attttagtcggcagcggcggcggcagcggggctgctgctcctcccagcatccctggcgcggccatttcagccccatcttggcccagcggagggagctgcagccgccgcttcagcagtttgaatttcagtttcttcggggtttaggaattgggcgcaccgaggaggagccggagaagccaccaccgctacctcacacagccggggcgcctccggtcccgtgccagcggtctgccgccgccgcccctctctgagagaagccgcgaggggaggccgagaccgccgtcgccgcccgcccgcaggggtggttccccctgtaaggggaggaccgagccggctttcccctcccccagagcgggtttccgcctgaggcagtcgacatgtccctggggctgagctccggctagagccggggagggagggccgcctgcccgcgccacagccccaccgcccgcccgcggaccttcagccagctccggcccgcggctcccggctgaattaggcatctccgactccggactcgccgctccttccctcagtcagagagcccagcgctgacgccggcaccggcctgaggagcccgagcggggcagcaccgcccctcacgccgccgccaccgcctcctcctcctcctcttcgccctcccactcccacccccagccaaggcctgctgaccgcgccgagcgccgagctggactgaccacggctgcccggagacgagagaggaagcagccggcccgcccctgggttcgcgctctcgccgcctctgagggaattgaattgaggcgccgcggctgcgagagctaaaaaggaaggaggagccgccgcgggactgagacgggggcagagccgaagagaccgacacagagaaggaaacgaggaggaggatgtctcaccgggcggccagcgcctggatcagcccgtgactcttaacagcggcgggcctcagaccccagcgcagactcggactttgtctttgggggcccgtgctctgccctccccggtttccgacaggacccagaggagccggcgtgcctctctgccctccagccttcttcaccatgtccaagatgccggccaagaagaagagctgcttccagatcaccagtgtcaccacggcccaggtggccactagcatcaccgaggacaccgagagcttggacgacccggacgagtcacgcacagaggacgtctcctccgagattttcgacgtctctcgggccacggattatggccctgaggaggtctgcgagcgcagctcttccgaagagacgcttaacaatgttggggatgcggagactcccgggaccgtctccccaaacctcctcctagatgggcagctggcagcggcggctgctgctcccgccaacggaggaggagtcgtttcggcccggagcgtgtctggggcgctcgccagtaccctggcggcggctgccacttcggcccccgcccccggagcacccggcggcccccagctcgcgggctcatccgccgggccagtgactgcagccccatctcagcctcccaccacatgtagttcccgttttcgcgtgatcaagctggaccacgggagcggagagccctatagacgcggccgatggacgtgtatggaatactatgagagggattcagacagcagcgtcctgactagatccggggattgcattagacacagcagtacttttgaccagactgcggagcgggacagcggcctgggcgccaccggagggtcggtggtggtagtagtggcctccatgcagggggcgcacgggcccgagtcgggaactgacagctccttgactgctgtgtcacagctacccccgtcggagaaaatgagccagcccactccggcccagccgcagagttttagcgttgggcagccacagccgccgccgccacccgtaggtggggctgtggctcaaagctcggctccgctgccgccgttcccgggagccgcgaccgggccgcagccaatgatggcagccgcgcagcccagccagccccagggagcggggcccgggggacagactctgccgccgacgaatgtaaccctggcgcagccggctatgtccctgcctccgcagccgggccctgcagtgggcgcccccgcggcgcagcagccccagcagttcgcgtatcctcagcctcagataccgcccggacatttgctgcccgtccagccctccggccagagtgagtacctgcagcagcacgtggccggcctgcagccgccaagccccgcgcagccctcgtccaccggcgccgcagcgagccccgccacggcggccacccttcccgtgggcaccggccagaatgcttcctcggtgggcgcgcagctcatgggcgcgtcttcccagcccagcgaagccatggccccccggacgggaccagcgcaaggcgggcaggtcgcgccttgtcagccgactggagtgcccccggctactgtgggaggcgtggtgcagccgtgcctcggtcctgccggggctgggcagccccagtccgtgcctccgccgcagatgggtggcagtggtccgctgtcagccgtacctggtggccctcacgccgtggtgcccggagttccaaacgtgcctgcagccgtgcccgctccaagcgtgcctagtgtgtctaccacttctgttactatgccaaatgtacccgcgcctctggcccagtcgcaacagctgagcagccatacgccagtcagcaggagcagcagcataatccagcatgttgggctgcccttagcgccaggcacacacagcgcaccaacaagtctaccacagtctgacctaagccagtttcaaactcagacccagcctttagtcgggcaagtcgacgatactagaagaaaatcagaacccctacctcaaccaccactttctctcattgctgaaaataagcctgttgtgaagccgcctgttgcagattccctggcaaacccccttcagttaacacctatgaacagtctggccacctctgtattcagcatagctattcctgttgatggtgatgaagacaggaatccttcaactgctttctaccaagcgttccatttgaacacgttaaaggaatcaaagagcctctgggatagtgcatctgggggaggtgttgtagccattgacaacaaaatagaacaagcaatggatctggtgaaaagccatttgatgtatgcagtaagagaagaagtggaagttttaaaggaacaaataaaagaattagttgaaagaaactctttacttgaacgagaaaatgcactgttaaaatctctttcaagcaatgatcaattatcccaactcccaacccaacaggccaatcctggtagcacttctcaacagcaagcagtgatagcacagcctccgcagccaacgcaacctccacagcagccgaatgtctcctcagcataaagctttcttaagcctcattaagaaaaaaactgaaagcaatctatccttgtgtgccactggtgttctttccactttatacgaaagcaagtagccatgctttggttgtgtgtttggccttttcagtattagacaatcattctacaagagcttttcctctctctgagatgtcatgcagcgctgttgatgtccagttctatgtcatcagtacacaaggagaataatagatggggtttattaaagcgagcaaagtctgcattttacctggtgcgcatgagtggggtctttaagagttttggtggctctcccatgtttcctattacccatggatttaccctgagccttcctatcacattataaataacagttcatctaaagagccacttttctttctgattcagtaacatttgcctacataagttttcatttatttgtgttttatttattacagggctgctattttcataatgtacatgaacaatgtcacagaacttttttaatttttttgaataattataagtatcagtaaaggaagtgaaagacaggattgcatttaatagataaaacgtttaggcaataattgaacaaaagaatcctggcatatttctaacactaatggcaatttacttatggtatttattttcagtagtaaagacccagcttgaatgtaaattttgtatagtgtaagtatgaagaacatagtgcaactgtacaggtagtcaccagttattgtgatatgataaataattgggctattttgatgaagaaaactttgttcatttgtttctactttctaagagaaattgccacgattcctctgcttttcaacatttcgtatgacttttttttcgggtgggaataaaaagctgtgaaattgttcaacctactttgtaaccaaagaagcaaagctgtgtaatggagtttggttttttttttgttgttttttttttttttgtctttttttttttttataatgcacattctttatgtatttttatttagtgttttctcagtcacaattttctttactgtctagcatgatctgcatgacctataatctttgaaccactttcgtacctcatgtttttatccagcactcttattgtaatatgtactagtctgtgaacaatgtcaaataaaagagaacgaacaggtagtttggtggagctgagctagtgtacaatacactagttgta

SEQ ID NO: 14871 - DNA, 656 bp, Homo sapiens
aaagtgctgggattaccggtgtgagaccttacaggactgttagtctcaaactatttttttaaaaataccaaaattttaaagtccaaaattacagatcactttaaagcagtactatgactagtttaacatcaaacagctttccgttggaatattgttcctttgttctctttatctaccattttaagcatgtgattttaaactttttttttttttaattctaagcttagttgacaatttaagaagctagtattttttggaaatcgtcccaaactttgaaaagaaaattctgggcttactgctctggttgggaactggattttttccaacccatcttccataggctcggtcaagataaagcagaaacattaaaagcaagagcaggaaaactagtataaaaacttagcaccaagtaggccagaaccagatagcaccacctttatcttttcactcttttgacattcctaattttgtttttcacaggatctggtgaaaagccatttgatgtatgcagtaagagaagaagtggaagttttaaaggaacaaataaaagaattagttgaaagaaactctttacttgaacgagtgcctgttacatcccttccaagcatggatcattttccaattcccccgggcatccggtagccttctcacagcgc

SEQ ID NO: 14872 - DNA, 5055 bp, Homo sapiens
attttagtcggcagcggcggcggcagcggggctgctgctcctcccagcatccctggcgcggccatttcagccccatcttggcccagcggagggagctgcagccgccgcttcagcagtttgaatttcagtttcttcggggtttaggaattgggcgcaccgaggaggagccggagaagccaccaccgctacctcacacagccggggcgcctccggtcccgtgccagcggtctgccgccgccgcccctctctgagagaagccgcgaggggaggccgagaccgccgtcgccgcccgcccgcaggggtggttccccctgtaaggggaggaccgagccggctttcccctcccccagagcgggtttccgcctgaggcagtcgacatgtccctggggctgagctccggctagagccggggagggagggccgcctgcccgcgccacagccccaccgcccgcccgcggaccttcagccagctccggcccgcggctcccggctgaattaggcatctccgactccggactcgccgctccttccctcagtcagagagcccagcgctgacgccggcaccggcctgaggagcccgagcggggcagcaccgcccctcacgccgccgccaccgcctcctcctcctcctcttcgccctcccactcccacccccagccaaggcctgctgaccgcgccgagcgccgagctggactgaccacggctgcccggagacgagagaggaagcagccggcccgcccctgggttcgcgctctcgccgcctctgagggaattgaattgaggcgccgcggctgcgagagctaaaaaggaaggaggagccgccgcgggactgagacgggggcagagccgaagagaccgacacagagaaggaaacgaggaggaggatgtctcaccgggcggccagcgcctggatcagcccgtgactcttaacagcggcgggcctcagaccccagcgcagactcggactttgtctttgggggcccgtgctctgccctccccggtttccgacaggacccagaggagccggcgtgcctctctgccctccagccttcttcaccatgtccaagatgccggccaagaagaagagctgcttccagatcaccagtgtcaccacggcccaggtggccactagcatcaccgaggacaccgagagcttggacgacccggacgagtcacgcacagaggacgtctcctccgagattttcgacgtctctcgggccacggattatggccctgaggaggtctgcgagcgcagctcttccgaagagacgcttaacaatgttggggatgcggagactcccgggaccgtctccccaaacctcctcctagatgggcagctggcagcggcggctgctgctcccgccaacggaggaggagtcgtttcggcccggagcgtgtctggggcgctcgccagtaccctggcggcggctgccacttcggcccccgcccccggagcacccggcggcccccagctcgcgggctcatccgccgggccagtgactgcagccccatctcagcctcccaccacatgtagttcccgttttcgcgtgatcaagctggaccacgggagcggagagccctatagacgcggccgatggacgtgtatggaatactatgagagggattcagacagcagcgtcctgactagatccggggattgcattagacacagcagtacttttgaccagactgcggagcgggacagcggcctgggcgccaccggagggtcggtggtggtagtagtggcctccatgcagggggcgcacgggcccgagtcgggaactgacagctccttgactgctgtgtcacagctacccccgtcggagaaaatgagccagcccactccggcccagccgcagagttttagcgttgggcagccacagccgccgccgccacccgtaggtggggctgtggctcaaagctcggctccgctgccgccgttcccgggagccgcgaccgggccgcagccaatgatggcagccgcgcagcccagccagccccagggagcggggcccgggggacagactctgccgccgacgaatgtaaccctggcgcagccggctatgtccctgcctccgcagccgggccctgcagtgggcgcccccgcggcgcagcagccccagcagttcgcgtatcctcagcctcagataccgcccggacatttgctgcccgtccagccctccggccagagtgagtacctgcagcagcacgtggccggcctgcagccgccaagccccgcgcagccctcgtccaccggcgccgcagcgagccccgccacggcggccacccttcccgtgggcaccggccagaatgcttcctcggtgggcgcgcagctcatgggcgcgtcttcccagcccagcgaagccatggccccccggacgggaccagcgcaaggcgggcaggtcgcgccttgtcagccgactggagtgcccccggctactgtgggaggcgtggtgcagccgtgcctcggtcctgccggggctgggcagccccagtccgtgcctccgccgcagatgggtggcagtggtccgctgtcagccgtacctggtggccctcacgccgtggtgcccggagttccaaacgtgcctgcagccgtgcccgctccaagcgtgcctagtgtgtctaccacttctgttactatgccaaatgtacccgcgcctctggcccagtcgcaacagctgagcagccatacgccagtcagcaggagcagcagcataatccagcatgttgggctgcccttagcgccaggcacacacagcgcaccaacaagtctaccacagtctgacctaagccagtttcaaactcagacccagcctttagtcgggcaagtcgacgatactagaagaaaatcagaacccctacctcaaccaccactttctctcattgctgaaaataagcctgttgtgaagccgcctgttgcagattccctggcaaacccccttcagttaacacctatgaacagtctggccacctctgtattcagcatagctattcctgttgatggtgatgaagacaggaatccttcaactgctttctaccaagcgttccatttgaacacgttaaaggaatcaaagagcctctgggatagtgcatctgggggaggtgttgtagccattgacaacaaaatagaacaagcaatggatctggtgaaaagccatttgatgtatgcagtaagagaagaagtggaagttttaaaggaacaaataaaagaattagttgaaagaaactctttacttgaacgagaaaatgcactgttaaaatctctttcaagcaatgatcaattatcccaactcccaacccaacaggccaatcctggtagcacttctcaacagcaagcagtgatagcacagcctccgcagccaacgcaacctccacagcagccgaatgtctcctcagcataaagctttcttaagcctcattaagaaaaaaactgaaagcaatctatccttgtgtgccactggtgttctttccactttatacgaaagcaagtagccatgctttggttgtgtgtttggccttttcagtattagacaatcattctacaagagcttttcctctctctgagatgtcatgcagcgctgttgatgtccagttctatgtcatcagtacacaaggagaataatagatggggtttattaaagcgagcaaagtctgcattttacctggtgcgcatgagtggggtctttaagagttttggtggctctcccatgtttcctattacccatggatttaccctgagccttcctatcacattataaataacagttcatctaaagagccacttttctttctgattcagtaacatttgcctacataagttttcatttatttgtgttttatttattacagggctgctattttcataatgtacatgaacaatgtcacagaacttttttaatttttttgaataattataagtatcagtaaaggaagtgaaagacaggattgcatttaatagataaaacgtttaggcaataattgaacaaaagaatcctggcatatttctaacactaatggcaatttacttatggtatttattttcagtagtaaagacccagcttgaatgtaaattttgtatagtgtaagtatgaagaacatagtgcaactgtacaggtagtcaccagttattgtgatatgataaataattgggctattttgatgaagaaaactttgttcatttgtttctactttctaagagaaattgccacgattcctctgcttttcaacatttcgtatgacttttttttcgggtgggaataaaaagctgtgaaattgttcaacctactttgtaaccaaagaagcaaagctgtgtaatggagtttggttttttttttgttgttttttttttttttgtctttttttttttttataatgcacattctttatgtatttttatttagtgttttctcagtcacaattttctttactgtctagcatgatctgcatgacctataatctttgaaccactttcgtacctcatgtttttatccagcactcttattgtaatatgtactagtctgtgaacaatgtcaaataaaagagaacgaacaggtagtttggtggagctgagctagtgtacaatacactagttgtaaaaaaaaaaaaaaaaagtgagccatcttttgttcatttaaaatggtgttttgaatttcgtatgcagaaaacgttttgttacattgcagattttaatgtatttaataaatgcaacatgcagattaagtgcagtgtatactgagtatttaaattaaaatgtacatttcataaatacagtttcaaaagaaagcatcattttgtgtatactaacacattaagtgtatgtcagaaattgatgtataaatatatattttaacattttctgaaattaaactgcagttttgttgaaatatttggctctatatgtgttcaaaatttgactagatttgtattttcacagttcaaaatactccttaaagacctgttaataatgacttactgatagttcttaaattttcaaagtaaaacaatttaaagaatgcaaaaatagtgagcaatatttggactcaatattcatattat

SEQ ID NO: 14873 - DNA, 4983 bp, Homo sapiens
attttagtcggcagcggcggcggcagcggggctgctgctcctcccagcatccctggcgcggccatttcagccccatcttggcccagcggagggagctgcagccgccgcttcagcagtttgaatttcagtttcttcggggtttaggaattgggcgcaccgaggaggagccggagaagccaccaccgctacctcacacagccggggcgcctccggtcccgtgccagcggtctgccgccgccgcccctctctgagagaagccgcgaggggaggccgagaccgccgtcgccgcccgcccgcaggggtggttccccctgtaaggggaggaccgagccggctttcccctcccccagagcgggtttccgcctgaggcagtcgacatgtccctggggctgagctccggctagagccggggagggagggccgcctgcccgcgccacagccccaccgcccgcccgcggaccttcagccagctccggcccgcggctcccggctgaattaggcatctccgactccggactcgccgctccttccctcagtcagagagcccagcgctgacgccggcaccggcctgaggagcccgagcggggcagcaccgcccctcacgccgccgccaccgcctcctcctcctcctcttcgccctcccactcccacccccagccaaggcctgctgaccgcgccgagcgccgagctggactgaccacggctgcccggagacgagagaggaagcagccggcccgcccctgggttcgcgctctcgccgcctctgagggaattgaattgaggcgccgcggctgcgagagctaaaaaggaaggaggagccgccgcgggactgagacgggggcagagccgaagagaccgacacagagaaggaaacgaggaggaggatgtctcaccgggcggccagcgcctggatcagcccgtgactcttaacagcggcgggcctcagaccccagcgcagactcggactttgtctttgggggcccgtgctctgccctccccggtttccgacaggacccagaggagccggcgtgcctctctgccctccagccttcttcaccatgtccaagatgccggccaagaagaagagctgcttccagatcaccagtgtcaccacggcccaggtggccactagcatcaccgaggacaccgagagcttggacgacccggacgagtcacgcacagaggacgtctcctccgagattttcgacgtctctcgggccacggattatggccctgaggaggtctgcgagcgcagctcttccgaagagacgcttaacaatgttggggatgcggagactcccgggaccgtctccccaaacctcctcctagatgggcagctggcagcggcggctgctgctcccgccaacggaggaggagtcgtttcggcccggagcgtgtctggggcgctcgccagtaccctggcggcggctgccacttcggcccccgcccccggagcacccggcggcccccagctcgcgggctcatccgccgggccagtgactgcagccccatctcagcctcccaccacatgtagttcccgttttcgcgtgatcaagctggaccacgggagcggagagccctatagacgcggccgatggacgtgtatggaatactatgagagggattcagacagcagcgtcctgactagatccggggattgcattagacacagcagtacttttgaccagactgcggagcgggacagcggcctgggcgccaccggagggtcggtggtggtagtagtggcctccatgcagggggcgcacgggcccgagtcgggaactgacagctccttgactgctgtgtcacagctacccccgtcggagaaaatgagccagcccactccggcccagccgcagagttttagcgttgggcagccacagccgccgccgccacccgtaggtggggctgtggctcaaagctcggctccgctgccgccgttcccgggagccgcgaccgggccgcagccaatgatggcagccgcgcagcccagccagccccagggagcggggcccgggggacagactctgccgccgacgaatgtaaccctggcgcagccggctatgtccctgcctccgcagccgggccctgcagtgggcgcccccgcggcgcagcagccccagcagttcgcgtatcctcagcctcagataccgcccggacatttgctgcccgtccagccctccggccagagtgagtacctgcagcagcacgtggccggcctgcagccgccaagccccgcgcagccctcgtccaccggcgccgcagcgagccccgccacggcggccacccttcccgtgggcaccggccagaatgcttcctcggtgggcgcgcagctcatgggcgcgtcttcccagcccagcgaagccatggccccccggacgggaccagcgcaaggcgggcaggtcgcgccttgtcagccgactggagtgcccccggctactgtgggaggcgtggtgcagccgtgcctcggtcctgccggggctgggcagccccagtccgtgcctccgccgcagatgggtggcagtggtccgctgtcagccgtacctggtggccctcacgccgtggtgcccggagttccaaacgtgcctgcagccgtgcccgctccaagcgtgcctagtgtgtctaccacttctgttactatgccaaatgtacccgcgcctctggcccagtcgcaacagctgagcagccatacgccagtcagcaggagcagcagcataatccagcatgttgggctgcccttagcgccaggcacacacagcgcaccaacaagtctaccacagtctgacctaagccagtttcaaactcagacccagcctttagtcgggcaagtcgacgatactagaagaaaatcagaacccctacctcaaccaccactttctctcattgctgaaaataagcctgttgtgaagccgcctgttgcagattccctggcaaacccccttcagttaacacctatgaacagtctggccacctctgtattcagcatagctattcctgttgatggtgatgaagacagtgcatctgggggaggtgttgtagccattgacaacaaaatagaacaagcaatggatctggtgaaaagccatttgatgtatgcagtaagagaagaagtggaagttttaaaggaacaaataaaagaattagttgaaagaaactctttacttgaacgagaaaatgcactgttaaaatctctttcaagcaatgatcaattatcccaactcccaacccaacaggccaatcctggtagcacttctcaacagcaagcagtgatagcacagcctccgcagccaacgcaacctccacagcagccgaatgtctcctcagcataaagctttcttaagcctcattaagaaaaaaactgaaagcaatctatccttgtgtgccactggtgttctttccactttatacgaaagcaagtagccatgctttggttgtgtgtttggccttttcagtattagacaatcattctacaagagcttttcctctctctgagatgtcatgcagcgctgttgatgtccagttctatgtcatcagtacacaaggagaataatagatggggtttattaaagcgagcaaagtctgcattttacctggtgcgcatgagtggggtctttaagagttttggtggctctcccatgtttcctattacccatggatttaccctgagccttcctatcacattataaataacagttcatctaaagagccacttttctttctgattcagtaacatttgcctacataagttttcatttatttgtgttttatttattacagggctgctattttcataatgtacatgaacaatgtcacagaacttttttaatttttttgaataattataagtatcagtaaaggaagtgaaagacaggattgcatttaatagataaaacgtttaggcaataattgaacaaaagaatcctggcatatttctaacactaatggcaatttacttatggtatttattttcagtagtaaagacccagcttgaatgtaaattttgtatagtgtaagtatgaagaacatagtgcaactgtacaggtagtcaccagttattgtgatatgataaataattgggctattttgatgaagaaaactttgttcatttgtttctactttctaagagaaattgccacgattcctctgcttttcaacatttcgtatgacttttttttcgggtgggaataaaaagctgtgaaattgttcaacctactttgtaaccaaagaagcaaagctgtgtaatggagtttggttttttttttgttgttttttttttttttgtctttttttttttttataatgcacattctttatgtatttttatttagtgttttctcagtcacaattttctttactgtctagcatgatctgcatgacctataatctttgaaccactttcgtacctcatgtttttatccagcactcttattgtaatatgtactagtctgtgaacaatgtcaaataaaagagaacgaacaggtagtttggtggagctgagctagtgtacaatacactagttgtaaaaaaaaaaaaaaaaagtgagccatcttttgttcatttaaaatggtgttttgaatttcgtatgcagaaaacgttttgttacattgcagattttaatgtatttaataaatgcaacatgcagattaagtgcagtgtatactgagtatttaaattaaaatgtacatttcataaatacagtttcaaaagaaagcatcattttgtgtatactaacacattaagtgtatgtcagaaattgatgtataaatatatattttaacattttctgaaattaaactgcagttttgttgaaatatttggctctatatgtgttcaaaatttgactagatttgtattttcacagttcaaaatactccttaaagacctgttaataatgacttactgatagttcttaaattttcaaagtaaaacaatttaaagaatgcaaaaatagtgagcaatatttggactcaatattcatattat

SEQ ID NO: 14874 - DNA, 5212 bp, Homo sapiens
attttagtcggcagcggcggcggcagcggggctgctgctcctcccagcatccctggcgcggccatttcagccccatcttggcccagcggagggagctgcagccgccgcttcagcagtttgaatttcagtttcttcggggtttaggaattgggcgcaccgaggaggagccggagaagccaccaccgctacctcacacagccggggcgcctccggtcccgtgccagcggtctgccgccgccgcccctctctgagagaagccgcgaggggaggccgagaccgccgtcgccgcccgcccgcaggggtggttccccctgtaaggggaggaccgagccggctttcccctcccccagagcgggtttccgcctgaggcagtcgacatgtccctggggctgagctccggctagagccggggagggagggccgcctgcccgcgccacagccccaccgcccgcccgcggaccttcagccagctccggcccgcggctcccggctgaattaggcatctccgactccggactcgccgctccttccctcagtcagagagcccagcgctgacgccggcaccggcctgaggagcccgagcggggcagcaccgcccctcacgccgccgccaccgcctcctcctcctcctcttcgccctcccactcccacccccagccaaggcctgctgaccgcgccgagcgccgagctggactgaccacggctgcccggagacgagagaggaagcagccggcccgcccctgggttcgcgctctcgccgcctctgagggaattgaattgaggcgccgcggctgcgagagctaaaaaggaaggaggagccgccgcgggactgagacgggggcagagccgaagagaccgacacagagaaggaaacgaggaggaggatgtctcaccgggcggccagcgcctggatcagcccgtgactcttaacagcggcgggcctcagaccccagcgcagactcggactttgtctttgggggcccgtgctctgccctccccggtttccgacaggacccagaggagccggcgtgcctctctgccctccagccttcttcaccatgtccaagatgccggccaagaagaagagctgcttccagatcaccagtgtcaccacggcccaggtggccactagcatcaccgaggacaccgagagcttggacgacccggacgagtcacgcacagaggacgtctcctccgagattttcgacgtctctcgggccacggattatggccctgaggaggtctgcgagcgcagctcttccgaagagacgcttaacaatgttggggatgcggagactcccgggaccgtctccccaaacctcctcctagatgggcagctggcagcggcggctgctgctcccgccaacggaggaggagtcgtttcggcccggagcgtgtctggggcgctcgccagtaccctggcggcggctgccacttcggcccccgcccccggagcacccggcggcccccagctcgcgggctcatccgccgggccagtgactgcagccccatctcagcctcccaccacatgtagttcccgttttcgcgtgatcaagctggaccacgggagcggagagccctatagacgcggccgatggacgtgtatggaatactatgagagggattcagacagcagcgtcctgactagatccggggattgcattagacacagcagtacttttgaccagactgcggagcgggacagcggcctgggcgccaccggagggtcggtggtggtagtagtggcctccatgcagggggcgcacgggcccgagtcgggaactgacagctccttgactgctgtgtcacagctacccccgtcggagaaaatgagccagcccactccggcccagccgcagagttttagcgttgggcagccacagccgccgccgccacccgtaggtggggctgtggctcaaagctcggctccgctgccgccgttcccgggagccgcgaccgggccgcagccaatgatggcagccgcgcagcccagccagccccagggagcggggcccgggggacagactctgccgccgacgaatgtaaccctggcgcagccggctatgtccctgcctccgcagccgggccctgcagtgggcgcccccgcggcgcagcagccccagcagttcgcgtatcctcagcctcagataccgcccggacatttgctgcccgtccagccctccggccagagtgagtacctgcagcagcacgtggccggcctgcagccgccaagccccgcgcagccctcgtccaccggcgccgcagcgagccccgccacggcggccacccttcccgtgggcaccggccagaatgcttcctcggtgggcgcgcagctcatgggcgcgtcttcccagcccagcgaagccatggccccccggacgggaccagcgcaaggcgggcaggtcgcgccttgtcagccgactggagtgcccccggctactgtgggaggcgtggtgcagccgtgcctcggtcctgccggggctgggcagccccagtccgtgcctccgccgcagatgggtggcagtggtccgctgtcagccgtacctggtggccctcacgccgtggtgcccggagttccaaacgtgcctgcagccgtgcccgctccaagcgtgcctagtgtgtctaccacttctgttactatgccaaatgtacccgcgcctctggcccagtcgcaacagctgagcagccatacgccagtcagcaggagcagcagcataatccagcatgttgggctgcccttagcgccaggcacacacagcgcaccaacaagtctaccacagtctgacctaagccagtttcaaactcagacccagcctttagtcgggcaagtcgacgatactagaagaaaatcagaacccctacctcaaccaccactttctctcattgctgaaaataagcctgttgtgaagccgcctgttgcagattccctggcaaacccccttcagttaacacctatgaacagtctggccacctctgtattcagcatagctattcctgttgatggtgatgaagacaggaatccttcaactgctttctaccaagcgttccatttgaacacgttaaaggaatcaaagagcctctgggatagaattttttttagaattcagcatcggaggaggaatgtgacataataatgatcgaaagccgaaagtttaaaagttgtgatgccctcacatggttggagggttattctagcttctaaggactgaatgttgtccacaagagtgtcatcaggtcataaattgtgcatctgggggaggtgttgtagccattgacaacaaaatagaacaagcaatggatctggtgaaaagccatttgatgtatgcagtaagagaagaagtggaagttttaaaggaacaaataaaagaattagttgaaagaaactctttacttgaacgagaaaatgcactgttaaaatctctttcaagcaatgatcaattatcccaactcccaacccaacaggccaatcctggtagcacttctcaacagcaagcagtgatagcacagcctccgcagccaacgcaacctccacagcagccgaatgtctcctcagcataaagctttcttaagcctcattaagaaaaaaactgaaagcaatctatccttgtgtgccactggtgttctttccactttatacgaaagcaagtagccatgctttggttgtgtgtttggccttttcagtattagacaatcattctacaagagcttttcctctctctgagatgtcatgcagcgctgttgatgtccagttctatgtcatcagtacacaaggagaataatagatggggtttattaaagcgagcaaagtctgcattttacctggtgcgcatgagtggggtctttaagagttttggtggctctcccatgtttcctattacccatggatttaccctgagccttcctatcacattataaataacagttcatctaaagagccacttttctttctgattcagtaacatttgcctacataagttttcatttatttgtgttttatttattacagggctgctattttcataatgtacatgaacaatgtcacagaacttttttaatttttttgaataattataagtatcagtaaaggaagtgaaagacaggattgcatttaatagataaaacgtttaggcaataattgaacaaaagaatcctggcatatttctaacactaatggcaatttacttatggtatttattttcagtagtaaagacccagcttgaatgtaaattttgtatagtgtaagtatgaagaacatagtgcaactgtacaggtagtcaccagttattgtgatatgataaataattgggctattttgatgaagaaaactttgttcatttgtttctactttctaagagaaattgccacgattcctctgcttttcaacatttcgtatgacttttttttcgggtgggaataaaaagctgtgaaattgttcaacctactttgtaaccaaagaagcaaagctgtgtaatggagtttggttttttttttgttgttttttttttttttgtctttttttttttttataatgcacattctttatgtatttttatttagtgttttctcagtcacaattttctttactgtctagcatgatctgcatgacctataatctttgaaccactttcgtacctcatgtttttatccagcactcttattgtaatatgtactagtctgtgaacaatgtcaaataaaagagaacgaacaggtagtttggtggagctgagctagtgtacaatacactagttgtaaaaaaaaaaaaaaaaagtgagccatcttttgttcatttaaaatggtgttttgaatttcgtatgcagaaaacgttttgttacattgcagattttaatgtatttaataaatgcaacatgcagattaagtgcagtgtatactgagtatttaaattaaaatgtacatttcataaatacagtttcaaaagaaagcatcattttgtgtatactaacacattaagtgtatgtcagaaattgatgtataaatatatattttaacattttctgaaattaaactgcagttttgttgaaatatttggctctatatgtgttcaaaatttgactagatttgtattttcacagttcaaaatactccttaaagacctgttaataatgacttactgatagttcttaaattttcaaagtaaaacaatttaaagaatgcaaaaatagtgagcaatatttggactcaatattcatattat

SEQ ID NO: 14875 - DNA, 4931 bp, Homo sapiens
attttagtcggcagcggcggcggcagcggggctgctgctcctcccagcatccctggcgcggccatttcagccccatcttggcccagcggagggagctgcagccgccgcttcagcagtttgaatttcagtttcttcggggtttaggaattgggcgcaccgaggaggagccggagaagccaccaccgctacctcacacagccggggcgcctccggtcccgtgccagcggtctgccgccgccgcccctctctgagagaagccgcgaggggaggccgagaccgccgtcgccgcccgcccgcaggggtggttccccctgtaaggggaggaccgagccggctttcccctcccccagagcgggtttccgcctgaggcagtcgacatgtccctggggctgagctccggctagagccggggagggagggccgcctgcccgcgccacagccccaccgcccgcccgcggaccttcagccagctccggcccgcggctcccggctgaattaggcatctccgactccggactcgccgctccttccctcagtcagagagcccagcgctgacgccggcaccggcctgaggagcccgagcggggcagcaccgcccctcacgccgccgccaccgcctcctcctcctcctcttcgccctcccactcccacccccagccaaggcctgctgaccgcgccgagcgccgagctggactgaccacggctgcccggagacgagagaggaagcagccggcccgcccctgggttcgcgctctcgccgcctctgagggaattgaattgaggcgccgcggctgcgagagctaaaaaggaaggaggagccgccgcgggactgagacgggggcagagccgaagagaccgacacagagaaggaaacgaggaggaggatgtctcaccgggcggccagcgcctggatcagcccgtgactcttaacagcggcgggcctcagaccccagcgcagactcggactttgtctttgggggcccgtgctctgccctccccggtttccgacaggacccagaggagccggcgtgcctctctgccctccagccttcttcaccatgtccaagatgccggccaagaagaagagctgcttccagatcaccagtgtcaccacggcccaggtggccactagcatcaccgaggacaccgagagcttggacgacccggacgagtcacgcacagaggacgtctcctccgagattttcgacgtctctcgggccacggattatggccctgaggaggtctgcgagcgcagctcttccgaagagacgcttaacaatgttggggatgcggagactcccgggaccgtctccccaaacctcctcctagatgggcagctggcagcggcggctgctgctcccgccaacggaggaggagtcgtttcggcccggagcgtgtctggggcgctcgccagtaccctggcggcggctgccacttcggcccccgcccccggagcacccggcggcccccagctcgcgggctcatccgccgggccagtgactgcagccccatctcagcctcccaccacatgtagttcccgttttcgcgtgatcaagctggaccacgggagcggagagccctatagacgcggccgatggacgtgtatggaatactatgagagggattcagacagcagcgtcctgactagatccggggattgcattagacacagcagtacttttgaccagactgcggagcgggacagcggcctgggcgccaccggagggtcggtggtggtagtagtggcctccatgcagggggcgcacgggcccgagtcgggaactgacagctccttgactgctgtgtcacagctacccccgtcggagaaaatgagccagcccactccggcccagccgcagagttttagcgttgggcagccacagccgccgccgccacccgtaggtggggctgtggctcaaagctcggctccgctgccgccgttcccgggagccgcgaccgggccgcagccaatgatggcagccgcgcagcccagccagccccagggagcggggcccgggggacagactctgccgccgacgaatgtaaccctggcgcagccggctatgtccctgcctccgcagccgggccctgcagtgggcgcccccgcggcgcagcagccccagcagttcgcgtatcctcagcctcagataccgcccggacatttgctgcccgtccagccctccggccagagtgagtacctgcagcagcacgtggccggcctgcagccgccaagccccgcgcagccctcgtccaccggcgccgcagcgagccccgccacggcggccacccttcccgtgggcaccggccagaatgcttcctcggtgggcgcgcagctcatgggcgcgtcttcccagcccagcgaagccatggccccccggacgggaccagcgcaaggcgggcaggtcgcgccttgtcagccgactggagtgcccccggctactgtgggaggcgtggtgcagccgtgcctcggtcctgccggggctgggcagccccagtccgtgcctccgccgcagatgggtggcagtggtccgctgtcagccgtacctggtggccctcacgccgtggtgcccggagttccaaacgtgcctgcagccgtgcccgctccaagcgtgcctagtgtgtctaccacttctgttactatgccaaatgtacccgcgcctctggcccagtcgcaacagctgagcagccatacgccagtcagcaggagcagcagcataatccagcatgttgggctgcccttagcgccaggcacacacagcgcaccaacaagtctaccacagtctgacctaagccagtttcaaactcagacccagcctttagtcgggcaagtcgacgatactagaagaaaatcagaacccctacctcaaccaccactttctctcattgctgaaaataagcctgttgtgaagccgcctgttgcagattccctggcaaacccccttcagttaacacctatgaacagtctggccacctctgtattcagcatagctattcctgttgatggtgatgaagacaggatctggtgaaaagccatttgatgtatgcagtaagagaagaagtggaagttttaaaggaacaaataaaagaattagttgaaagaaactctttacttgaacgagaaaatgcactgttaaaatctctttcaagcaatgatcaattatcccaactcccaacccaacaggccaatcctggtagcacttctcaacagcaagcagtgatagcacagcctccgcagccaacgcaacctccacagcagccgaatgtctcctcagcataaagctttcttaagcctcattaagaaaaaaactgaaagcaatctatccttgtgtgccactggtgttctttccactttatacgaaagcaagtagccatgctttggttgtgtgtttggccttttcagtattagacaatcattctacaagagcttttcctctctctgagatgtcatgcagcgctgttgatgtccagttctatgtcatcagtacacaaggagaataatagatggggtttattaaagcgagcaaagtctgcattttacctggtgcgcatgagtggggtctttaagagttttggtggctctcccatgtttcctattacccatggatttaccctgagccttcctatcacattataaataacagttcatctaaagagccacttttctttctgattcagtaacatttgcctacataagttttcatttatttgtgttttatttattacagggctgctattttcataatgtacatgaacaatgtcacagaacttttttaatttttttgaataattataagtatcagtaaaggaagtgaaagacaggattgcatttaatagataaaacgtttaggcaataattgaacaaaagaatcctggcatatttctaacactaatggcaatttacttatggtatttattttcagtagtaaagacccagcttgaatgtaaattttgtatagtgtaagtatgaagaacatagtgcaactgtacaggtagtcaccagttattgtgatatgataaataattgggctattttgatgaagaaaactttgttcatttgtttctactttctaagagaaattgccacgattcctctgcttttcaacatttcgtatgacttttttttcgggtgggaataaaaagctgtgaaattgttcaacctactttgtaaccaaagaagcaaagctgtgtaatggagtttggttttttttttgttgttttttttttttttgtctttttttttttttataatgcacattctttatgtatttttatttagtgttttctcagtcacaattttctttactgtctagcatgatctgcatgacctataatctttgaaccactttcgtacctcatgtttttatccagcactcttattgtaatatgtactagtctgtgaacaatgtcaaataaaagagaacgaacaggtagtttggtggagctgagctagtgtacaatacactagttgtaaaaaaaaaaaaaaaaagtgagccatcttttgttcatttaaaatggtgttttgaatttcgtatgcagaaaacgttttgttacattgcagattttaatgtatttaataaatgcaacatgcagattaagtgcagtgtatactgagtatttaaattaaaatgtacatttcataaatacagtttcaaaagaaagcatcattttgtgtatactaacacattaagtgtatgtcagaaattgatgtataaatatatattttaacattttctgaaattaaactgcagttttgttgaaatatttggctctatatgtgttcaaaatttgactagatttgtattttcacagttcaaaatactccttaaagacctgttaataatgacttactgatagttcttaaattttcaaagtaaaacaatttaaagaatgcaaaaatagtgagcaatatttggactcaatattcatattat

SEQ ID NO: 14876 - DNA, 5161 bp, Homo sapiens
attttagtcggcagcggcggcggcagcggggctgctgctcctcccagcatccctggcgcggccatttcagccccatcttggcccagcggagggagctgcagccgccgcttcagcagtttgaatttcagtttcttcggggtttaggaattgggcgcaccgaggaggagccggagaagccaccaccgctacctcacacagccggggcgcctccggtcccgtgccagcggtctgccgccgccgcccctctctgagagaagccgcgaggggaggccgagaccgccgtcgccgcccgcccgcaggggtggttccccctgtaaggggaggaccgagccggctttcccctcccccagagcgggtttccgcctgaggcagtcgacatgtccctggggctgagctccggctagagccggggagggagggccgcctgcccgcgccacagccccaccgcccgcccgcggaccttcagccagctccggcccgcggctcccggctgaattaggcatctccgactccggactcgccgctccttccctcagtcagagagcccagcgctgacgccggcaccggcctgaggagcccgagcggggcagcaccgcccctcacgccgccgccaccgcctcctcctcctcctcttcgccctcccactcccacccccagccaaggcctgctgaccgcgccgagcgccgagctggactgaccacggctgcccggagacgagagaggaagcagccggcccgcccctgggttcgcgctctcgccgcctctgagggaattgaattgaggcgccgcggctgcgagagctaaaaaggaaggaggagccgccgcgggactgagacgggggcagagccgaagagaccgacacagagaaggaaacgaggaggaggatgtctcaccgggcggccagcgcctggatcagcccgtgactcttaacagcggcgggcctcagaccccagcgcagactcggactttgtctttgggggcccgtgctctgccctccccggtttccgacaggacccagaggagccggcgtgcctctctgccctccagccttcttcaccatgtccaagatgccggccaagaagaagagctgcttccagatcaccagtgtcaccacggcccaggtggccactagcatcaccgaggacaccgagagcttggacgacccggacgagtcacgcacagaggacgtctcctccgagattttcgacgtctctcgggccacggattatggccctgaggaggtctgcgagcgcagctcttccgaagagacgcttaacaatgttggggatgcggagactcccgggaccgtctccccaaacctcctcctagatgggcagctggcagcggcggctgctgctcccgccaacggaggaggagtcgtttcggcccggagcgtgtctggggcgctcgccagtaccctggcggcggctgccacttcggcccccgcccccggagcacccggcggcccccagctcgcgggctcatccgccgggccagtgactgcagccccatctcagcctcccaccacatgtagttcccgttttcgcgtgatcaagctggaccacgggagcggagagccctatagacgcggccgatggacgtgtatggaatactatgagagggattcagacagcagcgtcctgactagatccggggattgcattagacacagcagtacttttgaccagactgcggagcgggacagcggcctgggcgccaccggagggtcggtggtggtagtagtggcctccatgcagggggcgcacgggcccgagtcgggaactgacagctccttgactgctgtgtcacagctacccccgtcggagaaaatgagccagcccactccggcccagccgcagagttttagcgttgggcagccacagccgccgccgccacccgtaggtggggctgtggctcaaagctcggctccgctgccgccgttcccgggagccgcgaccgggccgcagccaatgatggcagccgcgcagcccagccagccccagggagcggggcccgggggacagactctgccgccgacgaatgtaaccctggcgcagccggctatgtccctgcctccgcagccgggccctgcagtgggcgcccccgcggcgcagcagccccagcagttcgcgtatcctcagcctcagataccgcccggacatttgctgcccgtccagccctccggccagagtgagtacctgcagcagcacgtggccggcctgcagccgccaagccccgcgcagccctcgtccaccggcgccgcagcgagccccgccacggcggccacccttcccgtgggcaccggccagaatgcttcctcggtgggcgcgcagctcatgggcgcgtcttcccagcccagcgaagccatggccccccggacgggaccagcgcaaggcgggcaggtcgcgccttgtcagccgactggagtgcccccggctactgtgggaggcgtggtgcagccgtgcctcggtcctgccggggctgggcagccccagtccgtgcctccgccgcagatgggtggcagtggtccgctgtcagccgtacctggtggccctcacgccgtggtgcccggagttccaaacgtgcctgcagccgtgcccgctccaagcgtgcctagtgtgtctaccacttctgttactatgccaaatgtacccgcgcctctggcccagtcgcaacagctgagcagccatacgccagtcagcaggagcagcagcataatccagcatgttgggctgcccttagcgccaggcacacacagcgcaccaacaagtctaccacagtctgacctaagccagtttcaaactcagacccagcctttagtcgggcaagtcgacgatactagaagaaaatcagaacccctacctcaaccaccactttctctcattgctgaaaataagcctgttgtgaagccgcctgttgcagattccctggcaaacccccttcagttaacacctatgaacagtctggccacctctgtattcagcatagctattcctgttgatggtgatgaagacaggaatccttcaactgctttctaccaagcgttccatttgaacacgttaaaggaatcaaagagcctctgggatagaattttttttagaattcagcatcggaggaggaatgtgacataataatgatcgaaagccgaaagtttaaaagttgtgatgccctcacatggttggagggttattctagcttctaaggactgaatgttgtccacaagagtgtcatcaggtcataaattgtgcatctgggggaggtgttgtagccattgacaacaaaatagaacaagcaatggatctggtgaaaagccatttgatgtatgcagtaagagaagaagtggaagttttaaaggaacaaataaaagaattagttgaaagaaactctttacttgaacgagaaaatgcactgttaaaatctctttcaagcaatgatcaattatcccaactcccaacccaacaggccaatcctggtagcacttctcaacagcaagcagtgatagcacagcctccgcagccaacgcaacctccacagcagccgaatgtctcctcagcataaagctttcttaagcctcattaagaaaaaaactgaaagcaatctatccttgtgtgccactggtgttctttccactttatacgaaagcaagtagccatgctttggttgtgtgtttggccttttcagtattagacaatcattctacaagagcttttcctctctctgagatgtcatgcagcgctgttgatgtccagttctatgtcatcagtacacaaggagaataatagatggggtttattaaagcgagcaaagtctgcattttacctggtgcgcatgagtggggtctttaagagttttggtggctctcccatgtttcctattacccatggatttaccctgagccttcctatcacattataaataacagttcatctaaagagccacttttctttctgattcagtaacatttgcctacataagttttcatttatttgtgttttatttattacagggctgctattttcataatgtacatgaacaatgtcacagaacttttttaatttttttgaataattataagtatcagtaaaggaagtgaaagacaggattgcatttaatagataaaacgtttaggcaataattgaacaaaagaatcctggcatatttctaacactaatggcaatttacttatggtatttattttcagtagtaaagacccagcttgaatgtaaattttgtatagtgtaagtatgaagaacatagtgcaactgtacaggtagtcaccagttattgtgatatgataaataattgggctattttgatgaagaaaactttgttcatttgtttctactttctaagagaaattgccacgattcctctgcttttcaacatttcgtatgacttttttttcgggtgggaattgtaatggagtttggttttttttttgttgttttttttttttttgtctttttttttttttataatgcacattctttatgtatttttatttagtgttttctcagtcacaattttctttactgtctagcatgatctgcatgacctataatctttgaaccactttcgtacctcatgtttttatccagcactcttattgtaatatgtactagtctgtgaacaatgtcaaataaaagagaacgaacaggtagtttggtggagctgagctagtgtacaatacactagttgtaaaaaaaaaaaaaaaaagtgagccatcttttgttcatttaaaatggtgttttgaatttcgtatgcagaaaacgttttgttacattgcagattttaatgtatttaataaatgcaacatgcagattaagtgcagtgtatactgagtatttaaattaaaatgtacatttcataaatacagtttcaaaagaaagcatcattttgtgtatactaacacattaagtgtatgtcagaaattgatgtataaatatatattttaacattttctgaaattaaactgcagttttgttgaaatatttggctctatatgtgttcaaaatttgactagatttgtattttcacagttcaaaatactccttaaagacctgttaataatgacttactgatagttcttaaattttcaaagtaaaacaatttaaagaatgcaaaaatagtgagcaatatttggactcaatattcatattat

SEQ ID NO: 14877 - DNA, 2395 bp, Homo sapiens
aaagtgctgggattaccggtgtgagaccttacaggactgttagtctcaaactatttttttaaaaataccaaaattttaaagtccaaaattacagatcactttaaagcagtactatgactagtttaacatcaaacagctttccgttggaatattgttcctttgttctctttatctaccattttaagcatgtgattttaaactttttttttttttaattctaagcttagttgacaatttaagaagctagtattttttggaaatcgtcccaaactttgaaaagaaaattctgggcttactgctctggttgggaactggattttttccaacccatcttccataggctcggtcaagataaagcagaaacattaaaagcaagagcaggaaaactagtataaaaacttagcaccaagtaggccagaaccagatagcaccacctttatcttttcactcttttgacattcctaattttgtttttcacaggatctggtgaaaagccatttgatgtatgcagtaagagaagaagtggaagttttaaaggaacaaataaaagaattagttgaaagaaactctttacttgaacgagaaaatgcactgttaaaatctctttcaagcaatgatcaattatcccaactcccaacccaacaggccaatcctggtagcacttctcaacagcaagcagtgatagcacagcctccgcagccaacgcaacctccacagcagccgaatgtctcctcagcataaagctttcttaagcctcattaagaaaaaaactgaaagcaatctatccttgtgtgccactggtgttctttccactttatacgaaagcaagtagccatgctttggttgtgtgtttggccttttcagtattagacaatcattctacaagagcttttcctctctctgagatgtcatgcagcgctgttgatgtccagttctatgtcatcagtacacaaggagaataatagatggggtttattaaagcgagcaaagtctgcattttacctggtgcgcatgagtggggtctttaagagttttggtggctctcccatgtttcctattacccatggatttaccctgagccttcctatcacattataaataacagttcatctaaagagccacttttctttctgattcagtaacatttgcctacataagttttcatttatttgtgttttatttattacagggctgctattttcataatgtacatgaacaatgtcacagaacttttttaatttttttgaataattataagtatcagtaaaggaagtgaaagacaggattgcatttaatagataaaacgtttaggcaataattgaacaaaagaatcctggcatatttctaacactaatggcaatttacttatggtatttattttcagtagtaaagacccagcttgaatgtaaattttgtatagtgtaagtatgaagaacatagtgcaactgtacaggtagtcaccagttattgtgatatgataaataattgggctattttgatgaagaaaactttgttcatttgtttctactttctaagagaaattgccacgattcctctgcttttcaacatttcgtatgacttttttttcgggtgggaataaaaagctgtgaaattgttcaacctactttgtaaccaaagaagcaaagctgtgtaatggagtttggttttttttttgttgttttttttttttttgtctttttttttttttataatgcacattctttatgtatttttatttagtgttttctcagtcacaattttctttactgtctagcatgatctgcatgacctataatctttgaaccactttcgtacctcatgtttttatccagcactcttattgtaatatgtactagtctgtgaacaatgtcaaataaaagagaacgaacaggtagtttggtggagctgagctagtgtacaatacactagttgtaaaaaaaaaaaaaaaaagtgagccatcttttgttcatttaaaatggtgttttgaatttcgtatgcagaaaacgttttgttacattgcagattttaatgtatttaataaatgcaacatgcagattaagtgcagtgtatactgagtatttaaattaaaatgtacatttcataaatacagtttcaaaagaaagcatcattttgtgtatactaacacattaagtgtatgtcagaaattgatgtataaatatatattttaacattttctgaaattaaactgcagttttgttgaaatatttggctctatatgtgttcaaaatttgactagatttgtattttcacagttcaaaatactccttaaagacctgttaataatgacttactgatagttcttaaattttcaaagtaaaacaatttaaagaatgcaaaaatagtgagcaatatttggactcaatattcatattat

SEQ ID NO: 14878 - DNA, 1735 bp, Homo sapiens
gtgctgtggtgatctagaggatccaaatcctctcttcagccaacgcaacctccacagcagccgaatgtctcctcagcataaagctttcttaagcctcattaagaaaaaaactgaaagcaatctatccttgtgtgccactggtgttctttccactttatacgaaagcaagtagccatgctttggttgtgtgtttggccttttcagtattagacaatcattctacaagagcttttcctctctctgagatgtcatgcagcgctgttgatgtccagttctatgtcatcagtacacaaggagaataatagatggggtttattaaagcgagcaaagtctgcattttacctggtgcgcatgagtggggtctttaagagttttggtggctctcccatgtttcctattacccatggatttaccctgagccttcctatcacattataaataacagttcatctaaagagccacttttctttctgattcagtaacatttgcctacataagttttcatttatttgtgttttatttattacagggctgctattttcataatgtacatgaacaatgtcacagaacttttttaatttttttgaataattataagtatcagtaaaggaagtgaaagacaggattgcatttaatagataaaacgtttaggcaataattgaacaaaagaatcctggcatatttctaacactaatggcaatttacttatggtatttattttcagtagtaaagacccagcttgaatgtaaattttgtatagtgtaagtatgaagaacatagtgcaactgtacaggtagtcaccagttattgtgatatgataaataattgggctattttgatgaagaaaactttgttcatttgtttctactttctaagagaaattgccacgattcctctgcttttcaacatttcgtatgacttttttttcgggtgggaataaaaagctgtgaaattgttcaacctactttgtaaccaaagaagcaaagctgtgtaatggagtttggttttttttttgttgttttttttttttttgtctttttttttttttataatgcacattctttatgtatttttatttagtgttttctcagtcacaattttctttactgtctagcatgatctgcatgacctataatctttgaaccactttcgtacctcatgtttttatccagcactcttattgtaatatgtactagtctgtgaacaatgtcaaataaaagagaacgaacaggtagtttggtggagctgagctagtgtacaatacactagttgtaaaaaaaaaaaaaaaaagtgagccatcttttgttcatttaaaatggtgttttgaatttcgtatgcagaaaacgttttgttacattgcagattttaatgtatttaataaatgcaacatgcagattaagtgcagtgtatactgagtatttaaattaaaatgtacatttcataaatacagtttcaaaagaaagcatcattttgtgtatactaacacattaagtgtatgtcagaaattgatgtataaatatatattttaacattttctgaaattaaactgcagttttgttgaaatatttggctctatatgtgttcaaaatttgactagatttgtattttcacagttcaaaatactccttaaagacctgttaataatgacttactgatagttcttaaattttcaaagtaaaacaatttaaagaatgcaaaaatagtgagcaatatttggactcaatattcatattat

SEQ ID NO: 14879 - DNA, 4601 bp, Homo sapiens
  misc_feature (4434)..(4434): n is a, c, g, or t
  misc_feature (4447)..(4447): n is a, c, g, or t
  misc_feature (4459)..(4459): n is a, c, g, or t
  misc_feature (4468)..(4468): n is a, c, g, or t
  misc_feature (4493)..(4493): n is a, c, g, or t
  misc_feature (4515)..(4515): n is a, c, g, or t
  misc_feature (4523)..(4523): n is a, c, g, or t
  misc_feature (4561)..(4561): n is a, c, g, or t
attttagtcggcagcggcggcggcagcggggctgctgctcctcccagcatccctggcgcggccatttcagccccatcttggcccagcggagggagctgcagccgccgcttcagcagtttgaatttcagtttcttcggggtttaggaattgggcgcaccgaggaggagccggagaagccaccaccgctacctcacacagccggggcgcctccggtcccgtgccagcggtctgccgccgccgcccctctctgagagaagccgcgaggggaggccgagaccgccgtcgccgcccgcccgcaggggtggttccccctgtaaggggaggaccgagccggctttcccctcccccagagcgggtttccgcctgaggcagtcgacatgtccctggggctgagctccggctagagccggggagggagggccgcctgcccgcgccacagccccaccgcccgcccgcggaccttcagccagctccggcccgcggctcccggctgaattaggcatctccgactccggactcgccgctccttccctcagtcagagagcccagcgctgacgccggcaccggcctgaggagcccgagcggggcagcaccgcccctcacgccgccgccaccgcctcctcctcctcctcttcgccctcccactcccacccccagccaaggcctgctgaccgcgccgagcgccgagctggactgaccacggctgcccggagacgagagaggaagcagccggcccgcccctgggttcgcgctctcgccgcctctgagggaattgaattgaggcgccgcggctgcgagagctaaaaaggaaggaggagccgccgcgggactgagacgggggcagagccgaagagaccgacacagagaaggaaacgaggaggaggatgtctcaccgggcggccagcgcctggatcagcccgtgactcttaacagcggcgggcctcagaccccagcgcagactcggactttgtctttgggggcccgtgctctgccctccccggtttccgacaggacccagaggagccggcgtgcctctctgccctccagccttcttcaccatgtccaagatgccggccaagaagaagagctgcttccagatcaccagtgtcaccacggcccaggtggccactagcatcaccgaggacaccgagagcttggacgacccggacgagtcacgcacagaggacgtctcctccgagattttcgacgtctctcgggccacggattatggccctgaggaggtctgcgagcgcagctcttccgaagagacgcttaacaatgttggggatgcggagactcccgggaccgtctccccaaacctcctcctagatgggcagctggcagcggcggctgctgctcccgccaacggaggaggagtcgtttcggcccggagcgtgtctggggcgctcgccagtaccctggcggcggctgccacttcggcccccgcccccggagcacccggcggcccccagctcgcgggctcatccgccgggccagtgactgcagccccatctcagcctcccaccacatgtagttcccgttttcgcgtgatcaagctggaccacgggagcggagagccctatagacgcggccgatggacgtgtatggaatactatgagagggattcagacagcagcgtcctgactagatccggggattgcattagacacagcagtacttttgaccagactgcggagcgggacagcggcctgggcgccaccggagggtcggtggtggtagtagtggcctccatgcagggggcgcacgggcccgagtcgggaactgacagctccttgactgctgtgtcacagctacccccgtcggagaaaatgagccagcccactccggcccagccgcagagttttagcgttgggcagccacagccgccgccgccacccgtaggtggggctgtggctcaaagctcggctccgctgccgccgttcccgggagccgcgaccgggccgcagccaatgatggcagccgcgcagcccagccagccccagggagcggggcccgggggacagactctgccgccgacgaatgtaaccctggcgcagccggctatgtccctgcctccgcagccgggccctgcagtgggcgcccccgcggcgcagcagccccagcagttcgcgtatcctcagcctcagataccgcccggacatttgctgcccgtccagccctccggccagagtgagtacctgcagcagcacgtggccggcctgcagccgccaagccccgcgcagccctcgtccaccggcgccgcagcgagccccgccacggcggccacccttcccgtgggcaccggccagaatgcttcctcggtgggcgcgcagctcatgggcgcgtcttcccagcccagcgaagccatggccccccggacgggaccagcgcaaggcgggcaggtcgcgccttgtcagccgactggagtgcccccggctactgtgggaggcgtggtgcagccgtgcctcggtcctgccggggctgggcagccccagtccgtgcctccgccgcagatgggtggcagtggtccgctgtcagccgtacctggtggccctcacgccgtggtgcccggagttccaaacgtgcctgcagccgtgcccgctccaagcgtgcctagtgtgtctaccacttctgttactatgccaaatgtacccgcgcctctggcccagtcgcaacagctgagcagccatacgccagtcagcaggagcagcagcataatccagcatgttgggctgcccttagcgccaggcacacacagcgcaccaacaagtctaccacagtctgacctaagccagtttcaaactcagacccagcctttagtcgggcaagtcgacgatactagaagaaaatcagaacccctacctcaaccaccactttctctcattgctgaaaataagcctgttgtgaagccgcctgttgcagattccctggcaaacccccttcagttaacacctatgaacagtctggccacctctgtattcagcatagctattcctgttgatggtgatgaagacaggaatccttcaactgctttctaccaagcgttccatttgaacacgttaaaggaatcaaagagcctctgggatagaattttttttagaattcagcatcggaggaggaatgtgacataataatgatcgaaagccgaaagtttaaaagttgtgatgccctcacatggttggagggttattctagcttctaaggactgaatgttgtccacaagagtgtcatcaggtcataaattgtgcatctgggggaggtgttgtagccattgacaacaaaatagaacaagcaatggatctggtgaaaagccatttgatgtatgcagtaagagaagaagtggaagttttaaaggaacaaataaaagaattagttgaaagaaactctttacttgaacgagaaaatgcactgttaaaatctctttcaagcaatgatcaattatcccaactcccaacccaacaggccaatcctggtagcacttctcaacagcaagcagtgatagcacagcctccgcagccaacgcaacctccacagcagccgaatgtctcctcagcataaagctttcttaagcctcattaagaaaaaaactgaaagcaatctatccttgtgtgccactggtgttctttccactttatacgaaagcaagtagccatgctttggttgtgtgtttggccttttcagtattagacaatcattctacaagagcttttcctctctctgagatgtcatgcagcgctgttgatgtccagttctatgtcatcagtacacaaggagaataatagatggggtttattaaagcgagcaaagtctgcattttacctggtgcgcatgagtggggtctttaagagttttggtggctctcccatgtttcctattacccatggatttaccctgagccttcctatcacattataaataacagttcatctaaagagccacttttctttctgattcagtaacatttgcctacataagttttcatttatttgtgttttatttattacagggctgctattttcataatgtacatgaacaatgtcacagaacttttttaatttttttgaataattataagtatcagtaaaggaagtgaaagacaggattgcatttaatagataaaacgtttaggcaataattgaacaaaagaatcctggcatatttctaacactaatggcaatttacttatggtatttattttcagtagtaaagacccagcttgaatgtaaattttgtatagtgtaagtatgaagaacatagtgcaactgtacaggtagtcaccagttattgtgatatgataaataattgggctattttgatgaagaaaactttgttcatttgtttctactttctaagagaaattgccacgattcctctgcttttcaacatttcgtatgacttttttttcgggtgggaatgggtttgggttttttttgntggtttttttttngttttttttttnttttttttnttttttttttttttttttttttttntttttttttttttttttttttntttttttntttttttttttttttttttttttttttttttttttttntttttttttttttttttttttttttttttttttttttttt

SEQ ID NO: 14880 - DNA, 1496 bp, Homo sapiens
gtatcaacgcagagtgcccattacggccgggagttctatgtcatcagtacacaaggagaataatagatggggtttattaaagcgagcaaagtctgcattttacctggtgcgcatgagtggggtctttaagagttttggtggctctcccatgtttcctattacccatggatttaccctgagccttcctatcacattataaataacagttcatctaaagagccacttttctttctgattcagtaacatttgcctacataagttttcatttatttgtgttttatttattacagggctgctattttcataatgtacatgaacaatgtcacagaacttttttaatttttttgaataattataagtatcagtaaaggaagtgaaagacaggattgcatttaatagataaaacgtttaggcaataattgaacaaaagaatcctggcatatttctaacactaatggcaatttacttatggtatttattttcagtagtaaagacccagcttgaatgtaaattttgtatagtgtaagtatgaagaacatagtgcaactgtacaggtagtcaccagttattgtgatatgataaataattgggctattttgatgaagaaaactttgttcatttgtttctactttctaagagaaattgccacgattcctctgcttttcaacatttcgtatgacttttttttcgggtgggaataaaaagctgtgaaattgttcaacctactttgtaaccaaagaagcaaagctgtgtaatggagtttggttttttttttgttgttttttttttttttgtctttttttttttttataatgcacattctttatgtatttttatttagtgttttctcagtcacaattttctttactgtctagcatgatctgcatgacctataatctttgaaccactttcgtacctcatgtttttatccagcactcttattgtaatatgtactagtctgtgaacaatgtcaaataaaagagaacgaacaggtagtttggtggagctgagctagtgtacaatacactagttgtaaaaaaaaaaaaaaaaagtgagccatcttttgttcatttaaaatggtgttttgaatttcgtatgcagaaaacgttttgttacattgcagattttaatgtatttaataaatgcaacatgcagattaagtgcagtgtatactgagtatttaaattaaaatgtacatttcataaatacagtttcaaaagaaagcatcattttgtgtatactaacacattaagtgtatgtcagaaattgatgtataaatatatattttaacattttctgaaattaaactgcagttttgttgaaatatttggctctatatgtgttcaaaatttgactagatttgtattttcacagttcaaaatactccttaaagacctgttaataatgacttactgatagttcttaaattttcaaagtaaaacaatttaaagaatgcaaaaatagtgagcaatatttggactcaatattcatattat

SEQ ID NO: 14881 - DNA, 3188 bp, Homo sapiens
attttagtcggcagcggcggcggcagcggggctgctgctcctcccagcatccctggcgcggccatttcagccccatcttggcccagcggagggagctgcagccgccgcttcagcagtttgaatttcagtttcttcggggtttaggaattgggcgcaccgaggaggagccggagaagccaccaccgctacctcacacagccggggcgcctccggtcccgtgccagcggtctgccgccgccgcccctctctgagagaagccgcgaggggaggccgagaccgccgtcgccgcccgcccgcaggggtggttccccctgtaaggggaggaccgagccggctttcccctcccccagagcgggtttccgcctgaggcagtcgacatgtccctggggctgagctccggctagagccggggagggagggccgcctgcccgcgccacagccccaccgcccgcccgcggaccttcagccagctccggcccgcggctcccggctgaattaggcatctccgactccggactcgccgctccttccctcagtcagagagcccagcgctgacgccggcaccggcctgaggagcccgagcggggcagcaccgcccctcacgccgccgccaccgcctcctcctcctcctcttcgccctcccactcccacccccagccaaggcctgctgaccgcgccgagcgccgagctggactgaccacggctgcccggagacgagagaggaagcagccggcccgcccctgggttcgcgctctcgccgcctctgagggaattgaattgaggcgccgcggctgcgagagctaaaaaggaaggaggagccgccgcgggactgagacgggggcagagccgaagagaccgacacagagaaggaaacgaggaggaggatgtctcaccgggcggccagcgcctggatcagcccgtgactcttaacagcggcgggcctcagaccccagcgcagactcggactttgtctttgggggcccgtgctctgccctccccggtttccgacaggacccagaggagccggcgtgcctctctgccctccagccttcttcaccatgtccaagatgccggccaagaagaagagctgcttccagatcaccagtgtcaccacggcccaggtggccactagcatcaccgaggacaccgagagcttggacgacccggacgagtcacgcacagaggacgtctcctccgagattttcgacgtctctcgggccacggattatggccctgaggaggtctgcgagcgcagctcttccgaagagacgcttaacaatgttggggatgcggagactcccgggaccgtctccccaaacctcctcctagatgggcagctggcagcggcggctgctgctcccgccaacggaggaggagtcgtttcggcccggagcgtgtctggggcgctcgccagtaccctggcggcggctgccacttcggcccccgcccccggagcacccggcggcccccagctcgcgggctcatccgccgggccagtgactgcagccccatctcagcctcccaccacatgtagttcccgttttcgcgtgatcaagctggaccacgggagcggagagccctatagacgcggccgatggacgtgtatggaatactatgagagggattcagacagcagcgtcctgactagatccggggattgcattagacacagcagtacttttgaccagactgcggagcgggacagcggcctgggcgccaccggagggtcggtggtggtagtagtggcctccatgcagggggcgcacgggcccgagtcgggaactgacagctccttgactgctgtgtcacagctacccccgtcggagaaaatgagccagcccactccggcccagccgcagagttttagcgttgggcagccacagccgccgccgccacccgtaggtggggctgtggctcaaagctcggctccgctgccgccgttcccgggagccgcgaccgggccgcagccaatgatggcagccgcgcagcccagccagccccagggagcggggcccgggggacagactctgccgccgacgaatgtaaccctggcgcagccggctatgtccctgcctccgcagccgggccctgcagtgggcgcccccgcggcgcagcagccccagcagttcgcgtatcctcagcctcagataccgcccggacatttgctgcccgtccagccctccggccagagtgagtacctgcagcagcacgtggccggcctgcagccgccaagccccgcgcagccctcgtccaccggcgccgcagcgagccccgccacggcggccacccttcccgtgggcaccggccagaatgcttcctcggtgggcgcgcagctcatgggcgcgtcttcccagcccagcgaagccatggccccccggacgggaccagcgcaaggcgggcaggtcgcgccttgtcagccgactggagtgcccccggctactgtgggaggcgtggtgcagccgtgcctcggtcctgccggggctgggcagccccagtccgtgcctccgccgcagatgggtggcagtggtccgctgtcagccgtacctggtggccctcacgccgtggtgcccggagttccaaacgtgcctgcagccgtgcccgctccaagcgtgcctagtgtgtctaccacttctgttactatgccaaatgtacccgcgcctctggcccagtcgcaacagctgagcagccatacgccagtcagcaggagcagcagcataatccagcatgttgggctgcccttagcgccaggcacacacagcgcaccaacaagtctaccacagtctgacctaagccagtttcaaactcagacccagcctttagtcgggcaagtcgacgatactagaagaaaatcagaacccctacctcaaccaccactttctctcattgctgaaaataagcctgttgtgaagccgcctgttgcagattccctggcaaacccccttcagttaacacctatgaacagtctggccacctctgtattcagcatagctattcctgttgatggtgatgaagacagtgcatctgggggaggtgttgtagccattgacaacaaaatagaacaagcaatgcttaaaagaatggtgtgtgctgggtgaaagacaaagactaaagaatgaggaaacaaacgtgatgcatatgagctgaagatcgccacatagctcttcggagataagacgtatcgagttaca

SEQ ID NO: 14882 - DNA, 248 bp, Homo sapiens
ctataaaagatttttaaaggctatttgattaaaacatttatttacttaaactctttgctagaattttttttagaattcagcatcggaggaggaatgtgacataataatgatcgaaagccgaaagtttaaaagttgtgatgccctcacatggttggagggttattctagcttctaaggactgaatgttgtccacaagagtgtcatcaggtcataaattggtaagacttaatggcttagattttatgtat

SEQ ID NO: 14883 - DNA, 4421 bp, Homo sapiens
agtcgtacttctcgtatctgtcgaacaaggtcagtgctgaggtagagccctagaggaatatggttgcagacattttgtatcatgttaggaagcagccggcccgcccctgggttcgcgctctcgccgcctctgagggaattgaattgaggcgccgcggctgcgagagctaaaaaggaaggaggagccgccgcgggactgagacgggggcagagccgaagagaccgacacagagaaggaaacgaggaggaggatgtctcaccgggcggccagcgcctggatcagcccgtgactcttaacagcggcgggcctcagaccccagcgcagactcggactttgtctttgggggcccgtgctctgccctccccggtttccgacaggacccagaggagccggcgtgcctctctgccctccagccttcttcaccatgtccaagatgccggccaagaagaagagctgcttccagatcaccagtgtcaccacggcccaggtggccactagcatcaccgaggacaccgagagcttggacgacccggacgagtcacgcacagaggacgtctcctccgagattttcgacgtctctcgggccacggattatggccctgaggaggtctgcgagcgcagctcttccgaagagacgcttaacaatgttggggatgcggagactcccgggaccgtctccccaaacctcctcctagatgggcagctggcagcggcggctgctgctcccgccaacggaggaggagtcgtttcggcccggagcgtgtctggggcgctcgccagtaccctggcggcggctgccacttcggcccccgcccccggagcacccggcggcccccagctcgcgggctcatccgccgggccagtgactgcagccccatctcagcctcccaccacatgtagttcccgttttcgcgtgatcaagctggaccacgggagcggagagccctatagacgcggccgatggacgtgtatggaatactatgagagggattcagacagcagcgtcctgactagatccggggattgcattagacacagcagtacttttgaccagactgcggagcgggacagcggcctgggcgccaccggagggtcggtggtggtagtagtggcctccatgcagggggcgcacgggcccgagtcgggaactgacagctccttgactgctgtgtcacagctacccccgtcggagaaaatgagccagcccactccggcccagccgcagagttttagcgttgggcagccacagccgccgccgccacccgtaggtggggctgtggctcaaagctcggctccgctgccgccgttcccgggagccgcgaccgggccgcagccaatgatggcagccgcgcagcccagccagccccagggagcggggcccgggggacagactctgccgccgacgaatgtaaccctggcgcagccggctatgtccctgcctccgcagccgggccctgcagtgggcgcccccgcggcgcagcagccccagcagttcgcgtatcctcagcctcagataccgcccggacatttgctgcccgtccagccctccggccagagtgagtacctgcagcagcacgtggccggcctgcagccgccaagccccgcgcagccctcgtccaccggcgccgcagcgagccccgccacggcggccacccttcccgtgggcaccggccagaatgcttcctcggtgggcgcgcagctcatgggcgcgtcttcccagcccagcgaagccatggccccccggacgggaccagcgcaaggcgggcaggtcgcgccttgtcagccgactggagtgcccccggctactgtgggaggcgtggtgcagccgtgcctcggtcctgccggggctgggcagccccagtccgtgcctccgccgcagatgggtggcagtggtccgctgtcagccgtacctggtggccctcacgccgtggtgcccggagttccaaacgtgcctgcagccgtgcccgctccaagcgtgcctagtgtgtctaccacttctgttactatgccaaatgtacccgcgcctctggcccagtcgcaacagctgagcagccatacgccagtcagcaggagcagcagcataatccagcatgttgggctgcccttagcgccaggcacacacagcgcaccaacaagtctaccacagtctgacctaagccagtttcaaactcagacccagcctttagtcgggcaagtcgacgatactagaagaaaatcagaacccctacctcaaccaccactttctctcattgctgaaaataagcctgttgtgaagccgcctgttgcagattccctggcaaacccccttcagttaacacctatgaacagtctggccacctctgtattcagcatagctattcctgttgatggtgatgaagacaggaatccttcaactgctttctaccaagcgttccatttgaacacgttaaaggaatcaaagagcctctgggatagtgcatctgggggaggtgttgtagccattgacaacaaaatagaacaagcaatggatctggtgaaaagccatttgatgtatgcagtaagagaagaagtggaagttttaaaggaacaaataaaagaattagttgaaagaaactctttacttgaacgagaaaatgcactgttaaaatctctttcaagcaatgatcaattatcccaactcccaacccaacaggccaatcctggtagcacttctcaacagcaagcagtgatagcacagcctccgcagccaacgcaacctccacagcagccgaatgtctcctcagcataaagctttcttaagcctcattaagaaaaaaactgaaagcaatctatccttgtgtgccactggtgttctttccactttatacgaaagcaagtagccatgctttggttgtgtgtttggccttttcagtattagacaatcattctacaagagcttttcctctctctgagatgtcatgcagcgctgttgatgtccagttctatgtcatcagtacacaaggagaataatagatggggtttattaaagcgagcaaagtctgcattttacctggtgcgcatgagtggggtctttaagagttttggtggctctcccatgtttcctattacccatggatttaccctgagccttcctatcacattataaataacagttcatctaaagagccacttttctttctgattcagtaacatttgcctacataagttttcatttatttgtgttttatttattacagggctgctattttcataatgtacatgaacaatgtcacagaacttttttaatttttttgaataattataagtatcagtaaaggaagtgaaagacaggattgcatttaatagataaaacgtttaggcaataattgaacaaaagaatcctggcatatttctaacactaatggcaatttacttatggtatttattttcagtagtaaagacccagcttgaatgtaaattttgtatagtgtaagtatgaagaacatagtgcaactgtacaggtagtcaccagttattgtgatatgataaataattgggctattttgatgaagaaaactttgttcatttgtttctactttctaagagaaattgccacgattcctctgcttttcaacatttcgtatgacttttttttcgggtgggaataaaaagctgtgaaattgttcaacctactttgtaaccaaagaagcaaagctgtgtaatggagtttggttttttttttgttgttttttttttttttgtctttttttttttttataatgcacattctttatgtatttttatttagtgttttctcagtcacaattttctttactgtctagcatgatctgcatgacctataatctttgaaccactttcgtacctcatgtttttatccagcactcttattgtaatatgtactagtctgtgaacaatgtcaaataaaagagaacgaacaggtagtttggtggagctgagctagtgtacaatacactagttgtaaaaaaaaaaaaaaaaagtgagccatcttttgttcatttaaaatggtgttttgaatttcgtatgcagaaaacgttttgttacattgcagattttaatgtatttaataaatgcaacatgcagattaagtgcagtgtatactgagtatttaaattaaaatgtacatttcataaatacagtttcaaaagaaagcatcattttgtgtatactaacacattaagtgtatgtcagaaattgatgtataaatatatattttaacattttctgaaattaaactgcagttttgttgaaatatttggctctatatgtgttcaaaatttgactagatttgtattttcacagttcaaaatactccttaaagacctgttaataatgacttactgatagttcttaaattttcaaagtaaaacaatttaaagaatgcaaaaatagtgagcaatatttggactcaatattcatattat

SEQ ID NO: 14884 - DNA, 4929 bp, Homo sapiens
attttagtcggcagcggcggcggcagcggggctgctgctcctcccagcatccctggcgcggccatttcagccccatcttggcccagcggagggagctgcagccgccgcttcagcagtttgaatttcagtttcttcggggtttaggaattgggcgcaccgaggaggagccggagaagccaccaccgctacctcacacagccggggcgcctccggtcccgtgccagcggtctgccgccgccgcccctctctgagagaagccgcgaggggaggccgagaccgccgtcgccgcccgcccgcaggggtggttccccctgtaaggggaggaccgagccggctttcccctcccccagagcgggtttccgcctgaggcagtcgacatgtccctggggctgagctccggctagagccggggagggagggccgcctgcccgcgccacagccccaccgcccgcccgcggaccttcagccagctccggcccgcggctcccggctgaattaggcatctccgactccggactcgccgctccttccctcagtcagagagcccagcgctgacgccggcaccggcctgaggagcccgagcggggcagcaccgcccctcacgccgccgccaccgcctcctcctcctcctcttcgccctcccactcccacccccagccaaggcctgctgaccgcgccgagcgccgagctggactgaccacggctgcccggagacgagagaggaagcagccggcccgcccctgggttcgcgctctcgccgcctctgagggaattgaattgaggcgccgcggctgcgagagctaaaaaggaaggaggagccgccgcgggactgagacgggggcagagccgaagagaccgacacagagaaggaaacgaggaggaggatgtctcaccgggcggccagcgcctggatcagcccgtgactcttaacagcggcgggcctcagaccccagcgcagactcggactttgtctttgggggcccgtgctctgccctccccggtttccgacaggacccagaggagccggcgtgcctctctgccctccagccttcttcaccatgtccaagatgccggccaagaagaagagctgcttccagatcaccagtgtcaccacggcccaggtggccactagcatcaccgaggacaccgagagcttggacgacccggacgagtcacgcacagaggacgtctcctccgagattttcgacgtctctcgggccacggattatggccctgaggaggtctgcgagcgcagctcttccgaagagacgcttaacaatgttggggatgcggagactcccgggaccgtctccccaaacctcctcctagatgggcagctggcagcggcggctgctgctcccgccaacggaggaggagtcgtttcggcccggagcgtgtctggggcgctcgccagtaccctggcggcggctgccacttcggcccccgcccccggagcacccggcggcccccagctcgcgggctcatccgccgggccagtgactgcagccccatctcagcctcccaccacatgtagttcccgttttcgcgtgatcaagctggaccacgggagcggagagccctatagacgcggccgatggacgtgtatggaatactatgagagggattcagacagcagcgtcctgactagatccggggattgcattagacacagcagtacttttgaccagactgcggagcgggacagcggcctgggcgccaccggagggtcggtggtggtagtagtggcctccatgcagggggcgcacgggcccgagtcgggaactgacagctccttgactgctgtgtcacagctacccccgtcggagaaaatgagccagcccactccggcccagccgcagagttttagcgttgggcagccacagccgccgccgccacccgtaggtggggctgtggctcaaagctcggctccgctgccgccgttcccgggagccgcgaccgggccgcagccaatgatggcagccgcgcagcccagccagccccagggagcggggcccgggggacagactctgccgccgacgaatgtaaccctggcgcagccggctatgtccctgcctccgcagccgggccctgcagtgggcgcccccgcggcgcagcagccccagcagttcgcgtatcctcagcctcagataccgcccggacatttgctgcccgtccagccctccggccagagtgagtacctgcagcagcacgtggccggcctgcagccgccaagccccgcgcagccctcgtccaccggcgccgcagcgagccccgccacggcggccacccttcccgtgggcaccggccagaatgcttcctcggtgggcgcgcagctcatgggcgcgtcttcccagcccagcgaagccatggccccccggacgggaccagcgcaaggcgggcaggtcgcgccttgtcagccgactggagtgcccccggctactgtgggaggcgtggtgcagccgtgcctcggtcctgccggggctgggcagccccagtccgtgcctccgccgcagatgggtggcagtggtccgctgtcagccgtacctggtggccctcacgccgtggtgcccggagttccaaacgtgcctgcagccgtgcccgctccaagcgtgcctagtgtgtctaccacttctgttactatgccaaatgtacccgcgcctctggcccagtcgcaacagctgagcagccatacgccagtcagcaggagcagcagcataatccagcatgttgggctgcccttagcgccaggcacacacagcgcaccaacaagtctaccacagtctgacctaagccagtttcaaactcagacccagcctttagtcgggcaagtcgacgatactagaagaaaatcagaacccctacctcaaccaccactttctctcattgctgaattaacacctatgaacagtctggccacctctgtattcagcatagctattcctgttgatggtgatgaagacagtgcatctgggggaggtgttgtagccattgacaacaaaatagaacaagcaatggatctggtgaaaagccatttgatgtatgcagtaagagaagaagtggaagttttaaaggaacaaataaaagaattagttgaaagaaactctttacttgaacgagaaaatgcactgttaaaatctctttcaagcaatgatcaattatcccaactcccaacccaacaggccaatcctggtagcacttctcaacagcaagcagtgatagcacagcctccgcagccaacgcaacctccacagcagccgaatgtctcctcagcataaagctttcttaagcctcattaagaaaaaaactgaaagcaatctatccttgtgtgccactggtgttctttccactttatacgaaagcaagtagccatgctttggttgtgtgtttggccttttcagtattagacaatcattctacaagagcttttcctctctctgagatgtcatgcagcgctgttgatgtccagttctatgtcatcagtacacaaggagaataatagatggggtttattaaagcgagcaaagtctgcattttacctggtgcgcatgagtggggtctttaagagttttggtggctctcccatgtttcctattacccatggatttaccctgagccttcctatcacattataaataacagttcatctaaagagccacttttctttctgattcagtaacatttgcctacataagttttcatttatttgtgttttatttattacagggctgctattttcataatgtacatgaacaatgtcacagaacttttttaatttttttgaataattataagtatcagtaaaggaagtgaaagacaggattgcatttaatagataaaacgtttaggcaataattgaacaaaagaatcctggcatatttctaacactaatggcaatttacttatggtatttattttcagtagtaaagacccagcttgaatgtaaattttgtatagtgtaagtatgaagaacatagtgcaactgtacaggtagtcaccagttattgtgatatgataaataattgggctattttgatgaagaaaactttgttcatttgtttctactttctaagagaaattgccacgattcctctgcttttcaacatttcgtatgacttttttttcgggtgggaataaaaagctgtgaaattgttcaacctactttgtaaccaaagaagcaaagctgtgtaatggagtttggttttttttttgttgttttttttttttttgtctttttttttttttataatgcacattctttatgtatttttatttagtgttttctcagtcacaattttctttactgtctagcatgatctgcatgacctataatctttgaaccactttcgtacctcatgtttttatccagcactcttattgtaatatgtactagtctgtgaacaatgtcaaataaaagagaacgaacaggtagtttggtggagctgagctagtgtacaatacactagttgtaaaaaaaaaaaaaaaaagtgagccatcttttgttcatttaaaatggtgttttgaatttcgtatgcagaaaacgttttgttacattgcagattttaatgtatttaataaatgcaacatgcagattaagtgcagtgtatactgagtatttaaattaaaatgtacatttcataaatacagtttcaaaagaaagcatcattttgtgtatactaacacattaagtgtatgtcagaaattgatgtataaatatatattttaacattttctgaaattaaactgcagttttgttgaaatatttggctctatatgtgttcaaaatttgactagatttgtattttcacagttcaaaatactccttaaagacctgttaataatgacttactgatagttcttaaattttcaaagtaaaacaatttaaagaatgcaaaaatagtgagcaatatttggactcaatattcatattat

SEQ ID NO: 14885 - DNA, 2100 bp, Homo sapiens
gatccttcgatgtcggctcttcctatcattgtgaagcagattccctggcaaacccccttcagttaacacctatgaacagtctggccacctctgtattcagcatagctattcctgttgatggtgatgaagacagtgcatctgggggaggtgttgtagccattgacaacaaaatagaacaagcaatggatctggtgaaaagccatttgatgtatgcagtaagagaagaagtggaagttttaaaggaacaaataaaagaattagttgaaagaaactctttacttgaacgagaaaatgcactgttaaaatctctttcaagcaatgatcaattatcccaactcccaacccaacaggccaatcctggtagcacttctcaacagcaagcagtgatagcacagcctccgcagccaacgcaacctccacagcagccgaatgtctcctcagcataaagctttcttaagcctcattaagaaaaaaactgaaagcaatctatccttgtgtgccactggtgttctttccactttatacgaaagcaagtagccatgctttggttgtgtgtttggccttttcagtattagacaatcattctacaagagcttttcctctctctgagatgtcatgcagcgctgttgatgtccagttctatgtcatcagtacacaaggagaataatagatggggtttattaaagcgagcaaagtctgcattttacctggtgcgcatgagtggggtctttaagagttttggtggctctcccatgtttcctattacccatggatttaccctgagccttcctatcacattataaataacagttcatctaaagagccacttttctttctgattcagtaacatttgcctacataagttttcatttatttgtgttttatttattacagggctgctattttcataatgtacatgaacaatgtcacagaacttttttaatttttttgaataattataagtatcagtaaaggaagtgaaagacaggattgcatttaatagataaaacgtttaggcaataattgaacaaaagaatcctggcatatttctaacactaatggcaatttacttatggtatttattttcagtagtaaagacccagcttgaatgtaaattttgtatagtgtaagtatgaagaacatagtgcaactgtacaggtagtcaccagttattgtgatatgataaataattgggctattttgatgaagaaaactttgttcatttgtttctactttctaagagaaattgccacgattcctctgcttttcaacatttcgtatgacttttttttcgggtgggaataaaaagctgtgaaattgttcaacctactttgtaaccaaagaagcaaagctgtgtaatggagtttggttttttttttgttgttttttttttttttgtctttttttttttttataatgcacattctttatgtatttttatttagtgttttctcagtcacaattttctttactgtctagcatgatctgcatgacctataatctttgaaccactttcgtacctcatgtttttatccagcactcttattgtaatatgtactagtctgtgaacaatgtcaaataaaagagaacgaacaggtagtttggtggagctgagctagtgtacaatacactagttgtaaaaaaaaaaaaaaaaagtgagccatcttttgttcatttaaaatggtgttttgaatttcgtatgcagaaaacgttttgttacattgcagattttaatgtatttaataaatgcaacatgcagattaagtgcagtgtatactgagtatttaaattaaaatgtacatttcataaatacagtttcaaaagaaagcatcattttgtgtatactaacacattaagtgtatgtcagaaattgatgtataaatatatattttaacattttctgaaattaaactgcagttttgttgaaatatttggctctatatgtgttcaaaatttgactagatttgtattttcacagttcaaaatactccttaaagacctgttaataatgacttactgatagttcttaaattttcaaagtaaaacaatttaaagaatgcaaaaatagtgagcaatatttggactcaatattcatattat

SEQ ID NO: 14886 - DNA, 4494 bp, Homo sapiens
attttagtcggcagcggcggcggcagcggggctgctgctcctcccagcatccctggcgcggccatttcagccccatcttggcccagcggagggagctgcagccgccgcttcagcagtttgaatttcagtttcttcggggtttaggaattgggcgcaccgaggaggagccggagaagccaccaccgctacctcacacagccggggcgcctccggtcccgtgccagcggtctgccgccgccgcccctctctgagagaagccgcgaggggaggccgagaccgccgtcgccgcccgcccgcaggggtggttccccctgtaaggggaggaccgagccggctttcccctcccccagagcgggtttccgcctgaggcagtcgacatgtccctggggctgagctccggctagagccggggagggagggccgcctgcccgcgccacagccccaccgcccgcccgcggaccttcagccagctccggcccgcggctcccggctgaattaggcatctccgactccggactcgccgctccttccctcagtcagagagcccagcgctgacgccggcaccggcctgaggagcccgagcggggcagcaccgcccctcacgccgccgccaccgcctcctcctcctcctcttcgccctcccactcccacccccagccaaggcctgctgaccgcgccgagcgccgagctggactgaccacggctgcccggagacgagagaggaagcagccggcccgcccctgggttcgcgctctcgccgcctctgagggaattgaattgaggcgccgcggctgcgagagctaaaaaggaaggaggagccgccgcgggactgagacgggggcagagccgaagagaccgacacagagaaggaaacgaggaggaggatgtctcaccgggcggccagcgcctggatcagcccgtgactcttaacagcggcgggcctcagaccccagcgcagactcggactttgtctttgggggcccgtgctctgccctccccggtttccgacaggacccagaggagccggcgtgcctctctgccctccagccttcttcaccatgtccaagatgccggccaagaagaagagctgcttccagatcaccagtgtcaccacggcccaggtggccactagcatcaccgaggacaccgagagcttggacgacccggacgagtcacgcacagaggacgtctcctccgagattttcgacgtctctcgggccacggattatggccctgaggaggtctgcgagcgcagctcttccgaagagacgcttaacaatgttggggatgcggagactcccgggaccgtctccccaaacctcctcctagatgggcagctggcagcggcggctgctgctcccgccaacggaggaggagtcgtttcggcccggagcgtgtctggggcgctcgccagtaccctggcggcggctgccacttcggcccccgcccccggagcacccggcggcccccagctcgcgggctcatccgccgggccagtgactgcagccccatctcagcctcccaccacatgtagttcccgttttcgcgtgatcaagctggaccacgggagcggagagccctatagacgcggccgatggacgtgtatggaatactatgagagggattcagacagcagcgtcctgactagatccggggattgcattagacacagcagtacttttgaccagactgcggagcgggacagcggcctgggcgccaccggagggtcggtggtggtagtagtggcctccatgcagggggcgcacgggcccgagtcgggaactgacagctccttgactgctgtgtcacagctacccccgtcggagaaaatgagccagcccactccggcccagccgcagagttttagcgttgggcagccacagccgccgccgccacccgtaggtggggctgtggctcaaagctcggctccgctgccgccgttcccgggagccgcgaccgggccgcagccaatgatggcagccgcgcagcccagccagccccagggagcggggcccgggggacagactctgccgccgacgaatgtaaccctggcgcagccggctatgtccctgcctccgcagccgggccctgcagtgggcgcccccgcggcgcagcagccccagcagttcgcgtatcctcagcctcagataccgcccggacatttgctgcccgtccagccctccggccagagtgagtacctgcagcagcacgtggccggcctgcagccgccaagccccgcgcagccctcgtccaccggcgccgcagcgagccccgccacggcggccacccttcccgtgggcaccggccagaatgcttcctcggtgggcgcgcagctcatgggcgcgtcttcccagcccagcgaagccatggccccccggacgggaccagcgcaaggcgggcaggtcgcgccttgtcagccgactggagtgcccccggctactgtgggaggcgtggtgcagccgtgcctcggtcctgccggggctgggcagccccagtccgtgcctccgccgcagatgggtggcagtggtccgctgtcagccgtacctggtggccctcacgccgtggtgcccggagttccaaacgtgcctgcagccgtgcccgctccaagcgtgcctagtgtgtctaccacttctgttactatgccaaatgtacccgcgcctctggcccagtcgcaacagctgagcagccatacgccagtcagcaggagcagcagcataatccagcatgttgggctgcccttagcgccaggcacacacagcgcaccaacaagtctaccacagtctgacctaagccagtttcaaactcagacccagcctttagtcgggcaagtcgacgatactagaagaaaatcagaacccctacctcaaccaccactttctctcattgctgaaaataagcctgttgtgaagccgcctgttgcagattccctggcaaacccccttcagttaacacctatgaacagtctggccacctctgtattcagcatagctattcctgttgatggtgatgaagacaggaatccttcaactgctttctaccaagcgttccatttgaacacgttaaaggaatcaaagagcctctgggatagaattttttttagaattcagcatcggaggaggaatgtgacataataatgatcgaaagccgaaagtttaaaagttgtgatgccctcacatggttggagggttattctagcttctaaggactgaatgttgtccacaagagtgtcatcaggtcataaattgtgcatctgggggaggtgttgtagccattgacaacaaaatagaacaagcaatggatctggtgaaaagccatttgatgtatgcagtaagagaagaagtggaagttttaaaggaacaaataaaagaattagttgaaagaaactctttacttgaacgagaaaatgcactgttaaaatctctttcaagcaatgatcaattatcccaactcccaacccaacaggccaatcctggtagcacttctcaacagcaagcagtgatagcacagcctccgcagccaacgcaacctccacagcagccgaatgtctcctcagcataaagctttcttaagcctcattaagaaaaaaactgaaagcaatctatccttgtgtgccactggtgttctttccactttatacgaaagcaagtagccatgctttggttgtgtgtttggccttttcagtattagacaatcattctacaagagcttttcctctctctgagatgtcatgcagcgctgttgatgtccagttctatgtcatcagtacacaaggagaataatagatggggtttattaaagcgagcaaagtctgcattttacctggtgcgcatgagtggggtctttaagagttttggtggctctcccatgtttcctattacccatggatttaccctgagccttcctatcacattataaataacagttcatctaaagagccacttttctttctgattcagtaacatttgcctacataagttttcatttatttgtgttttatttattacagggctgctattttcataatgtacatgaacaatgtcacagaacttttttaatttttttgaataattataagtatcagtaaaggaagtgaaagacaggattgcatttaatagataaaacgtttaggcaataattgaacaaaagaatcctggcatatttctaacactaatggcaatttacttatggtatttattttcagtagtaaagacccagcttgaatgtaaattttgtatagtgtaagtatgaagaacatagtgcaactgtacaggtagtcaccagttattgtgatatgataaataattgggctattttgatgaagaaaactttgttcatttgtttctactttctaagagaaattgccacgattcctctgcttttcaacatttcgtatgacttttttttcgggtgggaataaaaagctgtgaaattgttcaacctactttgtaaccaaagaagcaaagctgtgtaaactgattgggatcctctagaaca

SEQ ID NO: 14887 - DNA, 4054 bp, Homo sapiens
attttagtcggcagcggcggcggcagcggggctgctgctcctcccagcatccctggcgcggccatttcagccccatcttggcccagcggagggagctgcagccgccgcttcagcagtttgaatttcagtttcttcggggtttaggaattgggcgcaccgaggaggagccggagaagccaccaccgctacctcacacagccggggcgcctccggtcccgtgccagcggtctgccgccgccgcccctctctgagagaagccgcgaggggaggccgagaccgccgtcgccgcccgcccgcaggggtggttccccctgtaaggggaggaccgagccggctttcccctcccccagagcgggtttccgcctgaggcagtcgacatgtccctggggctgagctccggctagagccggggagggagggccgcctgcccgcgccacagccccaccgcccgcccgcggaccttcagccagctccggcccgcggctcccggctgaattaggcatctccgactccggactcgccgctccttccctcagtcagagagcccagcgctgacgccggcaccggcctgaggagcccgagcggggcagcaccgcccctcacgccgccgccaccgcctcctcctcctcctcttcgccctcccactcccacccccagccaaggcctgctgaccgcgccgagcgccgagctggactgaccacggctgcccggagacgagagaggaagcagccggcccgcccctgggttcgcgctctcgccgcctctgagggaattgaattgaggcgccgcggctgcgagagctaaaaaggaaggaggagccgccgcgggactgagacgggggcagagccgaagagaccgacacagagaaggaaacgaggaggaggatgtctcaccgggcggccagcgcctggatcagcccgtgactcttaacagcggcgggcctcagaccccagcgcagactcggactttgtctttgggggcccgtgctctgccctccccggtttccgacaggacccagaggagccggcgtgcctctctgccctccagccttcttcaccatgtccaagatgccggccaagaagaagagctgcttccagatcaccagtgtcaccacggcccaggtggccactagcatcaccgaggacaccgagagcttggacgacccggacgagtcacgcacagaggacgtctcctccgagattttcgacgtctctcgggccacggattatggccctgaggaggtctgcgagcgcagctcttccgaagagacgcttaacaatgttggggatgcggagactcccgggaccgtctccccaaacctcctcctagatgggcagctggcagcggcggctgctgctcccgccaacggaggaggagtcgtttcggcccggagcgtgtctggggcgctcgccagtaccctggcggcggctgccacttcggcccccgcccccggagcacccggcggcccccagctcgcgggctcatccgccgggccagtgactgcagccccatctcagcctcccaccacatgtagttcccgttttcgcgtgatcaagctggaccacgggagcggagagccctatagacgcggccgatggacgtgtatggaatactatgagagggattcagacagcagcgtcctgactagatccggggattgcattagacacagcagtacttttgaccagactgcggagcgggacagcggcctgggcgccaccggagggtcggtggtggtagtagtggcctccatgcagggggcgcacgggcccgagtcgggaactgacagctccttgactgctgtgtcacagctacccccgtcggagaaaatgagccagcccactccggcccagccgcagagttttagcgttgggcagccacagccgccgccgccacccgtaggtggggctgtggctcaaagctcggctccgctgccgccgttcccgggagccgcgaccgggccgcagccaatgatggcagccgcgcagcccagccagccccagggagcggggcccgggggacagactctgccgccgacgaatgtaaccctggcgcagccggctatgtccctgcctccgcagccgggccctgcagtgggcgcccccgcggcgcagcagccccagcagttcgcgtatcctcagcctcagataccgcccggacatttgctgcccgtccagccctccggccagagtgagtacctgcagcagcacgtggccggcctgcagccgccaagccccgcgcagccctcgtccaccggcgccgcagcgagccccgccacggcggccacccttcccgtgggcaccggccagaatgcttcctcggtgggcgcgcagctcatgggcgcgtcttcccagcccagcgaagccatggccccccggacgggaccagcgcaaggcgggcaggtcgcgccttgtcagccgactggagtgcccccggctactgtgggaggcgtggtgcagccgtgcctcggtcctgccggggctgggcagccccagtccgtgcctccgccgcagatgggtggcagtggtccgctgtcagccgtacctggtggccctcacgccgtggtgcccggagttccaaacgtgcctgcagccgtgcccgctccaagcgtgcctagtgtgtctaccacttctgttactatgccaaatgtacccgcgcctctggcccagtcgcaacagctgagcagccatacgccagtcagcaggagcagcagcataatccagcatgttgggctgcccttagcgccaggcacacacagcgcaccaacaagtctaccacagtctgacctaagccagtttcaaactcagacccagcctttagtcgggcaagtcgacgatactagaagaaaatcagaacccctacctcaaccaccactttctctcattgctgaaaataagcctgttgtgaagccgcctgttgcagattccctggcaaacccccttcagttaacacctatgaacagtctggccacctctgtattcagcatagctattcctgttgatggtgatgaagacaggaatccttcaactgctttctaccaagcgttccatttgaacacgttaaaggaatcaaagagcctctgggatagaattttttttagaattcagcatcggaggaggaatgtgacataataatgatcgaaagccgaaagtttaaaagttgtgatgccctcacatggttggagggttattctagcttctaaggactgaatgttgtccacaagagtgtcatcaggtcataaattgtgcatctgggggaggtgttgtagccattgacaacaaaatagaacaagcaatggatctggtgaaaagccatttgatgtatgcagtaagagaagaagtggaagttttaaaggaacaaataaaagaattagttgaaagaaactctttacttgaacgagaaaatgcactgttaaaatctctttcaagcaatgatcaattatcccaactcccaacccaacaggccaatcctggtagcacttctcaacagcaagcagtgatagcacagcctccgcagccaacgcaacctccacagcagccgaatgtctcctcagcataaagctttcttaagcctcattaagaaaaaaactgaaagcaatctatccttgtgtgccactggtgttctttccactttatacgaaagcaagtagccatgctttggttgtgtgtttggccttttcagtattagacaatcattctacaagagcttttcctctctctgagatgtcatgcagcgctgttgatgtccagttctatgtcatcagtacacaaggagaataatagatggggtttattaaagcgagcaaagtctgcattttacctggtgcgcatgagtggggtctttaagagttttggtggctctcccatgtttcctattacccatggatttaccctgagccttcctatcacattataaataacagttcatctaaagagccacttttctttctgattcagtaacatttgcctacataagttttcatttatttgtgttttatttattacagggctgcggagaggatttgggatcctgagagtcgaccgcagcagcgcct

SEQ ID NO: 14888 - DNA, 3318 bp, Homo sapiens
attttagtcggcagcggcggcggcagcggggctgctgctcctcccagcatccctggcgcggccatttcagccccatcttggcccagcggagggagctgcagccgccgcttcagcagtttgaatttcagtttcttcggggtttaggaattgggcgcaccgaggaggagccggagaagccaccaccgctacctcacacagccggggcgcctccggtcccgtgccagcggtctgccgccgccgcccctctctgagagaagccgcgaggggaggccgagaccgccgtcgccgcccgcccgcaggggtggttccccctgtaaggggaggaccgagccggctttcccctcccccagagcgggtttccgcctgaggcagtcgacatgtccctggggctgagctccggctagagccggggagggagggccgcctgcccgcgccacagccccaccgcccgcccgcggaccttcagccagctccggcccgcggctcccggctgaattaggcatctccgactccggactcgccgctccttccctcagtcagagagcccagcgctgacgccggcaccggcctgaggagcccgagcggggcagcaccgcccctcacgccgccgccaccgcctcctcctcctcctcttcgccctcccactcccacccccagccaaggcctgctgaccgcgccgagcgccgagctggactgaccacggctgcccggagacgagagaggaagcagccggcccgcccctgggttcgcgctctcgccgcctctgagggaattgaattgaggcgccgcggctgcgagagctaaaaaggaaggaggagccgccgcgggactgagacgggggcagagccgaagagaccgacacagagaaggaaacgaggaggaggatgtctcaccgggcggccagcgcctggatcagcccgtgactcttaacagcggcgggcctcagaccccagcgcagactcggactttgtctttgggggcccgtgctctgccctccccggtttccgacaggacccagaggagccggcgtgcctctctgccctccagccttcttcaccatgtccaagatgccggccaagaagaagagctgcttccagatcaccagtgtcaccacggcccaggtggccactagcatcaccgaggacaccgagagcttggacgacccggacgagtcacgcacagaggacgtctcctccgagattttcgacgtctctcgggccacggattatggccctgaggaggtctgcgagcgcagctcttccgaagagacgcttaacaatgttggggatgcggagactcccgggaccgtctccccaaacctcctcctagatgggcagctggcagcggcggctgctgctcccgccaacggaggaggagtcgtttcggcccggagcgtgtctggggcgctcgccagtaccctggcggcggctgccacttcggcccccgcccccggagcacccggcggcccccagctcgcgggctcatccgccgggccagtgactgcagccccatctcagcctcccaccacatgtagttcccgttttcgcgtgatcaagctggaccacgggagcggagagccctatagacgcggccgatggacgtgtatggaatactatgagagggattcagacagcagcgtcctgactagatccggggattgcattagacacagcagtacttttgaccagactgcggagcgggacagcggcctgggcgccaccggagggtcggtggtggtagtagtggcctccatgcagggggcgcacgggcccgagtcgggaactgacagctccttgactgctgtgtcacagctacccccgtcggagaaaatgagccagcccactccggcccagccgcagagttttagcgttgggcagccacagccgccgccgccacccgtaggtggggctgtggctcaaagctcggctccgctgccgccgttcccgggagccgcgaccgggccgcagccaatgatggcagccgcgcagcccagccagccccagggagcggggcccgggggacagactctgccgccgacgaatgtaaccctggcgcagccggctatgtccctgcctccgcagccgggccctgcagtgggcgcccccgcggcgcagcagccccagcagttcgcgtatcctcagcctcagataccgcccggacatttgctgcccgtccagccctccggccagagtgagtacctgcagcagcacgtggccggcctgcagccgccaagccccgcgcagccctcgtccaccggcgccgcagcgagccccgccacggcggccacccttcccgtgggcaccggccagaatgcttcctcggtgggcgcgcagctcatgggcgcgtcttcccagcccagcgaagccatggccccccggacgggaccagcgcaaggcgggcaggtcgcgccttgtcagccgactggagtgcccccggctactgtgggaggcgtggtgcagccgtgcctcggtcctgccggggctgggcagccccagtccgtgcctccgccgcagatgggtggcagtggtccgctgtcagccgtacctggtggccctcacgccgtggtgcccggagttccaaacgtgcctgcagccgtgcccgctccaagcgtgcctagtgtgtctaccacttctgttactatgccaaatgtacccgcgcctctggcccagtcgcaacagctgagcagccatacgccagtcagcaggagcagcagcataatccagcatgttgggctgcccttagcgccaggcacacacagcgcaccaacaagtctaccacagtctgacctaagccagtttcaaactcagacccagcctttagtcgggcaagtcgacgatactagaagaaaatcagaacccctacctcaaccaccactttctctcattgctgaaaataagcctgttgtgaagccgcctgttgcagattccctggcaaacccccttcagttaacacctatgaacagtctggccacctctgtattcagcatagctattcctgttgatggtgatgaagacaggaatccttcaactgctttctaccaagcgttccatttgaacacgttaaaggaatcaaagagcctctgggataggggggaaatcacatggtatctagcatgggacaaagcagcaaaataaaccaaaaggacaatctctattttatatagaaaataaacatacttttctgcatcctgtgtactttaagtatatctatatttttgaagggttcatactgtgttgaatttttcttatgaaatagtcacttccccagtgtattttaatgcaaatgcatattctataaaataaactatattttaatttt

SEQ ID NO: 14889 - DNA, 416 bp, Homo sapiens
gagatgtcccagctgagggaatctcccagaatgaaaatggactaactgaactgtggctgcatagtcttcaggctactgagaaaacaatacaacaaaaaaccacacacaatgactcaaactttatagaggggaaaggtaatagtgcatcacaagtttaacatccttgagtatacatccttttacttaacttttgtttctagtaacaaagttatgacattgcaagtacatcactggaatgcatctactagcagaaatgtttattgtacaccatttttataggaagtactgcctcagcttacgagctttgcaaacaaatattagtgctaaatgctttttactgacatcttcgtttctgaacagaagctgataaaggtactatttttctgtcaaacatgaaatggattttccatgttgat

SEQ ID NO: 14890 - DNA, 343 bp, Homo sapiens
ggcagggacagacttgaatctaggtttgctggactcagaagccaattctcttggtatctctctggactacagcaacatatggttcactttcggagcccacagctcttgatgtgagctgcagttctgagggtcctaccctacaactgtcatgtgattacaccatactgaaaaagtgcactgggggtctcataagaatattttctgccataagaggaaagttatttaccccttgttgcagcctttatcatggacatgaaaatgctaaaaaatatttagggtcttctaatcagtaacttctattgtgaaagacaggaaaaactggctctttcccaaacgatgttgc

SEQ ID NO: 14891 - DNA, 1004 bp, Homo sapiens
ctttgaaacacaaaaatttttaattttgaggagatccagtttattttttgtttggcttgttctttttatgtcatatctaagaaaccattgcctaatccaaggttacaaagatttatggctatgttttctcctcatttttatagtattagctcttaggtttatgtttttgatccatttgagttaatttttatccatggtgtgagataggggtgggccagtaaactttctctatgaagggcttcacgctgctgatgaagacatacccaacactgggcaatttacaaaagaaagaggtttattggacttacatctccatgtggctggggaggcctcacaatcatggtggaaggtgaaagccatgtctcaaatggcagcagatgcaagaggagagactgtgcagggaaatctccctttttaaaaccatcagatcccttgagacttactatcacgagaacagaatagcacgagaaagacctgcccctgtgattcagttacctcccaccgcgtccctcccacaacatgtggaaattcaagatgacatttgggtggtgacacagccaaaccatatcaaaggaccatatagtcaatattctatcctttgtggggcatgtgatctctgttacaaatattgagctcttctgttgtgacaggaaaatagccatggacagtaaatgaacaaatggatgtggctgtgttcaaacaaaactttatatacgaaaatagatggcaggccagatgtgaccccttttttgccagcccctgttctaggatagctgagtaacctgaacataactggagatttatggtcacggtatttgccttatgtaggttttttgctcaaatgtttaatagtatacacaccagtgagtaataaacttatgtagttcttagcatttgaaatgctttaaacatcctggtaaactttgctttaatactgctttttacagatgatagacttgggtcattcattaaattgaattaaattagaatactaaacaagcctt

SEQ ID NO: 14892 - DNA, 381 bp, Homo sapiens
gatctgatggcagtgaaaactttaacagaggatggaaagactatgaaaatggctttggaaattttgtccaaaaacatggtgaatattggctgggcaataaaaatcttcacttcttgaccactcaagaagactacactttaaaaatcgaccttgcagattttgaaaaaaatagccgttatgcacaatataagaatttcaaagttggagatgaaaagaatttctacgagttgaatattggggaatattctggaacagctggagattcccttgcggggaattttcatcctgaggtgcagtggtgggctagtcaccaaagaatgaaattcagcacgtgggacagagatcatgacaactatgaagggaactgcgcagaagaagatc

SEQ ID NO: 14893 - DNA, 565 bp, Homo sapiens
aagaagctcccaggtgaagactctcctgctggtccagatttttattcaatacttctggtgttcaactaaagaaactattttaattagcacgtggatgaatgagacttcttgtgaatctacccaggagttgctttttccttgcaataccaggtcatcagcacaattgatgaacatgaatggaggcatctgacaactcctctgcaggtggtgattcttgcaaatgagatgttactaatttgaaccaattggagggactgtaattgagattctattagtgatctgcccacaaactgaatgagctattctgttattaacaaagaaaggaagaaattgaccttcaaattgggttcattttggactgtaaggtagaatgtcattcaactaaatgctcattattcccgatctttagatgaaagatgactttcccaaaaagatatgaaaaaaatgttatgctaatttcacatgttgagcaatgggtaatgctaagatgtcaaaatgtctctggaataggaaagtaactaatgtgtacactagaaatattgcaaataaaagagatcggccagag

SEQ ID NO: 14894 - DNA, 710 bp, Homo sapiens
accccttggtggtggctggaatgagcaggtaaacaccatcccagatgaaccgaggcatgttctatagcagaatatagacaagcatcttttgcatatgacagtgtccagggtaccctcgttcttccccgggcacactgcaagagcttgggaaccgctgaacatgggtgcaagctataacacagatttttattcaatacttctggtgttcaactaaagaaactattttaattagcacgtggatgaatgagacttcttgtgaatctacccaggagttgctttttccttgcaataccaggtcatcagcacaattgatgaacatgaatggaggcatctgacaactcctctgcaggtggtgattcttgcaaatgagatgttactaatttgaaccaattggagggactgtaattgagattctattagtgatctgcccacaaactgaatgagctattctgttattaacaaagaaaggaagaaattgaccttcaaattgggttcattttggactgtaaggtagaatgtcattcaactaaatgctcattattcccgatctttagatgaaagatgactttcccaaaaagatatgaaaaaaatgttatgctaatttcacatgttgagcaatgggtaatgctaagatgtcaaaatgtctctggaataggaaagtaactaatgtgtacactagaaatattgcaaataaaagagatcggccagag

SEQ ID NO: 14895 - DNA, 251 bp, Homo sapiens
ctttctgatctacagttcaatacagaaacaatgtattgatgttaaagattaaaatttactggctgaattttcacaaaaacttttgcatagttggagaattaggttgaaaaattagtgtcgtatttcagtaagcatggccaatcatgtgtcttccattttgatcttcttactttttcaagtataacaatatttaataccagatattaaaatgaatgcatttagaagatattcgaaagaatgaagcatgtgca

SEQ ID NO: 14896 - DNA, 318 bp, Homo sapiens
aaatcgcagaagtgatggcatcagaacttcaacagccttcttaaattggatgtcattaaataaagcaggccatcgcgcttttttagtttgacttctgtgatagattttcagttcctagcctgcgtgaaaaaacactgtaagtttaatagatgtggctataacatgcagacaataaggaatgttgtgaaaatgcaaagttagttacttcttgaggatcaatgtgtagatttagcacgttaacttgtatttcgcaaccatgttctgacaccgtataataatgatttctaattagaaatagatgtgcttatgttaacatgc

SEQ ID NO: 14897 - DNA, 219 bp, Homo sapiens
tcagactaggtaacagaccctgttactgggagggctctataggtatcgattgtttccacatatgaaatacacagcctttgtctctttggtgagcttatcatatgtgttttagtaaaaaagttcttcttaatcaaacaatttgtacacttgatttgtcaaactatattctggttaaagaaaaggccgattcttagttatttatccagttatctgccattg

SEQ ID NO: 14898 - DNA, 813 bp, Homo sapiens
cgagataaataaaaatgataagtaaccacccaggttactaccacccaactggtaggcagaaatggcccaagtcatgaagtcacatgactaaataaagcttgggaaatactagcataaagttaattcatgtaaacactaatgatcacaggcacagtatccttggcttctgtttcttcgtggcgtgtgtccacatgagccggcctgaatcataaagcccagcctgaaagcagctctctttctcggaagggctgatgtcatttgtgtgtgttttatcagctgctcttcaaggagcataactcctgtggcttctgccatatctttatgccatcagaattctgatttcgggaagacctcaagagagcattgaaatagctcacttacagtcctcaccccttttggcatcaagggctcacctctgctccctcacctccttggacctggtactccagccaacatggatcggtaaatatacataatgatggaatattagcctgaaaaaggaaagtcatacacaggctacaacatggaagaaccttgaaaacattatgaaactgaatgattccacattgttcaggatgtgcctagaccgatcagattcatagagacagaaagtagaagggtaattgtgggggctgaggagggataatggggagagttagtgtttaatgggtacagggtttcagtttgggaagatgaaacagttctagagatggatggtgccgatgaatagcgagggctaggaaagataggtgccgatgaatagcaggtgccgatgatagcgacgtgccgatgaaagcgaggtccgagctgata

SEQ ID NO: 14899 - DNA, 445 bp, Homo sapiens
gggagagttagtgtttaatgggtacagggtttcagtttgggaagatgaaacagttctagagatggatggtgccaaaggttcccaatagtgtgaatgtacctaatgccactgaactgtacgttaatcatggctaaaatggtcaatgttggctgggtgcggtggctcacacctgtaatcccagcactttgggaggcagaggcagggagatcacatgaggtcaggagttcgaggccagccttgccaacatggcaaaaccccgtctccactaaaaatacaaaaattagccaggtgtggtggtgcacatttgtgctcctagctatttgggaggctgagacacaagaatcgtgtaaacccgggagccagagtttgcagtgagccgagattgtagcactgcactccagcctgggtaacagagtaagactccatctcaaaaaataaaataaaa

SEQ ID NO: 14900 - DNA, 442 bp, Homo sapiens
ttttttttttgggtgtattttttgtatttttagagacaagagttcaccatgttggccaggctggtctcgaactcctggcctcaagtgatccactcgcctcggccctgcaaagtgctgggattacaggcatgagccactgtgcccagccaagggagttgaagccttaaaggaaagacccaggaaaacagatatagggtccaaaaggcagaaaaggattctaggggttgtaaacacccaggtaaccctggtgaaaggctttgttgcctccagatggtgggacaggagttccaccgcaggcaggattaggtggtattttcattcatttctttttaggttaatacattggcttagggacaggatcctattccagggctgaaggggatcttgagaatcaacttgcccaatgctctcattttgtaggtagaatctacagctcagagaa

SEQ ID NO: 14901 - DNA, 368 bp, Homo sapiens
cctctggggctcggggctcaggcctcagctggagctctggcctggggcctttgcacggcggctgctgccatctgctcctccctggcgctgtggggccagctcctttcttcgagttctctcactggacgcattgccacctcacacgggacccctgaccctgagctggccgggtggggccaagtgaccccagcacccaggaagtgggcccccgcccagaagctgctgtttgtttcttactagcacctaataagttggaatgtacttcgcaaagccgtggctttcgttgactgtcgacttgttcaacaccgcatcccaggtctgtctgtgctcaaagaagagtgagtgcctgaccagaggcgaccggggca

SEQ ID NO: 14902 - DNA, 383 bp, Homo sapiens
tttttttttctttagtctggctgaaattttttcacttttgtttatctttcccccaaaaaccttctttacttgcttttgtgttgtctttgtttgtttcaatcccatttacttctgctctgatatttattatttattttcttctactaagattgagtttggttgcccttgcatttctacttctttaagatgaatcattaggttgttttttggaagttgtacttttgatgaaggcatttattgttctaagcttccctctcactactgtttttgcagtgtcatattggttttggtatgttgcgtgtccattttcatttgtttctagaattgaaaaaacttccttcttaacttctccaatgacccagtggtcattcaggagaataatg

SEQ ID NO: 14903 - DNA, 383 bp, Homo sapiens
gtatcttctctcatactgattcttgtttgtatctttacccaaaataggagtacacctttgtcatttaattaattgtttgatataatcttccaaaatatggtatctggcagaggggggtgggagagaggaagaatagcacaaggctttgttgggtgcctgctgctggttgtatttgagatccaaatcaactattttgtatgaaatcgtagctattttttcctgtagcttttttttttttggtctctgtgccattggttgcttggatcaggaaatgccctatatttttgtctatattgtcatttaattccttttttcattgcctccttgactagatggtgagatacttgacatggggacctttacctcatcaggttttcattagt

SEQ ID NO: 14904 - DNA, 485 bp, Homo sapiens
  misc_feature (223)..(223): n is a, c, g, or t
  misc_feature (226)..(226): n is a, c, g, or t
  misc_feature (230)..(230): n is a, c, g, or t
  misc_feature (240)..(240): n is a, c, g, or t
  misc_feature (351)..(351): n is a, c, g, or t
  misc_feature (353)..(353): n is a, c, g, or t
  misc_feature (377)..(377): n is a, c, g, or t
  misc_feature (379)..(379): n is a, c, g, or t
  misc_feature (393)..(393): n is a, c, g, or t
  misc_feature (396)..(396): n is a, c, g, or t
  misc_feature (408)..(408): n is a, c, g, or t
  misc_feature (440)..(440): n is a, c, g, or t
  misc_feature (470)..(470): n is a, c, g, or t
ccaatcttcgaacgcaggtctgtgatcatccgcagactccgaaaaagggttcgaggaacgcgcctgctcccctcgtcgcagtttccagcccgacgagcttgttttgtcccggactcggtgcccctgtagacaatggccctcgtgtctgccgattcccgcattgcagaacttctcacagagctccatcagctgatcaaacaaacccagggaagagcgttcgcgnagnaacnaaactttagntgaacatccagaagacccatgagcggatgcaggacagagaacaagatttctccctattaccggacaaagctgcgtggcctcttacacaaccgccaaggccgatgcagaggntngagtgcaacatccttcgggaaagntntgggacaagatcgnggnaattcaagtctntgtttggaagagaggcggttttcgggccaagntttgccggttttttacattgatttcggggncaccccggtagacct

SEQ ID NO: 14905 - DNA, 342 bp, Homo sapiens
gaactgctgggattacaggcgtgagccactgcgccggccagtttttctatttttagcagagacagggtttcaccatgttgaccaggctggtctcaagctcctgacctcaggtgatcttctcgcttcagcctcccaaagtgctgggattataggtatgagctcccgtgcccagctggaagcaggatttttgacaaatgaattttaatatagaaaaaggccagatactgtgactcatgcctgcagtctcggcagtttgggagaccaaggcaggaggattgcttgaggccaggagttaaaggctacagtgagctatgatcatgccactgcactccagtctaggca

SEQ ID NO: 14906 - DNA, 200 bp, Homo sapiens
gtgttagattttaacatatctctcttggaaaataaaatattaagcactttaaaaaataaagatcaagactatttgactaacacaatagcatgacctaatagaaatattctgaactacgttctaagcagagtatacacattcacaaaaattgaccataagctaaactgcaaaggaaatcttaacacatctccccacccaaa

SEQ ID NO: 14907 - DNA, 273 bp, Homo sapiens
taccctgacagacgtgattgtgaggccacaggacagctttgtcagaatagatcctgtaggaaacacaaactccaaaatgagaaagacaatgatcttggagaactcccaatgggagaggctgttctttgggggctctgccacccagcagtccccccaagtaagcgctaatgctgcagcaaagtgtaagcaaccactacttttgcatttaaaggctagtaagtcagaccctgtatatatgaccataataaacaatttctgtaattttggtaactt

SEQ ID NO: 14908 - DNA, 212 bp, Homo sapiens
gaaaaatatgcaagcagtccttttacttcaagtttctacccacacagggtcaacagagggaggagaggcagaggcagctgccctagaagcagccatcgtcccagtcccatagccagtgtgaaatcttagccctcttttccttacacatggccgtggccgctcttctagtcagcaccgaaatctcctccctgaagagcttctttctcttcctc

SEQ ID NO: 14909 - DNA, 900 bp, Homo sapiens
aatccagaggagacttttaagtgctgttttgtagatgaaatatgaaagagaaacaagggcttaatggtaaagatgacatatgactatattaagaaactgaatggccctttgtccacaaacagtaacccacacagcattgctactgtggcatgcccactgctctgcactgacctcatggagcagagaacctccttcagacacctcacgcaccccctgaggagctaatgtttcttcccaacatggaaaatttggaagaggcctattcttcacagctgtcacttctcattttgaaagaatatgcccacccttattcccaggcaaggtgtgaggaggtctttgggctccagctgttgccagcagaggtggtgaaagtcaacaacagggcactggacacacatagaaatgtgacccacagctatggtttgcaaatacagtctttcaagaagtcctgccatgtcctaaatgcccaaatcccttgcctcccatgattcttctcctcaaaggaccttctgctggacgccgccccctccctctccagccccaccagggccctccccgccatcctcttaggccacagcagccaataaagagtgtttttattccatgatctgtacccccaatgaatccataatcatagtttccaatgtatttaccaaaaatactaacattatctggaatgaatgaatgaatgaatgaatgaataaatattatatatttatacattttcattcttccaaagtgaaccccactatgccagttttactccatactcagtgttctggaaagcccatattctttctaaatttttcagcatttttttctatttttgtactttaccaaaattatttacattggaataaactctcttccttctgaaaaaaaatgtagtaaaaatgtgat

SEQ ID NO: 14910 - DNA, 318 bp, Homo sapiens
caaaaatacctggccaattacctctgcaataattgtgaaactaatttatatatcattgttattaattgtttctatcctcaattataagaatatgaacgtttattttaggaaccaaacttcctcatttggatgggtgattcagttggtcctatgactgacactaacaaaggcaccagaaggcatttttcagagagaatgattggtcctagatggcatctttctcaacagtcagggaattgaccacgaactttcacatccccttctaaagaatgtgtcatctagcctcttagtctgcacttggaaaaaaataaacagaaa

SEQ ID NO: 14911 - DNA, 122 bp, Homo sapiens
aacagggtctcaatctgtcacccaagcttgcacgcaatggcacaattatggctcactgcagcctcacaatcccaggctcaactaatcctgcccctcagtctctcaagtagctgggaccacag

SEQ ID NO: 14912 - DNA, 384 bp, Homo sapiens
tggggagggagcagttggagaggaaagtgtgttgtcgtggctggagaagcaaaatgacagagatatggataaggggggagaccttcgaatgccccagaagtcaatgtaactcctataatatagccctacacagggcctttgctaggtgacgactcatcaggaagcttcttaatatctgttactctgtgcccacctactaggaatgatgataggccttctggacaagttaccattgttattaactcaaaagatccagcaatacaatataaaagctcattaatctacaccttgttaactaataatctgtgatgtgttagacaagctggatatgtttacctatatattgctaagggtagacagaggaaaggagaagactaagttagc

SEQ ID NO: 14913 - DNA, 648 bp, Homo sapiens
ttcaacctgtttttcttcaagcatgagtactttgatttatctggttaagaaattttcagtccttcatactgaggtctcagtcatcttacaatagagacagccagtttactccccactttctagcctccgactcttgaaagcttccaagaaacacatccagaggtcacatattgggcaaccgaaggctcatgtgaaaaagccttagagccacaaaaaccttgcgcctcagtcattaatgtaatttggggcagattttatgaagcaaactaacgcctttgaatttttttttttcagttttaacgtgagtataattacttccactcctttttccactttccagtctctccgagttgcgtccctaaaggatcctgctgcaagaaatgagtgaatgaatgaagatattaagaattaaagtactgatgttaatgagagcatgggtgatgtggtttggattgcttgaggccaggagattgaaactagcctgggcaacatagtgagacaaaccttgtttcaaaaaaaataatatatatatatacacatacacacactaagtgaggtggtgtgtgcttgtagtcctagctgcttggaaggctgagatgggaggattgtgcccaggtgacagagcgagacccagtctgtattaaaaaa

SEQ ID NO: 14914 - DNA, 373 bp, Homo sapiens
taagagcacagtttcatgggactgttgtgaaaaatgagattcttaattgaagagcttagcataatacctaaacttattcccctagattgagttttcatattttatcctcaatgcttggcccattgcttggtgtataaatcatgctcaataaattatctgtggaaaaaataaatgaattaactatacagtaattatttttgtcttaggatttaggagcattaggcccagtgttcggaaagaggatgcagggccagatgtggtggctcacacctgtaatcccagcattttgggaggctgtggcaggaggattgcttgagcctacgagttcaagagcagcctgggcaacatagtgagaccccatctctacaaaaaa

SEQ ID NO: 14915 - DNA, 448 bp, Homo sapiens
ctacctactgagggggtgatggcgctggactggagctgctcagacctcatccggattcatgagtctattctgttttaagagagattttttttttcttttatgagacagagtctgtcacccagtctggagcacagtggtacaatcacagctcactaacatcctcagcctcccaggctcagaagatcctcccacctcaacctcccgagtagctgggactacaggcatgcaccaccgtgcctggctacttttaaatgtttttgtagagatgggtctccatgtgttgtccaggctggtcttgaattcctgggctcaagtgaccctctcacctcagcctctcgaagtgctgggattacaggcgtgagccaccatgcccggacgagatattgctaaagttgaatataagcaaagagggaaaccagaatagggaaaggtctagaaattatgtcag

SEQ ID NO: 14916 - DNA, 131 bp, Homo sapiens
gagaaattctgtatgatcaaaattcacactacaggaagccaaaattaggtataatataataatggatcataactcattgaataaaatgagttgaataaaagaatcaatgagtgcactcaaatataaacaaa

SEQ ID NO: 14917 - DNA, 468 bp, Homo sapiens
gctcagaacccctggctatttctgtaccctcttttctgatctcttgggtagcttctactggtagcaatatcctgctcagcgagtagaaagccctgtctctcatttttcctttggcttcaaagacattgaagtgtgtacatgtgcatgtgtgtgtgtgtgagagagagagagaggggcaggtgtgtcagcaaggggcccgacagatgcaaggtagaaatacactatgcttgcccaggagttcaacaccagcctgggcaacaaggtgaaaccccgtctctacaacaaaatatgaaaatatccttacctccccacaaatccatagccgggcgtggtggcacatgcctgtagtcgcagctactcaggaggctgagatggtaggatcttttgagcccagaaggtcaaggctgtagtgagccaagatctgcaccactgcactctagtctgggtgacagagcgagaccctgtctg

SEQ ID NO: 14918 - DNA, 365 bp, Homo sapiens
acacagtcatccactaatttctgatccattgctttgtccacatgacctagtgtctggttattctttctaaaaaaatgcttataggccaggttcatgggcttctacctataatcctagcactttcagaggttgaggcaggaggatcacttgagtccaggagttcaagactaccctgggcaacatggagagactctgtctctacaaaaaaattaaaaattagctgagcatggtggcattcacctgtagtcccagctacttgggaggccgaggtgggaagatagcttgagcctgggaggtcgaggctgcagtgagccatgactgcatccctgaactccagcctaggtgacagagcaagaccctgtctc

SEQ ID NO: 14919 - DNA, 1003 bp, Homo sapiens
aagcatcagacttctgttaccagacaacttataagtgccaactattggtagaactgtggacatgaagatagtggaaacagcttctctaggatgctatactcatctccaccaaatgcactttgaacaaaaacaacttgtagaaataggtcttaattttttttgtttgtttgtttggtttttttacaacatgctgtactgctctccattggtaagtgctagggaaaatcacttagccactagagggagctataacacaaaattaagcaggaaataatccccattatagatacataggaacaaagtagagaccagctaactaccttgatcctctgtatcagctcttaaagttagatggtttgggtaagttttcttggcaactttacctttgtctttcccatcttttgtgtaaaattcttccccttttcagcttttgcatccatttaggttttcagagtttaccttacaggcactcattttgtaacaaatctaggttctgggactaagaaaatactgaagacataagtctgcttgtttttctgcctaccttgtacatcaggtatggaataataaggccatgaatgtgagaattgggaacaggagttaggtgtgctggggaaaactagacataacaatttggttatgaactagaagaaatgaatatgcttttagagacctgcagtttgcttttatggagtgacagtttcaggtgtgatgatcttctcagtattactaagaggttcttaaagtttgtcttaaaatcctacttatgtgtcagcttagctgttttctattttctaggcctcacttaagtagcaggttgtcttgtgatcaaaaagtcagtagacacagtagttaatgccatattaacagctgaaaattactgaaaatttaacacttttagtatctgtcattcccatcaccgctttctccccaggtttcttttataaaaaatggaaaggacacaaacttgtctcctgtttacagtataaattgtcattgagaa

SEQ ID NO: 14920 - DNA, 438 bp, Homo sapiens
gaacacccctatagtgcaaagaaaaaagggaaatcaaacttcatctttttttccaagattgtcctctgcaaagaaccttcatttcagaaacccagaagttttcaaaacaactgtgggaaagagagatgaatttgcaggccttctgaactctacccacaaactctcaagagaacccacccgctgcagcctgtggctcccaactgtcctgcctacgcccaacagggaactggggatccgtattccagggaaccctctggaaacgtcacactcagttagcagattcttgagggcggtaactatagttttcagatctttgtgtcctctgtacctggaccaggtagagacttgataaatatctgtagttgttaaataaatgaaatgtttatctttgctgatctcttaaaaataaatcagttttacctacttgccatgcaactc

SEQ ID NO: 14921 - DNA, 412 bp, Homo sapiens
aaagattcctcacattatcagtttttcctttttttttctttcattttaagcaagctatagtctagttctggcattctcagggattttttaaaagttcagcaagaatgctgaataagcagcagatgtggatagcagcaagccgtcttctgcttctgatctttcgggtcagcattattttactatcgagccaagcaatgggtctggagagggtggaggtccaccagggcctgtcctgctgagctgaatgcggcaaagtgaaggtgagtgctgttcacctccgtcctggcatctggtgccccagaggaggtggtctgcttctcatttttcacaggggcctgaacaacctgcacccttcactgagtctcagtgtttgcctttgcaaaataggctaacaagaggaagaaaaaagaaa

SEQ ID NO: 14922 - DNA, 332 bp, Homo sapiens
gctgcccagactgtagcaggctgcagtggctggggagaccctactcattcctgtgcccctcctaaccagtcctagatagggctaaagaacgtctataaaccttttcagaagcttccagttgacacattctctctcttctctgaaatcctacaagtgctatctcatgatttacaaagacccaatacatgtgctgtctcattctgtcattgccagtcttaagtcttaagccctttgaggcctgattctacagccgagacatcctctatttctccaccatctctctgtctcattcagagcacacagtatgaatgaggtcaataaacacagtgttt

SEQ ID NO: 14923 - DNA, 396 bp, Homo sapiens
aagagcctataactacactgactcatcattaatacccaaagtccatagtttatgttagagttcactataggtactctacattctatgggtattgagaaatgtataatgacatgcatccaccattgtagtatcatatagaatagtttaccctaaaaatcctctgtgttaatccaattcatcctttcttccccttaattttagcgggggtggggggggatctttttactgtctccatagttttgccttttccagaatgtcatatagttggaatggtacagtatgtatttttttttcagattggtttatttacttagtaatacacatttagggtttttccatgtcttttcatgacttgatagctcatttatttttagcactgtataataattgcattct

SEQ ID NO: 14924 - DNA, 587 bp, Homo sapiens
  misc_feature (21)..(21): n is a, c, g, or t
  misc_feature (30)..(30): n is a, c, g, or t
cggccgccgcccgagctgcanccgccgaancgctttctctgtctcgctcttcctccgccccccgaccacacccccttaaagggccagcccctctacaggcccctctcccctactccgcccccgggcaggggtaggggagggtctattcggcagggggtggcctagctgtccgtactccccaaacgcaaccttccagtcccaaacccaggcgttctaagcgctcaggacgacgatttgcgctcacgccaggaccctagtcttcattggacccttcctcattctgtcctcattgaggccatctgagaataggggctatctgagaatgcaggggagtggacatcgtgtgcagacagggagtctggtgaggagacgctgcggtccccgatgtccaggtcctccagccctcggccagcgaggagcgaacgggctcctccgcacggaccgacacgtggactgggctcctgggaaaggaagagtggagaaggcgggcaggagctgtccgggtccctagactctccgagtagcaggtcccacgcccccagcggaagaagccggggctgggggtgagcggtggcacccggccggcc

SEQ ID NO: 14925 - DNA, 698 bp, Homo sapiens
cagaaagcgggctagcctgcacgcacgccaagatggagctccaggctagcccacagaacagcccagccgcagccgtcctaccagaccagcaccttgtaaccacagtctaacccagcgggcaccaggcgattgtgagtgccacggggctgaggcctgcgccgacctggtctgctggtgctaccaggcttgaacagtcttcaaatccactgctattaggcaaattacctggctcccgctgaactccagcacctagaactatgtcacactcgtagtaggccgctgcattggttgaacaaatgattttgaaagaatgaatgtcttcctctgtgcctgcatttcctcagaaggctgtaacaaagattaaataggaaaattcgtggaaagttcaattacaaaaaaaaaaaaaaaaaaaaaaaaaaaacaaaaaaaaaaaaacaaaagaaataaaatacaaacaaaacacagacgaagaaacgaaaagaaaaaaacaaacagcgactgacagaaaacagaacgagcgagacacgaacaacaacacaacagaaacggaccacgaagacgggcggtctgccgccgcgcagcacggatccgccctcagcggcgagggaggcgagcgggtcggcggcagcaggccatccacgcgactacggtcggcccggcgccgggcggcgcgatggcggcgggtcggctgacgagcc

SEQ ID NO: 14926 - DNA, 931 bp, Homo sapiens
  misc_feature (21)..(21): n is a, c, g, or t
  misc_feature (30)..(30): n is a, c, g, or t
cggccgccgcccgagctgcanccgccgaancgctttctctgtctcgctcttcctccgccccccgaccacacccccttaaagggccagcccctctacaggcccctctcccctactccgcccccgggcaggggtaggggagggtctattcggcagggggtggcctagctgtccgtactccccaaacgcaaccttccagtcccaaacccaggcgttctaagcgctcaggacgacgatttgcgctcacgccaggaccctagtcttcattggacccttcctcattctgtcctcattgaggccatctgagaataggggctatctgagaatgcaggggagtggacatcgtgtgcagacagggagtctgattgtgagtgccacggggctgaggcctgcgccgacctggtctgctggtgctaccaggcttgaacagtcttcaaatccactgctattaggcaaattacctggctcccgctgaactccagcacctagaactatgtcacactcgtagtaggccgctgcattggttgaacaaatgattttgaaagaatgaatgtcttcctctgtgcctgcatttcctcagaaggctgtaacaaagattaaataggaaaattcgtggaaagttcaattacaaaaaaaaaaaaaaaaaaaaaaaaaaaacaaaaaaaaaaaaacaaaagaaataaaatacaaacaaaacacagacgaagaaacgaaaagaaaaaaacaaacagcgactgacagaaaacagaacgagcgagacacgaacaacaacacaacagaaacggaccacgaagacgggcggtctgccgccgcgcagcacggatccgccctcagcggcgagggaggcgagcgggtcggcggcagcaggccatccacgcgactacggtcggcccggcgccgggcggcgcgatggcggcgggtcggctgacgagcc

SEQ ID NO: 14927 - DNA, 621 bp, Homo sapiens
catctttaaatggtctcattcattcgtgtattgtctgtctcccacttctagattgtgagtgccacggggctgaggcctgcgccgacctggtctgctggtgctaccaggcttgaacagtcttcaaatccactgctattaggcaaattacctggctcccgctgaactccagcacctagaactatgtcacactcgtagtaggccgctgcattggttgaacaaatgattttgaaagaatgaatgtcttcctctgtgcctgcatttcctcagaaggctgtaacaaagattaaataggaaaattcgtggaaagttcaattacaaaaaaaaaaaaaaaaaaaaaaaaaaaacaaaaaaaaaaaaacaaaagaaataaaatacaaacaaaacacagacgaagaaacgaaaagaaaaaaacaaacagcgactgacagaaaacagaacgagcgagacacgaacaacaacacaacagaaacggaccacgaagacgggcggtctgccgccgcgcagcacggatccgccctcagcggcgagggaggcgagcgggtcggcggcagcaggccatccacgcgactacggtcggcccggcgccgggcggcgcgatggcggcgggtcggctgacgagcc

SEQ ID NO: 14928 - DNA, 365 bp, Homo sapiens
gtcaccgtctgaacaaccagggagtcatgggggtggagaagcagagcccagaaagcgggctagcctgcacgcacgccaagatggagctccaggctagcccacagaacagcccagccgcagccgtcctaccagaccagcaccttgtaaccacagtctaacccagcgggcaccaggcggtgagacctcctgccgctgccagcccaggatagcccccttgcctcttgcccaaggctcaggctaccccttgaggcgtctggaggacactaggcttgacctggggagtggcatgatggggggcagggtccgaggcaacggagaaggcagaagtgacttaggtcaggcaagaaagagtatatattgggggc

SEQ ID NO: 14929 - DNA, 796 bp, Homo sapiens
cagaaagcgggctagcctgcacgcacgccaagatggagctccaggctagcccacagaacagcccagccgcagccgtcctaccagaccagcaccttgtaaccacagtctaacccagcgggcaccaggcggtgagacctcctgccgctgccagcccaggatagcccccttgcctcttgcccaaggctcaggctaccccttgaggcgtctggaggacactaggcttgacctggggagtggcatgatggggggcagggtccgaggcaacggagaaggcagaagtgacttagattgtgagtgccacggggctgaggcctgcgccgacctggtctgctggtgctaccaggcttgaacagtcttcaaatccactgctattaggcaaattacctggctcccgctgaactccagcacctagaactatgtcacactcgtagtaggccgctgcattggttgaacaaatgattttgaaagaatgaatgtcttcctccaaagaaaaaaagaaaaaaaaaaaaattgggggggggcgccagaagactttttaaacccatttgtttgggcgccgcggagcccagcgtgggttatgtcagacttggcagaacgcgctccaagggaaacctcttggccattgaaatgtggggttgtgttttccccaaaaaaaaccccgcggcggcaccggtggtttgaccacctcgagtggcgtctggcggcactacgggcttcaccacgggcagcgactaatatgcgccgcgcgcgtgggaaaactagtagcacaaacagacgaaagcagtacgccatggca

SEQ ID NO: 14930 - DNA, 1748 bp, Homo sapiens
aaggtagctcccttactgtgggacataaaagttgcttgttttcagctttgaccagtgatgaactgataaccctggtaggaaaatgaaacattggggctgggcttgtaatacgctttcttaaaagaatgccccattgaaattagagtggcacggtgccaccagaccaagggttctcatcccgatgccacagagggaccacaggtgttatgaagtggtttgcaaaattgaatgtatgccaaaataaaataataaaaataaaaataaaaccccacaacaaaagcagatatggtctttagtgctcattagatctcaaagggtcattactcctcaaagattaagaaactgcttctttatgaggaggttgtcagaggagctgaatagtatcaataagaggaagatgtttgagattcaaaaggaagtaatattcgactaaggcatagcttctttccatcttaaaaaaaagccacccatgaaaataaatatagtttaaatttcctatttaagatgtcttattttaaaaatgatttgcatactctgtgtgtttgagttggctatgaaggagaaatcctagcatttccactcttgtaactagggaaaagcattttgaatttttagcagtagtatattatgtgatgatgactcagctgacttcccgtttcaaatggaatgttcaaaacagattgaaacctggttgaagaattttatactttgaaccttacaagatattttctgcaaacagtgactgattggattttgtataataacaaacaagattaagccaactcagttgttttgctgttcttattagtggttttcagtcagggagcacttattgagcagtttgctgcaataatattgaatatttttagagttatgacgtctgtgttttgttgactttggtcccttctttctcccattcttttgaagtttccctaaaacatgtgtgcacagacgggagagaatggtagttaagtatgtgctgattttaaatgtccttttaaatatcatttattccttgataattgactgtataactgatgtaagagaaatatgttttatatgttattccacttgtgaatctctttgcaatgtgaggcatatagtgaaaatcttacaaagatagggtcataaaatgtgcattctctacactgctgcaggttaatcgtcctcgagccacgtttctgaggcctgtcagtcactatttcttagaaacctttgttggctccttcccagtgactctggaattaaagcccagactcttgtttttttgctcagcttatcaatttagcactgtcccttccaccttttgccctgtccctaactcttccttctctgaatgtacctttcagtttctctcaacttttaaataacagctttattcagataaaattcccatatgataaaattcacccttttaaagtccacaaagtgtatgatttaatggtttttagtatattcacagagttgtgcaatcagcaccactgtctaattctagaattttcaccccttcacccaaaaaccccataatagcagccactccccatttgtcccttccacccagcctctggcaaccactaatctactttctattataactctatggacttacctattttcgtttaagtggaatcatactatatgatacttttgtacgtgacttgtcttatttagtgtagtgttttcaaggttcgtccatcatgtcgcatatatcctttattcctttttatgggcaaataaatttcattgta

SEQ ID NO: 14931 - DNA, 242 bp, Homo sapiens
taaaaaagacacaaattagccaggcgtggtggcacacacctgtagtcccagctacctgggaggctgagacaggaggatcagctgaacccgggaggtggaggttgcagtgagccgagatcacaccactgccctctagtattgtcactgggtgacagagcgagactcagtctgaaaaaaaaaactgacttcctattttgtctaatttatagctttagtgaattaaagaaaaaagttctagcctg

SEQ ID NO: 14932 - DNA, 476 bp, Homo sapiens
ttataataatgacttacatgaacatatctttcctcttttgaatactacctgattcagagaaacttctaatattccaacgggtttttctcctcatgattatttatatcattgtgtccaaagtttcttgatcatccaccccatgagtaaaaacttttgagcatgtgcccccaaaatatatttacttgtaaattttatatgtaagttactgtcaacccatatagtatatatttttagagcttaatttctttcttattttagatacaaataaatagaaactctaatattttactcctgtgctccaggaaattatcatacagaaggaatgcttgtaccccactttggaggatattacataaaaagaaaggggatatgtacgaggttgtcatcattcctgcaatgatagaaacaacattcttctcccacctcaatgaactgttgttctgacagatatacatataaggccctctgagctaatg

SEQ ID NO: 14933 - DNA, 445 bp, Homo sapiens
tatttcattcaatttttttctgagtcttatgccattatatgaatacacctgtgatctgctcaccagcaggcccacatcacaagtgacagctccaccaatgctggattccaacatcttataatctgatgtagataaatattttaaaagactaacccactgcactctattatttttcattaagtacagcctgtcttgtcccatcagacagaggattagttcccacataacctaaaagtaggtaattctaggaaagaaatctgagacagattgctcaggaaccatgctggaaaggatcctaccaggtactcctcactgccagaacaggtgtaaacttgtagacttatccctagaagacaagatacccataaaaaaacttaaaaggtggatctgtcagcagaaactctacaagacagaagagagtggggaccaatattcaacattcttc

SEQ ID NO: 14934 - DNA, 413 bp, Homo sapiens
ccagttggtgtgatagaatgacctgcctttctactacagaagattctcatagtcaggatttttcacaacacagcaagtgccattttgacctggctccattgcttccatcatgcatttaacatatttagattgtaaagaaaaactgtaggagtccttctgtctctctcccttcctgttcttcactaaactgtattcctagctatggctacattgagtaattccatcccttttaatttgtggatggaaataagatgaaaagttcttgaaggaaacttagaattctacaaagtttgccacacactcttaggtcggactatgaggaagggaaaattgcatgcctcactttcttcagatatgtaaaataagccaccttgttttagagattttagttacacgtaggaagtctaaattaa

SEQ ID NO: 14935 - DNA, 386 bp, Homo sapiens
ccccgtttcttttcattcagtgtggagtctggagacgacgtgcagaaatggcacctcgaaatgtagaagtaatagagttggcaaaagaatggaccccagcaggaaaagcaaagcaagagaattctgctaagaagttttattctgaatctgaggaagaggaggactcttctgatagtagcagtgacagtgagagtgaatctggaagtgaaagtggagaacaaggcgaaagtggggaggaaggagacagcaatgaggacagcagtgaggactcctccagtgagcaggacagtgagagtggacgggagtcaggcctagaaaacaaaagaacagccaagaggaactcaaaagccaaaggaaaaaggtaacttattttgtcagaatttcct

SEQ ID NO: 14936 - DNA, 4354 bp, Homo sapiens
cgagaactagttttgttccgtgccctctggactggaaccttttggagagaacccccggcaggaccaaccccgcacccgccagcaccgcggcaatgtccagcaatagttttccttacaatgagcagtccggaggaggggaggcgacggagctgggtcaggaggcgacctcaaccatttccccctcgggggccttcggcctctttagcagcgatttgaagaagaatgaagatctaaagcaaatgttagagagcaacaaagattctgctaaactggatgctatgaagcggattgttgggatgattgcaaaagggaaaaatgcatctgaactgtttcctgctgttgtgaagaatgtggccagtaaaaatattgagatcaagaagttggtatatgtttacctggttcgatatgctgaagaacagcaggatcttgcactcctgtccataagcacttttcagcgagctctgaaggacccaaaccaactaattcgtgcaagcgctttgagagttctgtcaagtattagagtgccaattattgtacctatcatgatgcttgctattaaggaagcttctgctgacttatcaccatatgttaggaagaatgcagcccatgcaatacaaaaattatacagccttgatccagagcagaaggaaatgttaattgaagtaattgaaaaacttctgaaagataaaagcacattggtagctggcagtgttgtgatggcttttgaagaagtatgcccggacagaatagatctgattcataaaaattaccgcaagctatgtaacttactagtggatgttgaagagtgggggcaggttgtcataatccacatgctaactcgatatgctcggacacagtttgtcagcccttggaaagagggtgatgaattagaagacaatggaaagaatttctacgaatctgatgatgatcagaaggaaaagactgacaaaaagaagaagccgtatactatggatccagatcatagactcttaattagaaatacaaagcctttgcttcagagcaggaatgctgcggtggttatggcagttgctcagctgtattggcacatatcaccaaaatctgaagctggcataatttctaaatcactagtgcgtttacttcgtagcaacagggaggtgcagtatattgtcctacaaaatatagcaactatgtcaattcaaagaaaggggatgtttgaaccttatctgaagagtttctatgttaggtcaactgatccaactatgatcaagacactgaagcttgaaattttgacaaacttggcaaatgaagccaacatatcaactcttcttcgagaatttcagacctatgtgaaaagccaggataaacaatttgcagcagccactattcagactataggcagatgtgcaaccaacatcttggaagtcactgacacgtgcctcaatggcttggtctgtctgctgtccaacagggatgaaatagttgttgctgaaagtgtggttgttataaagaaattactgcaaatgcaacctgcacaacatggtgaaattattaaacatatggccaaactcctggacagtatcactgttcctgttgctagagcaagtattctttggctaattggagaaaactgtgaacgagttcctaaaattgcccctgatgttttgaggaagatggctaaaagcttcactagtgaagatgatctggtaaaactgcagatattaaatctgggagcaaaattgtatttaaccaactccaaacagacaaaattgcttacccagtacatattaaatctcggcaagtatgatcaaaactacgacatcagagaccgtacaagatttattaggcagcttattgttccgaatgaaaagagtggagctttaagtaaatatgccaaaaaaatattcctagcacaaaagcctgcaccactgcttgagtctccttttaaagatagagatcatttccagcttggcaccttatctcatactctcaacattaaagctactgggtacctggaattatctaattggccagaggtggcgcccgacccatcagttcgaaatgtagaagtaatagagttggcaaaagaatggaccccagcaggaaaagcaaagcaagagaattctgctaagaagttttattctgaatctgaggaagaggaggactcttctgatagtagcagtgacagtgagagtgaatctggaagtgaaagtggagaacaaggcgaaagtggggaggaaggagacagcaatgaggacagcagtgaggactcctccagtgagcaggacagtgagagtggacgggagtcaggcctagaaaacaaaagaacagccaagaggaactcaaaagccaaaggaaaaagtgattctgaagatggggagaaggaaaatgaaaaatctaaaacttcagattcttcaaatgacgaatctagttcaatagaagacagttcttccgattctgaatcagagtcagaacctgaaagtgaatctgaatccagaagagtcactaaggagaaagaaaagaaaacaaagcaagatagaactcctcttaccaaagatgtttcacttctagatctggatgattttaacccagtatccactccagttgcacttcccacaccagctctttctccaagtttgatggctgatcttgaaggtttacacttgtcaacttcctcttcagtcatcagtgtcagtactcctgcatttgtaccaacgaaaactcacgtgctgcttcatcgaatgagtggaaaaggactagctgcccattatttctttccaagacagccttgcatttttggtgataagatggtctctatacaaataacactgaataacactactgatcgaaagatagaaaatatccacataggggaaaaaaaacttcctataggcatgaaaatgcatgtttttaatccaatagactctcttgagcctgagggatccattacagtttcaatgggtattgacttttgtgattctactcagactgccagtttccagttgtgtaccaaggatgattgcttcaatgttaatattcagccacctgttggagaactgcttttacctgtggccatgtcagagaaagattttaagaaagagcaaggagtgctaacaggaatgaatgaaacttctgctgtaatcattgctgcaccacagaatttcactccctctgtgatctttcagaaggttgtaaatgtagccaatgtaggtgcagtcccttctggccaggataatatacacaggtttgcagctaaaactgtgcacagtgggtcattgatgctagtcacagtggaactgaaggaaggctctacagcccagcttatcataaacactgagaaaactgtgattggctctgttctgctgcgggaactgaagcctgtcctgtctcaggggtaacctgcttacatctggactttagaatctggcacacaacaaaagtgcctggcatccactactgctgcctttcatttataataatagcccttccatctggcagtgggggtagaatacactcttgacattcttgtctcctgctttagaatgctagtgtgtatctatcatgtatgcaatactttccccctttttgctttgctaaccaaagagcatatattttactgtcagttgtctcaactcttgaatccatgtggcgttttctctgtcctgctgcttcttttggcctcctcgttttccttctctttttcgacaatggtagacatgaatgagatatttaaagttcattggaaatcttcttccctacagcagtaagcaaaaattagcaaagagatagtctaaatggcctctcagcttggtatgtgaaaatgagatcacatactttttaaatccaaatacaaaagcatagtctctgcaagattttgttctttgaatttcttgatattgtaattgattattgataactgtcatcatgaaattatctctcaataataagataaataaactagcatatgaatcataaaaacaaaaaaaaaaacaatcaaaacaaccgaaaagaaggggggggggcgcaaaaataaccccgggggggcccgtcgccccctttttttaaaaggggcgcccccatagaggcggacgcaaattaaaaacagagcagacgcggccggagtaaaacaacaagcgctcgcgggggaaacaaacgcacgtcggggcccatcttggagacagagcaccccacacttgttggccgtgcatacgtggggaccccacccaagagatttaagcgcccgaggaaaaaaccgcggagttttgcgaaccacagcacattccgggcgaaattgtcttctttttaaagcggcctcaaatagttcatcaaaccaccgacgcacaacatagaacaccactacaacagtctcaataac

SEQ ID NO: 14937 - DNA, 4376 bp, Homo sapiens
cgagaactagttttgttccgtgccctctggactggaaccttttggagagaacccccggcaggaccaaccccgcacccgccagcaccgcggcaatgtccagcaatagttttccttacaatgagcagtccggaggaggggaggcgacggagctgggtcaggaggcgacctcaaccatttccccctcgggggccttcggcctctttagcagcgatttgaagaagaatgaagatctaaagcaaatgttagagagcaacaaagattctgctaaactggatgctatgaagcggattgttgggatgattgcaaaagggaaaaatgcatctgaactgtttcctgctgttgtgaagaatgtggccagtaaaaatattgagatcaagaagttggtatatgtttacctggttcgatatgctgaagaacagcaggatcttgcactcctgtccataagcacttttcagcgagctctgaaggacccaaaccaactaattcgtgcaagcgctttgagagttctgtcaagtattagagtgccaattattgtacctatcatgatgcttgctattaaggaagcttctgctgacttatcaccatatgttaggaagaatgcagcccatgcaatacaaaaattatacagccttgatccagagcagaaggaaatgttaattgaagtaattgaaaaacttctgaaagataaaagcacattggtagctggcagtgttgtgatggcttttgaagaagtatgcccggacagaatagatctgattcataaaaattaccgcaagctatgtaacttactagtggatgttgaagagtgggggcaggttgtcataatccacatgctaactcgatatgctcggacacagtttgtcagcccttggaaagagggtgatgaattagaagacaatggaaagaatttctacgaatctgatgatgatcagaaggaaaagactgacaaaaagaagaagccgtatactatggatccagatcatagactcttaattagaaatacaaagcctttgcttcagagcaggaatgctgcggtggttatggcagttgctcagctgtattggcacatatcaccaaaatctgaagctggcataatttctaaatcactagtgcgtttacttcgtagcaacagggaggtgcagtatattgtcctacaaaatatagcaactatgtcaattcaaagaaaggggatgtttgaaccttatctgaagagtttctatgttaggtcaactgatccaactatgatcaagacactgaagcttgaaattttgacaaacttggcaaatgaagccaacatatcaactcttcttcgagaatttcagacctatgtgaaaagccaggataaacaatttgcagcagccactattcagactataggcagatgtgcaaccaacatcttggaagtcactgacacgtgcctcaatggcttggtctgtctgctgtccaacagggatgaaatagttgttgctgaaagtgtggttgttataaagaaattactgcaaatgcaacctgcacaacatggtgaaattattaaacatatggccaaactcctggacagtatcactgttcctgttgctagagcaagtattctttggctaattggagaaaactgtgaacgagttcctaaaattgcccctgatgttttgaggaagatggctaaaagcttcactagtgaagatgatctggtaaaactgcagatattaaatctgggagcaaaattgtatttaaccaactccaaacagacaaaattgcttacccagtacatattaaatctcggcaagtatgatcaaaactacgacatcagagaccgtacaagatttattaggcagcttattgttccgaatgaaaagagtggagctttaagtaaatatgccaaaaaaatattcctagcacaaaagcctgcaccactgcttgagtctccttttaaagatagagatcatttccagcttggcaccttatctcatactctcaacattaaagctactgggtacctggaattatctaattggccagaggtggcgcccgacccatcagttcgaaatgtagaagtaatagagttggcaaaagaatggaccccagcaggaaaagcaaagcaagagaattctgctaagaagttttattctgaatctgaggaagaggaggactcttctgatagtagcagtgacagtgagagtgaatctggaagtgaaagtggagaacaaggcgaaagtggggaggaaggagacagcaatgaggacagcagtgaggactcctccagtgagcaggacagtgagagtggacgggagtcaggcctagaaaacaaaagaacagccaagaggaactcaaaagccaaaggaaaaagtgattctgaagatggggagaaggaaaatgaaaaatctaaaacttcagattcttcaaatgacgaatctagttcaatagaagacagttcttccgattctgaatcagagtcagaacctgaaagtgaatctgaatccagaagagtcactaaggagaaagaaaagaaaacaaagcaagatagaactcctcttaccaaagatgtttcacttctagatctggatgattttaacccagtatccactccagttgcacttcccacaccagctctttctccaagtttgatggctgatcttgaaggtttacacttgtcaacttcctcttcagtcatcagtgtcagtactcctgcatttgtaccaacgaaaactcacgtgctgcttcatcgaatgagtggaaaaggactagctgcccattatttctttccaagacagccttgcatttttggtgataagatggtctctatacaaataacactgaataacactactgatcgaaagatagaaaatatccacataggggaaaaaaaacttcctataggcatgaaaatgcatgtttttaatccaatagactctcttgagcctgagggatccattacagtttcaatgggtattgacttttgtgattctactcagactgccagtttccagttgtgtaccaaggatgattgcttcaatgttaatattcagccacctgttggagaactgcttttacctgtggccatgtcagagaaagattttaagaaagagcaaggagtgctaacaggaatgaatgaaacttctgctgtaatcattgctgcaccacagaatttcactccctctgtgatctttcagaaggttgtaaatgtagccaatgtaggtgcagtcccttctggccaggataatatacacaggtctctcttttttctcttccaggtttgcagctaaaactgtgcacagtgggtcattgatgctagtcacagtggaactgaaggaaggctctacagcccagcttatcataaacactgagaaaactgtgattggctctgttctgctgcgggaactgaagcctgtcctgtctcaggggtaacctgcttacatctggactttagaatctggcacacaacaaaagtgcctggcatccactactgctgcctttcatttataataatagcccttccatctggcagtgggggtagaatacactcttgacattcttgtctcctgctttagaatgctagtgtgtatctatcatgtatgcaatactttccccctttttgctttgctaaccaaagagcatatattttactgtcagttgtctcaactcttgaatccatgtggcgttttctctgtcctgctgcttcttttggcctcctcgttttccttctctttttcgacaatggtagacatgaatgagatatttaaagttcattggaaatcttcttccctacagcagtaagcaaaaattagcaaagagatagtctaaatggcctctcagcttggtatgtgaaaatgagatcacatactttttaaatccaaatacaaaagcatagtctctgcaagattttgttctttgaatttcttgatattgtaattgattattgataactgtcatcatgaaattatctctcaataataagataaataaactagcatatgaatcataaaaacaaaaaaaaaaacaatcaaaacaaccgaaaagaaggggggggggcgcaaaaataaccccgggggggcccgtcgccccctttttttaaaaggggcgcccccatagaggcggacgcaaattaaaaacagagcagacgcggccggagtaaaacaacaagcgctcgcgggggaaacaaacgcacgtcggggcccatcttggagacagagcaccccacacttgttggccgtgcatacgtggggaccccacccaagagatttaagcgcccgaggaaaaaaccgcggagttttgcgaaccacagcacattccgggcgaaattgtcttctttttaaagcggcctcaaatagttcatcaaaccaccgacgcacaacatagaacaccactacaacagtctcaataac

SEQ ID NO: 14938 - DNA, 2374 bp, Homo sapiens
ccccgtttcttttcattcagtgtggagtctggagacgacgtgcagaaatggcacctcgaaatgtagaagtaatagagttggcaaaagaatggaccccagcaggaaaagcaaagcaagagaattctgctaagaagttttattctgaatctgaggaagaggaggactcttctgatagtagcagtgacagtgagagtgaatctggaagtgaaagtggagaacaaggcgaaagtggggaggaaggagacagcaatgaggacagcagtgaggactcctccagtgagcaggacagtgagagtggacgggagtcaggcctagaaaacaaaagaacagccaagaggaactcaaaagccaaaggaaaaagtgattctgaagatggggagaaggaaaatgaaaaatctaaaacttcagattcttcaaatgacgaatctagttcaatagaagacagttcttccgattctgaatcagagtcagaacctgaaagtgaatctgaatccagaagagtcactaaggagaaagaaaagaaaacaaagcaagatagaactcctcttaccaaagatgtttcacttctagatctggatgattttaacccagtatccactccagttgcacttcccacaccagctctttctccaagtttgatggctgatcttgaaggtttacacttgtcaacttcctcttcagtcatcagtgtcagtactcctgcatttgtaccaacgaaaactcacgtgctgcttcatcgaatgagtggaaaaggactagctgcccattatttctttccaagacagccttgcatttttggtgataagatggtctctatacaaataacactgaataacactactgatcgaaagatagaaaatatccacataggggaaaaaaaacttcctataggcatgaaaatgcatgtttttaatccaatagactctcttgagcctgagggatccattacagtttcaatgggtattgacttttgtgattctactcagactgccagtttccagttgtgtaccaaggatgattgcttcaatgttaatattcagccacctgttggagaactgcttttacctgtggccatgtcagagaaagattttaagaaagagcaaggagtgctaacaggaatgaatgaaacttctgctgtaatcattgctgcaccacagaatttcactccctctgtgatctttcagaaggttgtaaatgtagccaatgtaggtgcagtcccttctggccaggataatatacacaggtttgcagctaaaactgtgcacagtgggtcattgatgctagtcacagtggaactgaaggaaggctctacagcccagcttatcataaacactgagaaaactgtgattggctctgttctgctgcgggaactgaagcctgtcctgtctcaggggtaacctgcttacatctggactttagaatctggcacacaacaaaagtgcctggcatccactactgctgcctttcatttataataatagcccttccatctggcagtgggggtagaatacactcttgacattcttgtctcctgctttagaatgctagtgtgtatctatcatgtatgcaatactttccccctttttgctttgctaaccaaagagcatatattttactgtcagttgtctcaactcttgaatccatgtggcgttttctctgtcctgctgcttcttttggcctcctcgttttccttctctttttcgacaatggtagacatgaatgagatatttaaagttcattggaaatcttcttccctacagcagtaagcaaaaattagcaaagagatagtctaaatggcctctcagcttggtatgtgaaaatgagatcacatactttttaaatccaaatacaaaagcatagtctctgcaagattttgttctttgaatttcttgatattgtaattgattattgataactgtcatcatgaaattatctctcaataataagataaataaactagcatatgaatcataaaaacaaaaaaaaaaacaatcaaaacaaccgaaaagaaggggggggggcgcaaaaataaccccgggggggcccgtcgccccctttttttaaaaggggcgcccccatagaggcggacgcaaattaaaaacagagcagacgcggccggagtaaaacaacaagcgctcgcgggggaaacaaacgcacgtcggggcccatcttggagacagagcaccccacacttgttggccgtgcatacgtggggaccccacccaagagatttaagcgcccgaggaaaaaaccgcggagttttgcgaaccacagcacattccgggcgaaattgtcttctttttaaagcggcctcaaatagttcatcaaaccaccgacgcacaacatagaacaccactacaacagtctcaataac

SEQ ID NO: 14939 - DNA, 3551 bp, Homo sapiens
cgagaactagttttgttccgtgccctctggactggaaccttttggagagaacccccggcaggaccaaccccgcacccgccagcaccgcggcaatgtccagcaatagttttccttacaatgagcagtccggaggaggggaggcgacggagctgggtcaggaggcgacctcaaccatttccccctcgggggccttcggcctctttagcagcgatttgaagaagaatgaagatctaaagcaaatgttagagagcaacaaagattctgctaaactggatgctatgaagcggattgttgggatgattgcaaaagggaaaaatgcatctgaactgtttcctgctgttgtgaagaatgtggccagtaaaaatattgagatcaagaagttggtatatgtttacctggttcgatatgctgaagaacagcaggatcttgcactcctgtccataagcacttttcagcgagctctgaaggacccaaaccaactaattcgtgcaagcgctttgagagttctgtcaagtattagagtgccaattattgtacctatcatgatgcttgctattaaggaagcttctgctgacttatcaccatatgttaggaagaatgcagcccatgcaatacaaaaattatacagccttgatccagagcagaaggaaatgttaattgaagtaattgaaaaacttctgaaagataaaagcacattggtagctggcagtgttgtgatggcttttgaagaagtatgcccggacagaatagatctgattcataaaaattaccgcaagctatgtaacttactagtggatgttgaagagtgggggcaggttgtcataatccacatgctaactcgatatgctcggacacagtttgtcagcccttggaaagagggtgatgaattagaagacaatggaaagaatttctacgaatctgatgatgatcagaaggaaaagactgacaaaaagaagaagccgtatactatggatccagatcatagactcttaattagaaatacaaagcctttgcttcagagcaggaatgctgcggtggttatggcagttgctcagctgtattggcacatatcaccaaaatctgaagctggcataatttctaaatcactagtgcgtttacttcgtagcaacagggaggtgcagtatattgtcctacaaaatatagcaactatgtcaattcaaagaaaggggatgtttgaaccttatctgaagagtttctatgttaggtcaactgatccaactatgatcaagacactgaagcttgaaattttgacaaacttggcaaatgaagccaacatatcaactcttcttcgagaatttcagacctatgtgaaaagccaggataaacaatttgcagcagccactattcagactataggcagatgtgcaaccaacatcttggaagtcactgacacgtgcctcaatggcttggtctgtctgctgtccaacagggatgaaatagttgttgctgaaagtgtggttgttataaagaaattactgcaaatgcaacctgcacaacatggtgaaattattaaacatatggccaaactcctggacagtatcactgttcctgttgctagagcaagtattctttggctaattggagaaaactgtgaacgagttcctaaaattgcccctgatgttttgaggaagatggctaaaagcttcactagtgaagatgatctggtaaaactgcagatattaaatctgggagcaaaattgtatttaaccaactccaaacagacaaaattgcttacccagtacatattaaatctcggcaagtatgatcaaaactacgacatcagagaccgtacaagatttattaggcagcttattgttccgaatgaaaagagtggagctttaagtaaatatgccaaaaaaatattcctagcacaaaagcctgcaccactgcttgagtctccttttaaagatagagatcatttccagcttggcaccttatctcatactctcaacattaaagctactgggtacctggaattatctaattggccagaggtggcgcccgacccatcagttcgaaatgtagaagtaatagagttggcaaaagaatggaccccagcaggaaaagcaaagcaagagaattctgctaagaagttttattctgaatctgaggaagaggaggactcttctgatagtagcagtgacagtgagagtgaatctggaagtgaaagtggagaacaaggcgaaagtggggaggaaggagacagcaatgaggacagcagtgaggactcctccagtgagcaggacagtgagagtggacgggagtcaggcctagaaaacaaaagaacagccaagaggaactcaaaagccaaaggaaaaagtgattctgaagatggggagaaggaaaatgaaaaatctaaaacttcagattcttcaaatgacgaatctagttcaatagaagacagttcttccgattctgaatcagagtcagaacctgaaagtgaatctgaatccagaagagtcactaaggagaaagaaaagaaaacaaagcaagatagaactcctcttaccaaagatgtttcacttctagatctggatgattttaacccagtatccactccagttgcacttcccacaccagctctttctccaagtttgatggctgatcttgaaggtttacacttgtcaacttcctcttcagtcatcagtgtcagtactcctgcatttgtaccaacgaaaactcacgtgctgcttcatcgaatgagtggaaaaggactagctgcccattatttctttccaagacagccttgcatttttggtgataagatggtctctatacaaataacactgaataacactactgatcgaaagatagaaaatatccacataggggaaaaaaaacttcctataggcatgaaaatgcatgtttttaatccaatagactctcttgagcctgagggatccattacagtttcaatgggtattgacttttgtgattctactcagactgccagtttccagttgtgtaccaaggatgattgcttcaatgttaatattcagccacctgttggagaactgcttttacctgtggccatgtcagagaaagattttaagaaagagcaaggtgagagatgtctacaacttactagaaatttacataccaaataatatgtgcttattcctgtacagtctctaaaataaattttcataggtacatagccattaacagatattagtgcacaatcttccaatttttgttaatgctttgcacttacaaccttaaaaacagatgtttgtctatattcctggcatacttgaaaattgattaatatgtctttaaatgatacattaattcttaatcaccttttcaatgctgagagttgttgcttgtcaacctgatgatatactaatgggttttgtattattcaaagtgccaggaattggggactttaccgatgtcctaccactataattgttatgtttctgtattttttcactatagaactgtttttttatgtcttactaatgtatttgtccctgcacacattaaactaccttatccttcaaaataaactcctaattatggcatta

SEQ ID NO: 14940 - DNA, 2062 bp, Homo sapiens
ggctgaagtgggaggatccaccaggaggtggaggttgcagtgagctcatatcacaccaccgcactccagcctggacgacagagtgttacaccatctcaaaacaaacaaaaaaaggcagatagagatgatgagaaaaagtccaagattgaagaagatgtgggtgggttcagatgaagaggaggacaatggtaaggataagaaaaagaaaaccaacaagatcaaggagaaatcattgattgggaagaactaaacaagatcaagaacatttggatcagaaactctgatgacattcacccaggaggagtatagagaattctacaagagcttcaccagtgactaggaagaccatttggcagtcaagcacttctctgtagaaggtcagtactcctgcatttgtaccaacgaaaactcacgtgctgcttcatcgaatgagtggaaaaggactagctgcccattatttctttccaagacagccttgcatttttggtgataagatggtctctatacaaataacactgaataacactactgatcgaaagatagaaaatatccacataggggaaaaaaaacttcctataggcatgaaaatgcatgtttttaatccaatagactctcttgagcctgagggatccattacagtttcaatgggtattgacttttgtgattctactcagactgccagtttccagttgtgtaccaaggatgattgcttcaatgttaatattcagccacctgttggagaactgcttttacctgtggccatgtcagagaaagattttaagaaagagcaaggagtgctaacaggaatgaatgaaacttctgctgtaatcattgctgcaccacagaatttcactccctctgtgatctttcagaaggttgtaaatgtagccaatgtaggtgcagtcccttctggccaggataatatacacaggtttgcagctaaaactgtgcacagtgggtcattgatgctagtcacagtggaactgaaggaaggctctacagcccagcttatcataaacactgagaaaactgtgattggctctgttctgctgcgggaactgaagcctgtcctgtctcaggggtaacctgcttacatctggactttagaatctggcacacaacaaaagtgcctggcatccactactgctgcctttcatttataataatagcccttccatctggcagtgggggtagaatacactcttgacattcttgtctcctgctttagaatgctagtgtgtatctatcatgtatgcaatactttccccctttttgctttgctaaccaaagagcatatattttactgtcagttgtctcaactcttgaatccatgtggcgttttctctgtcctgctgcttcttttggcctcctcgttttccttctctttttcgacaatggtagacatgaatgagatatttaaagttcattggaaatcttcttccctacagcagtaagcaaaaattagcaaagagatagtctaaatggcctctcagcttggtatgtgaaaatgagatcacatactttttaaatccaaatacaaaagcatagtctctgcaagattttgttctttgaatttcttgatattgtaattgattattgataactgtcatcatgaaattatctctcaataataagataaataaactagcatatgaatcataaaaacaaaaaaaaaaacaatcaaaacaaccgaaaagaaggggggggggcgcaaaaataaccccgggggggcccgtcgccccctttttttaaaaggggcgcccccatagaggcggacgcaaattaaaaacagagcagacgcggccggagtaaaacaacaagcgctcgcgggggaaacaaacgcacgtcggggcccatcttggagacagagcaccccacacttgttggccgtgcatacgtggggaccccacccaagagatttaagcgcccgaggaaaaaaccgcggagttttgcgaaccacagcacattccgggcgaaattgtcttctttttaaagcggcctcaaatagttcatcaaaccaccgacgcacaacatagaacaccactacaacagtctcaataac

SEQ ID NO: 14941 - DNA, 3477 bp, Homo sapiens
cgagaactagttttgttccgtgccctctggactggaaccttttggagagaacccccggcaggaccaaccccgcacccgccagcaccgcggcaatgtccagcaatagttttccttacaatgagcagtccggaggaggggaggcgacggagctgggtcaggaggcgacctcaaccatttccccctcgggggccttcggcctctttagcagcgatttgaagaagaatgaagatctaaagcaaatgttagagagcaacaaagattctgctaaactggatgctatgaagcggattgttgggatgattgcaaaagggaaaaatgcatctgaactgtttcctgctgttgtgaagaatgtggccagtaaaaatattgagatcaagaagttggtatatgtttacctggttcgatatgctgaagaacagcaggatcttgcactcctgtccataagcacttttcagcgagctctgaaggacccaaaccaactaattcgtgcaagcgctttgagagttctgtcaagtattagagtgccaattattgtacctatcatgatgcttgctattaaggaagcttctgctgacttatcaccatatgttaggaagaatgcagcccatgcaatacaaaaattatacagccttgatccagagcagaaggaaatgttaattgaagtaattgaaaaacttctgaaagataaaagcacattggtagctggcagtgttgtgatggcttttgaagaagtatgcccggacagaatagatctgattcataaaaattaccgcaagctatgtaacttactagtggatgttgaagagtgggggcaggttgtcataatccacatgctaactcgatatgctcggacacagtttgtcagcccttggaaagagggtgatgaattagaagacaatggaaagaatttctacgaatctgatgatgatcagaaggaaaagactgacaaaaagaagaagccgtatactatggatccagatcatagactcttaattagaaatacaaagcctttgcttcagagcaggaatgctgcggtggttatggcagttgctcagctgtattggcacatatcaccaaaatctgaagctggcataatttctaaatcactagtgcgtttacttcgtagcaacagggaggtgcagtatattgtcctacaaaatatagcaactatgtcaattcaaagaaaggggatgtttgaaccttatctgaagagtttctatgttaggtcaactgatccaactatgatcaagacactgaagcttgaaattttgacaaacttggcaaatgaagccaacatatcaactcttcttcgagaatttcagacctatgtgaaaagccaggataaacaatttgcagcagccactattcagactataggcagatgtgcaaccaacatcttggaagtcactgacacgtgcctcaatggcttggtctgtctgctgtccaacagggatgaaatagttgttgctgaaagtgtggttgttataaagaaattactgcaaatgcaacctgcacaacatggtgaaattattaaacatatggccaaactcctggacagtatcactgttcctgttgctagagcaagtattctttggctaattggagaaaactgtgaacgagttcctaaaattgcccctgatgttttgaggaagatggctaaaagcttcactagtgaagatgatctggtaaaactgcagatattaaatctgggagcaaaattgtatttaaccaactccaaacagacaaaattgcttacccagtacatattaaatctcggcaagtatgatcaaaactacgacatcagagaccgtacaagatttattaggcagcttattgttccgaatgaaaagagtggagctttaagtaaatatgccaaaaaaatattcctagcacaaaagcctgcaccactgcttgagtctccttttaaagatagagatcatttccagcttggcaccttatctcatactctcaacattaaagctactgggtacctggaattatctaattggccagaggtggcgcccgacccatcagttcgaaatgtagaagtaatagagttggcaaaagaatggaccccagcaggaaaagcaaagcaagagaattctgctaagaagttttattctgaatctgaggaagaggaggactcttctgatagtagcagtgacagtgagagtgaatctggaagtgaaagtggagaacaaggcgaaagtggggaggaaggagacagcaatgaggacagcagtgaggactcctccagtgagcaggacagtgagagtggacgggagtcaggcctagaaaacaaaagaacagccaagaggaactcaaaagccaaaggaaaaagtgattctgaagatggggagaaggaaaatgaaaaatctaaaacttcagattcttcaaatgacgaatctagttcaatagaagacagttcttccgattctgaatcagagtcagaacctgaaagtgaatctgaatccagaagagtcactaaggagaaagaaaagaaaacaaagcaagatagaactcctcttaccaaagatgtttcacttctagatctggatgattttaacccagtatccactccagttgcacttcccacaccagctctttctccaagtttgatggctgatcttgaaggtttacacttgtcaacttcctcttcagtcatcagtgtcagtactcctgcatttgtaccaacgaaaactcacgtgctgcttcatcgaatgagtggaaaaggactagctgcccattatttctttccaagacagccttgcatttttggtgataagatggtctctatacaaataacactgaataacactactgatcgaaagatagaaaatatccacataggggaaaaaaaacttcctataggcatgaaaatgcatgtttttaatccaatagctctcagcttggtatgtgaaaatgagatcacatactttttaaatccaaatacaaaagcatagtctctgcaagattttgttctttgaatttcttgatattgtaattgattattgataactgtcatcatgaaattatctctcaataataagataaataaactagcatatgaatcataaaaacaaaaaaaaaaacaatcaaaacaaccgaaaagaaggggggggggcgcaaaaataaccccgggggggcccgtcgccccctttttttaaaaggggcgcccccatagaggcggacgcaaattaaaaacagagcagacgcggccggagtaaaacaacaagcgctcgcgggggaaacaaacgcacgtcggggcccatcttggagacagagcaccccacacttgttggccgtgcatacgtggggaccccacccaagagatttaagcgcccgaggaaaaaaccgcggagttttgcgaaccacagcacattccgggcgaaattgtcttctttttaaagcggcctcaaatagttcatcaaaccaccgacgcacaacatagaacaccactacaacagtctcaataac

SEQ ID NO: 14942 - DNA, 3082 bp, Homo sapiens
cgagaactagttttgttccgtgccctctggactggaaccttttggagagaacccccggcaggaccaaccccgcacccgccagcaccgcggcaatgtccagcaatagttttccttacaatgagcagtccggaggaggggaggcgacggagctgggtcaggaggcgacctcaaccatttccccctcgggggccttcggcctctttagcagcgatttgaagaagaatgaagatctaaagcaaatgttagagagcaacaaagattctgctaaactggatgctatgaagcggattgttgggatgattgcaaaagggaaaaatgcatctgaactgtttcctgctgttgtgaagaatgtggccagtaaaaatattgagatcaagaagttggtatatgtttacctggttcgatatgctgaagaacagcaggatcttgcactcctgtccataagcacttttcagcgagctctgaaggacccaaaccaactaattcgtgcaagcgctttgagagttctgtcaagtattagagtgccaattattgtacctatcatgatgcttgctattaaggaagcttctgctgacttatcaccatatgttaggaagaatgcagcccatgcaatacaaaaattatacagccttgatccagagcagaaggaaatgttaattgaagtaattgaaaaacttctgaaagataaaagcacattggtagctggcagtgttgtgatggcttttgaagaagtatgcccggacagaatagatctgattcataaaaattaccgcaagctatgtaacttactagtggatgttgaagagtgggggcaggttgtcataatccacatgctaactcgatatgctcggacacagtttgtcagcccttggaaagagggtgatgaattagaagacaatggaaagaatttctacgaatctgatgatgatcagaaggaaaagactgacaaaaagaagaagccgtatactatggatccagatcatagactcttaattagaaatacaaagcctttgcttcagagcaggaatgctgcggtggttatggcagttgctcagctgtattggcacatatcaccaaaatctgaagctggcataatttctaaatcactagtgcgtttacttcgtagcaacagggaggtgcagtatattgtcctacaaaatatagcaactatgtcaattcaaagaaaggggatgtttgaaccttatctgaagagtttctatgttaggtcaactgatccaactatgatcaagacactgaagcttgaaattttgacaaacttggcaaatgaagccaacatatcaactcttcttcgagaatttcagacctatgtgaaaagccaggataaacaatttgcagcagccactattcagactataggcagatgtgcaaccaacatcttggaagtcactgacacgtgcctcaatggcttggtctgtctgctgtccaacagggatgaaatagttgttgctgaaagtgtggttgttataaagaaattactgcaaatgcaacctgcacaacatggtgaaattattaaacatatggccaaactcctggacagtatcactgttcctgttgctagagcaagtattctttggctaattggagaaaactgtgaacgagttcctaaaattgcccctgatgttttgaggaagatggctaaaagcttcactagtgaagatgatctggtaaaactgcagatattaaatctgggagcaaaattgtatttaaccaactccaaacagacaaaattgcttacccagtacatattaaatctcggcaagtatgatcaaaactacgacatcagagaccgtacaagatttattaggcagcttattgttccgaatgaaaagagtggagctttaagtaaatatgccaaaaaaatattcctagcacaaaagcctgcaccactgcttgagtctccttttaaagatagagatcatttccagcttggcaccttatctcatactctcaacattaaagctactgggtacctggaattatctaattggccagaggtggcgcccgacccatcagttcgaaatgtagaagtaatagagttggcaaaagaatggaccccagcaggaaaagcaaagcaagagaattctgctaagaagttttattctgaatctgaggaagaggaggactcttctgatagtagcagtgacagtgagagtgaatctggaagtgaaagtggagaacaaggcgaaagtggggaggaaggagacagcaatgaggacagcagtgaggactcctccagtgagcaggacagtgagagtggacgggagtcaggcctagaaaacaaaagaacagccaagaggaactcaaaagccaaaggaaaaagtgattctgaagatggggagaaggaaaatgaaaaatctaaaacttcagattcttcaaatgacgaatctagttcaatagaagacagttcttccgattctgaatcagagtcagaacctgaaagtgaatctgaatccagaagagtcactaaggagaaagaaaagaaaacaaagcaagatagaactcctcttaccaaagatgtttcacttctagatctggatgattttaacccagtatccactccagttgcacttcccacaccagctctttctccaagtttgatggctgatcttgaaggtttacacttgtcaacttcctcttcagtcatcagtgtaagttatttttaaaatccaccagctcggttttcttatgttgccattgtatcttttttattaaaatgtaaatacttgaagtggattcttagttttgaacagattcttctctaagaacaagcccaatttagctaagaccttttaattttttaaataatttactcaaaccattatcttctcaatttttttcccttgttgtccacacttaattatcatctgtatgtttttctctggtattgttatatatctgtaacatacaaaggttcttcaccacattgacgcagtacatatacctgaactgtgccacaaaaagttgtctacattaacagactttcatttccgtaatcgttttattcctaccacactattttttcatagactattaaaaattcatgactgtttttatttaaaag

SEQ ID NO: 14943 - DNA, 1596 bp, Homo sapiens
gataaaccccagattgagtatactttaaagagactgaaattgatatttcatatgtgtgattctaagtttttatcctatcatacttaaaattagatttaagtgattttttactgaatttttacacattttcctatacaatgaggattttaaaaaacttcgaaacaattgcattttgttttagttttataattatcttgtaaattacatcctaaagtagtgtttcttttgttgaaaaaaagttaaaattttggccatgagcttaaaattctgtaaatgtaattttcaaaaagaaattaataaaagggagccttcttttgcttttacaggagtgctaacaggaatgaatgaaacttctgctgtaatcattgctgcaccacagaatttcactccctctgtgatctttcagaaggttgtaaatgtagccaatgtaggtgcagtcccttctggccaggataatatacacaggtttgcagctaaaactgtgcacagtgggtcattgatgctagtcacagtggaactgaaggaaggctctacagcccagcttatcataaacactgagaaaactgtgattggctctgttctgctgcgggaactgaagcctgtcctgtctcaggggtaacctgcttacatctggactttagaatctggcacacaacaaaagtgcctggcatccactactgctgcctttcatttataataatagcccttccatctggcagtgggggtagaatacactcttgacattcttgtctcctgctttagaatgctagtgtgtatctatcatgtatgcaatactttccccctttttgctttgctaaccaaagagcatatattttactgtcagttgtctcaactcttgaatccatgtggcgttttctctgtcctgctgcttcttttggcctcctcgttttccttctctttttcgacaatggtagacatgaatgagatatttaaagttcattggaaatcttcttccctacagcagtaagcaaaaattagcaaagagatagtctaaatggcctctcagcttggtatgtgaaaatgagatcacatactttttaaatccaaatacaaaagcatagtctctgcaagattttgttctttgaatttcttgatattgtaattgattattgataactgtcatcatgaaattatctctcaataataagataaataaactagcatatgaatcataaaaacaaaaaaaaaaacaatcaaaacaaccgaaaagaaggggggggggcgcaaaaataaccccgggggggcccgtcgccccctttttttaaaaggggcgcccccatagaggcggacgcaaattaaaaacagagcagacgcggccggagtaaaacaacaagcgctcgcgggggaaacaaacgcacgtcggggcccatcttggagacagagcaccccacacttgttggccgtgcatacgtggggaccccacccaagagatttaagcgcccgaggaaaaaaccgcggagttttgcgaaccacagcacattccgggcgaaattgtcttctttttaaagcggcctcaaatagttcatcaaaccaccgacgcacaacatagaacaccactacaacagtctcaataac

SEQ ID NO: 14944 - DNA, 2348 bp, Homo sapiens
  misc_feature (2219)..(2219): n is a, c, g, or t
  misc_feature (2226)..(2226): n is a, c, g, or t
  misc_feature (2228)..(2228): n is a, c, g, or t
cgagaactagttttgttccgtgccctctggactggaaccttttggagagaacccccggcaggaccaaccccgcacccgccagcaccgcggcaatgtccagcaatagttttccttacaatgagcagtccggaggaggggaggcgacggagctgggtcaggaggcgacctcaaccatttccccctcgggggccttcggcctctttagcagcgatttgaagaagaatgaagatctaaagcaaatgttagagagcaacaaagattctgctaaactggatgctatgaagcggattgttgggatgattgcaaaagggaaaaatgcatctgaactgtttcctgctgttgtgaagaatgtggccagtaaaaatattgagatcaagaagttggtatatgtttacctggttcgatatgctgaagaacagcaggatcttgcactcctgtccataagcacttttcagcgagctctgaaggacccaaaccaactaattcgtgcaagcgctttgagagttctgtcaagtattagagtgccaattattgtacctatcatgatgcttgctattaaggaagcttctgctgacttatcaccatatgttaggaagaatgcagcccatgcaatacaaaaattatacagccttgatccagagcagaaggaaatgttaattgaagtaattgaaaaacttctgaaagataaaagcacattggtagctggcagtgttgtgatggcttttgaagaagtatgcccggacagaatagatctgattcataaaaattaccgcaagctatgtaacttactagtggatgttgaagagtgggggcaggttgtcataatccacatgctaactcgatatgctcggacacagtttgtcagcccttggaaagagggtgatgaattagaagacaatggaaagaatttctacgaatctgatgatgatcagaaggaaaagactgacaaaaagaagaagccgtatactatggatccagatcatagactcttaattagaaatacaaagcctttgcttcagagcaggaatgctgcggtggttatggcagttgctcagctgtattggcacatatcaccaaaatctgaagctggcataatttctaaatcactagtgcgtttacttcgtagcaacagggaggtgcagtatattgtcctacaaaatatagcaactatgtcaattcaaagaaaggggatgtttgaaccttatctgaagagtttctatgttaggtcaactgatccaactatgatcaagacactgaagcttgaaattttgacaaacttggcaaatgaagccaacatatcaactcttcttcgagaatttcagacctatgtgaaaagccaggataaacaatttgcagcagccactattcagactataggcagatgtgcaaccaacatcttggaagtcactgacacgtgcctcaatggcttggtctgtctgctgtccaacagggatgaaatagttgttgctgaaagtgtggttgttataaagaaattactgcaaatgcaacctgcacaacatggtgaaattattaaacatatggccaaactcctggacagtatcactgttcctgttgctagagcaagtattctttggctaattggagaaaactgtgaacgagttcctaaaattgcccctgatgttttgaggaagatggctaaaagcttcactagtgaagatgatctggtaaaactgcagatattaaatctgggagcaaaattgtatttaaccaactccaaacagacaaaattgcttacccagtacatattaaatctcggcaagtatgatcaaaactacgacatcagagaccgtacaagatttattaggcagcttattgttccgaatgaaaagagtggagctttaagtaaatatgccaaaaaaatattcctagcacaaaagcctgcaccactgcttgagtctccttttaaagatagagatcatttccagcttggcaccttatctcatactctcaacattaaagctactgggtacctggaattatctaattggccagaggtggcgcccgacccatcagttcgaaatgtagaagtaatagagttggcaaaagaatggaccccagcaggaaaagcaaagcaagagaattctgctaagaagttttattctgaatctgaggaagaggaggactcttctgatagtagcagtgacagtgagagtgaatctggaagtgaaagtggagaacaaggcgaaagtggggagganagattcntnctttttgtcttcaattgagggattcttcctgttggccggcccatgagaaatggtcgtggattactcccttttaaacccaatggaccaccgctggtgggacctttaagtccacgggaaaaa

SEQ ID NO: 14945 - DNA, 644 bp, Homo sapiens
ctgtcctgctgcttcttttggcctcctcgttttccttctctttttcgacaatggtagacatgaatgagatatttaaagttcattggaaatcttcttccctacagcagtaagcaaaaattagcaaagagatagtctaaatggcctctcagcttggtatgtgaaaatgagatcacatactttttaaatccaaatacaaaagcatagtctctgcaagattttgttctttgaatttcttgatattgtaattgattattgataactgtcatcatgaaattatctctcaataataagataaataaactagcatatgaatcatatttgtctttgcatttttaatgagaaactattaataatcctgaagttcatatgctaaagttttcttattttaaagcaagtattttgagtgttacattatgcagagaagcaatgtggtttagttagcgaaagaaaaaccacttccaaaccaagtaaattttctacttatagtttactccaaggaaaaaaaattggtgtatttaataacaaaaacaaaaatcttcatattgcaaaataaacatcttctaggtagttttgatctattagtagatatctgattatgtggcctgctgaataaattctttgaatctcatttttccttatgccca

SEQ ID NO: 14946 - DNA, 329 bp, Homo sapiens
tcattcatttgatgaggtcatgttttcctggatgctgttgatgctagtagatattctttggtgtctgtgcattgaagagttgggtatttattgcagtcttaattgtctgggattatttgtagacatccttcttgagaaggttttggagatattttaaagggcttgggtgttgtgatctaaactgtgtctgcatatggggcatcctgagcctactaaccctgtggtttttgcagactcgtagagataccacctttttggtcttgggcaagatctggaagaattatctgtatttccaggcagagactcttcttctttctttaagttctccc

SEQ ID NO: 14947 - DNA, 352 bp, Homo sapiens
cctgggcatatctggagtagaaggatcactgtggggcagggcaggttctgtgttgctgtggatgacgttgactttgaccattgctcggcagagcctgctctcgctggttcagccacaggccccaccactccctattgtctcagccccgggtatgaaacatgtattcctcactggcctatcacctgaagcctttgaatttgcaacacctgccaacccctccctcaaaagagttgccctctcagatccttttgatgtaaggtttggtgttgagacttatttcactaaattctcatacataaacatcactttatgtatgaggcaaaatgaggaccagggagatgaatgacttgtc

SEQ ID NO: 14948 - DNA, 432 bp, Homo sapiens
gaggcaaagaaataatatttgcctgtttatctattggcactaagaaaagaaaccaaactcaagtatacacagaatttgaattgttccctccctgcagggtattgcaacttctctaattaaagcaatgaatgcagcgggatgcttaaagcccaagttcccctttttaagtataaggagatctgcactgctatatatagcacttcatctcaaaggtatgtcttttttaattatttactactcagaacaaatttaacattaatggtagtataagtgatgaataggattgttaaactgtgttgcctgcttggtgagagagaaagagagagtgttagtagcaaatacaatacagggcaaatattttaaataaaatgtcaaagttaaaattctattttcaaagtagggactaagtaatacagtcagctgtcaataatc

SEQ ID NO: 14949 - DNA, 1727 bp, Homo sapiens
  misc_feature (1069)..(1069): n is a, c, g, or t
accatgagcagggaaaggacttggaaaggaataattttgaggagtataaatgagtcctgaaactttgaaaactgctgcttgaggagattctacagccagaggtgccaagagatggctcttgctattatttctgcccctagagattgtcagctttcttttggagctactttggggtggggaaactcttaacaccttccagatactggatgttctgcatgaaaagtccaggattgaagcatcttggtgatgtagctcttttcttcaataagcttatggacacaagatgctcttgtagacacaagatgcttataaacacacacacttcctccgaggtgtacccacagtgccacaaggggtttcactcctagctgcactctgacctgaactgtgtctcttcttagttcatctaggttttgttgagcactggccactagttcagactctaaggcaggttctccattgcgccttcctgacatctttttctgacctgtatgatgacagtccgggcaacctaagtccatgagggatgtcctaatatcattgctccttctcagtgatctttgagctccaaattctcatttgtgacttttttttttttttttactacaacagatatctacatctggtatctataaaaatcaaaggtagtattcaagttccctccagcccctccacccctcccctacccccacaagtattcaccgttagaaacagaagtggctggaaactcacatggtgtttcttttgttcctttacagaaatgtgggcctatggagggctaaatttgctcatgtgaaacttctgctaacgttgttcataatttcttgaggctttcatgtcacactaatattttatgatttagataaaatttagtctttgttatcacagagtttaacaaccatgtagaaagaagatgagtccaaagtaatttttttgtttttgagacagggtctcgctctatggcccaggctggagcgcagcggtgtgatcatggctcgctgcagcctccagctcttgggctcaagcaatcctcccatctcagcctcctaagtagctgggactacaggtncatgccactgtgtctagctaatttttttttttggcagagacaaggttttgccatgttgccaaggctgatctcggactcctgggcttaagtgatctgtccatccctgcttccgcctctcagagtactgggattataggtgcgagccactgtgcctggtccccaaagtaatttttttattgtccggcttctcatctgtttcccagagttttcccattcactaggtcatttaattcttaaacaaatctaggtaaggtggatagtgacaaatcaactgtggtgagtacttgtatcacgacatactaagtttagtttcctgatattcaaagtagaaatattccacctacctctcaagactgctgcacgaattggttgactcagttcttaagccatggaacttgctctactgtgagagcactgtggaaagagcaactgaccctgagtagtaggattggaggagggaaggaggtcagcaacagggaactcatagtggaaagcaagacttgtaagggcagagtgagaatgtgggaggacattccaggaagaagaaactggatagtcgagagcccagagttgagacacactgggaaagtagggaattacagattccttagtcgacctccagaattagaaatcaagtctatgtaagcttacttgaaaa

SEQ ID NO: 14950 - DNA, 424 bp, Homo sapiens
gactttcattattctacttctcttccaaagcgtggctctatgttccttgctttgtgattctcccctctcagaatgaatcactctgtgcttccttggtcacacagtgtatacttcttttaagagttaattggaattttggctgggcgtggtggctcatgcctgtaatcccagcactttggaagtctgaggcaggtggatcacaaggtcaggagtttgagaccagcctgaccaacatggtgaaaccctgtctctactaaaaacacaaaaattagccaggcgtggtagcatgcacctgtaatcccagctactcaggaggctgaagcaggagaatcacttgtacctgggaggtggaggttgcagtgagccgagatcgcgccattgcactccagcctgggtgacagagtgatactctgtctcaaaaaaa

SEQ ID NO: 14951 - DNA, 383 bp, Homo sapiens
cagccctggactcctgggctcaaacgattctcccacctcagcctcccaagtagctgagactataggcgtgctccaccatgactggctaagtttttatttttgtagagatggggtctcactatgttgcccaggagtttaagaccagcctcggcaactcctgtctccaaaaagtaaaataaaaaataaatatggctttacaatgttattctttccagaatttctgataatttcaagtgagagaggtaaacatttttagttatatgatcagataccccatacgattcgcagacaatttaatctatctccagtcagatgatttaccataaagaaagccaccaaaaattgtaagcagtctggattcgtgtttattgaaaccagtaatt

SEQ ID NO: 14952 - DNA, 266 bp, Homo sapiens
cccatctcagctccgaattctggccccatctctgctctatattctgttgcagtgactcaggccaagcttcacttaatacctgcaaagaggtggagggatcagaggcagccctatcgagcttgctgatggatgcagaaggagatggcctggtgcccctattcctcagggcctgtgactgtgagccctactcactaggatgccatttggagaatagcataacattcttcatcttctgtgggtcagatgttgggttgtgtcttgggatt

SEQ ID NO: 14953 - DNA, 220 bp, Homo sapiens
aaatttctattaagatttcttcttctaaaaaaaagatatcttctttaaacaaaaccatgttatttggagataagtatacattcatgaaactatcagcacaatctatgccataaaactacctgtcactttcaaaagttttctcctgccttatttgtgtgtgtgtgtgtgtgtgtgtgtgtgtgtgtgtgtgtgtgttgagaatacttaatataagatctac

SEQ ID NO: 14954 - DNA, 335 bp, Homo sapiens
ggaggagtgagacttcagaagagaaacgcagcacatcaaatatctgctgtccatctaagatcagagccgggctgcaaggccacatggctggattggccccctctccccacttcgttctcccaggccagcctacagccgctgcacgcgttcatcttgcagcctgggccctgccagcaagactgtgcccgccaagacagcctctacacacccagaggacagtgggccccccagcatggccaaactgccaatgagacaatgttttcccttcatgaagaggtaactgggacaaggaaatcccttaaggaaagaggaaaagacctcggtgtctgccttgc

SEQ ID NO: 14955 - DNA, 421 bp, Homo sapiens
accattaggataaacaaatagagatttcagaattcttccacatgtaagtgatgccctagtactctaatttataatagagggattgttatggcttatactgaaatactagaagagagttttgcttgcaagacgtgtatacacataggctgatttcatattaagtaattctgctttattataataattcatcctgatcattgttcaataatggattcacattctaccttggttttgtgattgtgctggtgttgtagtataaattatagttattatgcacttcaaatttaaatgttattgataagtaaaattaaacactttccatatgacagcgtgggcagatatttttgtgtagtatgaaacagtgaatttcaaatagtagttaatttcttaaactaatattgagcattatatccctaaagat

SEQ ID NO: 14956 - DNA, 747 bp, Homo sapiens
cttaatacaaaggaaaaataataaagattttataagtagttaacattgattttattatctttactgttgttctcttatacttaataggaatttggcttttctggggattacctgctatagtacatatgaaacatcagtaacatccctaaggcggtttgctttgcagccgagccaaaatgctaaagtaagaagaatctttggctttaccaacatgccttggggtggagggagtgggattttttttccctttaattcagatttttctaatcttagtgatagctgatttgtgcttgctagcatataggctttgccatttcaaagaacatattttcagaacattaattcgtgtttcaatactccatttaacttctgcgccaagttccatggacacaggcagcttttggagtgttggactcatccacatccttggtgagctgactagtgaacgagtggcagtgtcttcccatagcagcgtgttcgtgtgattgggtataggtcagaaattttcagaacgttttagtgaagagtgaatggggcagcattttcaaaaagaaactttctgaggggtcactctattttcatatggttaggaaactgcttgaattggtatcggttcttgctgatttattgcctgagcatttgtgttatttctgatattacgcttcatggcaacatattttactttagaatttcccccatcatgcaggcattctagcttgagagcgtagtgttcatattcagagtgta

SEQ ID NO: 14957 - DNA, 2554 bp, Homo sapiens
tttagtattatctgtagaattttaattttattttattgtgataaatggctctttatgcaatggaaatgttgccagagtccctgttcttggacacctcttaaaccaaatgccatttaaatgaccacagactaaatacaaagtaggtaaatgcttacagggaaaggggaaagtggatcaaggtagaaaaaagacaatttgttttaaacactcttaatacaacttgttctctctccccttaaacatgtttaaaacaacgtaaagcacagatgattgtctgaaagaaaaagaaatcatttgcacagcccctgttttccagcttggtgccctttgatgggtggtgagtggtagcgatgtggcccagtgagacggcacagtcgctcttcctgcaggtcagaatcttcctaggctgttgctcttccaaggtactctgagtcctgcgatggtggcctggggttttgtttcctaagaagtagttgccattattttgattcatcctactgttctaaccaaaacaaaaaccaaaaaactccaaatggtaacagatattcatatacccggacacccaagtcagtgagtgtcacgtggcttccagatttgcatctgtgctgcagtagtctttcttcctggcaggtgtacttttgcatgtgatgggagatgccctggggtccgtggttgtggtcatcacggccatcatattctatgtgcttcccctgaagagtgaggacccgtgtaactggcagtgttacattgaccccagcctgactgtcctcatggtcatcatcattttgtcatctgccttcccgcttatcaaggagaccgctgccattctgctacagatggtcccaaaaggagtcaacatggaagagctgatgagtaaactctctgctgtgcctggaattagcagtgtacatgaagtgcacatctgggaacttgtaagtggaaagattattgccaccctgcacatcaagtatcctaaggacaggggatatcaagatgccagcacaaaaattcgagaaatcttccaccatgcgggaatccacaatgtgaccatccagtttgaaaatgtggacttgaaggaacccctggagcagaaggacttactgttgctctgcaactcaccctgcatctccaagggctgtgctaagcagctgtgttgtccccccggggcactgcctctggctcacgtcaatggctgtgctgagcacaatggtgggccctctctagacacatacggaagtgatggcctcagtagaagagacgcaagagaagtggctattgaagtgtctttggatagctgtctgagtgaccacggacaaagtcttaacaaaactcaggaggaccaatgttatgtcaacagaacgcatttttaatctggtactcacataatcagaccatatagacgaggcactttggaaccacaagcttggctcacaaaaagagctttctgggttgtaggcccagactagacttgcagcatgcatgctctgtgttcactaggggttggctgtttgggattttagttaaacgtgtctgtgaatttttatgtaactaactcctttccattcccctgggtgtctcatgctgctctttgactgtttcagcttgaacatgcattttctaaagcaaactgcactagtgtatatatcagggacattaaagtctgggactggggctcaatagctgcggatacagtgttcaaagaagttcttgtttctaaactgattagaacttctagctaatgctcaggtgagatcatagcttaaatacattgaaaaaactaaagtaccacaatagctgtatttttcccaatccccttaacgatcataaaagaggcaagttaagtatttctggcactgaagaaatatcttttttctttgattcatttttgaataaatataaaatgaataactattaaggtagaaaatattctcagaacattctagaggaggtaaaggttagtaggagggcgttggccatctctacattttgtgaggtgagagaaaactaatgtttactttctgctgtgaactgaactgcagctatagaatgtttcaaatgcttaaatatataatacatttttttccatggaagtgagggaatatttcagtttcctgaagtatgacacaaatactcatatactgtcttttagagtcagtatagttggagctgtcttcatttagtgctttgataatgatttacttatttttccaaatttcgtttgaattttctttcatatgattgcattgatctatgcagcatttaccagaaaagagtattcctgggatagcagaatgcataacactgagtgttaattcttgtgaaataaataagctagactgccttctctttaattagacatattttaaagtatttattatagttgtcaactagtaactcaatgaaaaagttgatgcccaagggagaaatgagaattagcttaattgctgcctttaatgtgtttttgaggaacttaaaattttctttcatgtcgctgatccatattaccaagttcaaataaaatttttataatcggattcagacccataaccaaact

SEQ ID NO: 14958 - DNA, 653 bp, Homo sapiens
taataaatccattccctttacaatcccgctttacttctcttctgccaatttaacatattccccatcccttcttttttctcctggatcctcgggtagccctggcctcttttcccttaccctattctctgtatatgagtattgattttcttggaaatcggtcactattattgggcaacaggcaggactctccaacccctcctccctctcattacttgctgtctgaattttgttgttctccccccctctttgcccatccgtttgtcttcttgggtgttacgggtttaggggctgcaggtgggctcccattcaccctctttttgttttaacttgaaaggatgtgtgaatgaagtccaaaggtggatcacaaggctatttcaaggccaaaatgtactgttctgagctgtgggtgtgcagaagggtctcccttaagctagtagaaatttaaaataacaaaactttattttgagtccattggtttttttttgtttgtttgtagaacttatacacaacacaaggtttcttctttgaatgcaggtgattccttcaacacccagaatgagccagaagacatgatgaagaaatccctttctatgacacacatggactgtgttgtttatttctgtttgacttttaataaggcaaaggtgtgtttg

SEQ ID NO: 14959 - DNA, 426 bp, Homo sapiens
taataaatccattccctttacaatcccgctttacttctcttctgccaatttaacatattccccatcccttcttttttctcctggatcctcgggtagccctggcctcttttcccttaccctattctctgtatatgagtattgattttcttggaaatcggtcactattattgggcaacaggcaggactctccaacccctcctccctctcattacttgctgtctgaattttgttgttctccccccctctttgcccatccgtttgtcttcttgggtgttacgggtttaggggctgcaggtgggctcccattcaccctctttttgttttaacttgaaaggatgtgtgaatgaagtccaaaggtggatcacaaggctatttcaagggctggggcctggggggggggcggttttccccccctcttttcggggt

SEQ ID NO: 14960 - DNA, 2418 bp, Homo sapiens
tcctcaccgcgctctgcttcaccatcttcgtggaggccgtgctgcgcctggcccggcccgagcgcatcgatgaccccgagctggtgctcatcgtcggcgtcctggggctgttggtcaacgtggtggggctgctcatcttccaggactgcgccgcctggttcgcgtgctgcctccggggacgcagtcgccgcctgcagcagcggcagcagctggcggagggctgtgtccccggcgctttcggggggcctcagggcgcggaggacccgcggcgcgcggcggacccgacagccccaggctcggactcggccgtaaccctccgggggacctcggtggaaaggaagcgggagaagggggcgaccgtgttcgcaaacgtagcagaacttatacacaacacaaggtttcttctttgaatgcaggtgattccttcaacacccagaatgagccagaagacatgatgaaaaaagagaaaaagtctgaagctctgaatatcagaggtgtacttttgcatgtgatgggagatgccctggggtccgtggttgtggtcatcacggccatcatattctatgtgcttcccctgaagagtgaggacccgtgtaactggcagtgttacattgaccccagcctgactgtcctcatggtcatcatcattttgtcatctgccttcccgcttatcaaggagaccgctgccattctgctacagatggtcccaaaaggagtcaacatggaagagctgatgagtaaactctctgctgtgcctggaattagcagtgtacatgaagtgcacatctgggaacttgtaagtggaaagattattgccaccctgcacatcaagtatcctaaggacaggggatatcaagatgccagcacaaaaattcgagaaatcttccaccatgcgggaatccacaatgtgaccatccagtttgaaaatgtggacttgaaggaacccctggagcagaaggacttactgttgctctgcaactcaccctgcatctccaagggctgtgctaagcagctgtgttgtccccccggggcactgcctctggctcacgtcaatggctgtgctgagcacaatggtgggccctctctagacacatacggaagtgatggcctcagtagaagagacgcaagagaagtggctattgaagtgtctttggatagctgtctgagtgaccacggacaaagtcttaacaaaactcaggaggaccaatgttatgtcaacagaacgcatttttaatctggtactcacataatcagaccatatagacgaggcactttggaaccacaagcttggctcacaaaaagagctttctgggttgtaggcccagactagacttgcagcatgcatgctctgtgttcactaggggttggctgtttgggattttagttaaacgtgtctgtgaatttttatgtaactaactcctttccattcccctgggtgtctcatgctgctctttgactgtttcagcttgaacatgcattttctaaagcaaactgcactagtgtatatatcagggacattaaagtctgggactggggctcaatagctgcggatacagtgttcaaagaagttcttgtttctaaactgattagaacttctagctaatgctcaggtgagatcatagcttaaatacattgaaaaaactaaagtaccacaatagctgtatttttcccaatccccttaacgatcataaaagaggcaagttaagtatttctggcactgaagaaatatcttttttctttgattcatttttgaataaatataaaatgaataactattaaggtagaaaatattctcagaacattctagaggaggtaaaggttagtaggagggcgttggccatctctacattttgtgaggtgagagaaaactaatgtttactttctgctgtgaactgaactgcagctatagaatgtttcaaatgcttaaatatataatacatttttttccatggaagtgagggaatatttcagtttcctgaagtatgacacaaatactcatatactgtcttttagagtcagtatagttggagctgtcttcatttagtgctttgataatgatttacttatttttccaaatttcgtttgaattttctttcatatgattgcattgatctatgcagcatttaccagaaaagagtattcctgggatagcagaatgcataacactgagtgttaattcttgtgaaataaataagctagactgccttctctttaattagacatattttaaagtatttattatagttgtcaactagtaactcaatgaaaaagttgatgcccaagggagaaatgagaattagcttaattgctgcctttaatgtgtttttgaggaacttaaaattttctttcatgtcgctgatccatattaccaagttcaaataaaatttttataatcggattcagacccataaccaaact

SEQ ID NO: 14961 - DNA, 2536 bp, Homo sapiens
taataaatccattccctttacaatcccgctttacttctcttctgccaatttaacatattccccatcccttcttttttctcctggatcctcgggtagccctggcctcttttcccttaccctattctctgtatatgagtattgattttcttggaaatcggtcactattattgggcaacaggcaggactctccaacccctcctccctctcattacttgctgtctgaattttgttgttctccccccctctttgcccatccgtttgtcttcttgggtgttacgggtttaggggctgcaggtgggctcccattcaccctctttttgttttaacttgaaaggatgtgtgaatgaagtccaaaggtggatcacaaggctatttcaaggccaaaatgtactgttctgagctgtgggtgtgcagaagggtctcccttaagctagtagaaatttaaaataacaaaactttattttgagtccattggtttttttttgtttgtttgtagaacttatacacaacacaaggtttcttctttgaatgcaggtgattccttcaacacccagaatgagccagaagacatgatgaaaaaagagaaaaagtctgaagctctgaatatcagaggtgtacttttgcatgtgatgggagatgccctggggtccgtggttgtggtcatcacggccatcatattctatgtgcttcccctgaagagtgaggacccgtgtaactggcagtgttacattgaccccagcctgactgtcctcatggtcatcatcattttgtcatctgccttcccgcttatcaaggagaccgctgccattctgctacagatggtcccaaaaggagtcaacatggaagagctgatgagtaaactctctgctgtgcctggaattagcagtgtacatgaagtgcacatctgggaacttgtaagtggaaagattattgccaccctgcacatcaagtatcctaaggacaggggatatcaagatgccagcacaaaaattcgagaaatcttccaccatgcgggaatccacaatgtgaccatccagtttgaaaatgtggacttgaaggaacccctggagcagaaggacttactgttgctctgcaactcaccctgcatctccaagggctgtgctaagcagctgtgttgtccccccggggcactgcctctggctcacgtcaatggctgtgctgagcacaatggtgggccctctctagacacatacggaagtgatggcctcagtagaagagacgcaagagaagtggctattgaagtgtctttggatagctgtctgagtgaccacggacaaagtcttaacaaaactcaggaggaccaatgttatgtcaacagaacgcatttttaatctggtactcacataatcagaccatatagacgaggcactttggaaccacaagcttggctcacaaaaagagctttctgggttgtaggcccagactagacttgcagcatgcatgctctgtgttcactaggggttggctgtttgggattttagttaaacgtgtctgtgaatttttatgtaactaactcctttccattcccctgggtgtctcatgctgctctttgactgtttcagcttgaacatgcattttctaaagcaaactgcactagtgtatatatcagggacattaaagtctgggactggggctcaatagctgcggatacagtgttcaaagaagttcttgtttctaaactgattagaacttctagctaatgctcaggtgagatcatagcttaaatacattgaaaaaactaaagtaccacaatagctgtatttttcccaatccccttaacgatcataaaagaggcaagttaagtatttctggcactgaagaaatatcttttttctttgattcatttttgaataaatataaaatgaataactattaaggtagaaaatattctcagaacattctagaggaggtaaaggttagtaggagggcgttggccatctctacattttgtgaggtgagagaaaactaatgtttactttctgctgtgaactgaactgcagctatagaatgtttcaaatgcttaaatatataatacatttttttccatggaagtgagggaatatttcagtttcctgaagtatgacacaaatactcatatactgtcttttagagtcagtatagttggagctgtcttcatttagtgctttgataatgatttacttatttttccaaatttcgtttgaattttctttcatatgattgcattgatctatgcagcatttaccagaaaagagtattcctgggatagcagaatgcataacactgagtgttaattcttgtgaaataaataagctagactgccttctctttaattagacatattttaaagtatttattatagttgtcaactagtaactcaatgaaaaagttgatgcccaagggagaaatgagaattagcttaattgctgcctttaatgtgtttttgaggaacttaaaattttctttcatgtcgctgatccatattaccaagttcaaataaaatttttataatcggattcagacccataaccaaact

SEQ ID NO: 14962 - DNA, 793 bp, Homo sapiens
cattataatgtcatgatgacaacattttgtgagagaagtctgtataaaaagcaattgctcttttgtttccaaaacaggtattacaagtggataaataatgtgcactgctctgagcccaaaggtacgcagtgggcctggcctctctgatatgcatcagtatagccaatggctagccagcagacatgaagctaatttgctaccaatgaaagaagatctggccttgtggttaaccaatctattagggaaggagattacagcagaaacttttatggagaagttggacaatggtgccttgctctgtcaacttgcagaaactatgcaggagaaattcaaggagagcatggatgctaacaagcccacaaaggtcaaaatccaaattattctcatttccttgtttcagtgagtcatagaaggaattgtctctcacacttttgatatataactcttgagggtggggtggccagaagaagcccagtgtcctaagatattgtgctgagattctttaggaataatacttaacagaggatgaagtttgttgaactgtctgtagatggaattgcaaattgaacaaaattactttatggccttatgtatttaaaaatctttggacaagagtataggccctagcaaaatggaaaatgaccatatgcaaagcatggaaaacctttgtaaaaagcactcatgtttgagatagcttactttttatgccctaataagcaaatggcaaaagtaaaaattattttagaattccccttaaattataagagggtaaaataaaatctatcattttcat

SEQ ID NO: 14963 - DNA, 2033 bp, Homo sapiens
cattataatgtcatgatgacaacattttgtgagagaagtctgtataaaaagcaattgctcttttgtttccaaaacaggtattacaagtggataaataatgtgcactgctctgagcccaaaggtacgcagtgggcctggcctctctgatatgcatcagtatagccaatggctagccagcagacatgaagctaatttgctaccaatgaaagaagatctggccttgtggttaaccaatctattagggaaggagattacagcagaaacttttatggagaagttggacaatggtgccttgctctgtcaacttgcagaaactatgcaggagaaattcaaggagagcatggatgctaacaagcccacaaagaatctaccgttgaagaagatcccatgcaaaaccagtgcaccctcgggctccttttttgccagagacaatacagcaaatttcttatcctggtgccgagatttaggggtggatgaaacgtgtctatttgaatcggaaggtttggtcctccacaagcaacccagagaagtgtgtctctgtctgctagagcttggccggattgcagccaggtatggtgtggagcctcctggtttgataaagctggaaaaagagattgaacaagaagaaacactttctgccccttctccttcaccttctccttcatcaaagtcttctggaaaaaagagtacaggaaacttactggatgatgcagtgaaacgaatttctgaagatcctccttgcaaatgcccaaacaagttctgtgtggagcggctctcccaaggaagataccgagtgggagaaaagatcctcttcattaggatgctgcacaacaaacatgtcatggtccgtgtgggaggaggctgggaaacttttgcagggtatttgttgaaacacgacccctgccgaatgctgcagatctcccgtgtggatggcaaaacatcccctatccaaagcaaatctccaactctaaaggacatgaatccagataactacttggtggtctctgccagttataaggctaagaaggaaattaagtgaaacaaattggtcatgacaaggggaccctcataatggcctgtatccacttctccagtatagtcagtttagttcatatgttctgaaaactgttttggagaaagatagacagaaaaatgtcatcatattgaaaaatgttcaaagagtagcactatttatttttaatgcttctgtagaatatgacctattaaaagaaaatctaaactcaaatttaaattatccaaattttaggcaaattattatttctcaatatgcgaacacagtatttagaacacaatattagaaacacaattctaactaaagataaataaggagaaaacatttaggatttgcagataagtcaacagaaagtgcctgctttacactcatgagtaaaagcactccagacatttttataattgcaagatttttatgcttttttttttttttttttttacaaaatgatgattagtgtgataatgtgctgcaaaaaatatccaacagcactacacataagtacagagtattcacaatagtaatatgttactggaaaggccacttccgaaaagtttacattcacttggaaggctgccttaaagtatatctcttatctatgaccaaatatctggggtacttttagaagttttcagtacacccccttagagaatagcttatgagttatttcacacattcctgagcacatggctgtgtttagaatgatctagtgtaattcatacatgagctgacatacgttgatactttgacgagtaaattgtacagtcaaatgttcattgatttcatgttatttcaaagcattttcttattaaaaatatatctttagttaatcctattttgctatgctttctagtaaagtaaattcactgtagctaatgatgttacagacttacgtatacccttgtatacctgggacagggctgttttataccaataaacagcaaaatattgtccttactcattcaagaattaaaaggataaattttaaaaatgttatctgtct

SEQ ID NO: 14964 - DNA, 2254 bp, Homo sapiens
  misc_feature (1)..(3): n is a, c, g, or t
nnnggagattcacagaggcaaggcagagaacaagacctgtgcttctttactccaaactcttagcagtgtggacactgattaactgcagctggggtctgatttgcccagcctgtctttgatattgatcaatgaactccttctcaaggaatgctttcctctaactgcggtgaaggtggtggctctggtggtcctctccaacatgggtgtctgggttttgactgcctaagagaaggtattacaagtggataaataatgtgcactgctctgagcccaaaggtacgcagtgggcctggcctctctgatatgcatcagtatagccaatggctagccagcagacatgaagctaatttgctaccaatgaaagaagatctggccttgtggttaaccaatctattagggaaggagattacagcagaaacttttatggagaagttggacaatggtgccttgctctgtcaacttgcagaaactatgcaggagaaattcaaggagagcatggatgctaacaagcccacaaagaatctaccgttgaagaagatcccatgcaaaaccagtgcaccctcgggctccttttttgccagagacaatacagcaaatttcttatcctggtgccgagatttaggggtggatgaaacgtgtctatttgaatcggaaggtttgggatttggaggccagtgactatgcttcatctatttctctgagaaagaatctactcaacaagaaaaggtcctccacaagcaacccagagaagtgtgtctctgtctgctagagcttggccggattgcagccaggtatggtgtggagcctcctggtttgataaagctggaaaaagagattgaacaagaagaaacactttctgccccttctccttcaccttctccttcatcaaagtcttctggaaaaaagagtacaggaaacttactggatgatgcagtgaaacgaatttctgaagatcctccttgcaaatgcccaaacaagttctgtgtggagcggctctcccaaggaagataccgagtgggagaaaagatcctcttcattaggatgctgcacaacaaacatgtcatggtccgtgtgggaggaggctgggaaacttttgcagggtatttgttgaaacacgacccctgccgaatgctgcagatctcccgtgtggatggcaaaacatcccctatccaaagcaaatctccaactctaaaggacatgaatccagataactacttggtggtctctgccagttataaggctaagaaggaaattaagtgaaacaaattggtcatgacaaggggaccctcataatggcctgtatccacttctccagtatagtcagtttagttcatatgttctgaaaactgttttggagaaagatagacagaaaaatgtcatcatattgaaaaatgttcaaagagtagcactatttatttttaatgcttctgtagaatatgacctattaaaagaaaatctaaactcaaatttaaattatccaaattttaggcaaattattatttctcaatatgcgaacacagtatttagaacacaatattagaaacacaattctaactaaagataaataaggagaaaacatttaggatttgcagataagtcaacagaaagtgcctgctttacactcatgagtaaaagcactccagacatttttataattgcaagatttttatgcttttttttttttttttttttacaaaatgatgattagtgtgataatgtgctgcaaaaaatatccaacagcactacacataagtacagagtattcacaatagtaatatgttactggaaaggccacttccgaaaagtttacattcacttggaaggctgccttaaagtatatctcttatctatgaccaaatatctggggtacttttagaagttttcagtacacccccttagagaatagcttatgagttatttcacacattcctgagcacatggctgtgtttagaatgatctagtgtaattcatacatgagctgacatacgttgatactttgacgagtaaattgtacagtcaaatgttcattgatttcatgttatttcaaagcattttcttattaaaaatatatctttagttaatcctattttgctatgctttctagtaaagtaaattcactgtagctaatgatgttacagacttacgtatacccttgtatacctgggacagggctgttttataccaataaacagcaaaatattgtccttactcattcaagaattaaaaggataaattttaaaaatgttatctgtct

SEQ ID NO: 14965 - DNA, 485 bp, Homo sapiens
tttcttataaatcaaatagctttaattactatttttcattaaatttttattagttggtacaatatttgattttgaaaactgcttcatgtcaaccacataaatgaagttctgtgaaacccccaaatacacatggagaaattttagatacaggcatatagaaagcaggtccaaaacctttatcaaaacctacatgaaagtggtaagaacaagtggtaagaatacaagtcatctcccactggctgggagtcaaaaaaaaagtctagatctcaagctgacgccaagtaagaagaattgaaacagattttataggctctatgatgtgacttcccagactttctctcacaatcacatcctcttcccaacattacagtgcccgtatgtatccataacattttgggcaggagagggagtcagcagggtctttgatgatcatgcaacattacctcttaatattaaattttctgatatttgcaagaagccgatga

SEQ ID NO: 14966 - DNA, 1360 bp, Homo sapiens
atttgccttcagatgtctttggggcctgaactttacatggtgaaacgaatttctgaagatcctccttgcaaatgcccaaacaagttctgtgtggagcggctctcccaaggaagataccgagtgggagaaaagatcctcttcattaggatgctgcacaacaaacatgtcatggtccgtgtgggaggaggctgggaaacttttgcagggtatttgttgaaacacgacccctgccgaatgctgcagatctcccgtgtggatggcaaaacatcccctatccaaagcaaatctccaactctaaaggacatgaatccagataactacttggtggtctctgccagttataaggctaagaaggaaattaagtgaaacaaattggtcatgacaaggggaccctcataatggcctgtatccacttctccagtatagtcagtttagttcatatgttctgaaaactgttttggagaaagatagacagaaaaatgtcatcatattgaaaaatgttcaaagagtagcactatttatttttaatgcttctgtagaatatgacctattaaaagaaaatctaaactcaaatttaaattatccaaattttaggcaaattattatttctcaatatgcgaacacagtatttagaacacaatattagaaacacaattctaactaaagataaataaggagaaaacatttaggatttgcagataagtcaacagaaagtgcctgctttacactcatgagtaaaagcactccagacatttttataattgcaagatttttatgcttttttttttttttttttttacaaaatgatgattagtgtgataatgtgctgcaaaaaatatccaacagcactacacataagtacagagtattcacaatagtaatatgttactggaaaggccacttccgaaaagtttacattcacttggaaggctgccttaaagtatatctcttatctatgaccaaatatctggggtacttttagaagttttcagtacacccccttagagaatagcttatgagttatttcacacattcctgagcacatggctgtgtttagaatgatctagtgtaattcatacatgagctgacatacgttgatactttgacgagtaaattgtacagtcaaatgttcattgatttcatgttatttcaaagcattttcttattaaaaatatatctttagttaatcctattttgctatgctttctagtaaagtaaattcactgtagctaatgatgttacagacttacgtatacccttgtatacctgggacagggctgttttataccaataaacagcaaaatattgtccttactcattcaagaattaaaaggataaattttaaaaatgttatctgtct

SEQ ID NO: 14967 - DNA, 1526 bp, Homo sapiens
tttcttataaatcaaatagctttaattactatttttcattaaatttttattagttggtacaatatttgattttgaaaactgcttcatgtcaaccacataaatgaagttctgtgaaacccccaaatacacatggagaaaaaaaaacaggacttctttcatagactatatgctaactcagacattttgcaccaagtagaaaaacaatgggtcatgaaatacaaaccaaaacactaatttcactagaaccaggggttgattcaaggtactgtaagaattctcggaatttaacacttttgatattttttcatttcagatgctgcacaacaaacatgtcatggtccgtgtgggaggaggctgggaaacttttgcagggtatttgttgaaacacgacccctgccgaatgctgcagatctcccgtgtggatggcaaaacatcccctatccaaagcaaatctccaactctaaaggacatgaatccagataactacttggtggtctctgccagttataaggctaagaaggaaattaagtgaaacaaattggtcatgacaaggggaccctcataatggcctgtatccacttctccagtatagtcagtttagttcatatgttctgaaaactgttttggagaaagatagacagaaaaatgtcatcatattgaaaaatgttcaaagagtagcactatttatttttaatgcttctgtagaatatgacctattaaaagaaaatctaaactcaaatttaaattatccaaattttaggcaaattattatttctcaatatgcgaacacagtatttagaacacaatattagaaacacaattctaactaaagataaataaggagaaaacatttaggatttgcagataagtcaacagaaagtgcctgctttacactcatgagtaaaagcactccagacatttttataattgcaagatttttatgcttttttttttttttttttttacaaaatgatgattagtgtgataatgtgctgcaaaaaatatccaacagcactacacataagtacagagtattcacaatagtaatatgttactggaaaggccacttccgaaaagtttacattcacttggaaggctgccttaaagtatatctcttatctatgaccaaatatctggggtacttttagaagttttcagtacacccccttagagaatagcttatgagttatttcacacattcctgagcacatggctgtgtttagaatgatctagtgtaattcatacatgagctgacatacgttgatactttgacgagtaaattgtacagtcaaatgttcattgatttcatgttatttcaaagcattttcttattaaaaatatatctttagttaatcctattttgctatgctttctagtaaagtaaattcactgtagctaatgatgttacagacttacgtatacccttgtatacctgggacagggctgttttataccaataaacagcaaaatattgtccttactcattcaagaattaaaaggataaattttaaaaatgttatctgtct

SEQ ID NO: 14968 - DNA, 1204 bp, Homo sapiens
  misc_feature (1)..(3): n is a, c, g, or t
nnnggagattcacagaggcaaggcagagaacaagacctgtgcttctttactccaaactcttagcagtgtggacactgattaactgcagctggggtctgatttgcccagcctgtctttgatattgatcaatgaactccttctcaaggaatgctttcctctaactgcggtgaaggtggtggctctggtggtcctctccaacatgggtgtctgggttttgactgcctaagagaaggtattacaagtggataaataatgtgcactgctctgagcccaaaggtacgcagtgggcctggcctctctgatatgcatcagtatagccaatggctagccagcagacatgaagctaatttgctaccaatgaaagaagatctggccttgtggttaaccaatctattagggaaggagattacagcagaaacttttatggagaagttggacaatggtgccttgctctgtcaacttgcagaaactatgcaggagaaattcaaggagagcatggatgctaacaagcccacaaagaatctaccgttgaagaagatcccatgcaaaaccagtgcaccctcgggctccttttttgccagagacaatacagcaaatttcttatcctggtgccgagatttaggggtggatgaaacgtgtctatttgaatcggaaggtttgggatttggaggccagtgactatgcttcatctatttctctgagaaagaatctactcaacaagaaaaggtcctccacaagcaacccagagaagtgtgtctctgtctgctagagcttggccggattgcagccaggtatggtgtggagcctcctggtttgataaagctggaaaaagagattgaacaagaagaaacactttctgccccttctccttcaccttctccttcatcaaagtcttctggaaaaaagagtacaggaaacttactggatgatgcagtaagtaaaatcagtcagacttcttaccaacggttagtctttcttgcactacaaaacatattctgtgcaatctcgtatcagtctaatctttacctatatcaattttcttgaaatttattttaagcccatatgaaaaactttgtagtcctacaattcattttgagattcaaaactgaactagttgttcaaaataaagtgtcatttaatgctgcagaccaatatctaaaactttagaataataagtcaactccctgaaaattgtatttgaaaa

SEQ ID NO: 14969 - DNA, 530 bp, Homo sapiens
gcacaaatgttttaagagttgaggaattttcaactctttctgaaagaataggaagatataaaggcttctcagagacggtattatttaagctgattttgtttttgtttttgagatgaagtcttgctctctcgcccaagatggagtgcaatggcgtgatctcagctcactgcaacctctgcttaccaggttcaagtgattcttctgcctcagtctcctgagtagctgggattacaggcatccaccaccacacccagctattttttgtatttttagtaaagacgaggtttcaccatgttggccaggctagtctcaaactactgatctgaggtgatccgcccaccttggcctcccagagtgctgggattataggcatgagccaccatgcccggcttatttaagctgattctttaagggtaagtagaaattttttccaggtgaataaaaccttgagctattattccaagcagagaccagtaggtgcaaagacacagggatatagagatgttgaagtttaccaaacactgctagat

SEQ ID NO: 14970 - DNA, 431 bp, Homo sapiens
aggaactcagaacatgcaggcaggtgctggaggtagggcaggtgtgctggtaagatggatgacctcagttccactggcaaaactgtgccacaggagaaacctgagcgtgtggtaaaaaccaccccagcagcaatcagtaaatgcaggaacagtgacctcaggaagacatgaggctcctaccagtgcctgtgatgaggccagcccagccctgtgtgtggttagggcacacctgaccaccccgacaaccagggaaggacggtgttggagctctgagttcttggcatgaggacatgatcttggctgattgttttccttcagaccttctgcagaattgaatgcacatcaaagaaacaagcagaagaaaccatgccagctacttgtattgaataaaagtattttacttacaaacttggattatcaaacttatgagg

SEQ ID NO: 14971 - DNA, 454 bp, Homo sapiens
tctggtttcagattgtcctgtattcccttcctggctctggtcccactggcctcttttcggtgacattctcccccaggaaccatccctggcccttccctcccccagccctagccagttctcccagacacactggaagagaacactgaccttacccaactatctgctgggatcccacccaaatttatagcccattcctccctcattcattcattcagcaagtatgtactgaacaccaactgtgtggcatacactggcttgggagtgttgctgatcctcaaaggcctctgtaggatggagggaggggaccttactcccttccccaccccagatgcaggagtcacccagcttccttctctgcgctgtttccttcacaaattagacattggtttgggaaacaatgtagcctcgttaaacatttaatgaaataaacaaataatcacactgtgaaggctgc

SEQ ID NO: 14972 - DNA, 1857 bp, Homo sapiens
tctggtttcagattgtcctgtattcccttcctggctctggtcccactggcctcttttcggtgacattctcccccaggaaccatccctggcccttccctcccccagccctagccagttctcccagacacactggaagagaacactgaccttacccaactatctgctgggatcccacccaaatttatagcccattcctccctcattcattcattcagcaagtatgtactgaacaccaactgtgtggcatacactggcttgggagattgcaaggaccagtctctaagcttttggaggccagcccagtgtggaagagaggtacctcaggtgtgagggtgccatggctgagggatatttgtacatgtatgggatgctatgggagctccttgcagcctgagaagccagtcctgtgagccaggtcctgagggttgaagaggagttttccgggcagggaaggggtaggaaaggcactctgggcagagggtacagcatgtgtaaacacgtggagatgagaatgagcatagcactgttggggctcccatggcagggagaatagaagacaaggctaggaaggtacactgaggctactgcagggtccacagaggaatcagaatttcattctgaggatgaatgaaatcatcctcagaggatgaagccaccaggaatttcaggcagagagtgaagtgatcagagttgttttttggatagatggttatctggatgtggtgttggagctgggagatttggctctgaggtgtgtcatttaaaataatagcttctcggcagtggctcacacctataatcccagccaagattcctcctttgggaggccaagctgggaggatcgcttgaggccaggagttagagactgcagtgagctatgatcatgccattgtcttccagcctgagtgtcagagtgagaccctgtctctaaaaaaaattaaaaaataaaaaataaaaaatagcttctcctttcccttatgccaggttccagtcttgagaggaaaggaatccctacccaccactccctggatcatcagatatccctatcccaacctctcctatgggactagttcatctcagccagtctcaaagattctaggataacttcaatggcatttgaaattatctaagtgtgcttggataaccaccccctcaaactgagacctggttagggactgactcaaagaccctgagtcctcggctaagggtacaggagagggcaggggctccaggcccagcttaggtggatctccatctgtctctgaggactgaccctttccccacaaggacctgccataaaaatcgacttgcgatttttagctgagtggcttctcttttccactttggacttctcagtgtatagcaggttcaagcctgcaaccaccaaagtgcagagtgtggagtgtttgtgccccctctttcctccaacctccatatcctgccatgtgagctcagggaatgcaaatgcatttaaatatccatctaaagcaaacataattagaaaaatcaatcagctggaggaccccccaaagtttaatacattttcaataccaccaggaatggatttttggtccctttctgcaggtctgggttgccagacgttttatttctggggaggagggctctgggctgaggagctcagtgggtgggaggagggaatgggactgttgctgatcctcaaaggcctctgtaggatggagggaggggaccttactcccttccccaccccagatgcaggagtcacccagcttccttctctgcgctgtttccttcacaaattagacattggtttgggaaacaatgtagcctcgttaaacatttaatgaaataaacaaataatcacactgtgaaggctgc

SEQ ID NO: 14973 - DNA, 576 bp, Homo sapiens
catgcttcctcttaggactttaggtctgcctacatgttgaagaagtttgagttttaggctttgggagcatttccttaaaaaccattgtcatgggggaggaaaaaaaaagggtagtgttaattctgtcttcacacactcagagatcatttggttgggctacattttatgagctatattccataaagatgctgcaaagttcaggtatctggtttaggaaagaaaaaaaaatcccttctttaacccaagaaatgtaatgcaaacaacttgggcctgtgtcacttagtcttctaagaagacttcaaggctgttataaagacccagtggtgggagaaacctgatccggtatagcggggccagaagaagctgcgggaccatgccgcggggacaaggcaaggagtttcgccaggatgttgatctcctggttatctacacttccgcctcagtatgatctgaattattaatgagaaagattaagatacagattccttccttcaagtgccttagtagtcacagacaggaggttaattataagactaaaagcaatcttgggttgttagaagaacttaaaggaaaaca

SEQ ID NO: 14974 - DNA, 312 bp, Homo sapiens
cccaaacttcttgccaatcgtagctaaaactgtacattacccctaaactttcccttattcagatctctaaaatgcctggtgccactccattagcacctgacataatggaaagtgtgaagaaggggaagttggagagaaaagagacagcaatctcaaccaattgctattaaaatatcttacttttgcaagtcttacaaaagcatgtgtccttgtgaacacaatgctagaatctctcccagggtattagaagggttgcctgcacttgagaggtcctgaaatttaatctctgttagcttcacagtaaacctgctg

SEQ ID NO: 14975 - DNA, 463 bp, Homo sapiens
ggccttttagcttttcagagaacttccacatgcattgatttttttttcctccttactacatttctgtgaggtgggttgaagttattattatcccttttcaccaatgaagataggctaaaacagcgaaatcaaagggcaaattagtggtggtgctaacactggaatccaaggcttataactccaaatctagttaaaaacagtggtttggcatctcactcccttattgatttgagctggacaggccaaagggatcgctgtggcgggagtcacctgatttcccttagacaactcctgatgcatcatgaggccaattctaaggaaaatagctgggagttaacctggactgtattctggaccacaaatacaagattcttctgaggaaataaaacttttatttctgccattttgtggccacttttgtaaaccattaataatggtctagatgaggccagctatttttgta

SEQ ID NO: 14976 - DNA, 344 bp, Homo sapiens
gtagaaaagtaatcttgtcttacccaaaatccttcccatcatcattttctctttctcttaaaaagacatgcgaaggaaaatgttcacacttactgaaaagcacagtgcaacgactgtggcacttacgcagtacccactcgcacatttttctctttaaataattcattcacacctgtatgcaaataaaggcatagtattttgtcatacagagtagcatgggctctttctccactgaatggctgacatagagctacctcatttttaggatctaccagacctcccatctgaaactaacattgcctaaatctctgaaagaaggaactcaaatcagccaagaaagacct

SEQ ID NO: 14977 - DNA, 416 bp, Homo sapiens
tcccatgaaactactttaccgaatgatggagctggaaaggacatttggaagtcatctagtctatttcccctgcctccaaatctaattctctctggatgagataatatgacagctacaattattctgaactctgttctagtgttgcatggcaacagcctgtcttaggtccctttgtatctttctgggagtttcccccactggaatttctagactcagggtcccagaggggagaatatctggctaccaacactaccagagttaggcctttcataaccatagctgctggaaatttggcattgttacagattgctaatagtctgtctctaatctttcaaagatagaattgaatttatcatgtgcctctttcctaactcagaatcttctttccctgccacctgctctattactttgcttgc

SEQ ID NO: 14978 - DNA, 725 bp, Homo sapiens
tccccataaaagacaagattgttgaacacctgcaagtgaataaagataaactgatctcagaggggaaaaagacgcagggttaggaaacagcaccctgctcgaggacgttctttccaaacagcctgctcatcacccgtgtaaactggcaaaggggtggctgggccaaaagacagaggaattaagtaagaagtccaggaaaaatgaacttcacatcaaattttagagcacggtagccatgaatcttgtgaatagctcccaaaaatgtcctgtggaagacaactagaaagcattctacaatcaggcacccacctccacctgcagcctcctgtgttgttctcatggggcacctctgggctccagctcctccaaggcacctccacactctctcaagtacactctttcactctttccccaaacatgattcccctactgctttgcctaactcccacttctctttcaagtagcagcttaaacgtcacctcatatttggctggaaaatagaatatagacagaggggtaagttaaggctagaaaggcaggctgggtcaacagaatggcaagctaaaacatgggattttctaaaacagcctaagagggtgacagataaaagtgtgcaaggagtggcacaactccagtttcatctttagctatagcaattaacaccataaggagtctggattcaattttgccatttactagctagctaccaacttctgtgtcgcttt

SEQ ID NO: 14979 - DNA, 519 bp, Homo sapiens
ccttggtttataatacctgagtctgaaaagagacatgaagtaacttagatcttagcaaagtttcctcacttttgatgggcttgccgccttggcttactggtcaccgccttcatctacagcaggggtccccaatccccgggctatggtccagcaacagtccatggcctgttaggaaccgggccacatagcaggagataagcggtggttacagctgctccccatcactcacagtactgcctgagctctgccttctgtcacggtggcatgagattctcacaggagtatgaacccctattgtaaactgtgcatgcaaggcatctaggttgtatgctccttatgagaatctaatgcctgacaatctgtcactctctcccatcacccccagatgggaccatctagttgcaggaaaataagctcaggcctccactgattctatattattgtgagttgtataattatttcattatatattacaatgtaataataatagaaataaagtgtacaataaatgtaatgtgc

SEQ ID NO: 14980 - DNA, 391 bp, Homo sapiens
ctacaatacttatttatcagtgtggtttgatgattacaaataatatgtaagatatttagtaaatatggtgcttaatacagttcttgagagttattactgatattcattcattcaacaagcacgcactatactggtttcagtgtaattgcgaagatcctactatataactccttatttccccttattttcaatgcagaaatgaataaccccatgtcatcctacatttctttatttctttgatacaacacccaataataacctacacctgctttgtcttgaaataatgcagtcatcccctaattaaaatgaagtatctgtcataaaggaggtactacccatggtgcccagatgttatgtcaagagtatatgccagaggccctctcggaaaaaa

SEQ ID NO: 14981 - DNA, 281 bp, Homo sapiens
agagcccactggtgaggtcctgaatcacacgtgaatgccgttcacagttggaattttcactgtcataagtgaacatctggccacagttgggatggtgactcatttctaaacccagcttgtaggaaggtgaggactctcctatctggactcaaccaattggagagatgttgactgtcatatctggacgtagaaccacagggaagactctggatctccttcctgtatgaaggtcacagaggatcaccattcttgcatattgtataaagccttcaggtgacaca

SEQ ID NO: 14982 - DNA, 428 bp, Homo sapiens
gtacaaaaatacagttagattaggtgaatgagttgtagcatttgataatacagtagggaaattatagttattactttattgtatatttcagaatagctagaagagaagagttgcagtgtttccaacacaaatgataaatgtttgacatgatagaaataccagttaccctaattgattattacacattgtatacgtctatcaaaatattacatgtaccccccacagatatgcacaaccatgatatagcaacttttctaaaaagaaattgaatgggtgcagcacaccaacatggcacatgtatatatacgtaacaaacctgcacgttgtgcacatgtaccctaaaacttaaagtataataataataaaatttaaaaaaaatgtagatccttgaatcaagatttaaaaaaaaaacttgaatctggaggaaa

SEQ ID NO: 14983 - DNA, 445 bp, Homo sapiens
tgccagtgcataaggcagataattgaaagttcgttcatgaatgtatctgaatctaaaattctagacccaatcctgaaataaaattaatgaaatatctggtcctatcttgatttactaccctaataaacaccaattaacgaatgaataaattaattcattaatctgaggttaatttagatctatttcagcacctggtttcttcaatatttgtatatagtctcctttcatgataaatacagtcttttttcatggtaaacgtatgtttgtatgaagaacaacaaagtaaaactgagataaagagaaagcatctactttcatataaagccacccattacgaagtcacagcattgctcttttgaaatttcagttgtattgctacagatacttcacaaccaatgattgactacttctgtcttcttcaggagctttaaaactcaaaactcaa

SEQ ID NO: 14984 - DNA, 203 bp, Homo sapiens
tcccaatctgttcagaacttcccctctgtagccagtgcccggctctccttcctactttgtcacatttatccacacggcacccttcaggctaagtgagtatatcctggggtctaagggtaggcccactgagatccagggaaaacacacaaatgggccaagaatctagctccacctggcatctgtgatacgaaggcccaggagca

SEQ ID NO: 14985 - DNA, 461 bp, Homo sapiens
ctatcagtctaagtattatgtaatgctaagatgtcatttgattgaaagacacatctctaattctgagatttgtaatgtgaaaaaagttgtcctcttagagaatttatgaaataggatgtctcttctgctatttagccatgctgaccttataccagtgttgttatctacttgcacaagagggggaaaatagggatatatgtatccctacacatacatacatacacaacataacgtgcattcttaaaaaactttgtggtcttcagaattatatactaaaattaacaacttatgggaaaaaataagatcaggacaaaccactccacctatagagtggaaacagaaataattatcttaataaaaatgcttgcacatttgaaaagatacattaatttcctaataagtactccagtaaatataggattttacacttttaaaaaaggtgaaagcttgataggagatgt

SEQ ID NO: 14986 - DNA, 198 bp, Homo sapiens
tctcctttttgcttcatttcctcattttggagatttgagtacctaacacttaggactgttgcaagaattcaaggagataagttatataaaaggatagagttcaagttgggcatggtggcacacccctataatcccggatattcaggagaccaaggtgggaggactgcttgagatcaggaattcaagaccagcctgggc

SEQ ID NO: 14987 - DNA, 458 bp, Homo sapiens
aggccctggcaaagatttcatgatgaagacaccaaaagcaattgcaagaaaaacagaaaagacaagtgggacctaataaactaaacagcttctacacagcaaaagacactagcaacagaataaacagacaacctaaagaatggaagaaaatgcccacacactatgcatctgatgaatgtccaatatccagaatctacaagaaacttaaacaaaataacaagcaaaaagaacaacaactccattaaaaagtggggaaaatacgtgaagagatgctttttaaaagaagacatacttgtggcaaacatatgaaaaatgctcaacatcactgatcattagaggaatgtaaatcaaaaccacaatgagataccatctcataccagtcagaatgcctattattatactatgcatctgatgagttccaatatccagaatctacaagaaacctaaacaaaataagc

SEQ ID NO: 14988 - DNA, 517 bp, Homo sapiens
gttttttttttacagtggctgtacctttttatattacaaccagtaatgcacaagggttccagtttcttcacaacctcgccatccatcatttgttataatcatgtgccacataatgatgttttggtcaatgagggaccacatatacagtagtggtcccataagattatagcagagctgaaaattttctttttataaaattgtatttattattattattttttttccaacttttatggagctgaaaagtttatactgcctaatgacattttgatgatcctggcactgtgtgtacctaggctaatgtgtttgtgtcttagtttttaacaaaaaagtctggaggctgaggcaagagaattgcttgatctgccctattaattgcaattttcacagttaactagtactatttttatttaaataatattacctgggaagcggaggttgcagtgagttaagatcacgccactgcactccagcctgggcgagagagtgagactctgtctcaaaataaaataaaatt

SEQ ID NO: 14989 - DNA, 898 bp, Homo sapiens
tggttttctgaagagtgaagcaggctgtgttcgtttgctagggctgctgtaacaaaataccactagctgggtggcttcacagaaattgatggtctcatggtgctgggggctggaagtgtgaattcatggtatcagcagcgctggttccttctgggatctgtgagggagaatttgttccacgcttgtctccgtgtatattggtccgttttcacactgctgtaaagaactacctgagactgggtaattgatgaagaaaagaggtttaattgactcacagttccgaaggcttaacaggaagcatgggtgggaggcctcaggaaacttacaatcatggtggaaggtgaagggggagcaagcacatctttaccatggcagagaaggagagagagagagcaaagcgggaagtgctacacactttcaaacaaccggatttcatgagaactccgtcactatcacaagaacagcaagggggaagtacgctcccatcaatcacctctcaccaggcccctaccccaacacatgggaattacaatttgagatgagatttgggtggggacacagagccaaaccatatctctgtgaaaggaaaatgaaatctcaggaccccaattcactatgccaaaaggaaaaacttaagctgtggctgggcactgtggctcatgtctgtaatcccagcactttgggaagccaagacaggaggatcgcttgagcccaggagttcaagatctgcctgggcaacatagtgagaccaagtctctacaaataattttaaaaattagctgggtgtggtagcacaagcctatagtctcagctactcaggaggctgaggtgggaggattgccggagcccaggagtttgaggctgcagtgagctatgatggtaccaccccactccaggc

SEQ ID NO: 14990 - DNA, 419 bp, Homo sapiens
cctccctcctcgtactaacttctagagtcttctggcgcagtctcctcttatcgtcaacaacaagaaataataatagtgatgatgatcatagccactaacattgagcacttgtgtaccaggtactgggctaagctctcttccatgctgaaagcaaccccttgagactggtattattaacttccttttatagataagggaacagagagattaagcaacttgccaagggcacctaggtagatctgggatttgttttgatctatagagtatatttgggcccagctggttctgcttccgactgtagaaatgtgtccccagcttccttctgaataacacttttagtgtatgggcatcagacttatcggtgtgacctcatcagcaccactaatagttattaaacacccaccctgaatcaacaactc

SEQ ID NO: 14991 - DNA, 934 bp, Homo sapiens
agcgggtgtagcccctgcgtaggaatgtggctaacggccagatgtctgacagttctccgacttctgggcattccacgtaggacgctttctcatgagtgtctgaaaccgtcagttcactgccagaaatggatgatacatgtttcctgataaactggcacttgccttttcaaagccaccatttcctctatcctctgggctgtcacaaatcctcctctgcacctcaggagtgccccttggagccacgttcaccacttctctgcccctgacccaggctggttcccaggccttggggtcctagcgtggacctcctggaagtaattaatgcagttttccagattaactcgaagtaccccacgactaaacgctaatgaaactagaggaggcacagcttcagctccgtgcaggatggatgcacaagagcagaatctccacgggacgcctttctggagcatcagtattactgcaggatttggaagaaacaaattcaaataatttccaaagtaagacactggaaatttaagaggaagctggaaactcatctgcctttaatacttttttttctccaagaaaaaaaaagaaactctaaggagaacctatttttcactcttctaagtagttaaaattagaaatcacagcaagtcaatagaaagctctgccttgccagtctcctaaatcacaatatggccttggtcaaagcaacctatatgtcatcatacaaactacaggctacgatgagcacctcattttctttctggaaggctgaccttaaatgtcctgcacattcctatagtgcatatttacccttttcctatactaagtaagccctaaatcttggcagtaacagcctggggaactacctgtcttgctaccactcaagaccatgcttctgtccacaaattccccccaataaattaccctttactgacaaactgga

SEQ ID NO: 14992 - DNA, 745 bp, Homo sapiens
agcgggtgtagcccctgcgtaggaatgtggctaacggccagatgtctgacagttctccgacttctgggcattccacgtaggacgctttctcatgagtgtctgaaaccgtcagttcactgccagaaatggatgatacatgtttcctgataaactggcacttgccttttcaaagccaccatttcctctatcctctgggctgtcacaaatcctcctctgcacctcaggagtgccccttggagccacgttcaccacttctctgcccctgacccaggctggttcccaggccttggggtcctagcgtggacctcctggaagtaattaatgcagttttccagattaactcgaagtaccccacgactaaacgctaatgaaactagaggaggcacagcttcagctccgtgcaggatggatgcacaagagcagaatctccacgggacgcctttctggagcatcagtattactgcaggatttggaagaaacaaattcaaataatttccaaagtcaaagcaacctatatgtcatcatacaaactacaggctacgatgagcacctcattttctttctggaaggctgaccttaaatgtcctgcacattcctatagtgcatatttacccttttcctatactaagtaagccctaaatcttggcagtaacagcctggggaactacctgtcttgctaccactcaagaccatgcttctgtccacaaattccccccaataaattaccctttactgacaaactgga

SEQ ID NO: 14993 - DNA, 220 bp, Homo sapiens
tcttccctgtgttttaccttgctcctctgccaggctgtttaagaatctacatgatttccatatggtctattggattaagagaaaaaaattttaaataagatctagtaattagtcccatttgctaaacagttttctcgttcacttttctccaaactgcattctctgtccatgttatatttgacatgctttgtgacattgccaggattccttccatttctca

SEQ ID NO: 14994 - DNA, 299 bp, Homo sapiens
taagtttgtgaggctttttttttttttctggtagatttctgtttccttgatcagtggtttttcagaattttttaaagcttgtgaaatacttatttgtaaatagcatcttatgaggaaccttgatatgtgacaaaacagatgctttgatttgagagcagaagacctgcagcccctgactgctcacctttccagggacccctgaacattggcctagagggtagtgtacagtcacttcttcagtgataacttactgagtgtgattcaacaaaactgctttggtttatgggtgaaacataatt

SEQ ID NO: 14995 - DNA, 783 bp, Homo sapiens
agtgagccagatgggaccatctccaaaccatcctgtcagtctggggtgctgtgcaggggtccgaggatctgccacccccatcctgttatctgttcccatttgcctgacccacgtcctcccccagtccaatcttccccagcgaaaccagaactgtcagcttcccgacaaccatttatcagacacgaggaaataacagcttttaaccacgcttgaagactgtgatcagattccgaaccatttccagaagtgtcccttggggcccagggggagacgtggtttccatgataacaaactctttgctgtctcccgtctccagcctctgggaagagaagcagatcttacctccctacggtgctagaggaaatttaactacaaaagctggcagagatgacatatgcagaaacaacagcatcaccttgatggggacctgtaatcaaatgtgctgtccatgacggcagctataatggagagtcttgcggcacccttccctccagacacgtcttctgggtttgcctgggccgacgtccaaaatggagagatgggggagctatgactggaagaaagactcaagttctttcccgacaggattgtagcctctccttcacatgatcttggggcttaagtactttcctgagaattattaaaaaactaagtagacaaaggagaaaacagaaaatgaaactaggaaaggctggggaggtagggaagaggcttccttcatttaaaaaagataacacatgcaaattacttagaggctctgatatcaagaaagcactccatatt

SEQ ID NO: 14996 - DNA, 712 bp, Homo sapiens
gccttagtaccacaccatctttaaagtctagagtgtagtccccttttccttcaaaactttccaacaaatctagcgctgtactgaactcagaacattgttctctttgagaatgtgaagattttatatagccaaagaattttcatgtataagagctagctaaatatagtatatcctgctctttcgaagaagatacaaaactgttgcctgtactaatgggtatagtagagcagttgaagaactaacacatacatggacttttcggtctgaatttgtgttggcatccatggtacttactgttcagtaggatgttattgcaaggagcagagtgccctctgctggagtaatcgcaattattcttgcagcagattaatttgacttgggtcatgaattcaacaaccagttacttgcctttcatcatacaatttcttcggtagttgagaatttggtctacatttatcaaatgaggaaagagtgtcacaaactctaaaaagctgaaggagaccccacagatcttctcactgtcagcagcccttacttctgcaaaatgttgaaggataatgttgctctgtttgcaaagaagatgcctctggctagaatgtttgtgcagttataagcaagggactgcttgtttttgtaagttatctcaactttattcttgtgaaattgcaaaggaagatcaataaaaagacttcatatgaatgtaaaaaaaaaa

SEQ ID NO: 14997 - DNA, 2256 bp, Homo sapiens
  misc_feature (1620)..(1620): n is a, c, g, or t
  misc_feature (1920)..(1920): n is a, c, g, or t
gctgtagtgaaaactcacgaacttgggaggaaagaatgagaaatgcaagactttatgtggccttcttgaaaaagaatctttgggggcctgtgatcatccggtctctacttggtgaattatgaccacctccaacagccagcattttactccaagtcagcatccacctgccaccccaatgctatggggaagaaaaggagcatttgcattcactcaaaataatttagggtcacctttaggaactgctacctcctatgtggctagtccctttggaagagctgagccctgactatgaatacagcttttgaacattgacttaatctctagggttagatatcccctgcagtgtcaactctggtcatctacacagggagaggtagagtctggagaaggcagaaaattaaaagcggcaaaggtacctacccatttttgacatcacatggaatgatcagaatcgtggaggcaaagctctgtccaaaaatgttcattttgttttgttttgttttgttttcttgtttttaacatttccttcatcctggtgaaatatcctggaaattcatagatctgggtttggtgatttcaaaactcaccatgcccagtggccatttcagttactgccgtgacatccctgaggctaccatactctcaaaaccaaatcaatgccagtgatctaacaggattctttcttatttatgagttttgtttagatggatatttttgcagagcataaaaaattaaatgacatttagttatccattgaatgtatcaccctgacttaaaaaaaaatccttaaatcaaaacttttcaaaaaatctgggctatggagtcactccctctgtggagcgagagcccagtcttttctggtactaaggccacagaggcaatttccagtagcatttttatatcttctctaagtttcttttccttttctgtctgtatctgtttttctctgactgcctatatcttactttgtatacccatacataaattattttcccatcttctctcttcccctttttttctgatttgttttctctcttgcaagaaactctgaaataaccttcagaacacaaaaaactggaggttctatacctacagagtcattatcattattgtgattaccattgttactgttgttggtgtttttcctctttttattgtgtagcaatatccatattcacttctgatgaggcaaacctgtttactataaaccaatgtcctccctaaaggagtcagtttcattttcacttctcacatcaccagttgtatcgcaacccatcttacaaccattgccatgttttcaggcttccttgccataaatgttttctgggcaaataatggcaaagcaacaattccagaatgctgtctagatctgctttctcccaccctcagcatttgaccctcctcattcgcctgagcccccagggttaggatttcttggaaaaacttgtatactgtacctgatggaatgcccattcttcctaactacttagcacaagtgcttgctcatcgtaagtgatctgagggccactaattcctgaagactgacaaagagacacgaagagactaccctcttaagatggggatgcatggttcttcatgcagtgctcttggccaccgagntccttcatccatgccattgcatggatgaatacgtttgatgttggcagttaaaatgggatgggagtgtcaccctgcaggaagtaagaaaagaggatggcaggatctctgatcagggagctggtcaaagcagggctggaaagcttctgtgcttaacaaaatgtgcatgctgtccccaagtaaatgctcatccctaggtttagagctgacctgggttttggggagtttgtatttttaaggaattaaatactcatgagttaaaatactcatgattgcaaagaaggtctggattgcctgaaaaanaaattaattctaagaagctaatatgagtttctcatcatcccttagctcttccttttccctccttttgtcctcactcaaccccagaccctgtgtaataggaacattaatttttaaagacccacagatcaatagccacactcttccactctacaccttttattgacaccaagttatcatcccagaactaatgaagcaagtccagatgctagacgtggccccttaatattgagcaatttgattgcaatctgcttgtttttgtaagttatctcaactttattcttgtgaaattgcaaaggaagatcaataaaaagacttcatatgaatgtaaaaaaaaaa

SEQ ID NO: 14998 - DNA, 449 bp, Homo sapiens
tactactactaaattcgcggccgcgtcgacctgttcagtaggatgttattgcaaggagcagagtgccctctgctggagtaatcgcaattattcttgcagcagattaatttgacttgggtcatgaattcaacaaccagttacttgcctttcatcatacaatttcttcggtagttgagaatttggtctacatttatcaaatgaggaaagagtgtcacaaactctaaaaagctgaaggagaccccacagatcttctcactgtcagcagcccttacttctgcaaaatgttgaaggataatgttgctctgtttgcaaagaagatgcctctggctagaatgtttgtgcagttataagcaagggactgcttgtttttgtaagttatctcaactttattcttgtgaaattgcaaaggaagatcaataaaaagacttcatatgaatgtaaaaaaaaaa

SEQ ID NO: 14999 - DNA, 1093 bp, Homo sapiens
ccactgcactccagcctgggtgacagagcgagaccctgtctcaaaaaaaaaatactgaagaattcaaggttaaactagatccctgcaaggccatcacctccattccaagttgttactttatttggtgtttttagcattgtaatagagtaagtaaatatttggtctttgtcccagttcttggcacagagctctccaaaaacactcggagtttgcagagtgctaggagtgtctttgtcgttcctagtgatccactttggaccacacctgagtttgttctactgtgaggtgattttggtggggcccctagatagcctcatagttggtttagtcagaaaggccaatcacttgatttgagggttaaaacttgtcagcccacttgccaaccttggggttgcagggccagagattgaactctataaaaactcctaatttgatgtgcttctggattggtgaacaactcgacatactgggtgggtagcatgcccagagacttgatggaaactctgcagcccctccccaccttgccgtatgcatctcttccatgtggttcctcagttgtatcctttatttaaaaaaaaaaaaaacaaaacaaaaaacaaacaaaaaacagtaatagtaaaaagctttcttgggttctgtgagtcattccatcaaattatcagacctgaggaggcagtagtgggaaccctgaaatttgtagtcaagtgggatagaagtgtgcaggtagcctgggaccagggaattgcaactggcttctgaagtaaggacagtcttctccaaagctaacttcagatagtgtcagaataggattgagttgttgtacacccagttggtgtcctaagaaagggtaccccacatttggtgttagaagtaacgtcagaaagcatcacacaattgtatgtattcttttctctggggtcagatcacaagctctttgaaggtaagactatcctgtcctctgcagtacctatcatagtgatatgtgcatggtaggtgctaagagcagtaaattttgctcctgtgaaagtggttcctgtattttaagattatgccgttggatacaggtattctgtcaagcagtagaagtagagtt

SEQ ID NO: 15000 - DNA, 1182 bp, Homo sapiens
gatcatttgaaatttctggctgccttacttgtttacagatagtttaagactatttaaatttctactcacaatttgatcatcacacacacacaaatccttgaatatcattgccagtgtcttaggtcaaatttacctaaagtgaatacagcccattctcaattatccttcacaattagacgcaggaatgctactaggaattggaatcaaacaatgccaccccaagcgtaattttagccagcagtttcagttatactcaaccatgcccttctgagctgttaacaagtgattcaatggacaagttctcttttgttccatctccattatttcctgctctaatgtatagtgggagtggttgtgtaatgaaaggaccaccaaaataataaaaggcagctaatggaaaggagagacaaaagcatggttaatatatatacttaatattacctccaatgactcgggaattgcctgtaaattattatagacaatagattgcatgtcatactccatttggttcaacacaacaacctatgtgttatcattacagctttggctgctgttaaagaatccagctctctattttgataaagataatcttaaagctgaggcaatgctccctcctctatctctctctgtgtaatttaccatagaattaggatgattagattgaaacacatgttgtatgttttaaaaactacattgcttcattactttcattttccgacaacatcaaactaacaagaggcagtgttaaatattttaaatggtgctatagccaatgtatttgaatgcttgcactgctggttgtgtatcatcaatatgaactttttatccaatgactcaactctaattacatctaagttagacttgctcacgttcagtttgtacagttgtgtgttgacttactatgttttgaaagtggtgacttctaccgaatgagtggaagttcccattgtcaaaaaaaataaagacctgcttgcagtattcatgttgacaacagagtaaaagagaatactgtaaagaattactgcaaatatttcctgtttatgttatttgccgttgtttgaagatattataaagggttaattgtatatttatatcatgtgctttatcgttttcccctcatgtatccaagtaatttttatttacatacaactaaataaatgttgtcctctttgaagacggtca

SEQ ID NO: 15001 - DNA, 247 bp, Homo sapiens
atcttcatcacatttattttcaggctttaaagacctttccccttgctataaaggttcatgttatgtaccactggtggaccacataagagtatctatttatacaatgactttatttccctttaggaatcaaattgtaatcaaagaataaatttatttctatattcaacaaaattcaggataactgctgatatgttacatgcaggcagtttctgcatcgtaagctaaatacaattaaacagttggcaca

SEQ ID NO: 15002 - DNA, 398 bp, Homo sapiens
ggactgggaaaaaagcacaatatatttagttttcttggcacataaagtgtgaggtaggtaggggtggtcaagaaatgagactggagaagtggaggaaggtgaggccatggggtccctgggtgtcatgctgcggagctggctctcatgctgtcagcagtgggaaggaattgggatgtgtatgcctcatgcaaagtgagagagtcagacttacattttctatttgctcactcttacatttctgtgaaggatagtcctacaggcaacagacttcagtcacagaggaggccagagtggctagaagtaattgaagcttcaatttattgaatgttcactatgtcaggtactgtttgaagcatttcacatgctatttaatcctagattttctctgttttatagat

SEQ ID NO: 15003 - DNA, 170 bp, Homo sapiens
tttttcataataccctttaatataaactggtagaatgtgaagagtagtttggtaaagacgtcaaatgaatgcaaaccaagtgcgtaggcctagcttggtcacttgctctggtttgattcagggatctgttttagaataccaagaatgactgatctgtatatccttcaggc

SEQ ID NO: 15004 - DNA, 329 bp, Homo sapiens
atgagctggatcaggaaaaaaaatagggcaaaacaagcagaaatgatctttagataagaacagtattacataaaacagcacccataatatgttaaagccactctgcagtacaaatcacttttccacaaagaattaaaagaagaagaacaaatacaaaaatcaattaaggtccagggaagggctccattccttctcgaggggctgcttcttatccaaacactggctgattcatgcaggtactgccaggctgcctcagagagggtattttttatttctgcttgactttgtccatagagtgattttcccattttagtttgcaaggaaaggtt

SEQ ID NO: 15005 - DNA, 327 bp, Homo sapiens
tgtaaaaatctacaaggagctatgacgccaaaggaatccaacacaaaaggtaaattcctgagcgaggcccggcccccacgggcttctggactcggacgtgtttgttctgccagaaggatcccgccttgactgctgctgccacttggaacctggccgttaccctcaaaggctgcaactggaccctcgcggggcggggggactggcaactatacgtgacatggttttatctgtgacctaaattaaaacacattgtgattgcagcccctgccaatcaggaatgcgaccagcccaggggattcaattaaaatgctaaattaattcaattga

SEQ ID NO: 15006 - DNA, 308 bp, Homo sapiens
gaatggtaagattgccagtggatatgggagtgaggcatctagaagatgtctggaattagtaatccctgacatgtacacaggggcatactcagaggatttcagtatcttctctgctgtggttcagtagcaggtgcttgcaccatctaaatcttaccaaagaacgtcatcttgcctcatgaaagttttaggattcctgtcaaccttgagtattctaagttaggggaaagttactttgatacaaaagtgtgggagggaaaagtttagagagggattcagaggaaagagacatgttctaaactatttttgca

SEQ ID NO: 15007 - DNA, 281 bp, Homo sapiens
ccccaagccttcaaccacatcctttgccatgaagcctccggtgcccatttctgggtacctactggacatttctgtgtctagacaagcaccgcaaacaacaaatcgaaaattgaatccagtcctggtctcaaacaactttgcctctggccttttttgccattaccgtgagacggtatctctgtaatcccagctactcagaaggctgaggcaggagaatcacttgaacctgggagacagaggttacagtgaccgagattgcaccattacactctagcctgggt

SEQ ID NO: 15008 - DNA, 963 bp, Homo sapiens
tgcgcttgtctgagatgattcccaatctgtcagccctggtcagtagctcagtaagcaccttgagaatagctcaagtagatctgtaggacccttcttagaagcagtggttcctcatggagaaacttgtgaggctgttacacattctacacacctaacattattttcaaacaaaaatgataattttcagatgcttgacttttaccaaagatcactggaaggcccagtcctaatgttaggggtttgtttaaagtcctttttattttacaatacagagccccagtcaattccacaatctcaatttcatacatgggaattttatttaaaaatctgtggtttggggctttaatgaattggcctgtgaaaatgagctctaaatttcctcccacgtacactcaaaactcaagattgctccaaatctctaagttcttccagcaaaagatttcttggcatgtatattcacttatacttagaaatattcattcttttaatttatgccagaataacaaagtggaaatcttatttcaaaatgctctttgtttttttgtgtgtgtttctgtagttctgctttctggggtagactagtaaaatggtagcttccagcattttgtccctggggccttctttatagggccactcaaatttaaataaaagtagtaaataatttagctaagtggaataagtataataattatagtggtaagcatagcacatcagcattatgccaacattctagactctttagttgatgtcattaaatggaaaagaaacttggattaaatgagtgtgctgctcaccttcccaagttctgttatttcaaacctgtgaactaaccttgcagttcattataaatcaacagtaacaactgcattctaaattactccctgatattattttctagttgtgtatcagcctgtctcctaggggttttcatttccctgaagacatacaagtgccccagagcgc

SEQ ID NO: 15009 - DNA, 517 bp, Homo sapiens
ctccaaggaaactaaatccataatgtggaatatgtgttgtgttcaccaaacaactcagatcagcagagtctggatagaaaaacaataaagagaataaatgtagggagtggtgagagggtccaactcttatcagatatcatgaagtgccagaataaaacaaaattcatagagaatagagactcaccatgaagaaaaaaaaggatatatcttgtttaaaacactagatatgggtcctaaagtgaacagtgaacaaggcatatgcaattaggttcaaggaaggaaatatggtaaagttatataaacaattttacaggttagctgtacatgtggaaagcaatttgtgtcagtggctgaacagatggagaaagatttttagtttctagtgtcctctcctctttccactgtcccacaggaaattctggaagtagctggtgcaagatagaatagcaatatattcatgtagtttatacaaacacacgcccacatatttttgtcacagaattaattctaaaattaa

SEQ ID NO: 15010 - DNA, 134 bp, Homo sapiens
aaattttattttaatcaaattttggtatggaagagagataaatgcccatactagtcaactatcttgaactggaagcatgagcctgactttgaactattaaaatgctaatcagcatgtgattaaacagcacatgc

SEQ ID NO: 15011 - DNA, 345 bp, Homo sapiens
tcagtggagcccacgttgatgacacttcccaagtccacgattccttcagcagactcctaagtcagaccttgctctaaatgttgaacatccagcaacaaatcagatgttccttgaaggggttctcagtgcagtggggggacctagacaagtgctgtcctttataacagcgtggaaagtgcccacaaggcttttgcacgtaggctgtcagggaacaggaacgtgcaaggcacatgccttggcttgagaattcagggaaggctgtgaaagtgaaagtcctgctgagaaaaatctcaaaggatggacaagaactggaatgtggaaaaggagagaaaggaagtttcaggc

SEQ ID NO: 15012 - DNA, 1232 bp, Homo sapiens
gtcatttctccagacctagctggcctgttcagtgggttatctccaccacctcaggaaagctattctgatcaaatttcttcatggcttgtattgaaaacgtccttggagggcacgccccttcacccttggtagtatctgtggacaaaaatgggaaccaggagctgcaccacgacatgcccctgcaatgtctgagttccaagccagaggatgacgcagagccctgggggtcaacctcaagtaccgctgagaccttccgtcaatgtgctgactgatctggatagcaagcaactggagtggccctctgaaagaacaggatcctgcattcctcttcatagcttgagagctcatagacacccctacgggccaccacctgctgttgcagaagagtccctagcaacagcagaagtaaacagctctgatgcactggcaggctggaggcaggagggacaggatgctattaatgtgtcctgggaagtctctggcggccctcctgcactgatagtagggggcacaaaggtcaacaatgggggcactgagagaggcagtaataacgcaaggttgcatgtagctttgccacaaggtaaagggttctttccacccaggggcccacaagtgagaggcccttcacatattcccacccttagatcagggatagtaatggaggtgccgcccggaaatacacgaatagcctgcagaggaaagctggctcatgtttctttcccactcaggggcccatgccaccccatgcataattggccaaggcctatcccgttgtcttccagtactccaggtttaccttcttgctctactgttcattgtttcatccctcctcgacctccgattttcaatccctttctcactatgcctcttccttttgctcctcctccgatatttggtcctccactgccttcttattttgcccatttccattctgggggaatgccagctcctgcatcacccaacagagagcacagctgatggcaaaaaggaaggatgaaaaaagggttgtggaaagaggtgaaagttattcatttatgcttttatatttgaaaccttgtaccctcccacactctgtttagcactaatgtgccctacttgaaaccacgtaccctcccacactctgtttagcactaatgtgccctatttgaaaccttgtaccctaccacactctgtttagcacaaatgtgccctacatactggagattaaataaagattgtgaagtctgaaatgt

SEQ ID NO: 15013 - DNA, 419 bp, Homo sapiens
cggcattccctttccctcattcagcacttctgctgggaactccctgactattccgctgctgcaggaacccagctagctggccaggtggggaggggctggggaccggccaggaaggaggggtgacttcatcccagagagacccgagttcccccagcccttcatcaccaacccgctcctgcaggagtgagtcttacctcccctggccctcctttctggctcagcctgcagcgactgtgaggccacagctcctcagattcactgcccgctgtgtgccagtactcaggcagctggagagaagagaaggcagcagcagaggcccccgccctcaccccagccatctgcacttgtaccatttgctctgtgctgactgtggtcctataaattcatgagaaataaactggttctgtgtgcctctctga

SEQ ID NO: 15014 - DNA, 580 bp, Homo sapiens
ccaaaagtaggaagaatagtctttaaaaaaatttattaagaaaaaactcattctagtacacattttttctcattttctgtatatcattggaaactcaaacaattgggcacagaaatgtaggttcgtatttgggaattattgatttaggtcaccgagctagtaaatggtagaactgaaactaggtcctgcattccgatttctgtgtctcagttttgattattttgagacaccttcagtaatttaagcattgttctttgatttttggctttttaaaatatattggaatttagttagacctgtggttaaaaataagaatagctcctactatttttacatgcttccctagatttttcctaattttggacctatgtggacaaaaaaaaaaatctagtccaagctttcactaccttctttttttattcgccttctgcttctgcgttccacatgggacttgaagtggtttataagaatgcatgctgtgaaatagtaaaaataatttactgatttttaaaaagccctcagaacgcatatgtatatgtatgtatatgaaaaatgtgttagaatcaggaggaaactagcg

SEQ ID NO: 15015 - DNA, 520 bp, Homo sapiens
cacgcaggactggctggggctggcatggcctcttgccagcaaacagcctggttgaaattttttctcatggtccaagatctttccttggaagctttctttcctttcacagctaataaaatggccatatctttcagcagggagttttttctgtttgtttgttttttctatttttaacagaatcatatacaataatgattattttattagaagtcttctgaaataattacttttcaagaaagaatcaattatataaaagtgtagagatttaaaaatatgttacaggttcacaatacaaatactagtagcactaccaataatgaacatcactaattattttctttgtttcatataggaaaggcaagtatgggaggagaaaggtgaatagcattttattgcttgtgaaattttctttctttttttagttctttgccctgtaggtgtttgacagtattttgtatttaggtgagctcaatctaaaaactaagcagattaagtggaatgctatataactagttagaat

SEQ ID NO: 15016 - DNA, 311 bp, Homo sapiens
gcaactctgtgagaaaggtactgctgttcccacacacaggtgaggaagctgaggattccacaggctcccacacttgagaagccttggagccaagacaaaagtgcagccacacaggccttattacatgtcaaggagtttaagttttgttttaagaaaactgaaaagtgcatgggcagctttgagcaggaacgtgatactgtcatgttttagaaagaaagttctgtctacagtatggaaaataaactgaaaaaaggatatgactggagacagagagaccagtcacaagactaagagaaagatgatggaggtca

SEQ ID NO: 15017 - DNA, 417 bp, Homo sapiens
agttcccagtccctctcttacccctaactccctcacagcccttctgttctctccttttggtatctcagaaatcttgggtatcagaaatcatttcataatacaagtaacaaggaataagataacctgttagaagattggattggtttttatatgttacaatttcaggcatatgatttttaaatctgccagagaggtgattgtatactgagtaatatcagtcagcgtactcccctgccagataaaccaggactcagtccgctgctaggatgcgtttcagtgaagacatctgacctgtgtggtatgtcttcagggcattgtagttgacagtagtaatgcaaggatctaccacagcctgtttaaaatatgaccagaaatgtggctgctggagtagctagatgaaatatagaccacactgat

SEQ ID NO: 15018 - DNA, 340 bp, Homo sapiens
cacttgaattgtagttaatgtctttcctgttgttgcctcctgtaccagactacaagttacgtaagagcatgataaatgtttaattcaatcatagttttgacgaagtgttcaattaatatttgtttaactgacaattgttattttaataacaaatttattgactgtgtaaagtgttgtacttattgtttaatgattttttaaggtaactggaaaacataaaggcatgccaggaaattatgcctgatttattatttttccccccaaaatactcgtggcttgtgcatagtatatgttcaaaactgtttattaagttagctgaataatatgtaaatacatatat

SEQ ID NO: 15019 - DNA, 1079 bp, Homo sapiens
  misc_feature (947)..(947): n is a, c, g, or t
  misc_feature (1062)..(1062): n is a, c, g, or t
ctacaacacaccattgagtcttggtcccaaggcgctggtgcacatggtacttcccgaaatccctgtagggccgctggagcaggagccccgatcccacgtttgggcagctgactcgcctaaggcctccagctgaaagcggaattgcaggggtatcttattgacagccggtggttcaagcagtggaagaagtatgtgggctttgacagctgggacatgtacaatgtgggtgaacataacctatttcctggcccaatagacaactctgggctattttcagatcctgagagtcagaccttgaaagaacacttaattgatgaattggactatgtattggtccctaccgaggcgtggaataaactactaaactggtacggctgtgtagaaggccagcaacccatcgtcagaaaagttgtggagcatggcctgtttgtcaagcactgcaaagtcgaggtgtatttgctggaactgaagctctgtgagaacagtgaccccaccaatgtgctgagttgccatttcagcaaggcagacaccattgcaaccatcgagaaagagatgcggaagctattcaacatccctgcggagcgtgaaacacggctctggaacaaatacatgagcaacacctacgagcagttgagcaagctagacaacactgtccaggatgctgggctataccagggtcaggtgctagtaattgagcctcaaaatgaagatggcacatggcccaggcagaccttgcagtcaaacatttgtcattatgtcaagttccatgccaatagggactttgcacatgggattaagcacaatggccaggagcagtggcttatgcctgtaatcccagcactttgggaggctgaggcgggtggatcacctgaggtcaagagtttgagaccagcctggccaacgtgcagaacaccctgtctctgctaagggtgcagaactggccggcngccctggccacatctctgctttagctgttggcgcctaggcagagatgcttgagccccaggggaggttgcgggacctgggattgcgccatccactctacgcctcgggaacaagagngaaaccccatctcaaaa

SEQ ID NO: 15020 - DNA, 4123 bp, Homo sapiens
agcgtgcgtgcgtgggcgcggtctatagcacgccgcgcgcggggcggatgtccgggccggctgggccggggccgcggaggagatggcggaaggtggaggctgccgtgagcgaccggatgcggagactcagaagtccgagcttggacccttaatgaggaccacactccaacgcggggcgcagtggtatcttattgacagccggtggttcaagcagtggaagaagtatgtgggctttgacagctgggacatgtacaatgtgggtgaacataacctatttcctggcccaatagacaactctgggctattttcagatcctgagagtcagaccttgaaagaacacttaattgatgaattggactatgtattggtccctaccgaggcgtggaataaactactaaactggtacggctgtgtagaaggccagcaacccatcgtcagaaaagttgtggagcatggcctgtttgtcaagcactgcaaagtcgaggtgtatttgctggaactgaagctctgtgagaacagtgaccccaccaatgtgctgagttgccatttcagcaaggcagacaccattgcaaccatcgagaaagagatgcggaagctattcaacatccctgcggagcgtgaaacacggctctggaacaaatacatgagcaacacctacgagcagttgagcaagctagacaacactgtccaggatgctgggctataccagggtcaggtgctagtaattgagcctcaaaatgaagatggcacatggcccaggcagaccttgcagtcaaaatcaagcactgcgcctagcagaaattttactacctctccaaaatcatcagcaagtccctattcctcagtgtctgcctctctcattgcaaatggtgatagcactagcacctgtgggatgcacagttccggtgtcagcaggggtggatctggcttttctgcttcgtataattgtcaggagccaccatcctctcatatacaacctgggctctgtggacttggaaacctgggaaacacctgcttcatgaactccgctttgcagtgtttgagcaacactgcaccactgactgactactttctcaaagatgagtatgaagccgaaatcaacagagacaaccctctggggatgaaaggggaaattgcagaagcctatgctgaactcattaagcagatgtggtctggaagggacgcccatgtggcacctcgcatgttcaaaactcaagtaggacgttttgctcctcaattttctggctaccagcaacaagattctcaggagctgctggcctttcttctagatggattgcatgaagatctgaaccgggtaaagaaaaagccctacttggagctgaaggatgccaatgggcggccagatgcggtggtggcaaaggaagcctgggagaatcacaggttgaggaatgattctgtgattgtggatactttccatggcctcttcaaatctactttggtttgcccagaatgtgctaaggtttctgtgacctttgacccattttgctatctaacgctgccactgcccttgaagaaagatcgagttatggaggttttcctggttcctgctgaccctcactgcagacctactcagtaccgtgtgactgtgccgctgatgggggctgtgtccgacctgtgcgaggctctctccaggctgtctggcattgctgcagaaaatatggtggtcgcagatgtgtataatcaccgattccacaaaattttccaaatggatgaaggtttaaaccacatcatgcctcgggatgacattttcgtgtacgaggtctgcagcacttccgtggatggctcggaatgtgtcacgcttccagtctacttcagggagaggaagtccaggccatcaagcacttcctccgcatcagcgctatatgggcagccactattgctttctgtccccaagcacaagttaacccttgagtctttgtaccaggctgtttgtgatcgtatcagccgctatgtgaaacagcctttacctgatgagtttggcagctcacccttggagccaggggcctgcaatggctccaggaacagctgtgaaggagaagatgaggaagaaatggagcatcaggaagaaggcaaagagcagctttcagaaacagaaggcagtggggaagatgagccaggaaatgaccccagtgagaccacccaaaagaagatcaaaggccagccctgcccaaaaaggctttttaccttcagtcttgtgaactcctatggaacagctgacataaattcacttgcagctgatggaaaactacttaaactcaactctcgatctacactggccatggattgggacagtgaaactcggagactttactatgatgagcaagaatctgaggcctacgagaagcatgtgagcatgttgcagcctcagaagaagaagaagaccacagtggccctgagagactgcatcgagctcttcaccaccatggagacccttggggagcatgacccctggtactgtcccaactgtaagaagcatcaacaggccacaaaaaagtttgacctatggtccttgcccaagatcctggtggtccacctcaaacgtttctcctacaacagatactggagggataagctcgacacagtcgtagaattcccaatcagagggctgaacatgtccgagtttgtctgtaacctgtcagcaaggccttatgtgtacgacctcattgccgtgtccaatcattatggagccatgggggttggccactacactgcatatgcgaagaacaaactgaatggtaaatggtattactttgatgatagcaacgtgtccctggcctctgaggatcagatagtgactaaagcagcttatgtgctattttaccaacgtcgagatgatgaattttataagacaccttcacttagcagttctggttcctctgatggagggacacgaccaagcagctctcagcagggctttggggatgatgaggcttgcagcatggacaccaactaatgctgactccacgatcctgccaccctgtagcgccagtgtaatcccccaggagaacatctttgacactctgcagactgctagtgttctgtctaaaaaccagacaaggaaatacccttcttttatgagcagaaggaaacaaaaaaaaaaaagaagaccgtttacctagaagaagctatgtcaagaggctgaattatttttatttttaaacaggtggtgagaaatttctgtgaaacctgtgaagctgaaaagggggtgggatgggggtactcaatggagtatgtctgatggatcccgaagaatggagaggaacacaggcgctgagtatggagcagcctggagacccaccccacctgcagggctgccctgagcgcctggatttctggttctgatgccaatactagtcaccccaagtagtctgctcacagtaacccaaacctcaagtaaactcccctttccctcgctatgtgcactgatatgggtttataattttctgaaagttacccactgaagcccatttctccgttgagtcatcttgtaatttccagctttctccccgctaaggaagatatctagtgttggggatcctggcccctcaacctcctgtggaacccagcagttctgttatatcccctgctaccctagatgaattaagacggttaaatactgtgtggaacttttattagataacacactttttattagataacgcttaaaggaagtcagtacataaaactgcccggtgctgtgtcccgtctagttgtttccatgttggcttgagaacagaaatctttgtgggagttagccgggaaagggctccagttcatggcgatttagggtagtaatacattttggtgttacccagatgctttctagaacgggttctttcctcatccctgccaagactcttcccggggcccccattcgaaagccccgtccccactcccaccgcggggccagccgctgcgtgtgggcaaggccttaaggaaccggacgtatgggtccgggattttttgtctgaccttcaacctaatccgtgggggtttggggcctgcgcggggcacgcgcatgcgatgaccgttggatgggtcggcgtcactgcgctgcgggtgaggacaaggacgtggctgccgactcgccaaagggggggtg

SEQ ID NO: 15021 - DNA, 3458 bp, Homo sapiens
agcgtgcgtgcgtgggcgcggtctatagcacgccgcgcgcggggcggatgtccgggccggctgggccggggccgcggaggagatggcggaaggtggaggctgccgtgagcgaccggatgcggagactcagaagtccgagcttggacccttaatgaggaccacactccaacgcggggcgcagtggtatcttattgacagccggtggttcaagcagtggaagaagtatgtgggctttgacagctgggacatgtacaatgtgggtgaacataacctatttcctggcccaatagacaactctgggctattttcagatcctgagagtcagaccttgaaagaacacttaattgatgaattggactatgtattggtccctaccgaggcgtggaataaactactaaactggtacggctgtgtagaaggccagcaacccatcgtcagaaaagttgtggagcatggcctgtttgtcaagcactgcaaagtcgaggtgtatttgctggaactgaagctctgtgagaacagtgaccccaccaatgtgctgagttgccatttcagcaaggcagacaccattgcaaccatcgagaaagagatgcggaagctattcaacatccctgcggagcgtgaaacacggctctggaacaaatacatgagcaacacctacgagcagttgagcaagctagacaacactgtccaggatgctgggctataccagggtcaggtgctagtaattgagcctcaaaatgaagatggcacatggcccaggcagaccttgcagtcaaaatcaagcactgcgcctagcagaaattttactacctctccaaaatcatcagcaagtccctattcctcagtgtctgcctctctcattgcaaatggtgatagcactagcacctgtgggatgcacagttccggtgtcagcaggggtggatctggcttttctgcttcgtataattgtcaggagccaccatcctctcatatacaacctgggctctgtggacttggaaacctgggaaacacctgcttcatgaactccgctttgcagtgtttgagcaacactgcaccactgactgactactttctcaaagatgagtatgaagccgaaatcaacagagacaaccctctggggatgaaaggggaaattgcagaagcctatgctgaactcattaagcagatgtggtctggaagggacgcccatgtggcacctcgcatgttcaaaactcaagtaggacgttttgctcctcaattttctggctaccagcaacaagattctcaggagctgctggcctttcttctagatggattgcatgaagatctgaaccgggtaaagaaaaagccctacttggagctgaaggatgccaatgggcggccagatgcggtggtggcaaaggaagcctgggagaatcacaggttgaggaatgattctgtgattgtggatactttccatggcctcttcaaatctactttggtttgcccagaatgtgctaaggtttctgtgacctttgacccattttgctatctaacgctgccactgcccttgaagaaagatcgagttatggaggttttcctggttcctgctgaccctcactgcagacctactcagtaccgtgtgactgtgccgctgatgggggctgtgtccgacctgtgcgaggctctctccaggctgtctggcattgctgcagaaaatatggtggtcgcagatgtgtataatcaccgattccacaaaattttccaaatggatgaaggtttaaaccacatcatgcctcgggatgacattttcgtgtacgaggtctgcagcacttccgtggatggctcggaatgtgtcacgcttccagtctacttcagggagaggaagtccaggccatcaagcacttcctccgcatcagcgctatatgggcagccactattgctttctgtccccaagcacaagttaacccttgagtctttgtaccaggctgtttgtgatcgtatcagccgctatgtgaaacagcctttacctgatgagtttggcagctcacccttggagccaggggcctgcaatggctccaggaacagctgtgaaggagaagatgaggaagaaatggagcatcaggaagaaggcaaagagcagctttcagaaacagaaggcagtggggaagatgagccaggaaatgaccccagtgagaccacccaaaagaagatcaaaggccagccctgcccaaaaaggctttttaccttcagtcttgtgaactcctatggaacagctgacataaattcacttgcagctgatggaaaactacttaaactcaactctcgatctacactggccatggattgggacagtgaaactcggagactttactatgatgagcaagaatctgaggcctacgagaagcatgtgagcatgttgcagcctcagaagaagaagaagaccacagtggccctgagagactgcatcgagctcttcaccaccatggagacccttggggagcatgacccctggtactgtcccaactgtaagaagcatcaacaggccacaaaaaagtttgacctatggtccttgcccaagatcctggtggtccacctcaaacgtttctcctacaacagatactggagggataagctcgacacagtcgtagaattcccaatcagagggctgaacatgtccgagtttgtctgtaacctgtcagcaaggccttatgtgtacgacctcattgccgtgtccaatcattatggagccatgggggttggccactacactgcatatgcgaagaacaaactgaatggtaaatggtattactttgatgatagcaacgtgtccctggcctctgaggatcagatagtgactaaagcagcttatgtgctattttaccaacgtcgagatgatgaattttataagacaccttcacttagcagttctggttcctctgatggagggacacgaccaagcagctctcagcagggctttggggatgatgaggcttgcagcatggacaccaactaatgctgactccacgatcctgccaccctgtagcgccagtgtaatcccccaggagaacatctttgacactctgcagactgctagtgttctgtctaaaaaccagacaaggaaatacccttcttttatgagcagaaggaaacaaaaaaaaaaaagaagaccgtttacctagaagaagctatgtcaagaggctgaattatttttatttttaaacaggtggtgagaaatttctgtgaaacctgtgaagctgaaaagggggtgggatgggggtactcaatggagtatgtctgatggatcccgaagaatggagaggaacacaggcgctgagtatggagcagcctggagacccaccccacctgcagggctgccctgagcgcctggatttctggttctgatgccaatactagtcaccccaagtagtctgctcacagtaacccaaacctcaagtaaactcccctttccctcgctatgtgcactgatatgggtttat

SEQ ID NO: 15022 - DNA, 3858 bp, Homo sapiens
agcgtgcgtgcgtgggcgcggtctatagcacgccgcgcgcggggcggatgtccgggccggctgggccggggccgcggaggagatggcggaaggtggaggctgccgtgagcgaccggatgcggagactcagaagtccgagcttggacccttaatgaggaccacactccaacgcggggcgcagtggtatcttattgacagccggtggttcaagcagtggaagaagtatgtgggctttgacagctgggacatgtacaatgtgggtgaacataacctatttcctggcccaatagacaactctgggctattttcagatcctgagagtcagaccttgaaagaacacttaattgatgaattggactatgtattggtccctaccgaggcgtggaataaactactaaactggtacggctgtgtagaaggccagcaacccatcgtcagaaaagttgtggagcatggcctgtttgtcaagcactgcaaagtcgaggtgtatttgctggaactgaagctctgtgagaacagtgaccccaccaatgtgctgagttgccatttcagcaaggcagacaccattgcaaccatcgagaaagagatgcggaagctattcaacatccctgcggagcgtgaaacacggctctggaacaaatacatgagcaacacctacgagcagttgagcaagctagacaacactgtccaggatgctgggctataccagggtcaggtgctagtaattgagcctcaaaatgaagatggcacatggcccaggcagaccttgcagtcaaaatcaagcactgcgcctagcagaaattttactacctctccaaaatcatcagcaagtccctattcctcagtgtctgcctctctcattgcaaatggtgatagcactagcacctgtgggatgcacagttccggtgtcagcaggggtggatctggcttttctgcttcgtataattgtcaggagccaccatcctctcatatacaacctgggctctgtggacttggaaacctgggaaacacctgcttcatgaactccgctttgcagtgtttgagcaacactgcaccactgactgactactttctcaaagatgagtatgaagccgaaatcaacagagacaaccctctggggatgaaaggggaaattgcagaagcctatgctgaactcattaagcagatgtggtctggaagggacgcccatgtggcacctcgcatgttcaaaactcaagtaggacgttttgctcctcaattttctggctaccagcaacaagattctcaggagctgctggcctttcttctagatggattgcatgaagatctgaaccgggtaaagaaaaagccctacttggagctgaaggatgccaatgggcggccagatgcggtggtggcaaaggaagcctgggagaatcacaggttgaggaatgattctgtgattgtggatactttccatggcctcttcaaatctactttggtttgcccagaatgtgctaaggtttctgtgacctttgacccattttgctatctaacgctgccactgcccttgaagaaagatcgagttatggaggttttcctggttcctgctgaccctcactgcagacctactcagtaccgtgtgactgtgccgctgatgggggctgtgtccgacctgtgcgaggctctctccaggctgtctggcattgctgcagaaaatatggtggtcgcagatgtgtataatcaccgattccacaaaattttccaaatggatgaaggtttaaaccacatcatgcctcgggatgacattttcgtgtacgaggtctgcagcacttccgtggatggctcggaatgtgtcacgcttccagtctacttcagggagaggaagtccaggccatcaagcacttcctccgcatcagcgctatatgggcagccactattgctttctgtccccaagcacaagttaacccttgagtctttgtaccaggctgtttgtgatcgtatcagccgctatgtgaaacagcctttacctgatgagtttggcagctcacccttggagccaggggcctgcaatggctccaggaacagctgtgaaggagaagatgaggaagaaatggagcatcaggaagaaggcaaagagcagctttcagaaacagaaggcagtggggaagatgagccaggaaatgaccccagtgagaccacccaaaagaagatcaaaggccagccctgcccaaaaaggctttttaccttcagtcttgtgaactcctatggaacagctgacataaattcacttgcagctgatggaaaactacttaaactcaactctcgatctacactggccatggattgggacagtgaaactcggagactttactatgatgagcaagaatctgaggcctacgagaagcatgtgagcatgttgcagcctcagaagaagaagaagaccacagtggccctgagagactgcatcgagctcttcaccaccatggagacccttggggagcatgacccctggtactgtcccaactgtaagaagcatcaacaggccacaaaaaagtttgacctatggtccttgcccaagatcctggtggtccacctcaaacgtttctcctacaacagatactggagggataagctcgacacagtcgtagaattcccaatcagagggctgaacatgtccgagtttgtctgtaacctgtcagcaaggccttatgtgtacgacctcattgccgtgtccaatcattatggagccatgggggttggccactacactgcatatgcgaagaacaaactgaatggtaaatggtattactttgatgatagcaacgtgtccctggcctctgaggatcagatagtgactaaagcagcttatgtgctattttaccaacgtcgagatgatgaattttataagacaccttcacttagcagttctggttcctctgatggagggacacgaccaagcagctctcagcagggctttggggatgatgaggcttgcagcatggacaccaactaatgctgactccacgatcctgccaccctgtagcgccagtgtaatcccccaggagaacatctttgacactctgcagactgctagtgttctgtctaaaaaccagacaaggaaatacccttcttttatgagcagaaggaaacaaaaaaaaaaaagaagaccgtttacctagaagaagctatgtcaagaggctgaattatttttatttttaaacaggtggtgagaaattttctgaaagttacccactgaagcccatttctccgttgagtcatcttgtaatttccagctttctccccgctaaggaagatatctagtgttggggatcctggcccctcaacctcctgtggaacccagcagttctgttatatcccctgctaccctagatgaattaagacggttaaatactgtgtggaacttttattagataacacactttttattagataacgcttaaaggaagtcagtacataaaactgcccggtgctgtgtcccgtctagttgtttccatgttggcttgagaacagaaatctttgtgggagttagccgggaaagggctccagttcatggcgatttagggtagtaatacattttggtgttacccagatgctttctagaacgggttctttcctcatccctgccaagactcttcccggggcccccattcgaaagccccgtccccactcccaccgcggggccagccgctgcgtgtgggcaaggccttaaggaaccggacgtatgggtccgggattttttgtctgaccttcaacctaatccgtgggggtttggggcctgcgcggggcacgcgcatgcgatgaccgttggatgggtcggcgtcactgcgctgcgggtgaggacaaggacgtggctgccgactcgccaaagggggggtg

SEQ ID NO: 15023 - DNA, 3922 bp, Homo sapiens
tccagagtataccccggattgaaataagcacggtggaggctgccgtgagcgaccggatgcggagactcagaagtccgagcttggacccttaatgaggaccacactccaacgcggggcgcagtggtatcttattgacagccggtggttcaagcagtggaagaagtatgtgggctttgacagctgggacatgtacaatgtgggtgaacataacctatttcctggcccaatagacaactctgggctattttcagatcctgagagtcagaccttgaaagaacacttaattgatgaattggactatgtattggtccctaccgaggcgtggaataaactactaaactggtacggctgtgtagaaggccagcaacccatcgtcagaaaagttgtggagcatggcctgtttgtcaagcactgcaaagtcgaggtgtatttgctggaactgaagctctgtgagaacagtgaccccaccaatgtgctgagttgccatttcagcaaggcagacaccattgcaaccatcgagaaagagatgcggaagctattcaacatccctgcggagcgtgaaacacggctctggaacaaatacatgagcaacacctacgagcagttgagcaagctagacaacactgtccaggatgctgggctataccagggtcaggtgctagtaattgagcctcaaaatgaagatggcacatggcccaggcagaccttgcagtcaaatggatctggcttttctgcttcgtataattgtcaggagccaccatcctctcatatacaacctgggctctgtggacttggaaacctgggaaacacctgcttcatgaactccgctttgcagtgtttgagcaacactgcaccactgactgactactttctcaaagatgagtatgaagccgaaatcaacagagacaaccctctggggatgaaaggggaaattgcagaagcctatgctgaactcattaagcagatgtggtctggaagggacgcccatgtggcacctcgcatgttcaaaactcaagtaggacgttttgctcctcaattttctggctaccagcaacaagattctcaggagctgctggcctttcttctagatggattgcatgaagatctgaaccgggtaaagaaaaagccctacttggagctgaaggatgccaatgggcggccagatgcggtggtggcaaaggaagcctgggagaatcacaggttgaggaatgattctgtgattgtggatactttccatggcctcttcaaatctactttggtttgcccagaatgtgctaaggtttctgtgacctttgacccattttgctatctaacgctgccactgcccttgaagaaagatcgagttatggaggttttcctggttcctgctgaccctcactgcagacctactcagtaccgtgtgactgtgccgctgatgggggctgtgtccgacctgtgcgaggctctctccaggctgtctggcattgctgcagaaaatatggtggtcgcagatgtgtataatcaccgattccacaaaattttccaaatggatgaaggtttaaaccacatcatgcctcgggatgacattttcgtgtacgaggtctgcagcacttccgtggatggctcggaatgtgtcacgcttccagtctacttcagggagaggaagtccaggccatcaagcacttcctccgcatcagcgctatatgggcagccactattgctttctgtccccaagcacaagttaacccttgagtctttgtaccaggctgtttgtgatcgtatcagccgctatgtgaaacagcctttacctgatgagtttggcagctcacccttggagccaggggcctgcaatggctccaggaacagctgtgaaggagaagatgaggaagaaatggagcatcaggaagaaggcaaagagcagctttcagaaacagaaggcagtggggaagatgagccaggaaatgaccccagtgagaccacccaaaagaagatcaaaggccagccctgcccaaaaaggctttttaccttcagtcttgtgaactcctatggaacagctgacataaattcacttgcagctgatggaaaactacttaaactcaactctcgatctacactggccatggattgggacagtgaaactcggagactttactatgatgagcaagaatctgaggcctacgagaagcatgtgagcatgttgcagcctcagaagaagaagaagaccacagtggccctgagagactgcatcgagctcttcaccaccatggagacccttggggagcatgacccctggtactgtcccaactgtaagaagcatcaacaggccacaaaaaagtttgacctatggtccttgcccaagatcctggtggtccacctcaaacgtttctcctacaacagatactggagggataagctcgacacagtcgtagaattcccaatcagagggctgaacatgtccgagtttgtctgtaacctgtcagcaaggccttatgtgtacgacctcattgccgtgtccaatcattatggagccatgggggttggccactacactgcatatgcgaagaacaaactgaatggtaaatggtattactttgatgatagcaacgtgtccctggcctctgaggatcagatagtgactaaagcagcttatgtgctattttaccaacgtcgagatgatgaattttataagacaccttcacttagcagttctggttcctctgatggagggacacgaccaagcagctctcagcagggctttggggatgatgaggcttgcagcatggacaccaactaatgctgactccacgatcctgccaccctgtagcgccagtgtaatcccccaggagaacatctttgacactctgcagactgctagtgttctgtctaaaaaccagacaaggaaatacccttcttttatgagcagaaggaaacaaaaaaaaaaaagaagaccgtttacctagaagaagctatgtcaagaggctgaattatttttatttttaaacaggtggtgagaaatttctgtgaaacctgtgaagctgaaaagggggtgggatgggggtactcaatggagtatgtctgatggatcccgaagaatggagaggaacacaggcgctgagtatggagcagcctggagacccaccccacctgcagggctgccctgagcgcctggatttctggttctgatgccaatactagtcaccccaagtagtctgctcacagtaacccaaacctcaagtaaactcccctttccctcgctatgtgcactgatatgggtttataattttctgaaagttacccactgaagcccatttctccgttgagtcatcttgtaatttccagctttctccccgctaaggaagatatctagtgttggggatcctggcccctcaacctcctgtggaacccagcagttctgttatatcccctgctaccctagatgaattaagacggttaaatactgtgtggaacttttattagataacacactttttattagataacgcttaaaggaagtcagtacataaaactgcccggtgctgtgtcccgtctagttgtttccatgttggcttgagaacagaaatctttgtgggagttagccgggaaagggctccagttcatggcgatttagggtagtaatacattttggtgttacccagatgctttctagaacgggttctttcctcatccctgccaagactcttcccggggcccccattcgaaagccccgtccccactcccaccgcggggccagccgctgcgtgtgggcaaggccttaaggaaccggacgtatgggtccgggattttttgtctgaccttcaacctaatccgtgggggtttggggcctgcgcggggcacgcgcatgcgatgaccgttggatgggtcggcgtcactgcgctgcgggtgaggacaaggacgtggctgccgactcgccaaagggggggtg

SEQ ID NO: 15024 - DNA, 4069 bp, Homo sapiens
agcgtgcgtgcgtgggcgcggtctatagcacgccgcgcgcggggcggatgtccgggccggctgggccggggccgcggaggagatggcggaaggtggaggctgccgtgagcgaccggatgcggagactcagaagtccgagcttggacccttaatgaggaccacactccaacgcggggcgcagtggtatcttattgacagccggtggttcaagcagtggaagaagtatgtgggctttgacagctgggacatgtacaatgtgggtgaacataacctatttcctggcccaatagacaactctgggctattttcagatcctgagagtcagaccttgaaagaacacttaattgatgaattggactatgtattggtccctaccgaggcgtggaataaactactaaactggtacggctgtgtagaaggccagcaacccatcgtcagaaaagttgtggagcatggcctgtttgtcaagcactgcaaagtcgaggtgtatttgctggaactgaagctctgtgagaacagtgaccccaccaatgtgctgagttgccatttcagcaaggcagacaccattgcaaccatcgagaaagagatgcggaagctattcaacatccctgcggagcgtgaaacacggctctggaacaaatacatgagcaacacctacgagcagttgagcaagctagacaacactgtccaggatgctgggctataccagggtcaggtgctagtaattgagcctcaaaatgaagatggcacatggcccaggcagaccttgcagtcaaaatcaagcactgcgcctagcagaaattttactacctctccaaaatcatcagcaagtccctattcctcagtgtctgcctctctcattgcaaatggtgatagcactagcacctgtgggatgcacagttccggtgtcagcaggggtggatctggcttttctgcttcgtataattgtcaggagccaccatcctctcatatacaacctgggctctgtggacttggaaacctgggaaacacctgcttcatgaactccgctttgcagtgtttgagcaacactgcaccactgactgactactttctcaaagatgagtatgaagccgaaatcaacagagacaaccctctggggatgaaaggggaaattgcagaagcctatgctgaactcattaagcagatgtggtctggaagggacgcccatgtggcacctcgcatgttcaaaactcaagtaggacgttttgctcctcaattttctggctaccagcaacaagattctcaggagctgctggcctttcttctagatggattgcatgaagatctgaaccgggtggtggcaaaggaagcctgggagaatcacaggttgaggaatgattctgtgattgtggatactttccatggcctcttcaaatctactttggtttgcccagaatgtgctaaggtttctgtgacctttgacccattttgctatctaacgctgccactgcccttgaagaaagatcgagttatggaggttttcctggttcctgctgaccctcactgcagacctactcagtaccgtgtgactgtgccgctgatgggggctgtgtccgacctgtgcgaggctctctccaggctgtctggcattgctgcagaaaatatggtggtcgcagatgtgtataatcaccgattccacaaaattttccaaatggatgaaggtttaaaccacatcatgcctcgggatgacattttcgtgtacgaggtctgcagcacttccgtggatggctcggaatgtgtcacgcttccagtctacttcagggagaggaagtccaggccatcaagcacttcctccgcatcagcgctatatgggcagccactattgctttctgtccccaagcacaagttaacccttgagtctttgtaccaggctgtttgtgatcgtatcagccgctatgtgaaacagcctttacctgatgagtttggcagctcacccttggagccaggggcctgcaatggctccaggaacagctgtgaaggagaagatgaggaagaaatggagcatcaggaagaaggcaaagagcagctttcagaaacagaaggcagtggggaagatgagccaggaaatgaccccagtgagaccacccaaaagaagatcaaaggccagccctgcccaaaaaggctttttaccttcagtcttgtgaactcctatggaacagctgacataaattcacttgcagctgatggaaaactacttaaactcaactctcgatctacactggccatggattgggacagtgaaactcggagactttactatgatgagcaagaatctgaggcctacgagaagcatgtgagcatgttgcagcctcagaagaagaagaagaccacagtggccctgagagactgcatcgagctcttcaccaccatggagacccttggggagcatgacccctggtactgtcccaactgtaagaagcatcaacaggccacaaaaaagtttgacctatggtccttgcccaagatcctggtggtccacctcaaacgtttctcctacaacagatactggagggataagctcgacacagtcgtagaattcccaatcagagggctgaacatgtccgagtttgtctgtaacctgtcagcaaggccttatgtgtacgacctcattgccgtgtccaatcattatggagccatgggggttggccactacactgcatatgcgaagaacaaactgaatggtaaatggtattactttgatgatagcaacgtgtccctggcctctgaggatcagatagtgactaaagcagcttatgtgctattttaccaacgtcgagatgatgaattttataagacaccttcacttagcagttctggttcctctgatggagggacacgaccaagcagctctcagcagggctttggggatgatgaggcttgcagcatggacaccaactaatgctgactccacgatcctgccaccctgtagcgccagtgtaatcccccaggagaacatctttgacactctgcagactgctagtgttctgtctaaaaaccagacaaggaaatacccttcttttatgagcagaaggaaacaaaaaaaaaaaagaagaccgtttacctagaagaagctatgtcaagaggctgaattatttttatttttaaacaggtggtgagaaatttctgtgaaacctgtgaagctgaaaagggggtgggatgggggtactcaatggagtatgtctgatggatcccgaagaatggagaggaacacaggcgctgagtatggagcagcctggagacccaccccacctgcagggctgccctgagcgcctggatttctggttctgatgccaatactagtcaccccaagtagtctgctcacagtaacccaaacctcaagtaaactcccctttccctcgctatgtgcactgatatgggtttataattttctgaaagttacccactgaagcccatttctccgttgagtcatcttgtaatttccagctttctccccgctaaggaagatatctagtgttggggatcctggcccctcaacctcctgtggaacccagcagttctgttatatcccctgctaccctagatgaattaagacggttaaatactgtgtggaacttttattagataacacactttttattagataacgcttaaaggaagtcagtacataaaactgcccggtgctgtgtcccgtctagttgtttccatgttggcttgagaacagaaatctttgtgggagttagccgggaaagggctccagttcatggcgatttagggtagtaatacattttggtgttacccagatgctttctagaacgggttctttcctcatccctgccaagactcttcccggggcccccattcgaaagccccgtccccactcccaccgcggggccagccgctgcgtgtgggcaaggccttaaggaaccggacgtatgggtccgggattttttgtctgaccttcaacctaatccgtgggggtttggggcctgcgcggggcacgcgcatgcgatgaccgttggatgggtcggcgtcactgcgctgcgggtgaggacaaggacgtggctgccgactcgccaaagggggggtg

SEQ ID NO: 15025 - DNA, 3948 bp, Homo sapiens
ctacaacacaccattgagtcttggtcccaaggcgctggtgcacatggtacttcccgaaatccctgtagggccgctggagcaggagccccgatcccacgtttgggcagctgactcgcctaaggcctccagctgaaagcggaattgcaggggtatcttattgacagccggtggttcaagcagtggaagaagtatgtgggctttgacagctgggacatgtacaatgtgggtgaacataacctatttcctggcccaatagacaactctgggctattttcagatcctgagagtcagaccttgaaagaacacttaattgatgaattggactatgtattggtccctaccgaggcgtggaataaactactaaactggtacggctgtgtagaaggccagcaacccatcgtcagaaaagttgtggagcatggcctgtttgtcaagcactgcaaagtcgaggtgtatttgctggaactgaagctctgtgagaacagtgaccccaccaatgtgctgagttgccatttcagcaaggcagacaccattgcaaccatcgagaaagagatgcggaagctattcaacatccctgcggagcgtgaaacacggctctggaacaaatacatgagcaacacctacgagcagttgagcaagctagacaacactgtccaggatgctgggctataccagggtcaggtgctagtaattgagcctcaaaatgaagatggcacatggcccaggcagaccttgcagtcaaatggatctggcttttctgcttcgtataattgtcaggagccaccatcctctcatatacaacctgggctctgtggacttggaaacctgggaaacacctgcttcatgaactccgctttgcagtgtttgagcaacactgcaccactgactgactactttctcaaagatgagtatgaagccgaaatcaacagagacaaccctctggggatgaaaggggaaattgcagaagcctatgctgaactcattaagcagatgtggtctggaagggacgcccatgtggcacctcgcatgttcaaaactcaagtaggacgttttgctcctcaattttctggctaccagcaacaagattctcaggagctgctggcctttcttctagatggattgcatgaagatctgaaccgggtaaagaaaaagccctacttggagctgaaggatgccaatgggcggccagatgcggtggtggcaaaggaagcctgggagaatcacaggttgaggaatgattctgtgattgtggatactttccatggcctcttcaaatctactttggtttgcccagaatgtgctaaggtttctgtgacctttgacccattttgctatctaacgctgccactgcccttgaagaaagatcgagttatggaggttttcctggttcctgctgaccctcactgcagacctactcagtaccgtgtgactgtgccgctgatgggggctgtgtccgacctgtgcgaggctctctccaggctgtctggcattgctgcagaaaatatggtggtcgcagatgtgtataatcaccgattccacaaaattttccaaatggatgaaggtttaaaccacatcatgcctcgggatgacattttcgtgtacgaggtctgcagcacttccgtggatggctcggaatgtgtcacgcttccagtctacttcagggagaggaagtccaggccatcaagcacttcctccgcatcagcgctatatgggcagccactattgctttctgtccccaagcacaagttaacccttgagtctttgtaccaggctgtttgtgatcgtatcagccgctatgtgaaacagcctttacctgatgagtttggcagctcacccttggagccaggggcctgcaatggctccaggaacagctgtgaaggagaagatgaggaagaaatggagcatcaggaagaaggcaaagagcagctttcagaaacagaaggcagtggggaagatgagccaggaaatgaccccagtgagaccacccaaaagaagatcaaaggccagccctgcccaaaaaggctttttaccttcagtcttgtgaactcctatggaacagctgacataaattcacttgcagctgatggaaaactacttaaactcaactctcgatctacactggccatggattgggacagtgaaactcggagactttactatgatgagcaagaatctgaggcctacgagaagcatgtgagcatgttgcagcctcagaagaagaagaagaccacagtggccctgagagactgcatcgagctcttcaccaccatggagacccttggggagcatgacccctggtactgtcccaactgtaagaagcatcaacaggccacaaaaaagtttgacctatggtccttgcccaagatcctggtggtccacctcaaacgtttctcctacaacagatactggagggataagctcgacacagtcgtagaattcccaatcagagggctgaacatgtccgagtttgtctgtaacctgtcagcaaggccttatgtgtacgacctcattgccgtgtccaatcattatggagccatgggggttggccactacactgcatatgcgaagaacaaactgaatggtaaatggtattactttgatgatagcaacgtgtccctggcctctgaggatcagatagtgactaaagcagcttatgtgctattttaccaacgtcgagatgatgaattttataagacaccttcacttagcagttctggttcctctgatggagggacacgaccaagcagctctcagcagggctttggggatgatgaggcttgcagcatggacaccaactaatgctgactccacgatcctgccaccctgtagcgccagtgtaatcccccaggagaacatctttgacactctgcagactgctagtgttctgtctaaaaaccagacaaggaaatacccttcttttatgagcagaaggaaacaaaaaaaaaaaagaagaccgtttacctagaagaagctatgtcaagaggctgaattatttttatttttaaacaggtggtgagaaatttctgtgaaacctgtgaagctgaaaagggggtgggatgggggtactcaatggagtatgtctgatggatcccgaagaatggagaggaacacaggcgctgagtatggagcagcctggagacccaccccacctgcagggctgccctgagcgcctggatttctggttctgatgccaatactagtcaccccaagtagtctgctcacagtaacccaaacctcaagtaaactcccctttccctcgctatgtgcactgatatgggtttataattttctgaaagttacccactgaagcccatttctccgttgagtcatcttgtaatttccagctttctccccgctaaggaagatatctagtgttggggatcctggcccctcaacctcctgtggaacccagcagttctgttatatcccctgctaccctagatgaattaagacggttaaatactgtgtggaacttttattagataacacactttttattagataacgcttaaaggaagtcagtacataaaactgcccggtgctgtgtcccgtctagttgtttccatgttggcttgagaacagaaatctttgtgggagttagccgggaaagggctccagttcatggcgatttagggtagtaatacattttggtgttacccagatgctttctagaacgggttctttcctcatccctgccaagactcttcccggggcccccattcgaaagccccgtccccactcccaccgcggggccagccgctgcgtgtgggcaaggccttaaggaaccggacgtatgggtccgggattttttgtctgaccttcaacctaatccgtgggggtttggggcctgcgcggggcacgcgcatgcgatgaccgttggatgggtcggcgtcactgcgctgcgggtgaggacaaggacgtggctgccgactcgccaaagggggggtg

SEQ ID NO: 15026 - DNA, 4176 bp, Homo sapiens
agcgtgcgtgcgtgggcgcggtctatagcacgccgcgcgcggggcggatgtccgggccggctgggccggggccgcggaggagatggcggaaggtggaggctgccgtgagcgaccggatgcggagactcagaagtccgagcttggacccttaatgaggaccacactccaacgcggggcgcagtggtatcttattgacagccggtggttcaagcagtggaagaagtatgtgggctttgacagctgggacatgtacaatgtgggtgaacataacctatttcctggcccaatagacaactctgggctattttcagatcctgagagtcagaccttgaaagaacacttaattgatgaattggactatgtattggtccctaccgaggcgtggaataaactactaaactggtacggctgtgtagaaggccagcaacccatcgtcagaaaagttgtggagcatggcctgtttgtcaagcactgcaaagtcgaggtgtatttgctggaactgaagctctgtgagaacagtgaccccaccaatgtgctgagttgccatttcagcaaggcagacaccattgcaaccatcgagaaagagatgcggaagctattcaacatccctgcggagcgtgaaacacggctctggaacaaatacatgagcaacacctacgagcagttgagcaagctagacaacactgtccaggatgctgggctataccagggtcaggtgctagtaattgagcctcaaaatgaagatggcacatggcccaggcagaccttgcagtcaaaatcaagcactgcgcctagcagaaattttactacctctccaaaatcatcagcaagtccctattcctcagtgtctgcctctctcattgcaaatggtgatagcactagcacctgtgggatgcacagttccggtgtcagcaggggtggatctggcttttctgcttcgtataattgtcaggagccaccatcctctcatatacaacctgggctctgtggacttggaaacctgggaaacacctgcttcatgaactccgctttgcagtgtttgagcaacactgcaccactgactgactactttctcaaagatgagtatgaagccgaaatcaacagagacaaccctctggggatgaaaggggaaattgcagaagcctatgctgaactcattaagcagatgtggtctggaagggacgcccatgtggcacctcgcatgttcaaaactcaagtaggacgttttgctcctcaattttctggctaccagcaacaagattctcaggagctgctggcctttcttctagatggattgcatgaagatctgaaccgggtaaagaaaaagccctacttggagctgaaggatgccaatgggcggccagatgcggtggtggcaaaggaagcctgggagaatcacaggttgaggaatgattctgtgattgtggatactttccatggcctcttcaaatctactttggtttgcccagaatgtgctaaggtttctgtgacctttgacccattttgctatctaacgctgccactgcccttgaagaaagatcgagttatggaggttttcctggttcctgctgaccctcactgcagacctactcagtaccgtgtgactgtgccgctgatgggggctgtgtccgacctgtgcgaggctctctccaggctgtctggcattgctgcagaaaatatggtggtcgcagatgtgtataatcaccgattccacaaaattttccaaatggatgaaggtttaaaccacatcatgcctcgggatgacattttcgtgtacgaggtctgcagcacttccgtggatggctcggaatgtgtcacgcttccagtctacttcagggagaggaagtccaggccatcaagcacttcctccgcatcagcgctatatgggcagccactattgctttctgtccccaagcacaagctggagtgcagtggcacgatctcggctcactgcaccctctacctcccaggttcaagtgattctgctgcctcagcctcccaagtagctgggattacagccgctatgtgaaacagcctttacctgatgagtttggcagctcacccttggagccaggggcctgcaatggctccaggaacagctgtgaaggagaagatgaggaagaaatggagcatcaggaagaaggcaaagagcagctttcagaaacagaaggcagtggggaagatgagccaggaaatgaccccagtgagaccacccaaaagaagatcaaaggccagccctgcccaaaaaggctttttaccttcagtcttgtgaactcctatggaacagctgacataaattcacttgcagctgatggaaaactacttaaactcaactctcgatctacactggccatggattgggacagtgaaactcggagactttactatgatgagcaagaatctgaggcctacgagaagcatgtgagcatgttgcagcctcagaagaagaagaagaccacagtggccctgagagactgcatcgagctcttcaccaccatggagacccttggggagcatgacccctggtactgtcccaactgtaagaagcatcaacaggccacaaaaaagtttgacctatggtccttgcccaagatcctggtggtccacctcaaacgtttctcctacaacagatactggagggataagctcgacacagtcgtagaattcccaatcagagggctgaacatgtccgagtttgtctgtaacctgtcagcaaggccttatgtgtacgacctcattgccgtgtccaatcattatggagccatgggggttggccactacactgcatatgcgaagaacaaactgaatggtaaatggtattactttgatgatagcaacgtgtccctggcctctgaggatcagatagtgactaaagcagcttatgtgctattttaccaacgtcgagatgatgaattttataagacaccttcacttagcagttctggttcctctgatggagggacacgaccaagcagctctcagcagggctttggggatgatgaggcttgcagcatggacaccaactaatgctgactccacgatcctgccaccctgtagcgccagtgtaatcccccaggagaacatctttgacactctgcagactgctagtgttctgtctaaaaaccagacaaggaaatacccttcttttatgagcagaaggaaacaaaaaaaaaaaagaagaccgtttacctagaagaagctatgtcaagaggctgaattatttttatttttaaacaggtggtgagaaatttctgtgaaacctgtgaagctgaaaagggggtgggatgggggtactcaatggagtatgtctgatggatcccgaagaatggagaggaacacaggcgctgagtatggagcagcctggagacccaccccacctgcagggctgccctgagcgcctggatttctggttctgatgccaatactagtcaccccaagtagtctgctcacagtaacccaaacctcaagtaaactcccctttccctcgctatgtgcactgatatgggtttataattttctgaaagttacccactgaagcccatttctccgttgagtcatcttgtaatttccagctttctccccgctaaggaagatatctagtgttggggatcctggcccctcaacctcctgtggaacccagcagttctgttatatcccctgctaccctagatgaattaagacggttaaatactgtgtggaacttttattagataacacactttttattagataacgcttaaaggaagtcagtacataaaactgcccggtgctgtgtcccgtctagttgtttccatgttggcttgagaacagaaatctttgtgggagttagccgggaaagggctccagttcatggcgatttagggtagtaatacattttggtgttacccagatgctttctagaacgggttctttcctcatccctgccaagactcttcccggggcccccattcgaaagccccgtccccactcccaccgcggggccagccgctgcgtgtgggcaaggccttaaggaaccggacgtatgggtccgggattttttgtctgaccttcaacctaatccgtgggggtttggggcctgcgcggggcacgcgcatgcgatgaccgttggatgggtcggcgtcactgcgctgcgggtgaggacaaggacgtggctgccgactcgccaaagggggggtg

SEQ ID NO: 15027 - DNA, 3635 bp, Homo sapiens
actaatgaggaccaccttgtaatttctgggcattttcagagttttctcttccatgtgaattgctccagctaacttaatattagtttctcaagggtttgtgtagacctggctttgtctctttccatctgtttctctctttccctttaacgtcacttgcctgaggtctataaggccctttaaggttgccagcccagagccagaagagattggtgtccctgaagttaagaaagccacctttgcctacagatggtgttcacagtgttggtgtggagtcacagcttgacttttgatcaagcactgcgcctagcagaaattttactacctctccaaaatcatcagcaagtccctattcctcagtgtctgcctctctcattgcaaatggtgatagcactagcacctgtgggatgcacagttccggtgtcagcaggggtggatctggcttttctgcttcgtataattgtcaggagccaccatcctctcatatacaacctgggctctgtggacttggaaacctgggaaacacctgcttcatgaactccgctttgcagtgtttgagcaacactgcaccactgactgactactttctcaaagatgagtatgaagccgaaatcaacagagacaaccctctggggatgaaaggggaaattgcagaagcctatgctgaactcattaagcagatgtggtctggaagggacgcccatgtggcacctcgcatgttcaaaactcaagtaggacgttttgctcctcaattttctggctaccagcaacaagattctcaggagctgctggcctttcttctagatggattgcatgaagatctgaaccgggtaaagaaaaagccctacttggagctgaaggatgccaatgggcggccagatgcggtggtggcaaaggaagcctgggagaatcacaggttgaggaatgattctgtgattgtggatactttccatggcctcttcaaatctactttggtttgcccagaatgtgctaaggtttctgtgacctttgacccattttgctatctaacgctgccactgcccttgaagaaagatcgagttatggaggttttcctggttcctgctgaccctcactgcagacctactcagtaccgtgtgactgtgccgctgatgggggctgtgtccgacctgtgcgaggctctctccaggctgtctggcattgctgcagaaaatatggtggtcgcagatgtgtataatcaccgattccacaaaattttccaaatggatgaaggtttaaaccacatcatgcctcgggatgacattttcgtgtacgaggtctgcagcacttccgtggatggctcggaatgtgtcacgcttccagtctacttcagggagaggaagtccaggccatcaagcacttcctccgcatcagcgctatatgggcagccactattgctttctgtccccaagcacaagttaacccttgagtctttgtaccaggctgtttgtgatcgtatcagccgctatgtgaaacagcctttacctgatgagtttggcagctcacccttggagccaggggcctgcaatggctccaggaacagctgtgaaggagaagatgaggaagaaatggagcatcaggaagaaggcaaagagcagctttcagaaacagaaggcagtggggaagatgagccaggaaatgaccccagtgagaccacccaaaagaagatcaaaggccagccctgcccaaaaaggctttttaccttcagtcttgtgaactcctatggaacagctgacataaattcacttgcagctgatggaaaactacttaaactcaactctcgatctacactggccatggattgggacagtgaaactcggagactttactatgatgagcaagaatctgaggcctacgagaagcatgtgagcatgttgcagcctcagaagaagaagaagaccacagtggccctgagagactgcatcgagctcttcaccaccatggagacccttggggagcatgacccctggtactgtcccaactgtaagaagcatcaacaggccacaaaaaagtttgacctatggtccttgcccaagatcctggtggtccacctcaaacgtttctcctacaacagatactggagggataagctcgacacagtcgtagaattcccaatcagagggctgaacatgtccgagtttgtctgtaacctgtcagcaaggccttatgtgtacgacctcattgccgtgtccaatcattatggagccatgggggttggccactacactgcatatgcgaagaacaaactgaatggtaaatggtattactttgatgatagcaacgtgtccctggcctctgaggatcagatagtgactaaagcagcttatgtgctattttaccaacgtcgagatgatgaattttataagacaccttcacttagcagttctggttcctctgatggagggacacgaccaagcagctctcagcagggctttggggatgatgaggcttgcagcatggacaccaactaatgctgactccacgatcctgccaccctgtagcgccagtgtaatcccccaggagaacatctttgacactctgcagactgctagtgttctgtctaaaaaccagacaaggaaatacccttcttttatgagcagaaggaaacaaaaaaaaaaaagaagaccgtttacctagaagaagctatgtcaagaggctgaattatttttatttttaaacaggtggtgagaaatttctgtgaaacctgtgaagctgaaaagggggtgggatgggggtactcaatggagtatgtctgatggatcccgaagaatggagaggaacacaggcgctgagtatggagcagcctggagacccaccccacctgcagggctgccctgagcgcctggatttctggttctgatgccaatactagtcaccccaagtagtctgctcacagtaacccaaacctcaagtaaactcccctttccctcgctatgtgcactgatatgggtttataattttctgaaagttacccactgaagcccatttctccgttgagtcatcttgtaatttccagctttctccccgctaaggaagatatctagtgttggggatcctggcccctcaacctcctgtggaacccagcagttctgttatatcccctgctaccctagatgaattaagacggttaaatactgtgtggaacttttattagataacacactttttattagataacgcttaaaggaagtcagtacataaaactgcccggtgctgtgtcccgtctagttgtttccatgttggcttgagaacagaaatctttgtgggagttagccgggaaagggctccagttcatggcgatttagggtagtaatacattttggtgttacccagatgctttctagaacgggttctttcctcatccctgccaagactcttcccggggcccccattcgaaagccccgtccccactcccaccgcggggccagccgctgcgtgtgggcaaggccttaaggaaccggacgtatgggtccgggattttttgtctgaccttcaacctaatccgtgggggtttggggcctgcgcggggcacgcgcatgcgatgaccgttggatgggtcggcgtcactgcgctgcgggtgaggacaaggacgtggctgccgactcgccaaagggggggtg

SEQ ID NO: 15028 - DNA, 3788 bp, Homo sapiens
agcgtgcgtgcgtgggcgcggtctatagcacgccgcgcgcggggcggatgtccgggccggctgggccggggccgcggaggagatggcggaaggtggaggctgccgtgagcgaccggatgcggagactcagaagtccgagcttggacccttaatgaggaccacactccaacgcggggcgcagtggtatcttattgacagccggtggttcaagcagtggaagaagtatgtgggctttgacagctgggacatgtacaatgtgggtgaacataacctatttcctggcccaatagacaactctgggctattttcagatcctgagagtcagaccttgaaagaacacttaattgatgaattggactatgtattggtccctaccgaggcgtggaataaactactaaactggtacggctgtgtagaaggccagcaacccatcgtcagaaaagttgtggagcatggcctgtttgtcaagcactgcaaagtcgaggtgtatttgctggaactgaagctctgtgagaacagtgaccccaccaatgtgctgagttgccatttcagcaaggcagacaccattgcaaccatcgagaaagagatgcggaagctattcaacatccctgcggagcgtgaaacacggctctggaacaaatacatgagcaacacctacgagcagttgagcaagctagacaacactgtccaggatgctgggctataccagggtcaggtgctagtaattgagcctcaaaatgaagatggcacatggcccaggcagaccttgcagtcaaaatcaagcactgcgcctagcagaaattttactacctctccaaaatcatcagcaagtccctattcctcagtgtctgcctctctcattgcaaatggtgatagcactagcacctgtgggatgcacagttccggtgtcagcaggggtggatctggcttttctgcttcgtataattgtcaggagccaccatcctctcatatacaacctgggctctgtggacttggaaacctgggaaacacctgcttcatgaactccgctttgcagtgtttgagcaacactgcaccactgactgactactttctcaaagatgagtatgaagccgaaatcaacagagacaaccctctggggatgaaaggggaaattgcagaagcctatgctgaactcattaagcagatgtggtctggaagggacgcccatgtggcacctcgcatgttcaaaactcaagtaggacgttttgctcctcaattttctggctaccagcaacaagattctcaggagctgctggcctttcttctagatggattgcatgaagatctgaaccgggtaaagaaaaagccctacttggagctgaaggatgccaatgggcggccagatgcggtggtggcaaaggaagcctgggagaatcacaggttgaggaatgattctgtgattgtggatactttccatggcctcttcaaatctactttggtttgcccagaatgtgctaaggtttctgtgacctttgacccattttgctatctaacgctgccactgcccttgaagaaagatcgagttatggaggttttcctggttcctgctgaccctcactgcagacctactcagtaccgtgtgactgtgccgctgatgggggctgtgtccgacctgtgcgaggctctctccaggctgtctggcattgctgcagaaaatatggtggtcgcagatgtgtataatcaccgattccacaaaattttccaaatggatgaaggtttaaaccacatcatgcctcgggatgacattttcgtgtacgaggtctgcagcacttccgtggatggctcggaatgtgtcacgcttccagtctacttcagggagaggaagtccaggccatcaagcacttcctccgcatcagcgctatatgggcagccactattgctttctgtccccaagcacaagttaacccttgagtctttgtaccaggctgtttgtgatcgtatcagccgctatgtgaaacagcctttacctgatgagtttggcagctcacccttggagccaggggcctgcaatggctccaggaacagctgtgaagaagaagaagaagaccacagtggccctgagagactgcatcgagctcttcaccaccatggagacccttggggagcatgacccctggtactgtcccaactgtaagaagcatcaacaggccacaaaaaagtttgacctatggtccttgcccaagatcctggtggtccacctcaaacgtttctcctacaacagatactggagggataagctcgacacagtcgtagaattcccaatcagagggctgaacatgtccgagtttgtctgtaacctgtcagcaaggccttatgtgtacgacctcattgccgtgtccaatcattatggagccatgggggttggccactacactgcatatgcgaagaacaaactgaatggtaaatggtattactttgatgatagcaacgtgtccctggcctctgaggatcagatagtgactaaagcagcttatgtgctattttaccaacgtcgagatgatgaattttataagacaccttcacttagcagttctggttcctctgatggagggacacgaccaagcagctctcagcagggctttggggatgatgaggcttgcagcatggacaccaactaatgctgactccacgatcctgccaccctgtagcgccagtgtaatcccccaggagaacatctttgacactctgcagactgctagtgttctgtctaaaaaccagacaaggaaatacccttcttttatgagcagaaggaaacaaaaaaaaaaaagaagaccgtttacctagaagaagctatgtcaagaggctgaattatttttatttttaaacaggtggtgagaaatttctgtgaaacctgtgaagctgaaaagggggtgggatgggggtactcaatggagtatgtctgatggatcccgaagaatggagaggaacacaggcgctgagtatggagcagcctggagacccaccccacctgcagggctgccctgagcgcctggatttctggttctgatgccaatactagtcaccccaagtagtctgctcacagtaacccaaacctcaagtaaactcccctttccctcgctatgtgcactgatatgggtttataattttctgaaagttacccactgaagcccatttctccgttgagtcatcttgtaatttccagctttctccccgctaaggaagatatctagtgttggggatcctggcccctcaacctcctgtggaacccagcagttctgttatatcccctgctaccctagatgaattaagacggttaaatactgtgtggaacttttattagataacacactttttattagataacgcttaaaggaagtcagtacataaaactgcccggtgctgtgtcccgtctagttgtttccatgttggcttgagaacagaaatctttgtgggagttagccgggaaagggctccagttcatggcgatttagggtagtaatacattttggtgttacccagatgctttctagaacgggttctttcctcatccctgccaagactcttcccggggcccccattcgaaagccccgtccccactcccaccgcggggccagccgctgcgtgtgggcaaggccttaaggaaccggacgtatgggtccgggattttttgtctgaccttcaacctaatccgtgggggtttggggcctgcgcggggcacgcgcatgcgatgaccgttggatgggtcggcgtcactgcgctgcgggtgaggacaaggacgtggctgccgactcgccaaagggggggtg

SEQ ID NO: 15029 - DNA, 2043 bp, Homo sapiens
gcatagtcgttctagagtatcccccattgtttgacaggcagtggggaagatgagccaggaaatgaccccagtgagaccacccaaaagaagatcaaaggccagccctgcccaaaaaggctttttaccttcagtcttgtgaactcctatggaacagctgacataaattcacttgcagctgatggaaaactacttaaactcaactctcgatctacactggccatggattgggacagtgaaactcggagactttactatgatgagcaagaatctgaggcctacgagaagcatgtgagcatgttgcagcctcagaagaagaagaagaccacagtggccctgagagactgcatcgagctcttcaccaccatggagacccttggggagcatgacccctggtactgtcccaactgtaagaagcatcaacaggccacaaaaaagtttgacctatggtccttgcccaagatcctggtggtccacctcaaacgtttctcctacaacagatactggagggataagctcgacacagtcgtagaattcccaatcagagggctgaacatgtccgagtttgtctgtaacctgtcagcaaggccttatgtgtacgacctcattgccgtgtccaatcattatggagccatgggggttggccactacactgcatatgcgaagaacaaactgaatggtaaatggtattactttgatgatagcaacgtgtccctggcctctgaggatcagatagtgactaaagcagcttatgtgctattttaccaacgtcgagatgatgaattttataagacaccttcacttagcagttctggttcctctgatggagggacacgaccaagcagctctcagcagggctttggggatgatgaggcttgcagcatggacaccaactaatgctgactccacgatcctgccaccctgtagcgccagtgtaatcccccaggagaacatctttgacactctgcagactgctagtgttctgtctaaaaaccagacaaggaaatacccttcttttatgagcagaaggaaacaaaaaaaaaaaagaagaccgtttacctagaagaagctatgtcaagaggctgaattatttttatttttaaacaggtggtgagaaatttctgtgaaacctgtgaagctgaaaagggggtgggatgggggtactcaatggagtatgtctgatggatcccgaagaatggagaggaacacaggcgctgagtatggagcagcctggagacccaccccacctgcagggctgccctgagcgcctggatttctggttctgatgccaatactagtcaccccaagtagtctgctcacagtaacccaaacctcaagtaaactcccctttccctcgctatgtgcactgatatgggtttataattttctgaaagttacccactgaagcccatttctccgttgagtcatcttgtaatttccagctttctccccgctaaggaagatatctagtgttggggatcctggcccctcaacctcctgtggaacccagcagttctgttatatcccctgctaccctagatgaattaagacggttaaatactgtgtggaacttttattagataacacactttttattagataacgcttaaaggaagtcagtacataaaactgcccggtgctgtgtcccgtctagttgtttccatgttggcttgagaacagaaatctttgtgggagttagccgggaaagggctccagttcatggcgatttagggtagtaatacattttggtgttacccagatgctttctagaacgggttctttcctcatccctgccaagactcttcccggggcccccattcgaaagccccgtccccactcccaccgcggggccagccgctgcgtgtgggcaaggccttaaggaaccggacgtatgggtccgggattttttgtctgaccttcaacctaatccgtgggggtttggggcctgcgcggggcacgcgcatgcgatgaccgttggatgggtcggcgtcactgcgctgcgggtgaggacaaggacgtggctgccgactcgccaaagggggggtg

SEQ ID NO: 15030 - DNA, 4034 bp, Homo sapiens
agcgtgcgtgcgtgggcgcggtctatagcacgccgcgcgcggggcggatgtccgggccggctgggccggggccgcggaggagatggcggaaggtggaggctgccgtgagcgaccggatgcggagactcagaagtccgagcttggacccttaatgaggaccacactccaacgcggggcgcagtggtatcttattgacagccggtggttcaagcagtggaagaagtatgtgggctttgacagctgggacatgtacaatgtgggtgaacataacctatttcctggcccaatagacaactctgggctattttcagatcctgagagtcagaccttgaaagaacacttaattgatgaattggactatgtattggtccctaccgaggcgtggaataaactactaaactggtacggctgtgtagaaggccagcaacccatcgtcagaaaagttgtggagcatggcctgtttgtcaagcactgcaaagtcgaggtgtatttgctggaactgaagctctgtgagaacagtgaccccaccaatgtgctgagttgccatttcagcaaggcagacaccattgcaaccatcgagaaagagatgcggaagctattcaacatccctgcggagcgtgaaacacggctctggaacaaatacatgagcaacacctacgagcagttgagcaagctagacaacactgtccaggatgctgggctataccagggtcaggtgctagtaattgagcctcaaaatgaagatggcacatggcccaggcagaccttgcagtcaaaatcaagcactgcgcctagcagaaattttactacctctccaaaatcatcagcaagtccctattcctcagtgtctgcctctctcattgcaaatggtgatagcactagcacctgtgggatgcacagttccggtgtcagcaggggtggatctggcttttctgcttcgtataattgtcaggagccaccatcctctcatatacaacctgggctctgtggacttggaaacctgggaaacacctgcttcatgaactccgctttgcagtgtttgagcaacactgcaccactgactgactactttctcaaagatgagtatgaagccgaaatcaacagagacaaccctctggggatgaaaggggaaattgcagaagcctatgctgaactcattaagcagatgtggtctggaagggacgcccatgtggcacctcgcatgttcaaaactcaagtaggacgttttgctcctcaattttctggctaccagcaacaagattctcaggagctgctggcctttcttctagatggattgcatgaagatctgaaccgggtaaagaaaaagccctacttggagctgaaggatgccaatgggcggccagatgcggtggtggcaaaggaagcctgggagaatcacaggttgaggaatgattctgtgattgtggatactttccatggcctcttcaaatctactttggtttgcccagaatgtgctaaggtttctgtgacctttgacccattttgctatctaacgctgccactgcccttgaagaaagatcgagttatggaggttttcctggttcctgctgaccctcactgcagacctactcagtaccgtgtgactgtgccgctgatgggggctgtgtccgacctgtgcgaggctctctccaggctgtctggcattgctgcagaaaatatggtggtcgcagatgtgtataatcaccgattccacaaaattttccaaatggatgaaggtttaaaccacatcatgcctcgggatgacattttcgtgtacgaggtctgcagcacttccgtggatggctcggaatgtgtcacgcttccagtctacttcagggagaggaagtccaggccatcaagcacttcctccgcatcagcgctatatgggcagccactattgctttctgtccccaagcacaagttaacccttgagtctttgtaccaggctgtttgtgatcgtatcagccgctatgtgaaacagcctttacctgatgagtttggcagctcacccttggagccaggggcctgcaatggctccaggaacagctgtgaaggagaagatgaggaagaaatggagcatcaggaagaaggcaaagagcagctttcagaaacagaaggcagtggggaagatgagccaggaaatgaccccagtgagaccacccaaaagaagatcaaaggccagccctgcccaaaaaggctttttaccttcagtcttgtgaactcctatggaacagctgacataaattcacttgcagctgatggaaaactacttaaactcaactctcgatctacactggccatggattgggacagtgaaactcggagactttactatgatgagcaagaatctgaggcctacgagaagcatgtgagcatgttgcagcctcagaagaagaagaagaccacagtggccctgagagactgcatcgagctcttcaccaccatggagacccttggggagcatgacccctggtactgtcccaactgtaagaagcatcaacaggccacaaaaaagtttgacctatggtccttgcccaagatcctggtggtccacctcaaacgtttctcctacaacagatactggagggataagctcgacacagtcgtagaattcccaatcagagggctgaacatgtccgagtttgtctgtaacctgtcagcaaggccttatgtgtacgacctcattgccgtgtccaatcattatggagccatgggggttggccactactaaagcagcttatgtgctattttaccaacgtcgagatgatgaattttataagacaccttcacttagcagttctggttcctctgatggagggacacgaccaagcagctctcagcagggctttggggatgatgaggcttgcagcatggacaccaactaatgctgactccacgatcctgccaccctgtagcgccagtgtaatcccccaggagaacatctttgacactctgcagactgctagtgttctgtctaaaaaccagacaaggaaatacccttcttttatgagcagaaggaaacaaaaaaaaaaaagaagaccgtttacctagaagaagctatgtcaagaggctgaattatttttatttttaaacaggtggtgagaaatttctgtgaaacctgtgaagctgaaaagggggtgggatgggggtactcaatggagtatgtctgatggatcccgaagaatggagaggaacacaggcgctgagtatggagcagcctggagacccaccccacctgcagggctgccctgagcgcctggatttctggttctgatgccaatactagtcaccccaagtagtctgctcacagtaacccaaacctcaagtaaactcccctttccctcgctatgtgcactgatatgggtttataattttctgaaagttacccactgaagcccatttctccgttgagtcatcttgtaatttccagctttctccccgctaaggaagatatctagtgttggggatcctggcccctcaacctcctgtggaacccagcagttctgttatatcccctgctaccctagatgaattaagacggttaaatactgtgtggaacttttattagataacacactttttattagataacgcttaaaggaagtcagtacataaaactgcccggtgctgtgtcccgtctagttgtttccatgttggcttgagaacagaaatctttgtgggagttagccgggaaagggctccagttcatggcgatttagggtagtaatacattttggtgttacccagatgctttctagaacgggttctttcctcatccctgccaagactcttcccggggcccccattcgaaagccccgtccccactcccaccgcggggccagccgctgcgtgtgggcaaggccttaaggaaccggacgtatgggtccgggattttttgtctgaccttcaacctaatccgtgggggtttggggcctgcgcggggcacgcgcatgcgatgaccgttggatgggtcggcgtcactgcgctgcgggtgaggacaaggacgtggctgccgactcgccaaagggggggtg

SEQ ID NO: 15031 - DNA, 3992 bp, Homo sapiens
agcgtgcgtgcgtgggcgcggtctatagcacgccgcgcgcggggcggatgtccgggccggctgggccggggccgcggaggagatggcggaaggtggaggctgccgtgagcgaccggatgcggagactcagaagtccgagcttggacccttaatgaggaccacactccaacgcggggcgcagtggtatcttattgacagccggtggttcaagcagtggaagaagtatgtgggctttgacagctgggacatgtacaatgtgggtgaacataacctatttcctggcccaatagacaactctgggctattttcagatcctgagagtcagaccttgaaagaacacttaattgatgaattggactatgtattggtccctaccgaggcgtggaataaactactaaactggtacggctgtgtagaaggccagcaacccatcgtcagaaaagttgtggagcatggcctgtttgtcaagcactgcaaagtcgaggtgtatttgctggaactgaagctctgtgagaacagtgaccccaccaatgtgctgagttgccatttcagcaaggcagacaccattgcaaccatcgagaaagagatgcggaagctattcaacatccctgcggagcgtgaaacacggctctggaacaaatacatgagcaacacctacgagcagttgagcaagctagacaacactgtccaggatgctgggctataccagggtcaggtgctagtaattgagcctcaaaatgaagatggcacatggcccaggcagaccttgcagtcaaaatcaagcactgcgcctagcagaaattttactacctctccaaaatcatcagcaagtccctattcctcagtgtctgcctctctcattgcaaatggtgatagcactagcacctgtgggatgcacagttccggtgtcagcaggggtggatctggcttttctgcttcgtataattgtcaggagccaccatcctctcatatacaacctgggctctgtggacttggaaacctgggaaacacctgcttcatgaactccgctttgcagtgtttgagcaacactgcaccactgactgactactttctcaaagatgagtatgaagccgaaatcaacagagacaaccctctggggatgaaaggggaaattgcagaagcctatgctgaactcattaagcagatgtggtctggaagggacgcccatgtggcacctcgcatgttcaaaactcaagtaggacgttttgctcctcaattttctggctaccagcaacaagattctcaggagctgctggcctttcttctagatggattgcatgaagatctgaaccgggtaaagaaaaagccctacttggagctgaaggatgccaatgggcggccagatgcggtggtggcaaaggaagcctgggagaatcacaggttgaggaatgattctgtgattgtggatactttccatggcctcttcaaatctactttggtttgcccagaatgtgctaaggtttctgtgacctttgacccattttgctatctaacgctgccactgcccttgaagaaagatcgagttatggaggttttcctggttcctgctgaccctcactgcagacctactcagtaccgtgtgactgtgccgctgatgggggctgtgtccgacctgtgcgaggctctctccaggctgtctggcattgctgcagaaaatatggtggtcgcagatgtgtataatcaccgattccacaaaattttccaaatggatgaaggtttaaaccacatcatgcctcgggatgacattttcgtgtacgaggtctgcagcacttccgtggatggctcggaatgtgtcacgcttccagtctacttcagggagaggaagtccaggccatcaagcacttcctccgcatcagcgctatatgggcagccactattgctttctgtccccaagcacaagttaacccttgagtctttgtaccaggctgtttgtgatcgtatcagccgctatgtgaaacagcctttacctgatgagtttggcagctcacccttggagccaggggcctgcaatggctccaggaacagctgtgaaggagaagatgaggaagaaatggagcatcaggaagaaggcaaagagcagctttcagaaacagaaggcagtggggaagatgagccaggaaatgaccccagtgagaccacccaaaagaagatcaaaggccagccctgcccaaaaaggctttttaccttcagtcttgtgaactcctatggaacagctgacataaattcacttgcagctgatggaaaactacttaaactcaactctcgatctacactggccatggattgggacagtgaaactcggagactttactatgatgagcaagaatctgaggcctacgagaagcatgtgagcatgttgcagcctcagaagaagaagaagaccacagtggccctgagagactgcatcgagctcttcaccaccatggagacccttggggagcatgacccctggtacgcagctcctcactgtagggctgaacatgtccgagtttgtctgtaacctgtcagcaaggccttatgtgtacgacctcattgccgtgtccaatcattatggagccatgggggttggccactacactgcatatgcgaagaacaaactgaatggtaaatggtattactttgatgatagcaacgtgtccctggcctctgaggatcagatagtgactaaagcagcttatgtgctattttaccaacgtcgagatgatgaattttataagacaccttcacttagcagttctggttcctctgatggagggacacgaccaagcagctctcagcagggctttggggatgatgaggcttgcagcatggacaccaactaatgctgactccacgatcctgccaccctgtagcgccagtgtaatcccccaggagaacatctttgacactctgcagactgctagtgttctgtctaaaaaccagacaaggaaatacccttcttttatgagcagaaggaaacaaaaaaaaaaaagaagaccgtttacctagaagaagctatgtcaagaggctgaattatttttatttttaaacaggtggtgagaaatttctgtgaaacctgtgaagctgaaaagggggtgggatgggggtactcaatggagtatgtctgatggatcccgaagaatggagaggaacacaggcgctgagtatggagcagcctggagacccaccccacctgcagggctgccctgagcgcctggatttctggttctgatgccaatactagtcaccccaagtagtctgctcacagtaacccaaacctcaagtaaactcccctttccctcgctatgtgcactgatatgggtttataattttctgaaagttacccactgaagcccatttctccgttgagtcatcttgtaatttccagctttctccccgctaaggaagatatctagtgttggggatcctggcccctcaacctcctgtggaacccagcagttctgttatatcccctgctaccctagatgaattaagacggttaaatactgtgtggaacttttattagataacacactttttattagataacgcttaaaggaagtcagtacataaaactgcccggtgctgtgtcccgtctagttgtttccatgttggcttgagaacagaaatctttgtgggagttagccgggaaagggctccagttcatggcgatttagggtagtaatacattttggtgttacccagatgctttctagaacgggttctttcctcatccctgccaagactcttcccggggcccccattcgaaagccccgtccccactcccaccgcggggccagccgctgcgtgtgggcaaggccttaaggaaccggacgtatgggtccgggattttttgtctgaccttcaacctaatccgtgggggtttggggcctgcgcggggcacgcgcatgcgatgaccgttggatgggtcggcgtcactgcgctgcgggtgaggacaaggacgtggctgccgactcgccaaagggggggtg

SEQ ID NO: 15032 - DNA, 3980 bp, Homo sapiens
agcgtgcgtgcgtgggcgcggtctatagcacgccgcgcgcggggcggatgtccgggccggctgggccggggccgcggaggagatggcggaaggtggaggctgccgtgagcgaccggatgcggagactcagaagtccgagcttggacccttaatgaggaccacactccaacgcggggcgcagtggtatcttattgacagccggtggttcaagcagtggaagaagtatgtgggctttgacagctgggacatgtacaatgtgggtgaacataacctatttcctggcccaatagacaactctgggctattttcagatcctgagagtcagaccttgaaagaacacttaattgatgaattggactatgtattggtccctaccgaggcgtggaataaactactaaactggtacggctgtgtagaaggccagcaacccatcgtcagaaaagttgtggagcatggcctgtttgtcaagcactgcaaagtcgaggtgtatttgctggaactgaagctctgtgagaacagtgaccccaccaatgtgctgagttgccatttcagcaaggcagacaccattgcaaccatcgagaaagagatgcggaagctattcaacatccctgcggagcgtgaaacacggctctggaacaaatacatgagcaacacctacgagcagttgagcaagctagacaacactgtccaggatgctgggctataccagggtcaggtgctagtaattgagcctcaaaatgaagatggcacatggcccaggcagaccttgcagtcaaaatcaagcactgcgcctagcagaaattttactacctctccaaaatcatcagcaagtccctattcctcagtgtctgcctctctcattgcaaatggtgatagcactagcacctgtgggatgcacagttccggtgtcagcaggggtggatctggcttttctgcttcgtataattgtcaggagccaccatcctctcatatacaacctgggctctgtggacttggaaacctgggaaacacctgcttcatgaactccgctttgcagtgtttgagcaacactgcaccactgactgactactttctcaaagatgagtatgaagccgaaatcaacagagacaaccctctggggatgaaaggggaaattgcagaagcctatgctgaactcattaagcagatgtggtctggaagggacgcccatgtggcacctcgcatgttcaaaactcaagtaggacgttttgctcctcaattttctggctaccagcaacaagattctcaggagctgctggcctttcttctagatggattgcatgaagatctgaaccgggtaaagaaaaagccctacttggagctgaaggatgccaatgggcggccagatgcggtggtggcaaaggaagcctgggagaatcacaggttgaggaatgattctgtgattgtggatactttccatggcctcttcaaatctactttggtttgcccagaatgtgctaaggtttctgtgacctttgacccattttgctatctaacgctgccactgcccttgaagaaagatcgagttatggaggttttcctggttcctgctgaccctcactgcagacctactcagtaccgtgtgactgtgccgctgatgggggctgtgtccgacctgtgcgaggctctctccaggctgtctggcattgctgcagaaaatatggtggtcgcagatgtgtataatcaccgattccacaaaattttccaaatggatgaaggtttaaaccacatcatgcctcgggatgacattttcgtgtacgaggtctgcagcacttccgtggatggctcggaatgtgtcacgcttccagtctacttcagggagaggaagtccaggccatcaagcacttcctccgcatcagcgctatatgggcagccactattgctttctgtccccaagcacaagttaacccttgagtctttgtaccaggctgtttgtgatcgtatcagccgctatgtgaaacagcctttacctgatgagtttggcagctcacccttggagccaggggcctgcaatggctccaggaacagctgtgaaggagaagatgaggaagaaatggagcatcaggaagaaggcaaagagcagctttcagaaacagaaggcagtggggaagatgagccaggaaatgaccccagtgagaccacccaaaagaagatcaaaggccagccctgcccaaaaaggctttttaccttcagtcttgtgaactcctatggaacagctgacataaattcacttgcagctgatggaaaactacttaaactcaactctcgatctacactggccatggattgggacagtgaaactcggagactttactatgatgagcaagaatctgaggcctacgagaagcatgtgagcatgttgcagcctcagaagaagaagaagaccacagtggccctgagagactgcatcgagctcttcaccaccatggagacccttggggagcatgacccctggtactgtcccaactgtaagaagcatcaacaggccacaaaaaagtttgacctatggtccttgcccaagatcctggtggtccacctcaaacgtttctcctacaacagatactggagggataagctcgacacagtcgtagaattcccaatcagagggctgaacatgtccgagtttgtctgtaacctgtcagcaaggccttatgtgtacgacctcattgccgtgtccaatccaacgtcgagatgatgaattttataagacaccttcacttagcagttctggttcctctgatggagggacacgaccaagcagctctcagcagggctttggggatgatgaggcttgcagcatggacaccaactaatgctgactccacgatcctgccaccctgtagcgccagtgtaatcccccaggagaacatctttgacactctgcagactgctagtgttctgtctaaaaaccagacaaggaaatacccttcttttatgagcagaaggaaacaaaaaaaaaaaagaagaccgtttacctagaagaagctatgtcaagaggctgaattatttttatttttaaacaggtggtgagaaatttctgtgaaacctgtgaagctgaaaagggggtgggatgggggtactcaatggagtatgtctgatggatcccgaagaatggagaggaacacaggcgctgagtatggagcagcctggagacccaccccacctgcagggctgccctgagcgcctggatttctggttctgatgccaatactagtcaccccaagtagtctgctcacagtaacccaaacctcaagtaaactcccctttccctcgctatgtgcactgatatgggtttataattttctgaaagttacccactgaagcccatttctccgttgagtcatcttgtaatttccagctttctccccgctaaggaagatatctagtgttggggatcctggcccctcaacctcctgtggaacccagcagttctgttatatcccctgctaccctagatgaattaagacggttaaatactgtgtggaacttttattagataacacactttttattagataacgcttaaaggaagtcagtacataaaactgcccggtgctgtgtcccgtctagttgtttccatgttggcttgagaacagaaatctttgtgggagttagccgggaaagggctccagttcatggcgatttagggtagtaatacattttggtgttacccagatgctttctagaacgggttctttcctcatccctgccaagactcttcccggggcccccattcgaaagccccgtccccactcccaccgcggggccagccgctgcgtgtgggcaaggccttaaggaaccggacgtatgggtccgggattttttgtctgaccttcaacctaatccgtgggggtttggggcctgcgcggggcacgcgcatgcgatgaccgttggatgggtcggcgtcactgcgctgcgggtgaggacaaggacgtggctgccgactcgccaaagggggggtg

SEQ ID NO: 15033 - DNA, 2207 bp, Homo sapiens
caattccattccagcgtacaagtccagttcgcagccaattccattccagcgtagctgacataaattcacttgcagctgatggaaaactacttaaactcaactctcgatctacactggccatggattgggacagtgaaactcggagactttactatgatgagcaagaatctgaggtaggtccctcggggttcgtggtcggtggtgtctgctggtttctgctctggatgtggactgcgatcactttcaccagttggacagcaatttagcaagttatatttaagactgagaaggaaaagcacttcaagattttgtcattttatattcagaggctctagaaagtgtactacattccaggtgggagagcctctgtaggccttcatgtcttaatgcagtaagatctctttctccagcagaactgagtgctttgattcccataggcctacgagaagcatgtgagcatgttgcagcctcagaagaagaagaagaccacagtggccctgagagactgcatcgagctcttcaccaccatggagacccttggggagcatgacccctggtactgtcccaactgtaagaagcatcaacaggccacaaaaaagtttgacctatggtccttgcccaagatcctggtggtccacctcaaacgtttctcctacaacagatactggagggataagctcgacacagtcgtagaattcccaatcagagggctgaacatgtccgagtttgtctgtaacctgtcagcaaggccttatgtgtacgacctcattgccgtgtccaatcattatggagccatgggggttggccactacactgcatatgcgaagaacaaactgaatggtaaatggtattactttgatgatagcaacgtgtccctggcctctgaggatcagatagtgactaaagcagcttatgtgctattttaccaacgtcgagatgatgaattttataagacaccttcacttagcagttctggttcctctgatggagggacacgaccaagcagctctcagcagggctttggggatgatgaggcttgcagcatggacaccaactaatgctgactccacgatcctgccaccctgtagcgccagtgtaatcccccaggagaacatctttgacactctgcagactgctagtgttctgtctaaaaaccagacaaggaaatacccttcttttatgagcagaaggaaacaaaaaaaaaaaagaagaccgtttacctagaagaagctatgtcaagaggctgaattatttttatttttaaacaggtggtgagaaatttctgtgaaacctgtgaagctgaaaagggggtgggatgggggtactcaatggagtatgtctgatggatcccgaagaatggagaggaacacaggcgctgagtatggagcagcctggagacccaccccacctgcagggctgccctgagcgcctggatttctggttctgatgccaatactagtcaccccaagtagtctgctcacagtaacccaaacctcaagtaaactcccctttccctcgctatgtgcactgatatgggtttataattttctgaaagttacccactgaagcccatttctccgttgagtcatcttgtaatttccagctttctccccgctaaggaagatatctagtgttggggatcctggcccctcaacctcctgtggaacccagcagttctgttatatcccctgctaccctagatgaattaagacggttaaatactgtgtggaacttttattagataacacactttttattagataacgcttaaaggaagtcagtacataaaactgcccggtgctgtgtcccgtctagttgtttccatgttggcttgagaacagaaatctttgtgggagttagccgggaaagggctccagttcatggcgatttagggtagtaatacattttggtgttacccagatgctttctagaacgggttctttcctcatccctgccaagactcttcccggggcccccattcgaaagccccgtccccactcccaccgcggggccagccgctgcgtgtgggcaaggccttaaggaaccggacgtatgggtccgggattttttgtctgaccttcaacctaatccgtgggggtttggggcctgcgcggggcacgcgcatgcgatgaccgttggatgggtcggcgtcactgcgctgcgggtgaggacaaggacgtggctgccgactcgccaaagggggggtg

SEQ ID NO: 15034 - DNA, 3250 bp, Homo sapiens
agcgtgcgtgcgtgggcgcggtctatagcacgccgcgcgcggggcggatgtccgggccggctgggccggggccgcggaggagatggcggaaggtggaggctgccgtgagcgaccggatgcggagactcagaagtccgagcttggacccttaatgaggaccacactccaacgcggggcgcagtggtatcttattgacagccggtggttcaagcagtggaagaagtatgtgggctttgacagctgggacatgtacaatgtgggtgaacataacctatttcctggcccaatagacaactctgggctattttcagatcctgagagtcagaccttgaaagaacacttaattgatgaattggactatgtattggtccctaccgaggcgtggaataaactactaaactggtacggctgtgtagaaggccagcaacccatcgtcagaaaagttgtggagcatggcctgtttgtcaagcactgcaaagtcgaggtgtatttgctggaactgaagctctgtgagaacagtgaccccaccaatgtgctgagttgccatttcagcaaggcagacaccattgcaaccatcgagaaagagatgcggaagctattcaacatccctgcggagcgtgaaacacggctctggaacaaatacatgagcaacacctacgagcagttgagcaagctagacaacactgtccaggatgctgggctataccagggtcaggtgctagtaattgagcctcaaaatgaagatggcacatggcccaggcagaccttgcagtcaaaatcaagcactgcgcctagcagaaattttactacctctccaaaatcatcagcaagtccctattcctcagtgtctgcctctctcattgcaaatggtgatagcactagcacctgtgggatgcacagttccggtgtcagcaggggtggatctggcttttctgcttcgtataattgtcaggagccaccatcctctcatatacaacctgggctctgtggacttggaaacctgggaaacacctgcttcatgaactccgctttgcagtgtttgagcaacactgcaccactgactgactactttctcaaagatgagtatgaagccgaaatcaacagagacaaccctctggggatgaaaggggaaattgcagaagcctatgctgaactcattaagcagatgtggtctggaagggacgcccatgtggcacctcgcatgttcaaaactcaagtaggacgttttgctcctcaattttctggctaccagcaacaagattctcaggagctgctggcctttcttctagatggattgcatgaagatctgaaccgggtaaagaaaaagccctacttggagctgaaggatgccaatgggcggccagatgcggtggtggcaaaggaagcctgggagaatcacaggttgaggaatgattctgtgattgtggatactttccatggcctcttcaaatctactttggtttgcccagaatgtgctaaggtttctgtgacctttgacccattttgctatctaacgctgccactgcccttgaagaaagatcgagttatggaggttttcctggttcctgctgaccctcactgcagacctactcagtaccgtgtgactgtgccgctgatgggggctgtgtccgacctgtgcgaggctctctccaggctgtctggcattgctgcagaaaatatggtggtcgcagatgtgtataatcaccgattccacaaaattttccaaatggatgaaggtttaaaccacatcatgcctcgggatgacattttcgtgtacgaggtctgcagcacttccgtggatggctcggaatgtgtcacgcttccagtctacttcagggagaggaagtccaggccatcaagcacttcctccgcatcagcgctatatgggcagccactattgctttctgtccccaagcacaagttaacccttgagtctttgtaccaggctgtttgtgatcgtatcagccgctatgtgaaacagcctttacctgatgagtttggcagctcacccttggagccaggggcctgcaatggctccaggaacagctgtgaaggagaagatgaggaagaaatggagcatcaggaagaaggcaaagagcagctttcagaaacagaaggcagtggggaagatgagccaggaaatgaccccagtgagaccacccaaaagaagatcaaaggccagccctgcccaaaaaggctttttaccttcagtcttgtgaactcctatggaacagctgacataaattcacttgcagctgatggaaaactacttaaactcaactctcgatctacactggccatggattgggacagtgaaactcggagactttactatgatgagcaagaatctgaggcctacgagaagcatgtgagcatgttgcagcctcagaagaagaagaagaccacagtggccctgagagactgcatcgagctcttcaccaccatggagacccttggggagcatgacccctggtactgtcccaactgtaagaagcatcaacaggccacaaaaaagtttgacctatggtccttgcccaagatcctggtggtccacctcaaacgtttctcctacaacagatactggagggataagctcgacacagtcgtagaattcccaatcagagggctgaacatgtccgagtttgtctgtaacctgtcagcaaggccttatgtgtacgacctcattgccgtgtccaatcattatggagccatgggggttggccactgtaagtattgacatctgcttccttctgagatgttgaaatgtgctcggccatcatctctcaccagtggaccaggcattgccctaaatgctttgcttatgcagtttcacaggcttcatgctgcacgctttcttcatactgattcccctctctgtttttttttaattctttttttttttttttttttgagacggagtctcgttatgtcacccaggctagaacacagtggcgcaatctcactcactgcaagctctgcctcccaggttcacgccattctcctgcctcagcctcctgagtagctgggactacaggcgcccgccaccacgcctggctaattttttgtatttttagtagagacggggtttcaccatgttagccaggatggtctcgatctcctgacctcgtgatccgcccgcctcggcctcccaaagtgctgggattacaggtgtgaggcactgtgcctggctggtttgctctttttttgagacagattctcactctgtcacccaggctggaaagcagtggcg

SEQ ID NO: 15035 - DNA, 1457 bp, Homo sapiens
aatcgagctcggcaccgtaacattcgtgtcaatcattatggagccagggggttggccactacactgcatatgcgaagaacaaactgaatggtaaatggtattactttgatgatagcaacgtgtccctggcctctgaggatcagatagtgactaaagcagcttatgtgctattttaccaacgtcgagatgatgaattttataagacaccttcacttagcagttctggttcctctgatggagggacacgaccaagcagctctcagcagggctttggggatgatgaggcttgcagcatggacaccaactaatgctgactccacgatcctgccaccctgtagcgccagtgtaatcccccaggagaacatctttgacactctgcagactgctagtgttctgtctaaaaaccagacaaggaaatacccttcttttatgagcagaaggaaacaaaaaaaaaaaagaagaccgtttacctagaagaagctatgtcaagaggctgaattatttttatttttaaacaggtggtgagaaatttctgtgaaacctgtgaagctgaaaagggggtgggatgggggtactcaatggagtatgtctgatggatcccgaagaatggagaggaacacaggcgctgagtatggagcagcctggagacccaccccacctgcagggctgccctgagcgcctggatttctggttctgatgccaatactagtcaccccaagtagtctgctcacagtaacccaaacctcaagtaaactcccctttccctcgctatgtgcactgatatgggtttataattttctgaaagttacccactgaagcccatttctccgttgagtcatcttgtaatttccagctttctccccgctaaggaagatatctagtgttggggatcctggcccctcaacctcctgtggaacccagcagttctgttatatcccctgctaccctagatgaattaagacggttaaatactgtgtggaacttttattagataacacactttttattagataacgcttaaaggaagtcagtacataaaactgcccggtgctgtgtcccgtctagttgtttccatgttggcttgagaacagaaatctttgtgggagttagccgggaaagggctccagttcatggcgatttagggtagtaatacattttggtgttacccagatgctttctagaacgggttctttcctcatccctgccaagactcttcccggggcccccattcgaaagccccgtccccactcccaccgcggggccagccgctgcgtgtgggcaaggccttaaggaaccggacgtatgggtccgggattttttgtctgaccttcaacctaatccgtgggggtttggggcctgcgcggggcacgcgcatgcgatgaccgttggatgggtcggcgtcactgcgctgcgggtgaggacaaggacgtggctgccgactcgccaaagggggggtg

SEQ ID NO: 15036 - DNA, 1205 bp, Homo sapiens
catggatttgctggtgcagtacaactaggcttaatagggacatggacaccaactaatgctgactccacgatcctgccaccctgtagcgccagtgtaatcccccaggagaacatctttgacactctgcagactgctagtgttctgtctaaaaaccagacaaggaaatacccttcttttatgagcagaaggaaacaaaaaaaaaaaagaagaccgtttacctagaagaagctatgtcaagaggctgaattatttttatttttaaacaggtggtgagaaatttctgtgaaacctgtgaagctgaaaagggggtgggatgggggtactcaatggagtatgtctgatggatcccgaagaatggagaggaacacaggcgctgagtatggagcagcctggagacccaccccacctgcagggctgccctgagcgcctggatttctggttctgatgccaatactagtcaccccaagtagtctgctcacagtaacccaaacctcaagtaaactcccctttccctcgctatgtgcactgatatgggtttataattttctgaaagttacccactgaagcccatttctccgttgagtcatcttgtaatttccagctttctccccgctaaggaagatatctagtgttggggatcctggcccctcaacctcctgtggaacccagcagttctgttatatcccctgctaccctagatgaattaagacggttaaatactgtgtggaacttttattagataacacactttttattagataacgcttaaaggaagtcagtacataaaactgcccggtgctgtgtcccgtctagttgtttccatgttggcttgagaacagaaatctttgtgggagttagccgggaaagggctccagttcatggcgatttagggtagtaatacattttggtgttacccagatgctttctagaacgggttctttcctcatccctgccaagactcttcccggggcccccattcgaaagccccgtccccactcccaccgcggggccagccgctgcgtgtgggcaaggccttaaggaaccggacgtatgggtccgggattttttgtctgaccttcaacctaatccgtgggggtttggggcctgcgcggggcacgcgcatgcgatgaccgttggatgggtcggcgtcactgcgctgcgggtgaggacaaggacgtggctgccgactcgccaaagggggggtg

SEQ ID NO: 15037 - DNA, 1493 bp, Homo sapiens
actaatgaggaccaccttgtaatttctgggcattttcagagttttctcttccatgtgaattgctccagctaacttaatattagtttctcaagggtttgtgtagacctggctttgtctctttccatctgtttctctctttccctttaacgtcacttgcctgaggtctataaggccctttaaggttgccagcccagagccagaagagattggtgtccctgaagttaagaaagccacctttgcctacagatggtgttcacagtgttggtgtggagtcacagcttgacttttgatcaagcactgcgcctagcagaaattttactacctctccaaaatcatcagcaagtccctattcctcagtgtctgccaccctgtagcgccagtgtaatcccccaggagaacatctttgacactctgcagactgctagtgttctgtctaaaaaccagacaaggaaatacccttcttttatgagcagaaggaaacaaaaaaaaaaaagaagaccgtttacctagaagaagctatgtcaagaggctgaattatttttatttttaaacaggtggtgagaaatttctgtgaaacctgtgaagctgaaaagggggtgggatgggggtactcaatggagtatgtctgatggatcccgaagaatggagaggaacacaggcgctgagtatggagcagcctggagacccaccccacctgcagggctgccctgagcgcctggatttctggttctgatgccaatactagtcaccccaagtagtctgctcacagtaacccaaacctcaagtaaactcccctttccctcgctatgtgcactgatatgggtttataattttctgaaagttacccactgaagcccatttctccgttgagtcatcttgtaatttccagctttctccccgctaaggaagatatctagtgttggggatcctggcccctcaacctcctgtggaacccagcagttctgttatatcccctgctaccctagatgaattaagacggttaaatactgtgtggaacttttattagataacacactttttattagataacgcttaaaggaagtcagtacataaaactgcccggtgctgtgtcccgtctagttgtttccatgttggcttgagaacagaaatctttgtgggagttagccgggaaagggctccagttcatggcgatttagggtagtaatacattttggtgttacccagatgctttctagaacgggttctttcctcatccctgccaagactcttcccggggcccccattcgaaagccccgtccccactcccaccgcggggccagccgctgcgtgtgggcaaggccttaaggaaccggacgtatgggtccgggattttttgtctgaccttcaacctaatccgtgggggtttggggcctgcgcggggcacgcgcatgcgatgaccgttggatgggtcggcgtcactgcgctgcgggtgaggacaaggacgtggctgccgactcgccaaagggggggtg

SEQ ID NO: 15038 - DNA, 2131 bp, Homo sapiens
agcgtgcgtgcgtgggcgcggtctatagcacgccgcgcgcggggcggatgtccgggccggctgggccggggccgcggaggagatggcggaaggtggaggctgccgtgagcgaccggatgcggagactcagaagtccgagcttggacccttaatgaggaccacactccaacgcggggcgcagtggtatcttattgacagccggtggttcaagcagtggaagaagtatgtgggctttgacagctgggacatgtacaatgtgggtgaacataacctatttcctggcccaatagacaactctgggctattttcagatcctgagagtcagaccttgaaagaacacttaattgatgaattggactatgtattggtccctaccgaggcgtggaataaactactaaactggtacggctgtgtagaaggccagcaacccatcgtcagaaaagttgtggagcatggcctgtttgtcaagcactgcaaagtcgaggtgtatttgctggaactgaagctctgtgagaacagtgaccccaccaatgtgctgagttgccatttcagcaaggcagacaccattgcaaccatcgagaaagagatgcggaagctattcaacatccctgcggagcgtgaaacacggctctggaacaaatacatgagcaacacctacgagcagttgagcaagctagacaacactgtccaggatgctgggctataccagggtcaggtgctagtaattgagcctcaaaatgaagatggcacatggcccaggcagaccttgcagtcaaaatcaagcactgcgcctagcagaaattttactacctctccaaaatcatcagcaagtccctattcctcagtgtctgcctctctcattgcaaatggtgatagcactagcacctgtgggatgcacagttccggtgtcagcaggggtggatctggcttttctgcttcgtataattgtcaggagccaccatcctctcatatacaacctgggctctgtggacttggaaacctgggaaacacctgcttcatgaactccgctttgcagtgtttgagcaacactgcaccactgactgactactttctcaaagatgagtatgaagccgaaatcaacagagacaaccctctggggatgaaaggggaaattgcagaagcctatgctgaactcattaagcagatgtggtctggaagggacgcccatgtggcacctcgcatgttcaaaactcaagtaggacgttttgctcctcaattttctggctaccagcaacaagattctcaggagctgctggcctttcttctagatggattgcatgaagatctgaaccgggtaaagaaaaagccctacttggagctgaaggatgccaatgggcggccagatgcggtggtggcaaaggaagcctgggagaatcacaggttgaggaatgattctgtgattgtggatactttccatggcctcttcaaatctactttggtttgcccagaatgtgctaaggtttctgtgacctttgacccattttgctatctaacgctgccactgcccttgaagaaagatcgagttatggaggttttcctggttcctgctgaccctcactgcagacctactcagtaccgtgtgactgtgccgctgatgggggctgtgtccgacctgtgcgaggctctctccaggctgtctggcattgctgcagaaaatatggtggtcgcagatgtgtataatcaccgattccacaaaattttccaaatggatgaaggtttaaaccacatcatgcctcgggatgacattttcgtgtacgaggtctgcagcacttccgtggatggctcggaatgtgtcacgcttccagtctacttcagggagaggaagtccaggccatcaagcacttcctccgcatcagcgctatatgggcagccactattgctttctgtccccaagcacaagctggagtgcagtggcacgatctcggctcactgcaccctctacctcccaggttcaagtgattctgctgcctcagcctcccaagtagctgggattacaggcatgtgccaccacgcccagcctccatgctgttcttaagaggccttcattgcaggcctataggcagaagcaggaagcggcagaagcaggaagcgcagaacaggagggccgacc

SEQ ID NO: 15039 - DNA, 1113 bp, Homo sapiens
  misc_feature (981)..(981): n is a, c, g, or t
  misc_feature (1096)..(1096): n is a, c, g, or t
agcgtgcgtgcgtgggcgcggtctatagcacgccgcgcgcggggcggatgtccgggccggctgggccggggccgcggaggagatggcggaaggtggaggctgccgtgagcgaccggatgcggagactcagaagtccgagcttggacccttaatgaggaccacactccaacgcggggcgcagtggtatcttattgacagccggtggttcaagcagtggaagaagtatgtgggctttgacagctgggacatgtacaatgtgggtgaacataacctatttcctggcccaatagacaactctgggctattttcagatcctgagagtcagaccttgaaagaacacttaattgatgaattggactatgtattggtccctaccgaggcgtggaataaactactaaactggtacggctgtgtagaaggccagcaacccatcgtcagaaaagttgtggagcatggcctgtttgtcaagcactgcaaagtcgaggtgtatttgctggaactgaagctctgtgagaacagtgaccccaccaatgtgctgagttgccatttcagcaaggcagacaccattgcaaccatcgagaaagagatgcggaagctattcaacatccctgcggagcgtgaaacacggctctggaacaaatacatgagcaacacctacgagcagttgagcaagctagacaacactgtccaggatgctgggctataccagggtcaggtgctagtaattgagcctcaaaatgaagatggcacatggcccaggcagaccttgcagtcaaacatttgtcattatgtcaagttccatgccaatagggactttgcacatgggattaagcacaatggccaggagcagtggcttatgcctgtaatcccagcactttgggaggctgaggcgggtggatcacctgaggtcaagagtttgagaccagcctggccaacgtgcagaacaccctgtctctgctaagggtgcagaactggccggcngccctggccacatctctgctttagctgttggcgcctaggcagagatgcttgagccccaggggaggttgcgggacctgggattgcgccatccactctacgcctcgggaacaagagngaaaccccatctcaaaa

SEQ ID NO: 15040 - DNA, 329 bp, Homo sapiens
tcaatcaatcaatataatatatatttgaaatatgtatatatataaacatatatgtgaaatatatatatgtgtgttggggtggggattgggcgtagagctggcatgtggtatgagtatgatacactaagagtagtcctggccttgtttgtcctggatcaagctcttggctgtacagattgccacctgattcatctccaggtttgctgtgagtcattctggatgcaggggcaaggggctgagaggtgttgagaatgtcctgtttatccctttgacgcaggtggtggcaaaggaagcctgggagaatcacaggttgaggaatgattctgtga

SEQ ID NO: 15041 - DNA, 593 bp, Homo sapiens
ggccgaagtaggcggatcacctgaggtcaggagtttgagaccagcctgcccaacatggtgaaaccccgtctctactaaaaatacaaaaattagctgggagtggtgacaggtgcctgtaatcccagttagtcaggaggctgaggcaggagaatcgcttgaacctgggaggcagaggttgcagtgagccaagattgtgtcactatactccagcctgggcgacagaacaagactccgtctaaaagaaaaaaaaagaaagactgcatttaaataagcattttgaaaccacttgttttctttcttttattcactctttgaacaatcatttcacttaatggatgcataccctgggccagactctctgtgccatgtggggcctgggccctgctcttgctcttgtgacagtgttttttagtgggtattgcatatgccccaagtggaaggaccataaaaaagattaaggaagcagctgcagaaatttataatctcagcttttctgctacagtaaatttctgtctctctctaggtatcttattgacagccggtggttcaagcagtggaagaagtatgtgggctttgacagctgggacatgtac

SEQ ID NO: 15042 - DNA, 697 bp, Homo sapiens
gagagacacacgttagcaaagaagcatagggatactttccaggcatatgagtgcaagaggccacccatgggagatgattgattttaagaggtatcagggggttgatccagagcacctgtgagcatctgacaagaaagaggatgagcattagtttgccatggctgtctttagccttgcatgtggacaaagccccaagtgatatttctgcctgttcctagcaaccatcgagaaagagatgcggaagctattcaacatccctgcggagcgtgaaacacggctctggaacaaatacatgagcaacacctacgagcagttgagcaagctagacaacactgtccaggatgctgggctataccagggtcaggtaggagggccctggccattccccagcaggtagctctgcccagggtgtgtggccagatactttttgcttctaagcatgttggaagtgcggtggtttgaactctcctcatttggtttcccctttcactcaggtgctagtaattgagcctcaaaatgaagatggcacatggcccaggcagaccttgcagtcaaagtaagtgaattttttctcccttgtgtaggctcacatgtgcaaaagagacagtctttcctaaggcagtacttgtactaagaattgttctgattcagatgaacaatgcctattttgtatatccagagttcatgcttctggatg

SEQ ID NO: 15043 - DNA, 503 bp, Homo sapiens
gggctgttatgtacaggaggattcctccagctgatgaaagtattgtttgtaatgtccttatggagtttaagactctgaaccaaagaaggacatgttggagagggattcatgtcagtacttgggtgtggttactcagggtactccacccttcctccttaggacttagggcagtggcccaggttccaggttcatcctcctggctctctgatctaggccttctttctggtgggaaccactggcctcctgtaggctcttcaggagttaattggactactcaaccaagtgttctctctcactgccccagctaactcctcagagctatttttgatggcaattcttttttgatttaactagttctttacgtattatgccttctgatacagttgcttttgttgtagactcaagtaggacgttttgctcctcaattttctggctaccagcaacaagattctcaggagctgctggcctttcttctagatggattgcatgaagatctgaaccgg

SEQ ID NO: 15044 - DNA, 7339 bp, Homo sapiens
  misc_feature (1985)..(1985): n is a, c, g, or t
  misc_feature (2205)..(2205): n is a, c, g, or t
  misc_feature (3134)..(3134): n is a, c, g, or t
cccagccccatttaacttcgcggcggcggcggcgactgcggcgccgcgggctggaggccggcgtcggggaaggtcctggtgccggattccgcacgaggtgttgacgggcggcttctgccaacttctccccagcgcgcgccgagcccgcgcggccccggggctgcacgtcccagatacttctgcggcgcaaggctacaactgagacccggaggagactagaccccatggcttcctggacgagcccctggtgggtgctgatagggatggtcttcatgcactctcccctcccgcagaccacagctgagaaatctcctggagcctatttccttcccgagtttgcactttctcctcagggaagttttctggaagacacaacaggggagcagttcctcacttatcgctatgatgaccagacctcaagaaacactcgttcagatgaagacaaagatggcaactgggatgcttggggcgactggagtgactgctcccggacctgtgggggaggagcatcatattctctgcggagatgtttgactggaaggaattgtgaagggcagaacattcggtacaagacatgcagcaatcatgactgccctccagatgcagaagatttcagagcccagcagtgctcagcctacaatgatgtccagtatcaggggcattactatgaatggcttccacgatataatgatcctgctgccccgtgtgcactcaagtgtcatgcacaaggacaaaacttggtggtggagctggcacctaaggtactggatggaactcgttgcaacacggactccttggacatgtgtatcagtggcatctgtcaggcagtgggctgcgatcggcaactgggaagcaatgccaaggaggacaactgtggagtctgtgccggcgatggctccacctgcaggcttgtacggggacaatcaaagtcacacgtttctcctgaaaaaagagaagaaaatgtaattgctgttcctttgggaagtcgaagtgtgagaattacagtgaaaggacctgcccacctctttattgaatcaaaaacacttcaaggaagcaaaggagaacacagctttaacagccccggcgtctttgtcgtagaaaacacaacagtggaatttcagaggggctccgagaggcaaacttttaagattccaggacctctgatggctgatttcatcttcaagaccaggtacactgcagccaaagacagcgtggttcagttcttcttttaccagcccatcagtcatcagtggagacaaactgacttctttccctgcactgtgacgtgtggaggaggttatcagctcaattctgctgaatgtgtggatatccgcttgaagagggtagttcctgaccattattgtcactactaccctgaaaatgtaaaaccaaaaccaaaactgaaggaatgcagcatggatccctgcccatcaagtgatggatttaaagagataatgccctatgaccacttccaacctcttcctcgctgggaacataatccttggactgcatgttccgtgtcctgtggaggagggattcagagacggagctttgtgtgtgtagaggaatccatgcatggagagatattgcaggtggaagaatggaagtgcatgtacgcacccaaacccaaggttatgcaaacttgtaatctgtttgattgccccaagtggattgccatggagtggtctcagtgcacagtgacttgtggccgagggttacggtaccgggttgttctgtgtattaaccaccgcggagagcatgttgggggctgcaatccacaactgaagttacacatcaaagaagaatgtgtcattcccatcccgtgttataaaccaaaagaaaaaagtccagtggaagcaaaattgccttggctgaaacaagcacaagaactagaagagaccagaatagcaacagaagaaccaacgttcattccagaaccctggtcagcctgcagtaccacgtgtgggccgggtgtgcaggtccgngaggtgaagtgccgtgtgctcctcacattcacgcagactgagactgagctgcccgaggaagagtgtgaaggccccaagctgcccaccgaacggccctgcctcctggaagcatgtgatgagagcccggcctcccgagagctagacatccctctccctgaggacagtgagacgacttacgactgggagtacgctgggttcaccccttgcacagcaacatgcntgggaggccatcaagaagccatagcagtgtgcttacatatccagacccagcagacagtcaatgacagcttgtgtgatatggtccaccgtcctccagccatgagccaggcctgtaacacagagccctgtccccccaggtggcatgtgggctcttgggggccctgctcagctacctgtggagttggaattcagacccgagatgtgtactgcctgcacccaggggagacccctgcccctcctgaggagtgccgagatgaaaagccccatgctttacaagcatgcaatcagtttgactgccctcctggctggcacattgaagaatggcagcagtgttccaggacttgtggcgggggaactcagaacagaagagtcacctgtcggcagctgctaacggatggcagctttttgaatctctcagatgaattgtgccaaggacccaaggcatcgtctcacaagtcctgtgccaggacagactgtcctccacatttagctgtgggagactggtcgaagtgttctgtcagttgtggtgttggaatccagagaagaaagcaggtgtgtcaaaggctggcagccaaaggtcggcgcatccccctcagtgagatgatgtgcagggatctaccagggctccctcttgtaagatcttgccagatgcctgagtgcagtaaaatcaaatcagagatgaagacaaaacttggtgagcagggtccgcagatcctcagtgtccagagagtctacattcagacaagggaagagaagcgtattaacctgaccattggtagcagagcctatttgctgcccaacacatccgtgattattaagtgccccgtgcgacgattccagaaatctctgatccagtgggagaaggatggccgttgcctgcagaactccaaacggcttggcatcaccaagtcaggctcactaaaaatccanggtcttgctgcccccgacatcggcgtgtaccggtgcattgcaggctctgcacaggaaacagttgtgctcaagctcattggtactgacaaccggctcatcgcacgcccagccctcagggagcctatgagggaatatcctgggatggaccacagcgaagccaatagtttgggagtcacatggcacaaaatgaggcaaatgtggaataacaaaaatgacctttatctggatgatgaccacattagtaaccagcctttcttgagagctctgttaggccactgcagcaattctgcaggaagcaccaactcctgggagttgaagaataagcagtttgaagcagcagttaaacaaggagcatatagcatggatacagcccagtttgatgagctgataagaaacatgagtcagctcatggaaaccggagaggtcagcgatgatcttgcgtcccagctgatatatcagctggtggccgaattagccaaggcacagccaacacacatgcagtggcggggcatccaggaagagacacctcctgctgctcagctcagaggggaaacagggagtgtgtcccaaagctcgcatgcaaaaaactcaggcaagctgacattcaagccgaaaggacctgttctcatgaggcaaagccaacctccctcaatttcatttaataaaacaataaattccaggattggaaatacagtatacattacaaaaaggacagaggtcatcaatatactgtgtgaccttattacccccagtgaggccacatatacatggaccaaggatggaaccttgttacagccctcagtaaaaataattttggatggaactgggaagatacagatacagaatcctacaaggaaagaacaaggcatatatgaatgttctgtagctaatcatcttggttcagatgtggaaagttcttctgtgctgtatgcagaggcacctgtcatcttgtctgttgaaagaaatatcaccaaaccagagcacaaccatctgtctgttgtggttggaggcatcgtggaggcagcccttggagcaaacgtgacaatccgatgtcctgtaaaaggtgtccctcagcctaatataacttggttgaagagaggaggatctctgagtggcaatgtttccttgcttttcaatggatccctgttgttgcagaatgtttcccttgaaaatgaaggaacctacgtctgcatagccaccaatgctcttggaaaggcagtggcaacatctgtactccacttgctggaacgaagatggccagagagtagaatcgtatttctgcaaggacataaaaagtacattctccaggcaaccaacactagaaccaacagcaatgacccaacaggagaacccccgcctcaagagcctttttgggagcctggtaactggtcacattgttctgccacctgtggtcatttgggagcccgcattcagagaccccagtgtgtgatggccaatgggcaggaagtgagtgaggccctgtgtgatcacctccagaagccactggctgggtttgagccctgtaacatccgggactgcccagcgaggtggttcacaagtgtgtggtcacagtgctctgtgtcttgcggtgaaggataccacagtcggcaggtgacgtgcaagcggacaaaagccaatggaactgtgcaggtggtgtctccaagagcatgtgcccctaaagaccggcctctgggaagaaaaccatgttttggtcatccatgtgttcagtgggaaccagggaaccggtgtcctggacgttgcatgggccgtgctgtgaggatgcagcagcgtcacacagcttgtcaacacaacagctctgactccaactgtgatgacagaaagagacccaccttaagaaggaactgcacatcaggggcctgtgatgtgtgttggcacacaggcccttggaagccctgtacagcagcctgtggcaggggtttccagtctcggaaagtcgactgtatccacacaaggagttgcaaacctgtggccaagagacactgtgtacagaaaaagaaaccaatttcctggcggcactgtcttgggccctcctgtgatagagactgcacagacacaactcactactgtatgtttgtaaaacatcttaatttgtgttctctagaccgctacaaacaaaggtgctgccagtcatgtcaagagggataaacctttggaggggtcatgatgctgctgtgaagataaaagtagaatataaaagctcttttccccatgtcgctgattcaaaaacatgtatttcttaaaagactagattctatggatcaaacagaggttgatgcaaaaacaccactgttaaggtgtaaagtgaaattttccaatggtagttttatattccaattttttaaaatgatgtattcaaggatgaacaaaatactatagcatgcatgccactgcacttgggacctcatcatgtcagttgaatcgagaaatcaccaagattatgagtgcatcctcacgtgctgcctctttcctgtgatatgtagactagcacagagtggtacatcctaaaaacttgggaaacacagcaacccatgacttcctcttctctcaagttgcaggttttcaacagttttataaggtatttgcattttagaagctctggccagtagttgttaagatgttggcattaatggcattttcatagatccttggtttagtctgtgaaaaagaaaccatctctctggataggctgtcacactgactgacctaagggttcatggaagcatggcatcttgtccttgcttttagaacacccatggaagaaaacacagagtagatattgctgtcatttatacaactacagaaatttatctatgacctaatgaggcatctcggaagtcaaagaagagggaaagttaaccttttctactgatttcgtagtatattcagagctttcttttaagagctgtgaatgaaactttttctaagcactattctattgcacacaaacagaaaaccaaagccttattagacctaatttatgcataaagtagtattcctgagaactttattttggaaaatttataagaaagtaatccaaataagaaacacgatagttgaaaataatttttatagtaaataattgttttgggctgatttttcagtaaatccaaagtgacttaggttagaagttacactaaggaccaggggttggaatcagaatttagtttaagatttgaggaaaagggtaagggttagtttcagttttaggattagagctagaattgggttaggtgagaaagaaagttaaggttaaggctagagttgtctttaagggttagggttaggaccaggttaggtcagggttggattgggtttagattggggccagtgctggtgttagtgatagtgtcaggatggaggttaggtttggagtaagcgttgttgctgaagtgagttcaggctagcattaaattgtaagttctgaagctgatttggttatggggtctttcccctgtatactaccagttgtgtctttagatggcacacaagtccaaataagtggtcatacttctttattcagggtctcagctgcctgtacacctgctgcctacatcttcttggcaacaaagttacctgccacaggctctgctgagcctagttcctggtcagtaataactgaacagtgcattttggctttggatgtgtctgtggacaagcttgctgagtttctctaccatattctgagcacacggtctcttttgttctaacttcagcttcactgacactgggttgagcactactgtatgtggagggtttggtgattgggaatggatgggggacagtgaggaggacacaccagcccattagttgttaatcatcaatcacatctgattgttgaaggttattaaattaaaagaaagatcatttgtaacatactctttgtatatatttattatatgaaaggtgcaatattttattttgtacagtatgtaataaagacatgggacatatatttttcttattaacaaaatttcatattaaattgcttcactttgtatttaaagttaaaagttactatttttcatttgctattgtactttcattgttgtcattcaattgacattcctgtgtactgtattttactactgtttttataacatgagagttaatgtttctgtttcatgatccttatgtaattcagaaataaatttactttgattattcagtggcatccttataaaaaa

SEQ ID NO: 15045 - DNA, 7276 bp, Homo sapiens
  misc_feature (1985)..(1985): n is a, c, g, or t
  misc_feature (2205)..(2205): n is a, c, g, or t
  misc_feature (3134)..(3134): n is a, c, g, or t
cccagccccatttaacttcgcggcggcggcggcgactgcggcgccgcgggctggaggccggcgtcggggaaggtcctggtgccggattccgcacgaggtgttgacgggcggcttctgccaacttctccccagcgcgcgccgagcccgcgcggccccggggctgcacgtcccagatacttctgcggcgcaaggctacaactgagacccggaggagactagaccccatggcttcctggacgagcccctggtgggtgctgatagggatggtcttcatgcactctcccctcccgcagaccacagctgagaaatctcctggagcctatttccttcccgagtttgcactttctcctcagggaagttttctggaagacacaacaggggagcagttcctcacttatcgctatgatgaccagacctcaagaaacactcgttcagatgaagacaaagatggcaactgggatgcttggggcgactggagtgactgctcccggacctgtgggggaggagcatcatattctctgcggagatgtttgactggaaggaattgtgaagggcagaacattcggtacaagacatgcagcaatcatgactgccctccagatgcagaagatttcagagcccagcagtgctcagcctacaatgatgtccagtatcaggggcattactatgaatggcttccacgatataatgatcctgctgccccgtgtgcactcaagtgtcatgcacaaggacaaaacttggtggtggagctggcacctaaggtactggatggaactcgttgcaacacggactccttggacatgtgtatcagtggcatctgtcaggcagtgggctgcgatcggcaactgggaagcaatgccaaggaggacaactgtggagtctgtgccggcgatggctccacctgcaggcttgtacggggacaatcaaagtcacacgtttctcctgaaaaaagagaagaaaatgtaattgctgttcctttgggaagtcgaagtgtgagaattacagtgaaaggacctgcccacctctttattgaatcaaaaacacttcaaggaagcaaaggagaacacagctttaacagccccggcgtctttgtcgtagaaaacacaacagtggaatttcagaggggctccgagaggcaaacttttaagattccaggacctctgatggctgatttcatcttcaagaccaggtacactgcagccaaagacagcgtggttcagttcttcttttaccagcccatcagtcatcagtggagacaaactgacttctttccctgcactgtgacgtgtggaggaggttatcagctcaattctgctgaatgtgtggatatccgcttgaagagggtagttcctgaccattattgtcactactaccctgaaaatgtaaaaccaaaaccaaaactgaaggaatgcagcatggatccctgcccatcaagtgatggatttaaagagataatgccctatgaccacttccaacctcttcctcgctgggaacataatccttggactgcatgttccgtgtcctgtggaggagggattcagagacggagctttgtgtgtgtagaggaatccatgcatggagagatattgcaggtggaagaatggaagtgcatgtacgcacccaaacccaaggttatgcaaacttgtaatctgtttgattgccccaagtggattgccatggagtggtctcagtgcacagtgacttgtggccgagggttacggtaccgggttgttctgtgtattaaccaccgcggagagcatgttgggggctgcaatccacaactgaagttacacatcaaagaagaatgtgtcattcccatcccgtgttataaaccaaaagaaaaaagtccagtggaagcaaaattgccttggctgaaacaagcacaagaactagaagagaccagaatagcaacagaagaaccaacgttcattccagaaccctggtcagcctgcagtaccacgtgtgggccgggtgtgcaggtccgngaggtgaagtgccgtgtgctcctcacattcacgcagactgagactgagctgcccgaggaagagtgtgaaggccccaagctgcccaccgaacggccctgcctcctggaagcatgtgatgagagcccggcctcccgagagctagacatccctctccctgaggacagtgagacgacttacgactgggagtacgctgggttcaccccttgcacagcaacatgcntgggaggccatcaagaagccatagcagtgtgcttacatatccagacccagcagacagtcaatgacagcttgtgtgatatggtccaccgtcctccagccatgagccaggcctgtaacacagagccctgtccccccaggtggcatgtgggctcttgggggccctgctcagctacctgtggagttggaattcagacccgagatgtgtactgcctgcacccaggggagacccctgcccctcctgaggagtgccgagatgaaaagccccatgctttacaagcatgcaatcagtttgactgccctcctggctggcacattgaagaatggcagcagtgttccaggacttgtggcgggggaactcagaacagaagagtcacctgtcggcagctgctaacggatggcagctttttgaatctctcagatgaattgtgccaaggacccaaggcatcgtctcacaagtcctgtgccaggacagactgtcctccacatttagctgtgggagactggtcgaagtgttctgtcagttgtggtgttggaatccagagaagaaagcaggtgtgtcaaaggctggcagccaaaggtcggcgcatccccctcagtgagatgatgtgcagggatctaccagggctccctcttgtaagatcttgccagatgcctgagtgcagtaaaatcaaatcagagatgaagacaaaacttggtgagcagggtccgcagatcctcagtgtccagagagtctacattcagacaagggaagagaagcgtattaacctgaccattggtagcagagcctatttgctgcccaacacatccgtgattattaagtgccccgtgcgacgattccagaaatctctgatccagtgggagaaggatggccgttgcctgcagaactccaaacggcttggcatcaccaagtcaggctcactaaaaatccanggtcttgctgcccccgacatcggcgtgtaccggtgcattgcaggctctgcacaggaaacagttgtgctcaagctcattggtactgacaaccggctcatcgcacgcccagccctcagggagcctatgagggaatatcctgggatggaccacagcgaagccaatagtttgggagtcacatggcacaaaatgaggcaaatgtggaataacaaaaatgacctttatctggatgatgaccacattagtaaccagcctttcttgagagctctgttaggccactgcagcaattctgcaggaagcaccaactcctgggagttgaagaataagcagtttgaagcagcagttaaacaaggagcatatagcatggatacagcccagtttgatgagctgataagaaacatgagtcagctcatggaaaccggagaggtcagcgatgatcttgcgtcccagctgatatatcagctggtggccgaattagccaaggcacagccaacacacatgcagtggcggggcatccaggaagagacacctcctgctgctcagctcagaggggaaacagggagtgtgtcccaaagctcgcatgcaaaaaactcaggcaagctgacattcaagccgaaaggacctgttctcatgaggcaaagccaacctccctcaatttcatttaataaaacaataaattccaggattggaaatacagtatacattacaaaaaggacagaggtcatcaatatactgtgtgaccttattacccccagtgaggccacatatacatggaccaaggatggaaccttgttacagccctcagtaaaaataattttggatggaactgggaagatacagatacagaatcctacaaggaaagaacaaggcatatatgaatgttctgtagctaatcatcttggttcagatgtggaaagttcttctgtgctgtatgcagaggcacctgtcatcttgtctgttgaaagaaatatcaccaaaccagagcacaaccatctgtctgttgtggttggaggcatcgtggaggcagcccttggagcaaacgtgacaatccgatgtcctgtaaaaggtgtccctcagcctaatataacttggttgaagagaggaggatctctgagtggcaatgtttccttgcttttcaatggatccctgttgttgcagaatgtttcccttgaaaatgaaggaacctacgtctgcatagccaccaatgctcttggaaaggcagtggcaacatctgtactccacttgctggaacgaagatggccagagagtagaatcgtatttctgcaaggacataaaaagtacattctccaggcaaccaacactagaaccaacagcaatgacccaacaggagaacccccgcctcaagagcctttttgggagcctggtaactggtcacattgttctgccacctgtggtcatttgggagcccgcattcagagaccccagtgtgtgatggccaatgggcaggaagtgagtgaggccctgtgtgatcacctccagaagccactggctgggtttgagccctgtaacatccgggactgcccagcgaggtggttcacaagtgtgtggtcacagtgctctgtgtcttgcggtgaaggataccacagtcggcaggtgacgtgcaagcggacaaaagccaatggaactgtgcaggtggtgtctccaagagcatgtgcccctaaagaccggcctctgggaagaaaaccatgttttggtcatccatgtgttcagtgggaaccagggaaccggtgtcctggacgttgcatgggccgtgctgtgaggatgcagcagcgtcacacagcttgtcaacacaacagctctgactccaactgtgatgacagaaagagacccaccttaagaaggaactgcacatcaggggcctgtgatgtgtgttggcacacaggcccttggaagccctgtacagcagcctgtggcaggggtttccagtctcggaaagtcgactgtatccacacaaggagttgcaaacctgtggccaagagacactgtgtacagaaaaagaaaccaatttcctggcggcactgtcttgggccctcctgtgataaccgctacaaacaaaggtgctgccagtcatgtcaagagggataaacctttggaggggtcatgatgctgctgtgaagataaaagtagaatataaaagctcttttccccatgtcgctgattcaaaaacatgtatttcttaaaagactagattctatggatcaaacagaggttgatgcaaaaacaccactgttaaggtgtaaagtgaaattttccaatggtagttttatattccaattttttaaaatgatgtattcaaggatgaacaaaatactatagcatgcatgccactgcacttgggacctcatcatgtcagttgaatcgagaaatcaccaagattatgagtgcatcctcacgtgctgcctctttcctgtgatatgtagactagcacagagtggtacatcctaaaaacttgggaaacacagcaacccatgacttcctcttctctcaagttgcaggttttcaacagttttataaggtatttgcattttagaagctctggccagtagttgttaagatgttggcattaatggcattttcatagatccttggtttagtctgtgaaaaagaaaccatctctctggataggctgtcacactgactgacctaagggttcatggaagcatggcatcttgtccttgcttttagaacacccatggaagaaaacacagagtagatattgctgtcatttatacaactacagaaatttatctatgacctaatgaggcatctcggaagtcaaagaagagggaaagttaaccttttctactgatttcgtagtatattcagagctttcttttaagagctgtgaatgaaactttttctaagcactattctattgcacacaaacagaaaaccaaagccttattagacctaatttatgcataaagtagtattcctgagaactttattttggaaaatttataagaaagtaatccaaataagaaacacgatagttgaaaataatttttatagtaaataattgttttgggctgatttttcagtaaatccaaagtgacttaggttagaagttacactaaggaccaggggttggaatcagaatttagtttaagatttgaggaaaagggtaagggttagtttcagttttaggattagagctagaattgggttaggtgagaaagaaagttaaggttaaggctagagttgtctttaagggttagggttaggaccaggttaggtcagggttggattgggtttagattggggccagtgctggtgttagtgatagtgtcaggatggaggttaggtttggagtaagcgttgttgctgaagtgagttcaggctagcattaaattgtaagttctgaagctgatttggttatggggtctttcccctgtatactaccagttgtgtctttagatggcacacaagtccaaataagtggtcatacttctttattcagggtctcagctgcctgtacacctgctgcctacatcttcttggcaacaaagttacctgccacaggctctgctgagcctagttcctggtcagtaataactgaacagtgcattttggctttggatgtgtctgtggacaagcttgctgagtttctctaccatattctgagcacacggtctcttttgttctaacttcagcttcactgacactgggttgagcactactgtatgtggagggtttggtgattgggaatggatgggggacagtgaggaggacacaccagcccattagttgttaatcatcaatcacatctgattgttgaaggttattaaattaaaagaaagatcatttgtaacatactctttgtatatatttattatatgaaaggtgcaatattttattttgtacagtatgtaataaagacatgggacatatatttttcttattaacaaaatttcatattaaattgcttcactttgtatttaaagttaaaagttactatttttcatttgctattgtactttcattgttgtcattcaattgacattcctgtgtactgtattttactactgtttttataacatgagagttaatgtttctgtttcatgatccttatgtaattcagaaataaatttactttgattattcagtggcatccttataaaaaa

SEQ ID NO: 15046 - DNA, 338 bp, Homo sapiens
gggcatccaggaagagacacctcctgctgctcagctcagaggggaaacagggagtgtgtcccaaagctcgcatgcaaaaaactcaggcaagctgacattcaagccgaaaggacctgttctcatgaggcaaagccaacctccctcaatttcatttaataaaacaataaattccaggattggaaatacagtatacattacaaaaaggacagaggtcatcaatatactgtgtgaccttattacccccagtgaggccacatatacatggaccaaggatggaaccttgttacagccctcagtaaagtaagtaaaataaaaatgcagtattcatttttgcacta

SEQ ID NO: 15047 - DNA, 485 bp, Homo sapiens
catggaccaactctggcccaccacctgtttctcagaagaaaattttattggaactcagccacacttactcatttacatgttgtccttgactgcctttgtgtccagtgtcagaactgagtagctgcagcggaggttgtgcctctgggctttaatatcacaaacagagcagcttataagcaacagaaacttacttctcacagttttggaggctgggaagtccaagatcaaggtgtcaacatatttagggtctagggaaggtctgcttcttggttaatagaaagcacctttcactgtgtcttcacatggtagaaggggagagctctggtatcttcaggcccttataagggcactaatcccattcatgagcgctccaccctcacgacctaatcacctccaaaaggccccatttcataataccatcaattaagtttcattatatgactttgatggggatatagcccatagtaggttctatgtccctgaaa

SEQ ID NO: 15048 - DNA, 557 bp, Homo sapiens
ataatcggtgtacttgaggaagaagagaattctaaaagcctggaaagcatatttgggggaataatcgagaaaaacttccccggtcttgcaggagacttcaacatccaaatataagaagcacaaagaacacccaggaaattcatcacagaaagatcattgcctaggcacattgtcatcaggttatccaaagttaagacaaaggaaagaatcttaagagctgtgagacagaagcaccaggtaacctataaaggaaaacctatcagattaacagcagatttctcagcagaaaccctcaaagctagaagggattagggacctatcttcagcctcctcaaacaaaacagttatcagccaaaaattttgtatccagtgaaactaagtatcacatatgaaggaaagatacagccattttcagacaaacaaatgctgagagaatttgccaccaccaagctatcactaaaagaactgctaaaaggagctctaaatcttgaaacaaattctggaaatacatcaaaacagaacctctttaaaacataaatcacacagatctataaagc

SEQ ID NO: 15049 - DNA, 228 bp, Homo sapiens
ctactgagcgaggccctctaccccgagctgcatggctgtggagatgcctttgacaaaggatcgctggctagctagtgctggggttcagaggagagccatgtttctgcactaactgaaggctcccctgtggccagcactgttctgggtgtggcaggctggccccccggcaggagagagctgcccgaggccctgctctcctgcagcttgcattccccagtatgggacatg

SEQ ID NO: 15050 - DNA, 184 bp, Homo sapiens
gacctaatgcatggtgactatagggaataataatgtatatttgaatttgctaagacagtagaccttatgtgttctcaccacacacacacaaatggtaactacactgtaaggctcttttagaatttatctagcaagttttcttgtttttaccagaaaactcctcaaaaaaaagggaattgtatga

SEQ ID NO: 15051 - DNA, 335 bp, Homo sapiens
  misc_feature (118)..(118): n is a, c, g, or t
  misc_feature (138)..(138): n is a, c, g, or t
  misc_feature (170)..(170): n is a, c, g, or t
  misc_feature (199)..(199): n is a, c, g, or t
tggtagagacggggtttcaccatgttggccaggctggtcttgaactcctgacctcaggtgatccgcctgccttggcctccccaaagtgctgggattacaggcgtgagccaccatgccnggcctctttctcacctttanacctgtcttcttatcctcacatctgttttcanaccttcatccctgtcttcctcatgttcanacttgtcttccccatgttcatagctgcctttcttaccattttggtttgaagggcagtcttctctggcttgtttttttgtttttcccagaaaatcagtattattttttaaataagaaaaacattcctaaaaaaaaaa

SEQ ID NO: 15052 - DNA, 155 bp, Homo sapiens
gattagatggtatatacttattagacataattaacaggacacattttgtagctattattaaaatagaaacagaataaattaggctttcccaagccctgattatcttttcctttctttttcttcttttttcttaaaaacaaacaaacaaacaaaca

SEQ ID NO: 15053 - DNA, 372 bp, Homo sapiens
gtcagtcttttgcttgccctggctggtatcactgttttagatagctatgatgttaagtaattactgctgattgttttctacaaaaccccaggatagtgagttctgagtctggtaaaatataggctctgtgaatggggcttttcctgggagctgccagacaggtcaaaagtgagatttttctagagattggatttttggggaattccagacctattctacctgtccagtggatactagattactggttttcacagcaactgtctttgggcagcgtttggattttaagtttatgatagagctaaggagaaactgaaaggtcaagggcaagttcaaatgccacaaagtttacttctcttactgaaaatcaacctt

SEQ ID NO: 15054 - DNA, 520 bp, Homo sapiens
atcacttttgttacttacttttagggtacttttaaacacatcaattaacagagtaaaagaattcatattatcattcagtaggggcaactttcattacttctctttaggatattttggcaatctaactgtctccttgccaccgagatattcatcccatataccctcataagctttctgaaacacacactttatagcatcacctctctgctcaaaaaccttcagtgatgtccagctttctctgcaggtctttgaggcaccacaagatctggagctacgtacctttccaggctcccaactcttcctctgccctggtactatccctgtcccctcccatcccaggtcagagtatgaggagctcctgactcccttctttactcagtgaaattctacttaacattcaagatcctcagtaaaaaaaagaatcacctcctctcataagaaccctctaatctttccagttggaaaaaatcctgcttccatttatactctactcccaattgtaagttttaataaagtttac

SEQ ID NO: 15055 - DNA, 440 bp, Homo sapiens
tctggctttgccagtcgataggtatgtgaccctaggcaaattacgtagacactgagaaccagtttcttagggttattgcaaagaagaggcaagataattcacataaagcacacgaaatgcgttgggagcagtctgtagaaggtagctgttattattagggaaggaaagaggaacagagtgaaaggagggttgctggtaggattgggcagctagaaggatgagcaggtgggagagcccactgatagagtcctcactggctcagggtttacggagagaaagaaatgtgaggatggagagatagaggaacacatggaggggcaaggccctgcctcaggtgcaccgttcgatgccagtccttggtcctggtcactgggtagataaaccccccatgccttcccctctgcttcttccccaactcagtgtatcccattctaccaggt

SEQ ID NO: 15056 - DNA, 2409 bp, Homo sapiens
cctggagtgaagggcacaagatgcttttattttaaacccctaaaagtgttgcaaagtgtttttaatttcatataaatagttaaggatcacatgaacacaatccagtacaaatgggtccaggagcttcaacgagcgttccagcttcttcgtaacgttcccacaccgtgcagcaagcggagggaagagaacttccggcgcccccacctaccgctccccagccgtgtcccgctgctctaaatctgcagacttgatcgattgcttctgcctgggcggtaccgcccgaattgactgctcctgtctgatgcgtccccgggcgcgggaaacgagtttcaatccactttcctgaccccaaccatcctgcccagtctccgcttccccgtcttgtacacccctaactcctgaggctcctccgaatcacgcgagtggaagcggagaagctcaagtggccgccatgtcagaggcttatttccgagtggagtcgggtgcgctggggcctgaggagaactttctttctttggacgacatcctgatgtcccacgagaagctgccggtgcgcacggagaccgccatgcctcgccttggcgctttcttcctggagcggagcgcaggcgccgagactgacaacgcggtcccacagggttccaagcttgaactacccttgtggctggcaaaaggactttttgacaacaagcgacggatcctttctgtggaactccccaagatctaccaagagggttggaggactgtgttcagtgcagatcccaatgtggtggacctccacaaaatggggccccatttctacgggtttggctcccagctcctgcattttgacagtcccgagaatgcagacatttcccagtctctgctgcagacttttatcggacgttttcgccgcatcatggactcctcacagaatgcttacaacgaagacacttcagccctggtagccaggctagacgagatggagaggggcttatttcaaacagggcagaaaggactgaatgactttcagtgttgggagaaggggcaggcttctcagatcacagcttccaacctcgttcagaattacaagaagagaaaattcactgatatggaagactgaaagccggaagaacacagaatggctcctcacagacgtatccctccgtgtgtccttgataggagctggttgaccttgtacagaaccagaatcctgtcccatttcatggcttatttcctgtggccatagagaattatagggaactggacatgctggaggatgtgggtgtccctggctctgtgagtcttccaggaccgtcccaccctgctgacccacagcccaggccctttaacccaagaacccatggccaaggagaaatcaaagtccttcctaaataagaatcactgccatataatatatcacagtagagttgcaactgagattccttgtgtctgggagtttggacagcttcagatgtacagtttcactagccacaaagcacaggtacaaactgggtcatcgcctgttcacaaaatgctctcttgatcttatttgcctcatcttcctcatggttgtacagaggatagcaccccaccatgccagcctgacttggagatatctcctgctgcctgcctgcagggagttaccccagtttccaaaaacagtcgcccagataaaggaggaaaagggaaaggcagacgaatggcatggcttttactaaagaaaagatgttggcctcatactctatactcagggcttaatgaactggaatctgcataactcagcagtcaacccagaagggaaatggttaaactgagcttgttattgcctcggagagcctaagagcacccgcacacttaattctactccctgtctagaaaagctgtcagggagtcgtttggaattgcaatgtagttattaagggctgttaaccagcctgcattacatctggaagtcaggacttgggtgctgactatgaagggccctgttttcaaaatctaacattgcaagtgtaaatgggcaagaagcctccgttgtgctttttttttcctcttcagtaacttttgcaacattattgcatagaagatccctgaccatttactaggaacctggttaagcaagcactaatctcttttcctggagatcaaggatgcaacctcaggttgagaaagaaacagggttccctgggcccattagactgtttgcagggcatcactgcttccccctgacacctcacaactagcaaaaattgtctttgtctttggaaattatagagggatttgggtatccagattgtgcagatgcaaacttaggctgtcttgatgcaaacttagaaccacagaaatgcttttaaaatgcctgttttaagatggaattgttgtttttataatttgattttagtgctaaataaatgattggctttgtacatg

SEQ ID NO: 15057 - DNA, 2175 bp, Homo sapiens
cctggagtgaagggcacaagatgcttttattttaaacccctaaaagtgttgcaaagtgtttttaatttcatataaatagttaaggatcacatgaacacaatccagtacaaatgggtccaggagcttcaacgagcgttccagcttcttcgtaacgttcccacaccgtgcagcaagcggagggaagagaacttccggcgcccccacctaccgctccccagccgtgtcccgctgctctaaatctgcagacttgatcgattgcttctgcctgggcggtaccgcccgaattgactgctcctgtctgatgcgtccccgggcgcgggaaacgagtttcaatccactttcctgaccccaaccatcctgcccagtctccgcttccccgtcttgtacacccctaactcctgaggctcctccgaatcacgcgagtggaagcggagaagctcaagtggccgccatgtcagaggcttatttccgagtggagtcgggtgcgctggggcctgaggagaactttctttctttggacgacatcctgatgtcccacgagaagctgccggtgcgcacggagaccgccatgcctcgccttggcgctttcttcctggagcggagcgcaggcgccgagactgacaacgcggtcccacagacttttatcggacgttttcgccgcatcatggactcctcacagaatgcttacaacgaagacacttcagccctggtagccaggctagacgagatggagaggggcttatttcaaacagggcagaaaggactgaatgactttcagtgttgggagaaggggcaggcttctcagatcacagcttccaacctcgttcagaattacaagaagagaaaattcactgatatggaagactgaaagccggaagaacacagaatggctcctcacagacgtatccctccgtgtgtccttgataggagctggttgaccttgtacagaaccagaatcctgtcccatttcatggcttatttcctgtggccatagagaattatagggaactggacatgctggaggatgtgggtgtccctggctctgtgagtcttccaggaccgtcccaccctgctgacccacagcccaggccctttaacccaagaacccatggccaaggagaaatcaaagtccttcctaaataagaatcactgccatataatatatcacagtagagttgcaactgagattccttgtgtctgggagtttggacagcttcagatgtacagtttcactagccacaaagcacaggtacaaactgggtcatcgcctgttcacaaaatgctctcttgatcttatttgcctcatcttcctcatggttgtacagaggatagcaccccaccatgccagcctgacttggagatatctcctgctgcctgcctgcagggagttaccccagtttccaaaaacagtcgcccagataaaggaggaaaagggaaaggcagacgaatggcatggcttttactaaagaaaagatgttggcctcatactctatactcagggcttaatgaactggaatctgcataactcagcagtcaacccagaagggaaatggttaaactgagcttgttattgcctcggagagcctaagagcacccgcacacttaattctactccctgtctagaaaagctgtcagggagtcgtttggaattgcaatgtagttattaagggctgttaaccagcctgcattacatctggaagtcaggacttgggtgctgactatgaagggccctgttttcaaaatctaacattgcaagtgtaaatgggcaagaagcctccgttgtgctttttttttcctcttcagtaacttttgcaacattattgcatagaagatccctgaccatttactaggaacctggttaagcaagcactaatctcttttcctggagatcaaggatgcaacctcaggttgagaaagaaacagggttccctgggcccattagactgtttgcagggcatcactgcttccccctgacacctcacaactagcaaaaattgtctttgtctttggaaattatagagggatttgggtatccagattgtgcagatgcaaacttaggctgtcttgatgcaaacttagaaccacagaaatgcttttaaaatgcctgttttaagatggaattgttgtttttataatttgattttagtgctaaataaatgattggctttgtacatg

SEQ ID NO: 15058 - DNA, 1063 bp, Homo sapiens
cctggagtgaagggcacaagatgcttttattttaaacccctaaaagtgttgcaaagtgtttttaatttcatataaatagttaaggatcacatgaacacaatccagtacaaatgggtccaggagcttcaacgagcgttccagcttcttcgtaacgttcccacaccgtgcagcaagcggagggaagagaacttccggcgcccccacctaccgctccccagccgtgtcccgctgctctaaatctgcagacttgatcgattgcttctgcctgggcggtaccgcccgaattgactgctcctgtctgatgcgtccccgggcgcgggaaacgagtttcaatccactttcctgaccccaaccatcctgcccagtctccgcttccccgtcttgtacacccctaactcctgaggctcctccgaatcacgcgagtggaagcggagaagctcaagtggccgccatgtcagaggcttatttccgagtggagtcgggtgcgctggggcctgaggagaactttctttctttggacgacatcctgatgtcccacgagaagctgccggtgcgcacggagaccgccatgcctcgccttggcgctttcttcctggagcggagcgcaggcgccgagactgacaacgcggtcccacagggttttgctctgttgcccaggctggagtgcagtggtgtgatatggctcactgcagccttgacctcccaggctccagagatcctcccacctcagccacctatgtggctggtattgcagggttccaagcttgaactacccttgtggctggcaaaaggactttttgacaacaagcgacggatcctttctgtggaactccccaagatctaccaagagggttggaggactgtgttcagtgcagatcccaatgtggtggacctccacaaaatggggccccatttctacgggtttggctcccagctcctgcattttgacagtcccgagaatgcagacatttcccagtctctgctgcagacttttatcggacgttttcgcggatcatggatcctccagatgtttcaagaaaaacttttcccgggtcccgcgaaa

SEQ ID NO: 15059 - DNA, 2584 bp, Homo sapiens
cctggagtgaagggcacaagatgcttttattttaaacccctaaaagtgttgcaaagtgtttttaatttcatataaatagttaaggatcacatgaacacaatccagtacaaatgggtccaggagcttcaacgagcgttccagcttcttcgtaacgttcccacaccgtgcagcaagcggagggaagagaacttccggcgcccccacctaccgctccccagccgtgtcccgctgctctaaatctgcagacttgatcgattgcttctgcctgggcggtaccgcccgaattgactgctcctgtctgatgcgtccccgggcgcgggaaacgagtttcaatccactttcctgaccccaaccatcctgcccagtctccgcttccccgtcttgtacacccctaactcctgaggctcctccgaatcacgcgagtggaagcggagaagctcaagtggccgccatgtcagaggcttatttccgagtggagtcgggtgcgctggggcctgaggagaactttctttctttggacgacatcctgatgtcccacgagaagctgccggtgcgcacggagaccgccatgcctcgccttggcgctttcttcctggagcggagcgcaggcgccgagactgacaacgcggtcccacaggtgggttcttggtctcgctggtctcgctgacttcaagaatgaagccgaagacccttgtgggttccaagcttgaactacccttgtggctggcaaaaggactttttgacaacaagcgacggatcctttctgtggaactccccaagatctaccaagagggttggaggactgtgttcagtgcagatcccaatgtggtggacctccacaaaatggggccccatttctacgggtttggctcccagctcctgcattttgacagtcccgagaatgcagacatttcccagtctctgctgcagacttttatcggacgttttcgccgcatcatggactcctcacagaatgcttacaacgaagacacttcagccctggtagccaggctagacgagatggagaggggcttatttcaaacagggcagaaaggactgaatgactttcagtgttgggagaaggggcaggcttctcagatcacagcttccaacctcgttcagaattacaagaagagaaaattcactgatatggaagactgaaagccggaagaacacagaatggctcctcacagacgtatccctccgtgtgtccttgataggagctggttgaccttgtacagaaccagaatcctgtcccatttcatggcttatttcctgtggccatagagaattatagggaactggacatgctggaggatgtgggtgtccctggctctgtgagtcttccaggaccgtcccaccctgctgacccacagcccaggccctttaacccaagaacccatggccaaggagaaatcaaagtccttcctaaataagaatcactgccatataatatatcacagtagagttgcaactgagattccttgtgtctgggagtttggacagcttcagatgtacagtttcactagccacaaagcacaggtacaaactgggtcatcgcctgttcacaaaatgctctcttgatcttatttgcctcatcttcctcatggttgtacagaggatagcaccccaccatgccagcctgacttggagatatctcctgctgcctgcctgcagggagttaccccagtttccaaaaacagtcgcccagataaaggaggaaaagggaaaggcagacgaatggcatggcttttactaaagaaaagatgttggcctcatactctatactcagggcttaatgaactggaatctgcataactcagcagtcaacccagaagggaaatggttaaactgagcttgttattgcctcggagagcctaagagcacccgcacacttaattctactccctgtctagaaaagctgtcagggagtcgtttggaattgcaatgtagttattaagggctgttaaccagcctgcattacatctggaagtcaggacttgggtgctgactatgaagggccctgttttcaaaatctaacattgcaagtgtaaatgggcaagaagcctccgttgtgctttttttttcctcttcagtaacttttgcaacattattgcatagaagatccctgaccatttactaggaacctggttaagcaagcactaatctcttttcctggagatcaaggatgcaacctcaggttgagaaagaaacagggttccctgggcccattagactgtttgcagggcatcactgcttccccctgacacctcacaactagcaaaaattgtctttgtctttggaaattatagagggatttgggtatccagattgtgcagatgcaaacttaggctgtcttgatgcaaacttagaaccacagaaatgcttttaaaatgcctgttttaagatggaattgttgtttttataatttgattttagtgctaaataaatgattggctttgtacatgaatatgttctgtacaagtgctctttcactagtactacagataatcaaagctatcagaattgtgtctttgatcatatttgacggtaatacacaaataaatccatgttttagcaaaag

SEQ ID NO: 15060 - DNA, 1761 bp, Homo sapiens
cctggagtgaagggcacaagatgcttttattttaaacccctaaaagtgttgcaaagtgtttttaatttcatataaatagttaaggatcacatgaacacaatccagtacaaatgggtccaggagcttcaacgagcgttccagcttcttcgtaacgttcccacaccgtgcagcaagcggagggaagagaacttccggcgcccccacctaccgctccccagccgtgtcccgctgctctaaatctgcagacttgatcgattgcttctgcctgggcggtaccgcccgaattgactgctcctgtctgatgcgtccccgggcgcgggaaacgagtttcaatccactttcctgaccccaaccatcctgcccagtctccgcttccccgtcttgtacacccctaactcctgaggctcctccgaatcacgcgagtggaagcggagaagctcaagtggccgccatgtcagaggcttatttccgagtggagtcgggtgcgctggggcctgaggagaactttctttctttggacgacatcctgatgtcccacgagaagctgccggtgcgcacggagaccgccatgcctcgccttggcgctttcttcctggagcggagcgcaggcgccgagactgacaacgcggtcccacagggttccaagcttgaactacccttgtggctggcaaaaggactttttgacaacaagcgacggatcctttctgtggaactccccaagatctaccaagagggttggaggactgtgttcagtgcagatcccaatgtggtggacctccacaaaatggggccccatttctacgggtttggctcccagctcctgcattttgacagtcccgagaatgcagacatttcccagtctctgctgcagacttttatcggacgttttcgccgcatcatggactcctcacagaatgcttacaacgaagacacttcagccctggtagccaggctagacgagatggagaggggcttatttcaaacagggcagaaaggactgaatgactttcagtgttgggagaaggggcaggcttctcagatcacagcttccaacctcgttcagaattacaagaagagaaaattcactgatatggaagactgaaagccggaagaacacagaatggctcctcacagacgtatccctccgtgtgtccttgataggagctggttgaccttgtacagaaccagaatcctgtcccatttcatggcttatttcctgtggccatagagaattatagggaactggacatgctggaggatgtgggtgtccctggctctgtgagtcttccaggaccgtcccaccctgctgacccacagcccaggccctttaacccaagaacccatggccaaggagaaatcaaagtccttcctaaataagaatcactgccatataatatatcacagtagagttgcaactgagattccttgtgtctgggagtttggacagcttcagatgtacagtttcactagccacaaagcacaggtacaaactgggtcatcgcctgttcacaaaatgctctcttgatcttatttgcctcatcttcctcatggttgtacagaggatagcaccccaccatgccagcctgacttggagatatctcctgctgcctgcctgcagggagttaccccagtttccaaaaacagtcgcccagataaaggaggaaaagggaaaggcagacgaatggcatggcttttactaaagaaaagatgttggcctcatactctatactggccaagtcattaacctctcgacctcatcga

SEQ ID NO: 15061 - DNA, 757 bp, Homo sapiens
cctggagtgaagggcacaagatgcttttattttaaacccctaaaagtgttgcaaagtgtttttaatttcatataaatagttaaggatcacatgaacacaatccagtacaaatgggtccaggagcttcaacgagcgttccagcttcttcgtaacgttcccacaccgtgcagcaagcggagggaagagaacttccggcgcccccacctaccgctccccagccgtgtcccgctgctctaaatctgcagacttgatcgattgcttctgcctgggcggtaccgcccgaattgactgctcctgtctgatgcgtccccgggcgcgggaaacgagtttcaatccactttcctgaccccaaccatcctgcccagtctccgcttccccgtcttgtacacccctaactcctgaggctcctccgaatcacgcgagtggaagcggagaagctcaagtggccgccatgtcagaggcttatttccgagtggagtcgggtgcgctggggcctgaggagaactttctttctttggacgacatcctgatgtcccacgagaagctgccggtgcgcacggagaccgccatgcctcgccttggcgctttcttcctggagcggagcgcaggcgccgagactgacaacgcggtcccacagtcaaataggccggatgcggtggctcacgcctgtaatcccagcactttgggaggctgaggcgggcggatcacgaggtcaagagatccagaccatcctggccaacatggtgaaaccccatct

SEQ ID NO: 15062 - DNA, 2525 bp, Homo sapiens
cctggagtgaagggcacaagatgcttttattttaaacccctaaaagtgttgcaaagtgtttttaatttcatataaatagttaaggatcacatgaacacaatccagtacaaatgggtccaggagcttcaacgagcgttccagcttcttcgtaacgttcccacaccgtgcagcaagcggagggaagagaacttccggcgcccccacctaccgctccccagccgtgtcccgctgctctaaatctgcagacttgatcgattgcttctgcctgggcggtaccgcccgaattgactgctcctgtctgatgcgtccccgggcgcgggaaacgagtttcaatccactttcctgaccccaaccatcctgcccagtctccgcttccccgtcttgtacacccctaactcctgaggctcctccgaatcacgcgagtggaagcggagaagctcaagtggccgccatgtcagaggcttatttccgagtggagtcgggtgcgctggggcctgaggagaactttctttctttggacgacatcctgatgtcccacgagaagctgccggtgcgcacggagaccgccatgcctcgccttggcgctttcttcctggagcggagcgcaggcgccgagactgacaacgcggtcccacagggttccaagcttgaactacccttgtggctggcaaaaggactttttgacaacaagcgacggatcctttctgtggaactccccaagatctaccaagagggttggaggactgtgttcagtgcagatcccaatgtggtggacctccacaaaatggggccccatttctacgggtttggctcccagctcctgcattttgacagtcccgagaatgcagacatttcccagtctctgctgcagacttttatcggacgttttcgccgcatcatggactcctcacagaatgcttacaacgaagacacttcagccctggtagccaggctagacgagatggagaggggcttatttcaaacagggcagaaaggactgaatgactttcagtgttgggagaaggggcaggcttctcagatcacagcttccaacctcgttcagaattacaagaagagaaaattcactgatatggaagactgaaagccggaagaacacagaatggctcctcacagacgtatccctccgtgtgtccttgataggagctggttgaccttgtacagaaccagaatcctgtcccatttcatggcttatttcctgtggccatagagaattatagggaactggacatgctggaggatgtgggtgtccctggctctgtgagtcttccaggaccgtcccaccctgctgacccacagcccaggccctttaacccaagaacccatggccaaggagaaatcaaagtccttcctaaataagaatcactgccatataatatatcacagtagagttgcaactgagattccttgtgtctgggagtttggacagcttcagatgtacagtttcactagccacaaagcacaggtacaaactgggtcatcgcctgttcacaaaatgctctcttgatcttatttgcctcatcttcctcatggttgtacagaggatagcaccccaccatgccagcctgacttggagatatctcctgctgcctgcctgcagggagttaccccagtttccaaaaacagtcgcccagataaaggaggaaaagggaaaggcagacgaatggcatggcttttactaaagaaaagatgttggcctcatactctatactcagggcttaatgaactggaatctgcataactcagcagtcaacccagaagggaaatggttaaactgagcttgttattgcctcggagagcctaagagcacccgcacacttaattctactccctgtctagaaaagctgtcagggagtcgtttggaattgcaatgtagttattaagggctgttaaccagcctgcattacatctggaagtcaggacttgggtgctgactatgaagggccctgttttcaaaatctaacattgcaagtgtaaatgggcaagaagcctccgttgtgctttttttttcctcttcagtaacttttgcaacattattgcatagaagatccctgaccatttactaggaacctggttaagcaagcactaatctcttttcctggagatcaaggatgcaacctcaggttgagaaagaaacagggttccctgggcccattagactgtttgcagggcatcactgcttccccctgacacctcacaactagcaaaaattgtctttgtctttggaaattatagagggatttgggtatccagattgtgcagatgcaaacttaggctgtcttgatgcaaacttagaaccacagaaatgcttttaaaatgcctgttttaagatggaattgttgtttttataatttgattttagtgctaaataaatgattggctttgtacatgaatatgttctgtacaagtgctctttcactagtactacagataatcaaagctatcagaattgtgtctttgatcatatttgacggtaatacacaaataaatccatgttttagcaaaag

SEQ ID NO: 15063 - DNA, 1255 bp, Homo sapiens
  misc_feature (1116)..(1116): n is a, c, g, or t
  misc_feature (1119)..(1119): n is a, c, g, or t
cctggagtgaagggcacaagatgcttttattttaaacccctaaaagtgttgcaaagtgtttttaatttcatataaatagttaaggatcacatgaacacaatccagtacaaatgggtccaggagcttcaacgagcgttccagcttcttcgtaacgttcccacaccgtgcagcaagcggagggaagagaacttccggcgcccccacctaccgctccccagccgtgtcccgctgctctaaatctgcagacttgatcgattgcttctgcctgggcggtaccgcccgaattgactgctcctgtctgatgcgtccccgggcgcgggaaacgagtttcaatccactttcctgaccccaaccatcctgcccagtctccgcttccccgtcttgtacacccctaactcctgaggctcctccgaatcacgcgagtggaagcggagaagctcaagtggccgccatgtcagaggcttatttccgagtggagtcgggtgcgctggggcctgaggagaactttctttctttggacgacatcctgatgtcccacgagaagctgccggtgcgcacggagaccgccatgcctcgccttggcgctttcttcctggagcggagcgcaggcgccgagactgacaacgcggtcccacagacttttatcggacgttttcgccgcatcatggactcctcacagaatgcttacaacgaagacacttcagccctggtagccaggctagacgagatggagaggggcttatttcaaacagggcagaaaggactgaatgactttcagtgttgggagaaggggcaggcttctcagatcacagcttccaacctcgttcagaattacaagaagagaaaattcactgatatggaagactgaaagccggaagaacacagaatggctcctcacagacgtatccctccgtgtgtccttgataggagctggttgaccttgtacagaaccagaatcctgtcccatttcatggcttatttcctgtggccatagagaattatagggaactggacatgctggaggatgtgggtgtccctggctctgtgagtcttccaggaccgtcccaccctgctgacccacagcccaggccctttaacccaagaacctggccaggnaancaacctctcaatagatctggcttttttccagggagtgcctggatcttggttggggtggacgtccatttctcccccccgggactggtcccgtcagctgtctttcctcccgtggggcccccgttgttttcgccgggcc

SEQ ID NO: 15064 - DNA, 2183 bp, Homo sapiens
taggctaggtacgaggccgggtggtgcaggttccccgtcttgtacacccctaactcctgaggctcctccgaatcacgcgagtggaagcggagaagctcaagtggccgccatgtcagaggcttatttccgagtggagtcgggtgcgctggggcctgaggagaactttctttctttggacgacatcctgatgtcccacgagaagctgccggtgcgcacggagaccgccatgcctcgccttggcgctttcttcctggagcggagcgcaggcgccgagactgacaacgcggtcccacagggttccaagcttgaactacccttgtggctggcaaaaggactttttgacaacaagcgacggatcctttctgtggaactccccaagatctaccaagagggttggaggactgtgttcagtgcagatcccaatgtggtggacctccacaaaatggggccccatttctacgggtttggctcccagctcctgcattttgacagtcccgagaatgcagacatttcccagtctctgctgcagacttttatcggacgttttcgccgcatcatggactcctcacagaatgcttacaacgaagacacttcagccctggtagccaggctagacgagatggagaggggcttatttcaaacagggcagaaaggactgaatgactttcagtgttgggagaaggggcaggcttctcagatcacagcttccaacctcgttcagaattacaagaagagaaaattcactgatatggaagactgaaagccggaagaacacagaatggctcctcacagacgtatccctccgtgtgtccttgataggagctggttgaccttgtacagaaccagaatcctgtcccatttcatggcttatttcctgtggccatagagaattatagggaactggacatgctggaggatgtgggtgtccctggctctgtgagtcttccaggaccgtcccaccctgctgacccacagcccaggccctttaacccaagaacccatggccaaggagaaatcaaagtccttcctaaataagaatcactgccatataatatatcacagtagagttgcaactgagattccttgtgtctgggagtttggacagcttcagatgtacagtttcactagccacaaagcacaggtacaaactgggtcatcgcctgttcacaaaatgctctcttgatcttatttgcctcatcttcctcatggttgtacagaggatagcaccccaccatgccagcctgacttggagatatctcctgctgcctgcctgcagggagttaccccagtttccaaaaacagtcgcccagataaaggaggaaaagggaaaggcagacgaatggcatggcttttactaaagaaaagatgttggcctcatactctatactcagggcttaatgaactggaatctgcataactcagcagtcaacccagaagggaaatggttaaactgagcttgttattgcctcggagagcctaagagcacccgcacacttaattctactccctgtctagaaaagctgtcagggagtcgtttggaattgcaatgtagttattaagggctgttaaccagcctgcattacatctggaagtcaggacttgggtgctgactatgaagggccctgttttcaaaatctaacattgcaagtgtaaatgggcaagaagcctccgttgtgctttttttttcctcttcagtaacttttgcaacattattgcatagaagatccctgaccatttactaggaacctggttaagcaagcactaatctcttttcctggagatcaaggatgcaacctcaggttgagaaagaaacagggttccctgggcccattagactgtttgcagggcatcactgcttccccctgacacctcacaactagcaaaaattgtctttgtctttggaaattatagagggatttgggtatccagattgtgcagatgcaaacttaggctgtcttgatgcaaacttagaaccacagaaatgcttttaaaatgcctgttttaagatggaattgttgtttttataatttgattttagtgctaaataaatgattggctttgtacatgaatatgttctgtacaagtgctctttcactagtactacagataatcaaagctatcagaattgtgtctttgatcatatttgacggtaatacacaaataaatccatgttttagcaaaag

SEQ ID NO: 15065 - DNA, 2642 bp, Homo sapiens
cctggagtgaagggcacaagatgcttttattttaaacccctaaaagtgttgcaaagtgtttttaatttcatataaatagttaaggatcacatgaacacaatccagtacaaatgggtccaggagcttcaacgagcgttccagcttcttcgtaacgttcccacaccgtgcagcaagcggagggaagagaacttccggcgcccccacctaccgctccccagccgtgtcccgctgctctaaatctgcagacttgatcgattgcttctgcctgggcggtaccgcccgaattgactgctcctgtctgatgcgtccccgggcgcgggaaacgagtttcaatccactttcctgaccccaaccatcctgcccagtctccgcttccccgtcttgtacacccctaactcctgaggctcctccgaatcacgcgagtggaagcggagaagctcaagtggccgccatgtcagaggcttatttccgagtggagtcgggtgcgctggggcctgaggagaactttctttctttggacgacatcctgatgtcccacgagaagctgccggtgcgcacggagaccgccatgcctcgccttggcgctttcttcctggagcggagcgcaggcgccgagactgacaacgcggtcccacagggttttgctctgttgcccaggctggagtgcagtggtgtgatatggctcactgcagccttgacctcccaggctccagagatcctcccacctcagccacctatgtggctggtattgcagggttccaagcttgaactacccttgtggctggcaaaaggactttttgacaacaagcgacggatcctttctgtggaactccccaagatctaccaagagggttggaggactgtgttcagtgcagatcccaatgtggtggacctccacaaaatggggccccatttctacgggtttggctcccagctcctgcattttgacagtcccgagaatgcagacatttcccagtctctgctgcagacttttatcggacgttttcgccgcatcatggactcctcacagaatgcttacaacgaagacacttcagccctggtagccaggctagacgagatggagaggggcttatttcaaacagggcagaaaggactgaatgactttcagtgttgggagaaggggcaggcttctcagatcacagcttccaacctcgttcagaattacaagaagagaaaattcactgatatggaagactgaaagccggaagaacacagaatggctcctcacagacgtatccctccgtgtgtccttgataggagctggttgaccttgtacagaaccagaatcctgtcccatttcatggcttatttcctgtggccatagagaattatagggaactggacatgctggaggatgtgggtgtccctggctctgtgagtcttccaggaccgtcccaccctgctgacccacagcccaggccctttaacccaagaacccatggccaaggagaaatcaaagtccttcctaaataagaatcactgccatataatatatcacagtagagttgcaactgagattccttgtgtctgggagtttggacagcttcagatgtacagtttcactagccacaaagcacaggtacaaactgggtcatcgcctgttcacaaaatgctctcttgatcttatttgcctcatcttcctcatggttgtacagaggatagcaccccaccatgccagcctgacttggagatatctcctgctgcctgcctgcagggagttaccccagtttccaaaaacagtcgcccagataaaggaggaaaagggaaaggcagacgaatggcatggcttttactaaagaaaagatgttggcctcatactctatactcagggcttaatgaactggaatctgcataactcagcagtcaacccagaagggaaatggttaaactgagcttgttattgcctcggagagcctaagagcacccgcacacttaattctactccctgtctagaaaagctgtcagggagtcgtttggaattgcaatgtagttattaagggctgttaaccagcctgcattacatctggaagtcaggacttgggtgctgactatgaagggccctgttttcaaaatctaacattgcaagtgtaaatgggcaagaagcctccgttgtgctttttttttcctcttcagtaacttttgcaacattattgcatagaagatccctgaccatttactaggaacctggttaagcaagcactaatctcttttcctggagatcaaggatgcaacctcaggttgagaaagaaacagggttccctgggcccattagactgtttgcagggcatcactgcttccccctgacacctcacaactagcaaaaattgtctttgtctttggaaattatagagggatttgggtatccagattgtgcagatgcaaacttaggctgtcttgatgcaaacttagaaccacagaaatgcttttaaaatgcctgttttaagatggaattgttgtttttataatttgattttagtgctaaataaatgattggctttgtacatgaatatgttctgtacaagtgctctttcactagtactacagataatcaaagctatcagaattgtgtctttgatcatatttgacggtaatacacaaataaatccatgttttagcaaaag

SEQ ID NO: 15066 - DNA, 935 bp, Homo sapiens
cggaacgcgtgggtcgacccacgcgtccgggccacatttcatgtctttgaaagtgttgtacattactgtaaaccaagtactctgtctacaccagagggtgctttaactgcaaaatatttgagaaacaattcagtctctcaaacattttggcacagttcatcactccagtttgttactttcttgagaatagtccattttttgtttttgttattataccgtatgttctggtcattggaaacagaacagctcatagttgggtgatgtaatataataacagtaatataacctagtagtcattttgcttcaagtaatttaattagatagcaaaatcactgcggtttgtttattacacttgtagggctttttgtcttactcagtgaccatcactacgaatgtcttacattgaagcacagactgcagagcacttgttaacttagtcctcctgcataatgcactcgtgaaaagtagtgcttgctaggtgtttgaagattttatgatccgtgtgcttgggctcgttgagttatttgtaaaataaacatttagtttgagttgatgcagtaagttttttggactagtagtatccaggtccctactctactgaaaatataatcttcactatctccccttaagtcagaggagatgtagcatttagaacaccttgagacatgacattgtaaaatagcttgttttatgttcctgaagctatcttgttctctgttaaagctactaattgtctcagtgtaagttttaaataaacatatttcttaaaaaacaaagagaaaataacagaacaaaaaaggggggggctaagagtacccggggcacaaatgctgaccagttttgtaaagggcccagggagggtataaagggaggggggaaacagaggggaaggtgtgttggggagctttgggagagggaacgaagggcgggaaaag

SEQ ID NO: 15067 - DNA, 1597 bp, Homo sapiens
  misc_feature (1540)..(1540): n is a, c, g, or t
  misc_feature (1559)..(1560): n is a, c, g, or t
gcaggtgtgtaccaccacgcccggctaatttttgtatttttaatagagatggggtttcaccatgttggttaggctggtctcgaactcctgacctcgtgatccgcccacctcagcctctcaaagcgctgggattacaggcatgagccaccatgcccagccctcaaatttactcttaatgctcagttaatataaaggattcctaacagtttacaatgtggttttcttgtttttgttgttgttttggttttttaagatgtgaggtctcaccttattggccaggctggtctcaagctcctttcctcaagcaatcctcccaccttggcctcccaaagagccacctgtccaatgatttatcctgtttcttaaggactgtctttaccttcttagacattttgtcataccattctagaagtcaaattccaagtgcagtgattttttttttccctagtccattatagttaatcttcttgttagtgatcaaataccaaaagagaaaagcacaaccagaaattttggctatttgctgcaagttgtaggtcttgggctctatactaagaacttgaaatttttaaattagtatccctgcctaggtgaaaagtttttaataaatgtgttgaaaatcaactttaaatccatttaatttagactggagtgggcgtgagaaactgcaagtctatttctacatataaggatatattattatattgtcccatcccaccactacctttttctcaatttctatttctttgtagttattttagtaaaagccatttggattctgagaagcactaattcttagctgtgataggtctatgcaagtaagacagaatcattaaatgaagctcactaaatgaagttctcatttctctccaacagactgtgctagcaaacttcgttttcttgattgtatttaaataatttagtatctcactacgataatagtttttaactggaagggtgtgatgtgtttttttgttttttgttctcagagttgtcttctgagataattattaccaagtcatttgtggggttgtgtttttttcacatcatgtgacagaaattataactcataagatttaggcataatctggttttaaaccttgattgaaactgttgttttttaacttagcaggcagcctaggccatggctgaaaagaaggggtaagtccttcattgcatgatgatgtgtgcaggttttcctgattttctaatttttatttttgaattcacatgtgtaatttcacatcaataacttgtgtttctgaaatatcctaactaacttgttaataaggaaagaaaccagatttgcttaaatctgttcaaggctgacattctgaaattctaaactggaaataacttcccagagtatttggaaaggttctaagtacaaggatcaggcctaaaatagctccttgggaaagaaatttcctttttgatgagaaaacttaaaatactgtttttggtaatgtaagcagttaaaaacatgactttagaaagacagcttaatgcgtattcaagcaaacctttggttgggggtttnctttggtggagagaggagnnttttcccggaatagttttgcttgggggggctcttttt

SEQ ID NO: 15068 - DNA, 1223 bp, Homo sapiens
gcaggtgtgtaccaccacgcccggctaatttttgtatttttaatagagatggggtttcaccatgttggttaggctggtctcgaactcctgacctcgtgatccgcccacctcagcctctcaaagcgctgggattacaggcatgagccaccatgcccagccctcaaatttactcttaatgctcagttaatataaaggattcctaacagtttacaatgtggttttcttgtttttgttgttgttttggttttttaagatgtgaggtctcaccttattggccaggctggtctcaagctcctttcctcaagcaatcctcccaccttggcctcccaaagagccacctgtccaatgatttatcctgtttcttaaggactgtctttaccttcttagacattttgtcataccattctagaagtcaaattccaagtgcagtgattttttttttccctagtccattatagttaatcttcttgttagtgatcaaataccaaaagagaaaagcacaaccagaaattttggctatttgctgcaagttgtaggtcttgggctctatactaagaacttgaaatttttaaattagtatccctgcctaggtgaaaagtttttaataaatgtgttgaaaatcaactttaaatccatttaatttagactggagtgggcgtgagaaactgcaagtctatttctacatataaggatatattattatattgtcccatcccaccactacctttttctcaatttctatttctttgtagttattttagtaaaagccatttggattctgagaagcactaattcttagctgtgataggtctatgcaagtaagacagaatcattaaatgaagctcactaaatgaagttctcatttctctccaacagactgtgctagcaaacttcgttttcttgattgtatttaaataatttagtatctcactacgataatagtttttaactggaagggtgtgatgtgtttttttgttttttgttctcagagttgtcttctgagataattattaccaagtcatttgtggggttgtgtttttttcacatcatgtgacagacatcttaccccctccgtttacgcctcccctccgcttcttctaaccacccccccgctcctctcttctccccttacctcccctgccctcctccccgtccccctcctcttttcgccttccacccgtctccttcccatcacccttctcccccctctgctgtaccgcccc

SEQ ID NO: 15069 - DNA, 462 bp, Homo sapiens
gtgactcttagagtgatccccaattactacaacaccaattttatttgcacatttactttgatattctttttcattttttattaaatgattggttttggcaagatctgacttctgcattgagccctcatctgcaggaggcatgtgcaatagtgagactgaaatttgaatgaaaacactcaatatttcagcaagataatttgagaatgtttgcattgatattttcttatgtttatctagaaatgccagtttccttcctagaagatgtgactgatgagaaattttttactggctcatgcattttttgaatatttttcattagcagctgtttatagactttaagccttcaatctgaggtgacggtagttggcaaaagtatagatctttagctaattgactaaatacagagcaagttacatgtgtgaactttgtttctctaagaagaaaagtattagtgtagactgg

SEQ ID NO: 15070 - DNA, 3219 bp, Homo sapiens
gcaggtgtgtaccaccacgcccggctaatttttgtatttttaatagagatggggtttcaccatgttggttaggctggtctcgaactcctgacctcgtgatccgcccacctcagcctctcaaagcgctgggattacaggcatgagccaccatgcccagccctcaaatttactcttaatgctcagttaatataaaggattcctaacagtttacaatgtggttttcttgtttttgttgttgttttggttttttaagatgtgaggtctcaccttattggccaggctggtctcaagctcctttcctcaagcaatcctcccaccttggcctcccaaagagccacctgtccaatgatttatcctgtttcttaaggactgtctttaccttcttagacattttgtcataccattctagaagtcaaattccaagtgcagtgattttttttttccctagtccattatagttaatcttcttgttagtgatcaaataccaaaagagaaaagcacaaccagaaattttggctatttgctgcaagttgtaggtcttgggctctatactaagaacttgaaatttttaaattagtatccctgcctaggtgaaaagtttttaataaatgtgttgaaaatcaactttaaatccatttaatttagactggagtgggcgtgagaaactgcaagtctatttctacatataaggatatattattatattgtcccatcccaccactacctttttctcaatttctatttctttgtagttattttagtaaaagccatttggattctgagaagcactaattcttagctgtgataggtctatgcaagtaagacagaatcattaaatgaagctcactaaatgaagttctcatttctctccaacagactgtgctagcaaacttcgttttcttgattgtatttaaataatttagtatctcactacgataatagtttttaactggaagggtgtgatgtgtttttttgttttttgttctcagagttgtcttctgagataattattaccaagtcatttgtggggttgtgtttttttcacatcatgtgacagaaattataactcataagatttaggcataatctggttttaaaccttgattgaaactgttgttttttaacttagcaggcagcctaggccatggctgttctaatttttatttttgaattcacatgtgtaatttcacatcaataacttgtgtttctgaaatatcctaactaacttgttaataaggaaagaaaccagatttgcttaaatctgttcaaggctgacattctgaaattctaaactggaaataacttcccagagtatttggaaaggttctaagtacaaggatcaggcctaaaatagctccttgggaaagaaatttcctttttgatgagaaaacttaaaatactgtttttggtaatgtaagcagttaaaaacatgactttagaaagacagcttaatgcgtattcaagcaaacctttgttttgttgcttttgcttttgtttgtagaagagagaggaagttattataccaaaaagtaatagtatatgtaactttgagtgaggctacttatatcttagaatgggtatccttgaactatatctaccccaccatggcttaaaaaaatcagtggtatatattgagaatgtcagtcatgagcttagtgtttaagtaacacatcccacttacagttgtttgcatgattagtcttgtgtatcatgatgttcaactttgcttttgctgtgccagttcaaaaatatcttttttgctaaaaactcttaaaattcatgacataagttttgttttgatcacccggttttatatagtatttctgggaccaaaaaatttaaatatacctttttaatataaaacagaagtttgaagctggaaagatagtgtttatggaagatttgtgtgcttttgtgttttttaaacccgtcaggctgctggtaaggcagtttctagggctcacttttcctccttacctcttgactagtgtagcatgtggtatgtttaaaatatttcattttctgcttcgtaattctaaggtcaacactatactgtatgtagacaggagagctgatttgtatatttagttatttggtctaatcaagcataactaaagggacttcttttttgatacttttctcaaattaagtttaaatatagtatacgggccacatttcatgtctttgaaagtgttgtacattactgtaaaccaagtactctgtctacaccagagggtgctttaactgcaaaatatttgagaaacaattcagtctctcaaacattttggcacagttcatcactccagtttgttactttcttgagaatagtccattttttgtttttgttattataccgtatgttctggtcattggaaacagaacagctcatagttgggtgatgtaatataataacagtaatataacctagtagtcattttgcttcaagtaatttaattagatagcaaaatcactgcggtttgtttattacacttgtagggctttttgtcttactcagtgaccatcactacgaatgtcttacattgaagcacagactgcagagcacttgttaacttagtcctcctgcataatgcactcgtgaaaagtagtgcttgctaggtgtttgaagattttatgatccgtgtgcttgggctcgttgagttatttgtaaaataaacatttagtttgagttgatgcagtaagttttttggactagtagtatccaggtccctactctactgaaaatataatcttcactatctccccttaagtcagaggagatgtagcatttagaacaccttgagacatgacattgtaaaatagcttgttttatgttcctgaagctatcttgttctctgttaaagctactaattgtctcagtgtaagttttaaataaacatatttcttagctagaaataagagataagttaagaaagaaaaaacattttggggcgcggtattggcgtagaaagaaagtttgtctaaacacccagctggtaagtggagcggaggccgcgtacaagtatgtagcacagtggcccacaagaagtaaccacgaaggaaacatccgggcgtccatcgacggagcgggtccccgcacgaataaaaagccgggtgggggaacggtagtctttaaagcagaccacgaataggggtccgacggccacacgggctcgttaacgagcggcagaggagacgataaaacccccggggggaacagag

SEQ ID NO: 15071 - DNA, 3073 bp, Homo sapiens
gcaggtgtgtaccaccacgcccggctaatttttgtatttttaatagagatggggtttcaccatgttggttaggctggtctcgaactcctgacctcgtgatccgcccacctcagcctctcaaagcgctgggattacaggcatgagccaccatgcccagccctcaaatttactcttaatgctcagttaatataaaggattcctaacagtttacaatgtggttttcttgtttttgttgttgttttggttttttaagatgtgaggtctcaccttattggccaggctggtctcaagctcctttcctcaagcaatcctcccaccttggcctcccaaagagccacctgtccaatgatttatcctgtttcttaaggactgtctttaccttcttagacattttgtcataccattctagaagtcaaattccaagtgcagtgattttttttttccctagtccattatagttaatcttcttgttagtgatcaaataccaaaagagaaaagcacaaccagaaattttggctatttgctgcaagttgtaggtcttgggctctatactaagaacttgaaatttttaaattagtatccctgcctaggtgaaaagtttttaataaatgtgttgaaaatcaactttaaatccatttaatttagactggagtgggcgtgagaaactgcaagtctatttctacatataaggatatattattatattgtcccatcccaccactacctttttctcaatttctatttctttgtagttattttagtaaaagccatttggattctgagaagcactaattcttagctgtgataggtctatgcaagtaagacagaatcattaaatgaagctcactaaatgaagttctcatttctctccaacagactgtgctagcaaacttcgttttcttgattgtatttaaataatttagtatctcactacgataatagtttttaactggaagggtgtgatgtgtttttttgttttttgttctcagagttgtcttctgagataattattaccaagtcatttgtggggttgtgtttttttcacatcatgtgacagaaattataactcataagatttaggcataatctggttttaaaccttgattgaaactgttgttttttaacttagcaggcagcctaggccatggctgttctaatttttatttttgaattcacatgtgtaatttcacatcaataacttgtgtttctgaaatatcctaactaacttgttaataaggaaagaaaccagatttgcttaaatctgttcaaggctgacattctgaaattctaaactggaaataacttcccagagtatttggaaaggttctaagtacaaggatcaggcctaaaatagctccttgggaaagaaatttcctttttgatgagaaaacttaaaatactgtttttggtaatgtaagcagttaaaaacatgactttagaaagacagcttaatgcgtattcaagcaaacctttgttttgttgcttttgcttttgtttgtagaagagagaggaagttattataccaaaaagtaatagtatatgtaactttgagtgaggctacttatatcttagaatgggtatccttgaactatatctaccccaccatggcttaaaaaaatcagtggtatatattgagaatgtcagtcatgagcttagtgtttaagtaacacatcccacttacagttgtttgcatgattagtcttgtgtatcatgatgttcaactttgcttttgctgtgccagttcaaaaatatcttttttgctaaaaactcttaaaattcatgacataagttttgttttgatcacccggttttatatagtatttctgggaccaaaaaatttaaatatacctttttaatataaaacagaagtttgaagctggaaagatagtgtttatggaagatttgtgtgcttttgtgttttttaaacccgtcaggctgctggtaaggcagtttctagggctcacttttcctccttacctcttgactagtgtagcatgtggtatgtttaaaatatttcattttctgcttcgtaattctaaggtcaacactatactgtatgtagacaggagagctgatttgtatatttagttatttggtctaatcaagcataactaaagggacttcttttttgatacttttctcaaattaagtttaaatatagtatacgggccacatttcatgtctttgaaagtgttgtacattactgtaaaccaagtactctgtctacaccagagggtgctttaactgcaaaatatttgagaaacaattcagtctctcaaacattttggcacagttcatcactccagtttgttactttcttgagaatagtccattttttgtttttgttattataccgtatgttctggtcattggaaacagaacagctcatagttgggtgatgtaatataataacagtaatataacctagtagtcattttgcttcaagtaatttaattagatagcaaaatcactgcggtttgtttattacacttgtagggctttttgtcttactcagtgaccatcactacgaatgtcttacattgaagcacagactgcagagcacttgttaacttagtcctcctgcataatgcactcgtgaaaagtagtgcttgctaggtgtttgaagattttatgatccgtgtgcttgggctcgttgagttatttgtaaaataaacatttagtttgagttgatgcagtaagttttttggactagtagtatccaggtccctactctactgaaaatataatcttcactatctccccttaagtcagaggagatgtagcatttagaacaccttgagacatgacattgtaaaatagcttgttttatgttcctgaagctatcttgttctctgttaaagctactaattgtctcagtgtaagttttaaataaacatatttcttaaaaaacaaagagaaaataacagaacaaaaaaggggggggctaagagtacccggggcacaaatgctgaccagttttgtaaagggcccagggagggtataaagggaggggggaaacagaggggaaggtgtgttggggagctttgggagagggaacgaagggcgggaaaag

SEQ ID NO: 15072 - DNA, 3273 bp, Homo sapiens
gcaggtgtgtaccaccacgcccggctaatttttgtatttttaatagagatggggtttcaccatgttggttaggctggtctcgaactcctgacctcgtgatccgcccacctcagcctctcaaagcgctgggattacaggcatgagccaccatgcccagccctcaaatttactcttaatgctcagttaatataaaggattcctaacagtttacaatgtggttttcttgtttttgttgttgttttggttttttaagatgtgaggtctcaccttattggccaggctggtctcaagctcctttcctcaagcaatcctcccaccttggcctcccaaagagccacctgtccaatgatttatcctgtttcttaaggactgtctttaccttcttagacattttgtcataccattctagaagtcaaattccaagtgcagtgattttttttttccctagtccattatagttaatcttcttgttagtgatcaaataccaaaagagaaaagcacaaccagaaattttggctatttgctgcaagttgtaggtcttgggctctatactaagaacttgaaatttttaaattagtatccctgcctaggtgaaaagtttttaataaatgtgttgaaaatcaactttaaatccatttaatttagactggagtgggcgtgagaaactgcaagtctatttctacatataaggatatattattatattgtcccatcccaccactacctttttctcaatttctatttctttgtagttattttagtaaaagccatttggattctgagaagcactaattcttagctgtgataggtctatgcaagtaagacagaatcattaaatgaagctcactaaatgaagttctcatttctctccaacagactgtgctagcaaacttcgttttcttgattgtatttaaataatttagtatctcactacgataatagtttttaactggaagggtgtgatgtgtttttttgttttttgttctcagagttgtcttctgagataattattaccaagtcatttgtggggttgtgtttttttcacatcatgtgacagaaattataactcataagatttaggcataatctggttttaaaccttgattgaaactgttgttttttaacttagcaggcagcctaggccatggctgaaaagaaggggtaagtccttcattgcatgatgatgtgtgcaggttttcctgattttctaatttttatttttgaattcacatgtgtaatttcacatcaataacttgtgtttctgaaatatcctaactaacttgttaataaggaaagaaaccagatttgcttaaatctgttcaaggctgacattctgaaattctaaactggaaataacttcccagagtatttggaaaggttctaagtacaaggatcaggcctaaaatagctccttgggaaagaaatttcctttttgatgagaaaacttaaaatactgtttttggtaatgtaagcagttaaaaacatgactttagaaagacagcttaatgcgtattcaagcaaacctttgttttgttgcttttgcttttgtttgtagaagagagaggaagttattataccaaaaagtaatagtatatgtaactttgagtgaggctacttatatcttagaatgggtatccttgaactatatctaccccaccatggcttaaaaaaatcagtggtatatattgagaatgtcagtcatgagcttagtgtttaagtaacacatcccacttacagttgtttgcatgattagtcttgtgtatcatgatgttcaactttgcttttgctgtgccagttcaaaaatatcttttttgctaaaaactcttaaaattcatgacataagttttgttttgatcacccggttttatatagtatttctgggaccaaaaaatttaaatatacctttttaatataaaacagaagtttgaagctggaaagatagtgtttatggaagatttgtgtgcttttgtgttttttaaacccgtcaggctgctggtaaggcagtttctagggctcacttttcctccttacctcttgactagtgtagcatgtggtatgtttaaaatatttcattttctgcttcgtaattctaaggtcaacactatactgtatgtagacaggagagctgatttgtatatttagttatttggtctaatcaagcataactaaagggacttcttttttgatacttttctcaaattaagtttaaatatagtatacgggccacatttcatgtctttgaaagtgttgtacattactgtaaaccaagtactctgtctacaccagagggtgctttaactgcaaaatatttgagaaacaattcagtctctcaaacattttggcacagttcatcactccagtttgttactttcttgagaatagtccattttttgtttttgttattataccgtatgttctggtcattggaaacagaacagctcatagttgggtgatgtaatataataacagtaatataacctagtagtcattttgcttcaagtaatttaattagatagcaaaatcactgcggtttgtttattacacttgtagggctttttgtcttactcagtgaccatcactacgaatgtcttacattgaagcacagactgcagagcacttgttaacttagtcctcctgcataatgcactcgtgaaaagtagtgcttgctaggtgtttgaagattttatgatccgtgtgcttgggctcgttgagttatttgtaaaataaacatttagtttgagttgatgcagtaagttttttggactagtagtatccaggtccctactctactgaaaatataatcttcactatctccccttaagtcagaggagatgtagcatttagaacaccttgagacatgacattgtaaaatagcttgttttatgttcctgaagctatcttgttctctgttaaagctactaattgtctcagtgtaagttttaaataaacatatttcttagctagaaataagagataagttaagaaagaaaaaacattttggggcgcggtattggcgtagaaagaaagtttgtctaaacacccagctggtaagtggagcggaggccgcgtacaagtatgtagcacagtggcccacaagaagtaaccacgaaggaaacatccgggcgtccatcgacggagcgggtccccgcacgaataaaaagccgggtgggggaacggtagtctttaaagcagaccacgaataggggtccgacggccacacgggctcgttaacgagcggcagaggagacgataaaacccccggggggaacagag

SEQ ID NO: 15073 - DNA, 1329 bp, Homo sapiens
gtgactcttagagtgatccccaattactacaacaccaattttatttgcacatttactttgatattctttttcattttttattaaatgattggttttggcaagatctgacttctgcattgagccctcatctgcaggaggcatgtgcaatagtgagactgaaatttgaatgaaaacactcaatatttcagcaagataatttgagaatgtttgcattgatattttcttatgtttatctagaaatgccagtttccttcctagaagatgtgactgatgagaaattttttactggctcatgcattttttgaatatttttcattagcagctgtttatagactttaagccttcaatctgaggtgacggtagttggcaaaagtatagatctttagctaattgactaaatacagagcaagttacatgtgtgaactttgtttctaatagtccattttttgtttttgttattataccgtatgttctggtcattggaaacagaacagctcatagttgggtgatgtaatataataacagtaatataacctagtagtcattttgcttcaagtaatttaattagatagcaaaatcactgcggtttgtttattacacttgtagggctttttgtcttactcagtgaccatcactacgaatgtcttacattgaagcacagactgcagagcacttgttaacttagtcctcctgcataatgcactcgtgaaaagtagtgcttgctaggtgtttgaagattttatgatccgtgtgcttgggctcgttgagttatttgtaaaataaacatttagtttgagttgatgcagtaagttttttggactagtagtatccaggtccctactctactgaaaatataatcttcactatctccccttaagtcagaggagatgtagcatttagaacaccttgagacatgacattgtaaaatagcttgttttatgttcctgaagctatcttgttctctgttaaagctactaattgtctcagtgtaagttttaaataaacatatttcttagctagaaataagagataagttaagaaagaaaaaacattttggggcgcggtattggcgtagaaagaaagtttgtctaaacacccagctggtaagtggagcggaggccgcgtacaagtatgtagcacagtggcccacaagaagtaaccacgaaggaaacatccgggcgtccatcgacggagcgggtccccgcacgaataaaaagccgggtgggggaacggtagtctttaaagcagaccacgaataggggtccgacggccacacgggctcgttaacgagcggcagaggagacgataaaacccccggggggaacagag

SEQ ID NO: 15074 - DNA, 1892 bp, Homo sapiens
gcaggtgtgtaccaccacgcccggctaatttttgtatttttaatagagatggggtttcaccatgttggttaggctggtctcgaactcctgacctcgtgatccgcccacctcagcctctcaaagcgctgggattacaggcatgagccaccatgcccagccctcaaatttactcttaatgctcagttaatataaaggattcctaacagtttacaatgtggttttcttgtttttgttgttgttttggttttttaagatgtgaggtctcaccttattggccaggctggtctcaagctcctttcctcaagcaatcctcccaccttggcctcccaaagagccacctgtccaatgatttatcctgtttcttaaggactgtctttaccttcttagacattttgtcataccattctagaagtcaaattccaagtgcagtgattttttttttccctagtccattatagttaatcttcttgttagtgatcaaataccaaaagagaaaagcacaaccagaaattttggctatttgctgcaagttgtaggtcttgggctctatactaagaacttgaaatttttaaattagtatccctgcctaggtgaaaagtttttaataaatgtgttgaaaatcaactttaaatccatttaatttagactggagtgggcgtgagaaactgcaagtctatttctacatataaggatatattattatattgtcccatcccaccactacctttttctcaatttctatttctttgtagttattttagtaaaagccatttggattctgagaagcactaattcttagctgtgataggtctatgcaagtaagacagaatcattaaatgaagctcactaaatgaagttctcatttctctccaacagactgtgctagcaaacttcgttttcttgattgtatttaaataatttagtatctcactacgataatagtttttaactggaagggtgtgatgtgtttttttgttttttgttctcagagttgtcttctgagataattattaccaagtcatttgtggggttgtgtttttttcacatcatgtgacagaaattataactcataagatttaggcataatctggttttaaaccttgattgaaactgttgttttttaacttagcaggcagcctaggccatggctgttctaatttttatttttgaattcacatgtgtaatttcacatcaataacttgtgtttctgaaatatcctaactaacttgttaataaggaaagaaaccagatttgcttaaatctgttcaaggctgacattctgaaattctaaactggaaataacttcccagagtatttggaaaggttctaagtacaaggatcaggcctaaaatagctccttgggaaagaaatttcctttttgatgagaaaacttaaaatactgtttttggtaatgtaagcagttaaaaacatgactttagaaagacagcttaatgcgtattcaagcaaacctttgttttgttgcttttgcttttgtttgtagaagagagaggaagttattataccaaaaagtaatagtatatgtaactttgagtgaggctacttatatcttagaatgggtatccttgaactatatctaccccaccatggcttaaaaaaatcagtggtatatattgagaatgtcagtcatgagcttagtgtttttttcacatcatgtgacagaaattataactcataagatttaggcataatctggttttaaaaccttgattgaaactgttgttttttaacttagcaggcagcctaggccatggctgaaaagaaggggtaagtccttcattgcatgatgatgtgtgcaggttttcctgattttctaatttttatttttgaattcacatgtgtaatttcacatcaataacttgtgtaaactgatt

SEQ ID NO: 15075 - DNA, 378 bp, Homo sapiens
aacgagttatgactcctttgtcttgaggacttacgttttgaacatgctttaagcaccaattttatttgcacatttactttgatattctttttcattttttattaaatgattggttttggcaagatctgacttctgcattgagccctcatctgcaggaggcatgtgcaatagtgagactgaaatttgaatgaaaacactcaatatttcagcaagataatttgagaatgtttgcattgatattttcttatgtttatctagaaatgccagtttccttcctagaagatgtgactgatgagaaattttttactggctcatgcattttttgaatatttttcattagcagctgtttatagactttaagccttcaatctgaggtga

SEQ ID NO: 15076 - DNA, 3011 bp, Homo sapiens
aaaaaaaaattgccctttctcctcctgccaccctggaggtgccaggttgtaatctgcaaatgtattgtctggcccttagggcttgacagttaatgattggtcgctgaaggagccgagcggaggagcgagagggacgcgagcaagagagcgagggagggagcgcagggccagagcggagccccagccggccgcacaggcaccgcctcccgtcttccgggacccggcacttcgggggttttgggcgccggagacgcgcaagggcgccgatggaggcagactcgccagcgggccccggcgccccagagcccctcgcggagggagcggcggccgagttctccagcctgctgcgcaggataaaaggcaaactcttcacctggaatattttgaaaacaattgccctgggtcagatgttgtccttgtgtatatgtgggacagccatcaccagccagtatttggcagaaagatacaaagtgaacacccccatgcttcagagctttatcaattattgcttgctgttcctaatttatacagtgatgctggcatttcgatcaggcagtgataaccttttagtaatcttgaaaagaaaatggtggaagtacatcctgctgggactagcagatgtggaagctaattatgtgatcgtcagagcctaccagtacacaactctaaccagtgtccagcttttggattgctttgggattcctgtgttgatggctctgtcatggtttattcttcatgcaagatacagagtgatccacttcatcgccgtggctgtctgtctgttgggtgtaggaaccatggttggtgcagacatactagcagggagggaagacaattcagggagtgatgtattgattggtgacatcttggtccttcttggggcttccctctatgccatttcaaatgtttgtgaggaatacatcgtgaagaagctgagcagacaggagtttttaggaatggtgggcctgtttggaacaattatcagtggtatacagctattgattgtggaatataaggatattgccagcattcattgggactggaaaattgccctgctgttcgtggcatttgccctgtgtatgttttgcctgtacagcttcatgccattggtgattaaagtcactagtgccacttccgtcaacctgggcatcctgacagcggacctctacagcctttttgttggactctttctgtttggctataagttttcaggactctacatcctgtccttcactgtcatcatggtggggtttatcctgtactgctccacccctactcgcacggccgagccggctgaaagcagcgtgcctccagtcaccagcattgggattgacaacctggggctgaagctggaggagaacctccaggagacccactctgctgtcttgtagctggagaagatggcgcacccatcccccaccaggataaagcagagcctgctgcctgctgaggggacacttggggaaatagcagactcagaatggacactctacaaccctgggttggatccagtggttaggttttagaaaggaacactgaacaaagttcaaaagtagaaataccaaaatagagcagaaaccaagctaagagtgtgtttctgtgtttgaggaccaatatctgttcgtgttgaggagatgaggtgcagactccacactggggtcttagaggcaccggtgggaaagcaggactggggagagatccaggactgagccagcctcaggccagggcgggaaagcaggctgtccaggctgggcttggtggtcaggaacaggggcagctcacggtggctctggagtacgtttcctctgtcagatgcttcaaggtttttttttttttttttttttgctgaggcagttattgtccacaggcctttgggtacagatgaggcctcggggctgactgcatgtggcagaaaacgggtgggtcagcccttgaaaagtcttgagatataagtgtgagtactatacaagcattaaactggagtgcagtaaacctaggaaccttcccacaattgtttttttgtttgtttgagatgcagagtctagagtgcagtggtgcaagctcagcttactgtaacctctgcctcctggattcaagtgttagtagctgggattacaaaagcatgtggccccacgcccagctaagttttgtatttttagtagacatggggtttcaccatgttgcccaggctggtcttgacctcccgacctcaagtgatctgcctgccccgacctcccaaagtgctgggattacaggcttgagccaccgtgccaggcctgttttgtttgtttttgtagagagatggggtttcgccatgttgcccaggctaatctcaaattcctgagctaaagcgatctgcccacctcggcctccgaaagtgctaggattacagatgtgaaccactgtgcctggcctgtttgtttgtttgtttaaaacatttctccatcactcattccaggtcccagagcaaactctctctgctctcggagcctgtgacactggctatgtgctccacagtttcagtcccaggtcatactctccaacagttttcagagctccatatatatgtagatgccatcctttctaaaaacttctcacgacctcctggaatattcctattgatctcattttatttagcatcagctcaagaaactaagtcttagtgcacagtatcacaacaaagaaaaagctttgtttttataactggtaaaaacaagaaaagattctcatcaaaatgaaaatataaaattaatcatttctcaccaaagagtatgcctgggagcctccagctgttaaaagacaatgctattactacttcttatcaaaaatctgtaatgccctgtgatttttatgatacttcttcaatacaaagtgttaatatgtgtcatcagtataataacaaccaacaaaatgccactttcagaaaactgtatgtaaattttttgtaacaatgtaaaaaagaaatggggagtaagtgttcacatcattaaaaggctttgaattcatggaaa

SEQ ID NO: 15077 - DNA, 605 bp, Homo sapiens
tagggaaatttggccctgaggcccaaaaattcggccacgaggttcattccaggtcccagagcaaactctctctgctctcggagcctgtgacactggctatgtgctccacagtttcagtcccaggtcatactctccaacagttttcagagctccatatatatgtagatgccatcctttctaaaaacttctcacgacctcctggaatattcctattgatctcattttatttagcatcagctcaagaaactaagtcttagtgcacagtatcacaacaaagaaaaagctttgtttttataactggtaaaaacaagaaaagattctcatcaaaatgaaaatataaaattaatcatttctcaccaaagagtatgcctgggagcctccagctgttaaaagacaatgctattactacttcttatcaaaaatctgtaatgccctgtgatttttatgatacttcttcaatacaaagtgttaatatgtgtcatcagtataataacaaccaacaaaatgccactttcagaaaactgtatgtaaattttttgtaacaatgtaaaaaagaaatggggagtaagtgttcacatcattaaaaggctttgaattcatggaaa

SEQ ID NO: 15078 - DNA, 3168 bp, Homo sapiens
aaaaaaaaattgccctttctcctcctgccaccctggaggtgccaggttgtaatctgcaaatgtattgtctggcccttagggcttgacagttaatgattggtcgctgaaggagccgagcggaggagcgagagggacgcgagcaagagagcgagggagggagcgcagggccagagcggagccccagccggccgcacaggcaccgcctcccgtcttccgggacccggcacttcgggggttttgggcgccggagacgcgcaagggcgccgatggaggcagactcgccagcgggccccggcgccccagagcccctcgcggagggagcggcggccgagttctccagcctgctgcgcaggataaaaggcaaactcttcacctggtgagtggaaggggcgtgctgcagctccgctggggcgtgggggcggctgcgggccctgcgcgcacgtggacaaggagcacactctctgaggcccccagcagggaggcagaggtggcggccgcacggacttcggttcggggctcaacacgcacaccaggaatattttgaaaacaattgccctgggtcagatgttgtccttgtgtatatgtgggacagccatcaccagccagtatttggcagaaagatacaaagtgaacacccccatgcttcagagctttatcaattattgcttgctgttcctaatttatacagtgatgctggcatttcgatcaggcagtgataaccttttagtaatcttgaaaagaaaatggtggaagtacatcctgctgggactagcagatgtggaagctaattatgtgatcgtcagagcctaccagtacacaactctaaccagtgtccagcttttggattgctttgggattcctgtgttgatggctctgtcatggtttattcttcatgcaagatacagagtgatccacttcatcgccgtggctgtctgtctgttgggtgtaggaaccatggttggtgcagacatactagcagggagggaagacaattcagggagtgatgtattgattggtgacatcttggtccttcttggggcttccctctatgccatttcaaatgtttgtgaggaatacatcgtgaagaagctgagcagacaggagtttttaggaatggtgggcctgtttggaacaattatcagtggtatacagctattgattgtggaatataaggatattgccagcattcattgggactggaaaattgccctgctgttcgtggcatttgccctgtgtatgttttgcctgtacagcttcatgccattggtgattaaagtcactagtgccacttccgtcaacctgggcatcctgacagcggacctctacagcctttttgttggactctttctgtttggctataagttttcaggactctacatcctgtccttcactgtcatcatggtggggtttatcctgtactgctccacccctactcgcacggccgagccggctgaaagcagcgtgcctccagtcaccagcattgggattgacaacctggggctgaagctggaggagaacctccaggagacccactctgctgtcttgtagctggagaagatggcgcacccatcccccaccaggataaagcagagcctgctgcctgctgaggggacacttggggaaatagcagactcagaatggacactctacaaccctgggttggatccagtggttaggttttagaaaggaacactgaacaaagttcaaaagtagaaataccaaaatagagcagaaaccaagctaagagtgtgtttctgtgtttgaggaccaatatctgttcgtgttgaggagatgaggtgcagactccacactggggtcttagaggcaccggtgggaaagcaggactggggagagatccaggactgagccagcctcaggccagggcgggaaagcaggctgtccaggctgggcttggtggtcaggaacaggggcagctcacggtggctctggagtacgtttcctctgtcagatgcttcaaggtttttttttttttttttttttgctgaggcagttattgtccacaggcctttgggtacagatgaggcctcggggctgactgcatgtggcagaaaacgggtgggtcagcccttgaaaagtcttgagatataagtgtgagtactatacaagcattaaactggagtgcagtaaacctaggaaccttcccacaattgtttttttgtttgtttgagatgcagagtctagagtgcagtggtgcaagctcagcttactgtaacctctgcctcctggattcaagtgttagtagctgggattacaaaagcatgtggccccacgcccagctaagttttgtatttttagtagacatggggtttcaccatgttgcccaggctggtcttgacctcccgacctcaagtgatctgcctgccccgacctcccaaagtgctgggattacaggcttgagccaccgtgccaggcctgttttgtttgtttttgtagagagatggggtttcgccatgttgcccaggctaatctcaaattcctgagctaaagcgatctgcccacctcggcctccgaaagtgctaggattacagatgtgaaccactgtgcctggcctgtttgtttgtttgtttaaaacatttctccatcactcattccaggtcccagagcaaactctctctgctctcggagcctgtgacactggctatgtgctccacagtttcagtcccaggtcatactctccaacagttttcagagctccatatatatgtagatgccatcctttctaaaaacttctcacgacctcctggaatattcctattgatctcattttatttagcatcagctcaagaaactaagtcttagtgcacagtatcacaacaaagaaaaagctttgtttttataactggtaaaaacaagaaaagattctcatcaaaatgaaaatataaaattaatcatttctcaccaaagagtatgcctgggagcctccagctgttaaaagacaatgctattactacttcttatcaaaaatctgtaatgccctgtgatttttatgatacttcttcaatacaaagtgttaatatgtgtcatcagtataataacaaccaacaaaatgccactttcagaaaactgtatgtaaattttttgtaacaatgtaaaaaagaaatggggagtaagtgttcacatcattaaaaggctttgaattcatggaaa

SEQ ID NO: 15079 - DNA, 3379 bp, Homo sapiens
aaaaaaaaattgccctttctcctcctgccaccctggaggtgccaggttgtaatctgcaaatgtattgtctggcccttagggcttgacagttaatgattggtcgctgaaggagccgagcggaggagcgagagggacgcgagcaagagagcgagggagggagcgcagggccagagcggagccccagccggccgcacaggcaccgcctcccgtcttccgggacccggcacttcgggggttttgggcgccggagacgcgcaagggcgccgatggaggcagactcgccagcgggccccggcgccccagagcccctcgcggagggagcggcggccgagttctccagcctgctgcgcaggataaaaggcaaactcttcacctggaatattttgaaaacaattgccctgggtcagatgttgtccttgtgtatatgtgggacagccatcaccagccagtatttggcagaaagatacaaagtgaacacccccatgcttcagagctttatcaattattgcttgctgttcctaatttatacagtgatgctggcatttcgatcaggcagtgataaccttttagtaatcttgaaaagaaaatggtggaagtacatcctgctgggactagcagatgtggaagctaattatgtgatcgtcagagcctaccagtacacaactctaaccagtgtccagcttttggattgctttgggattcctgtgttgatggctctgtcatggtttattcttcatgcaagatacagagtgatccacttcatcgccgtggctgtctgtctgttgggtgtaggaaccatggttggtgcagacatactagcagggagggaagacaattcagggagtgatgtattgattggtgacatcttggtccttcttggggcttccctctatgccatttcaaatgtttgtgaggaatacatcgtgaagaagctgagcagacaggagtttttaggaatggtgggcctgtttggaacaattatcagtggtatacagctattgattgtggaatataaggatattgccagcattcattgggactggaaaattgccctgctgttcgtggcatttgccctgtgtatgttttgcctgtacagcttcatgccattggtgattaaagtcactagtgccacttccgtcaacctgggcatcctgacagcggacctctacagcctttttgttggactctttctgtttggctataagttttcaggactctacatcctgtccttcactgtcatcatggtggggtttatcctgtactgctccacccctactcgcacggccgagccggctgaaagcagcgtgcctccagtcaccagcattgggattgacaacctggggctgaagctggaggagaacctccaggagacccactctgctgtcttgtagctggagaagatggcgcacccatcccccaccaggataaagcagagcctgctgcctgctgaggggacacttggggaaatagcagactcagaatggacactctacaaccctgggttggatccagtggttaggttttagaaaggaacactgaacaaagttcaaaagtagaaataccaaaatagagcagaaaccaagctaagagtgtgtttctgtgtttgaggaccaatatctgttcgtgttgaggagatgaggtgcagactccacactggggtcttagaggcaccggtgggaaagcaggactggggagagatccaggactgagccagcctcaggccagggcgggaaagcaggctgtccaggctgggcttggtggtcaggaacaggggcagctcacggtggctctggagtacgtttcctctgtcagatgcttcaaggtttttttttttttttttttttgctgaggcagttattgtccacaggcctttgggtacagatgaggcctcggggctgactgcatgtggcagaaaacgggtgggtcagcccttgaaaagtcttgagatataagtgtgagtactatacaagcattaaactggagtgcagtaaacctaggaaccttcccacaattgtttttttgtttgtttgagatgcagagtctagagtgcagtggtgcaagctcagcttactgtaacctctgcctcctggattcaagtgttagtagctgggattacaaaagcatgtggccccacgcccagctaagttttgtatttttagtagacatggggtttcaccatgttgcccaggctggtcttgacctcccgacctcaagtgatctgcctgccccgacctcccaaagtgctgggattacaggcttgagccaccgtgccaggcctgttttgtttgtttttgtagagagatggggtttcgccatgttgcccaggctaatctcaaattcctgagctaaagcgatctgcccacctcggcctccgaaagtgctaggattacagatgtgaaccactgtgcctggcctgtttgtttgtttgtttaaaacatttctccatcactcattccaggtcccagagcaaactctctctgctctcggagcctgtgacactggctatgtgctccacagtttcagtcccaggtcatactctccaacagttttcagagctccatatatatgtagatgccatcctttctaaaaacttctcacgacctcctggaatattcctattgatctcattttatttagcatcagctcaagaaactaagtcttagtgcacagtatcacaacaaagaaaaagctttgtttttataactggtaaaaacaagaaaagattctcatcaaaatgaaaatataaaattaatcatttctcaccaaagagtatgcctgggagcctccagctgttaaaagacaatgctattactacttcttatcaaaaatctgtaatgccctgtgatttttatgatacttcttcaatacaaagtgttaatatgtgtcatcagtataataacaaccaacaaaatgccactttcagaaaactgtatgtaaattttttgtaacaatgtaaaaaagaaatggggagtaagtgttcacatcattaaaaggctttgaattcatggaaaaaaaaaaaaaaaaaaaaaaaaaaaaaaaaaaaaaaaaaaaaaaaaaaaaaaaaaaaaaaaaaaaaaaaaaaaaaaaaaaaaaaaaaaaaaaaaaaaaaaaaaaaaaaaaaaaaaatgtggcccctttggcccaagccattttaaaactgaaaaaatttaatcattcggcccaaatttgagccaaattggccaaatccccctaaaaggggccgatttaaaattcaatggcccgcttttaaaaaccgcggaactggaaaaaccctggggttacccaatttaaaccccttgaaaaaaaacccctttttccaaagtgggaaaaatcccaaaaggccccaaccaaacgcctcttcaaaaaattcccccttggg

SEQ ID NO: 15080 - DNA, 2158 bp, Homo sapiens
aaaaaaaaattgccctttctcctcctgccaccctggaggtgccaggttgtaatctgcaaatgtattgtctggcccttagggcttgacagttaatgattggtcgctgaaggagccgagcggaggagcgagagggacgcgagcaagagagcgagggagggagcgcagggccagagcggagccccagccggccgcacaggcaccgcctcccgtcttccgggacccggcacttcgggggttttgggcgccggagacgcgcaagggcgccgatggaggcagactcgccagcgggccccggcgccccagagcccctcgcggagggagcggcggccgagttctccagcctgctgcgcaggataaaaggcaaactcttcacctggaatattttgaaaacaattgccctgggtcagatgttgtccttgtgtatatgtgggacagccatcaccagccagtatttggcagaaagatacaaagtgaacacccccatgcttcagagctttatcaattattgcttgctgttcctaatttatacagtgatgctggcatttcgatcaggcagtgataaccttttagtaatcttgaaaagaaaatggtggaagtacatcctgctgggactagcagatgtggaagctaattatgtgatcgtcagagcctaccagtacacaactctaaccagtgtccagcttttggattgctttgggattcctgtgttgatggctctgtcatggtttattcttcatgcaagatacagagtgatccacttcatcgccgtggctgtctgtctgttgggtgtaggaaccatggttggtgcagacatactagcagggagggaagacaattcagggagtgatgtattgattggtgacatcttggtccttcttggggcttccctctatgccatttcaaatgtttgtgaggaatacatcgtgaagaagctgagcagacaggagtttttaggaatggtgggcctgtttggaacaattatcagtggtatacagctattgattgtggaatataaggatattgccagcattcattgggactggaaaattgccctgctgttcgtggcatttgccctgtgtatgttttgcctgtacagcttcatgccattggtgattaaagtcactagtgccacttccgtcaacctgggcatcctgacagcggacctctacagcctttttgttggactctttctgtttggctataagttttcaggactctacatcctgtccttcactgtcatcatggtggggtttatcctgtactgctccacccctactcgcacggccgagccggctgaaagcagcgtgcctccagtcaccagcattgggattgacaacctggggctgaagctggaggagaacctccaggagacccactctgctgtcttgtagtgggattacaggcttgagccaccgtgccaggcctgttttgtttgtttttgtagagagatggggtttcgccatgttgcccaggctaatctcaaattcctgagctaaagcgatctgcccacctcggcctccgaaagtgctaggattacagatgtgaaccactgtgcctggcctgtttgtttgtttgtttaaaacatttctccatcactcattccaggtcccagagcaaactctctctgctctcggagcctgtgacactggctatgtgctccacagtttcagtcccaggtcatactctccaacagttttcagagctccatatatatgtagatgccatcctttctaaaaacttctcacgacctcctggaatattcctattgatctcattttatttagcatcagctcaagaaactaagtcttagtgcacagtatcacaacaaagaaaaagctttgtttttataactggtaaaaacaagaaaagattctcatcaaaatgaaaatataaaattaatcatttctcaccaaagagtatgcctgggagcctccagctgttaaaagacaatgctattactacttcttatcaaaaatctgtaatgccctgtgatttttatgatacttcttcaatacaaagtgttaatatgtgtcatcagtataataacaaccaacaaaatgccactttcagaaaactgtatgtaaattttttgtaacaatgtaaaaaagaaatggggagtaagtgttcacatcattaaaaggctttgaattcatggaaa

SEQ ID NO: 15081 - DNA, 745 bp, Homo sapiens
  misc_feature (14)..(15): n is a, c, g, or t
tgaaccccctagtnnagaagttcaatagcagagagatggggtttcgccatgttgcccaggctaatctcaaattcctgagctaaagcgatctgcccacctcggcctccgaaagtgctaggattacagatgtgaaccactgtgcctggcctgtttgtttgtttgtttaaaacatttctccatcactcattccaggtcccagagcaaactctctctgctctcggagcctgtgacactggctatgtgctccacagtttcagtcccaggtcatactctccaacagttttcagagctccatatatatgtagatgccatcctttctaaaaacttctcacgacctcctggaatattcctattgatctcattttatttagcatcagctcaagaaactaagtcttagtgcacagtatcacaacaaagaaaaagctttgtttttataactggtaaaaacaagaaaagattctcatcaaaatgaaaatataaaattaatcatttctcaccaaagagtatgcctgggagcctccagctgttaaaagacaatgctattactacttcttatcaaaaatctgtaatgccctgtgatttttatgatacttcttcaatacaaagtgttaatatgtgtcatcagtataataacaaccaacaaaatgccactttcagaaaactgtatgtaaattttttgtaacaatgtaaaaaagaaatggggagtaagtgttcacatcattaaaaggctttgaattcatggaaa

SEQ ID NO: 15082 - DNA, 1904 bp, Homo sapiens
aaaaaaaaattgccctttctcctcctgccaccctggaggtgccaggttgtaatctgcaaatgtattgtctggcccttagggcttgacagttaatgattggtcgctgaaggagccgagcggaggagcgagagggacgcgagcaagagagcgagggagggagcgcagggccagagcggagccccagccggccgcacaggcaccgcctcccgtcttccgggacccggcacttcgggggttttgggcgccggagacgcgcaagggcgccgatggaggcagactcgccagcgggccccggcgccccagagcccctcgcggagggagcggcggccgagttctccagcctgctgcgcaggataaaaggcaaactcttcacctggaatattttgaaaacaattgccctgggtcagatgttgtccttgtgtatatgtgggacagccatcaccagccagtatttggcagaaagatacaaagtgaacacccccatgcttcagagctttatcaattattgcttgctgttcctaatttatacagtgatgctggcatttcgatcaggcagtgataaccttttagtaatcttgaaaagaaaatggtggaagtacatcctgctgggactagcagatgtggaagctaattatgtgatcgtcagagcctaccagtacacaactctaaccagtgtccagcttttggattgctttgggattcctgtgttgatggctctgtcatggtttattcttcatgcaagatacagagtgatccacttcatcgccgtggctgtctgtctgttgggtgtaggaaccatggttggtgcagacatactagcagggagggaagacaattcagggagtgatgtattgattggtgacatcttggtccttcttggggcttccctctatgccatttcaaatgtttgtgaggaatacatcgtgaagaagctgagcagacaggagtttttaggaatggtgggcctgtttggaacaattatcagtggtatacagctattgattgtggaatataaggatattgccagcattcattgggactggaaaattgccctgctgttcgtggcatttgccctgtgtatgttttgcctgtacagcttcatgccattggtgattaaagtcactagtgccacttccgtcaacctgggcatcctgacagcggacctctacagcctttttgttggactctttctgtttggctataagttttcaggactctacatcctgtccttcactgtcatcatggtggggtttatcctgtactgctccacccctactcgcacggccgagccggctgaaagcagcgtgcctccagctgttaaaagacaatgctattactacttcttatcaaaaatctgtaatgccctgtgatttttatgatacttcttcaatacaaagtgttaatatgtgtcatcagtataataacaaccaacaaaatgccactttcagaaaactgtatgtaaattttttgtaacaatgtaaaaaagaaatggggagtaagtgttcacatcattaaaaggctttgaattcatggaaaaaaaaaaaaaaaaaaaaaaaaaaaaaaaaaaaaaaaaaaaaaaaaaaaaaaaaaaaaaaaaaaaaaaaaaaaaaaaaaaaaaaaaaaaaaaaaaaaaaaaaaaaaaaaaaaaaaatgtggcccctttggcccaagccattttaaaactgaaaaaatttaatcattcggcccaaatttgagccaaattggccaaatccccctaaaaggggccgatttaaaattcaatggcccgcttttaaaaaccgcggaactggaaaaaccctggggttacccaatttaaaccccttgaaaaaaaacccctttttccaaagtgggaaaaatcccaaaaggccccaaccaaacgcctcttcaaaaaattcccccttggg

SEQ ID NO: 15083 - DNA, 1536 bp, Homo sapiens
aaaaaaaaattgccctttctcctcctgccaccctggaggtgccaggttgtaatctgcaaatgtattgtctggcccttagggcttgacagttaatgattggtcgctgaaggagccgagcggaggagcgagagggacgcgagcaagagagcgagggagggagcgcagggccagagcggagccccagccggccgcacaggcaccgcctcccgtcttccgggacccggcacttcgggggttttgggcgccggagacgcgcaagggcgccgatggaggcagactcgccagcgggccccggcgccccagagcccctcgcggagggagcggcggccgagttctccagcctgctgcgcaggataaaaggcaaactcttcacctggaatattttgaaaacaattgccctgggtcagatgttgtccttgtgtatatgtgggacagccatcaccagccagtatttggcagaaagatacaaagtgaacacccccatgcttcagagctttatcaattattgcttgctgttcctaatttatacagtgatgctggcatttcgatcaggcagtgataaccttttagtaatcttgaaaagaaaatggtggaagtacatcctgctgggactagcagatgtggaagctaattatgtgatcgtcagagcctaccagtacacaactctaaccagtgtccagcttttggattgctttgggattcctgtgttgatggctctgtcatggtttattcttcatgcaagatacagagtgatccacttcatcgccgtggctgtctgtctgttgggtgtaggaaccatggttggtgcagacatactagcagggagggaagacaattcagggagtgatgtattgattggtgacatcttggtccttcttggggcttccctctatgccatttcaaatgtttgtgaggaatacatcgtgaagaagctgagcagacaggagtttttaggaatggtgggcctgtttggaacaattatcagtggtatacagctattgattgtggaatataaggatattgccagcattcattgggactggaaaattgccctgctgttcgtggcatttgccctgtgtatgttttgcctgtacagcttcatgccattggtgattaaagtcactagtgccacttccgtcaacctgggcatcctgacagcggacctctacagcctttttgttggactctttctgtttggctataagttttcaggactctacatcctgtccttcactgtcatcatggtggggtttatcctgtactgctccacccctactcgcacggccgagccggctgaaagcagcgtgcctccagctgttaaaagacaatgctattactacttcttatcaaaaatctgtaatgccctgtgatttttatgatacttcttcaatacaaagtgttaatatgtgtcatcagtataataacaaccaacaaaatgccactttcagaaaactgtatgtaaattttttgtaacaatgtaaaaaagaaatggggagtaagtgttcacatcattaaaaggctttgaattcatggaaa

SEQ ID NO: 15084 - DNA, 1041 bp, Homo sapiens
aaaaaaaaattgccctttctcctcctgccaccctggaggtgccaggttgtaatctgcaaatgtattgtctggcccttagggcttgacagttaatgattggtcgctgaaggagccgagcggaggagcgagagggacgcgagcaagagagcgagggagggagcgcagggccagagcggagccccagccggccgcacaggcaccgcctcccgtcttccgggacccggcacttcgggggttttgggcgccggagacgcgcaagggcgccgatggaggcagactcgccagcgggccccggcgccccagagcccctcgcggagggagcggcggccgagttctccagcctgctgcgcaggataaaaggcaaactcttcacctggtgagtggaaggggcgtgctgcagctccgctggggcgtgggggcggctgcgggccctgcgcgcacgtggacaaggagcacactctctgaggcccccagcagggaggcagaggtggcggccgcacggacttcggttcggggctcaacacgcacaccaggtatggtgcgcttcacctggcctcgggaagcacttggtgcgtctccctcggctcccgtttcgaaatcgtggcgatgtattttggaggatttggggggaaatccaccctgttggcactattaggtcggtcctctggggcgttccgcggtggagggacgaggtccccggggatgctgtgaaggaggagtgcccacctcgggctgggcaggtgggtgagcgccacttcctggcgccggcgccctcattccatctgctgccgagccagccagactgggcgcggtgattcaagagttgaccgaagtgagaaatcctggttaagttttgtgctgctgccgggtgggagaccagagccggctctctcttcctgggcctgagcgaggtgatatagccacccccagggctggggtccagggaagcctgtttgtggtatcactatgctctgtgcgaagtagggacaaatgtttttaaggagtgggcagcgactctagaaagcgtttctgtggttgctg

SEQ ID NO: 15085 - DNA, 652 bp, Homo sapiens
tcaggactgagactagggtgaggcaagagaggcatcagaatgcaaaagtgaagtagacacctgccgtcagcactgggcagccctgctcctggggccttacttgactcatcctggtgggttttccaaatggcagaggtgcacaaccacttcttgcaagcatgggcacttgaattgtagcccatgtacacagtgattcttggaaaaagtcatgagtaatgaatggaacttttctctcccaggttgatcttgtgttttgagacataaagagtcaaaggttggtgcctagggatgctcattcttattgtttttggtagtttgattgttgaaggcttttgacacgacattgaagtgaatatttggggcattttgctcctctgggcttttctctaaagcaccctcacatttcctctctcatgttcctgggctttcctggctttgatgctagccccactgtgtgttcccattaatagccctatgtagcctggctccttattctggaaactgtgtaacttttgctcttgatcttaaacacaactcagtcttgcaaggagctccgcctttggtctcagcttcttggggatttccctggcagccacatagtgaactatgtcacactctctgttttacccgttaataaggaaatactctggta

SEQ ID NO: 15086 - DNA, 360 bp, Homo sapiens
agtctatattggtctgcacaaataaactaaaatgctttttaagttgttttatgatctatatagaagagatattgacaaacttctcctgcttagaaaataaaagggacacttggaattaacaaagggggttggtagatttaccattgaggttgatgaacttaatatatcatctggtaaaacaagcgtcaggaaatatccatcattcaaatgttttggctgacagcaaaatgctcaaggactaatcccacagctgaaatgtaggggaaaatttcccctacatttggctccttctggctcctacttggtctacacttttggaaggactgctgagattgtatccttggagtcagggcgagagtg

SEQ ID NO: 15087 - DNA, 721 bp, Homo sapiens
gtatatacccagtaatgggatggctgggtcaaatggtatttttagttctagatccctgaggaatcaccacactgacttccacaatggttgaactagtttacagtcccaccgacagtgttaaagtgttcctatttctccacatcctctccagcacctgttgtttcctgactttttaatgatcgccattctaactggtgtgagatggtatctcattgtggttttgatttgcatttctctgatggccagtgatgatgagctttttttcatgtgtatgtttatattatgttatagatatacatcaagtataggtaactattcctattttaataagctttttgagatgtaattcacatactatgcaattcaccattttaaagtgtacaattcagtgccttaaaatattaatacattcacgaagttgtacaacaatcaccattaacttttgtatatgataagagttaggagtccaaattccttctttgcgtgtggtcatccagttctcccagcaacacttgtggaaaagattattctcccctattgaatggtcttggcacccttgttgaaaatcagttagttaatcccagcctgggcaacatagagagaccccatctccacaaaaaatcagccaggtgtggtggtgcctacctgtagtcctagctactcaggaggtcaaggctgtagtgagctgtgattgggagacagagcaaaagcctgtctaaaa

SEQ ID NO: 15088 - DNA, 334 bp, Homo sapiens
gagcaagtctctaatccacattaatattcaagaaaaaaaaattaaattcaaaagtacaactttacagcctgggcctgatggctcacatctgtaatcccagcactttgggaggccgaggtgggcagatcacctgaggtcaggagttcgaaaccagcccggccaacatggtgaaaccccatctctactaaaaatacaaaaattagttgggcatggtggcacacgtttgtagtcccagctacttgggaagctcaggcaggataaacttgaacccaggaggtagagttcgcagtgagtagagatcacactgctgcactccaaagtgagactccatctc

SEQ ID NO: 15089 - DNA, 291 bp, Homo sapiens
tagcagaaagccagccgcagcgagaccctccgcctggcatgcggcactggtgagccgccaccccgcttgctcagtaggtagccgggacgaaggggtctggcaggcccctcaggcaaggcctctgtgccgcatcccgttaaggggcggggaccagccccgtatcttggctggtcttcctgactctgaatgcagagaaagtatgtccaagagttcaaaccacatttgtgttcttttaatggtgtttaatgcagatgttaattgtgatttatgtgaaacgggttgatgtagagg

SEQ ID NO: 15090 - DNA, 462 bp, Homo sapiens
gagaggctggagggcatgaggactgataaactcgcctgccattgtctccaagggcgaccctgcaggaggtcaggctgcctgattatcgctcaggaatcctgctgtcggctattcctggctctgaccctcacctgctctctaacctcaggcagtcccctttgactgcccttatgctcaatttccccttttcgtcaatactcagatgccctctgcgacataaaccaggggccatttggcaaaatatcagtgactcccacccctgggagaaggctagtgttttgaacgattcattttaaagaacaaaatcctgttaattacttttcaacgtgaatataagcatacacacaatatacatattcgtatatattttcataggattctttcacatacacatatatttactactaataagtaaactataaacgttccttcaggagctagtaaaataaacaagacatatat

SEQ ID NO: 15091 - DNA, 209 bp, Homo sapiens
agttctggagattcatagtggtgataactacacaattactgtgaatgtatttaatgacattaagtacatttaaaattgacaacaaaagagtgaaactctgtctcaaaaaaaaaaaattaccactttaaaattttaaccactttaagtgtacaattaatgacactgaattgtacactttaagtagttaaaaatttaaagtagtaaatttt

SEQ ID NO: 15092 - DNA, 365 bp, Homo sapiens
aggcaacaatccatctttaaatataaaaagttagatatttattttagaatgatatagtaaattctaaattatagttttcatacaactaaaatatttagaataatttttgaaaagatttaaaatactattgtaaatctgtgaaatgacaaatcaaaagggcaaataaccttttagacttgagaaagagttttgactttgcagattttcaaaaaaggtattgggatacctaggggtttgtagaccatacctgaagaactgcttgatgaaatatagtattagaaacatggtctcagcttctcatgaaactctttccataggtggataaataatgatttcttttgatttacaaatttgtttactaagaa

SEQ ID NO: 15093 - DNA, 365 bp, Homo sapiens
gagtggccaaattctcatctgacacaatcaaatctctgtagaagtcttctatttgctgtcgtacaaagtgctgtgactttccaccttctttttttttttatttttcgagacagggtttcactcctgttgccaaggctggagtgcaatgatacgatctcagcttacggcgacctccgcctcctaggctcaagtgattctcatgccacagcctcccgagtagctgggaccacagacacacgccacggcaaacggctaatttttgtatttttagtagagacggggtttcaccttgttgctcaagctggtctcgaatttctgagcttgagtgatctgcccgccccagcctcccaaagtgctgggattac

SEQ ID NO: 15094 - DNA, 113 bp, Homo sapiens
catcttttaagtgttgggtaaagattgttttccatccacagtaaacacaggcatggggtctgatctgccctcttccactgttccaccctcaaggataaatacaataggtttca

SEQ ID NO: 15095 - DNA, 427 bp, Homo sapiens
ctagaggtgaaaggcaaggtcaaagactcttatcctcctgcgatcatcagcaggcagtaaccaagggagcgtggccaggcgctgaagtgaattcgggtccaaggagcctgctgggacccaggaaaacgagagaaggaacagaaattgtggtggaggcaaattcaagatcagaagattggggaggaggtgctaagagaggtctggagagatgctgggacccagaactggggcctcagtgagatcagcaggctgcagctaaactgtggtatccagaccatgcggccgatgccctgggagggagaccacttgcttaagtcctccaggagggcgatggaggagccggcattccaaccaggctcacggatgccaagatatggatgcagagagggaagccctgcagagcactgcctaccctgaagtgccagac

SEQ ID NO: 15096 - DNA, 1417 bp, Homo sapiens
caattatagattaaaaatatcagaagcatttccagattattcttaaaagttgatgagatcttcccaaaccagaatgacaactgaggatgagatgtgcatagattaaatggtaaagtgggtggttctcaggtgagaagcagtgaggaccattcattttgcagcctaaaaattttaggggatgcaaactgtcatttccccttcagttatgtaaataattgaagaaaataaggaaagcacataaactagcaaaaatctatagctcatgaacttggtttagtgtggacaaccctgttcttttcagaactatttaatcattaatagttcttaccaagtagaagtgatcccaggcaaagaaacaactttccaatgcattcaagagagaatcatacggacaaccatcattctcagcagctcattaaatgcaaatacacacacgcaaagagagagagagaacacattttacatagttttccagctgttgttagtgtcacttaaaactgatctctgctggtagtattcagttgtgagtatagcaagacactgcataggagcattttttttctaaacctttagctaagatttggaaacccaatatttcctaagtagtgaatgtggtctatttatagtaattagcttaggtgacacaccaaacatgatgagttgctcattcaggatagccggtccattgcacaaatgtgtaatatcaggtactctcatgccactcattgcctgcatcagtcagtcatgacctttgcatcagcctttcaatagacagtcatcaggctagtatcttatctcatcactacttgacgatgagttcgccgaattagactgttctataccagtacaacaaccaaaatactttctcatagattatgcataaatacgcaattttgtccatgtcaatgaacctaacaagaatgctttttaaaagtatattttagattcaaacatgctttctagatcagaggttaacttgtctttttgaaatcctggagtcacttataagttagctgcaaactgtagtttcggtaattcaactgcttaagcatttctggactgtttatcaaaatatattacagaatgtgagactaaagtttaaagtctggacctttggtttaatttctagactttccaaagcttttttttttctttttaaaaagcccattgtcaactctcttagaacttcatcaagtaaatggtaccttgcaaatgtaggttgtgtctgaccttctttctttttgtgtgttggtgcctcagatgtatcatgtgctgcttgaactgattctctacagtgttccttcctagtctcaagctgatgatgtgctcaaagatgtatcaaaatccatgtaatgacaccttttagatgtttctaatatgtcaataaatgatatattgcaatccttcagtagtattt

SEQ ID NO: 15097 - DNA, 254 bp, Homo sapiens
gtggtttaaaacaacggaaacctacttcctcactcttcgggggccagaggtccgaaatcgaggtgctgtcaggggtggctccatttggaggctgtgcagggaaccgtccccagcctcgcttcccatttccggtggggtctgcagttcctggtgccccttgacttgtgaatgcatcactccaatctatgcctccgtcttcacaaaccctccgtctctgcgttctctcctgttttcataaggcctgccctgaatgc

SEQ ID NO: 15098 - DNA, 462 bp, Homo sapiens
gaaaattgccttcctaagtaatttacctcaaatggtaggccttatattttaagagaataccatatttcaactatattttcacaccataatattaggcccctatatatcttatagcactttcacaattttcctctaggaagtagacatgaaataagattaagagactaagaataagatttaaaccagcctcccctttggaagcataaatgatgtgattgcagctctgggcctggagaatactgcagctttgtaaaatatatcaatggtactttcttgcttttacagtggcagaatatatatacaaaggacacctagtgcagtgggtagaacaaaaatgagctaagtgtctaacaaaacagatagagggctaacaaaacattacatttttttttatattccaggaactagtaattaaaataacaaaaatcttcttttcaatatgaagctattgatggtctctaa

SEQ ID NO: 15099 - DNA, 305 bp, Homo sapiens
taatggtccctcagtgcccaccgggtgatggtggcagattttccatccgcattgctcccggacatgcggatgtaggtttcagcagttcccatcattagacacagttgccgtaggctgggttcttagtagcaggctcagtggggcctttgagtctttccatggctggtgcccgccggactccacctgagggaaactaatggggaagcactggtctccattccctgcacgcacagcccactgctgcgatggtgaagggataaggttgtgttcacgcgtcgaagtttgtgtccactgcacacgcggct

SEQ ID NO: 15100 - DNA, 523 bp, Homo sapiens
cttttcctttaaaaaatatttttttcagaaagatgaaaaccacttcattagtgattgccggcaaaatctcctaatgtctttctataagctgtttaagcttagcattagaaattagtgctagaggatttaattagccagctcacaggatgcagtccctttaatttaggatttccctttgagaaaattatggagttgaaaaggaatatgatatttcatacaagtttccatcttgggcccttatgttgtttgttctgctgatctggaaattgtacatgatttacattaaaactttttgtttttaatatcgattattgtagtgtggggtgttagattatgtgcaatagttctcagagttgggaaaggtaaaagggtttttttgggcaatgattaactcatctactttaccagggttacataatcaagtattagttactatacatttagctaatgcagtgggtttagttaagcaatgaatacattatcatgggagcattaacacttttgcatttttagacttgccttt

SEQ ID NO: 15101 - DNA, 398 bp, Homo sapiens
cttaactgggataaattaattcagttacttttctgacaccatcatatctagtgaccagtgaagaattttccagatagcctactagtaaaataaagcacctagaaataagagtaagtgaactcgagaatgataagagctaaaggaatcccagaactgctatgcagtttcattattcccttaaattattggcatgccaagccctataattgctagatgggagaatatagataaactgaactttaagcagcccaatttatgacaatccagatttaccctaaagaaaaactaaagactaatggtttaatgtagaaatctttaaaaaataaagatttctgtacgtacatttaaactttcctggtttacaaaaggtaccaaaattaattcttttgtaatcggat

SEQ ID NO: 15102 - DNA, 413 bp, Homo sapiens
gaaggaataagggacttgatatttatctagcatcagcaatgtgtggacatcgtgtgaacggctttataaacatttcatttaattctctacatctagccattttttaacctgtgctttccctccctctcaaagtactgtttatacatttattagtccatattttaaacgctccatgctctcaactgtattaatgctatttgttaggataagtggcagatgtccatggaaaataagtggctgcaaagtggtaatgctgaccagatgagaaaagaagtgtaaaagggaagttctaaagaattaaagccctggagagggtgggtagacaacaacagtccaaaatagtgctcttcattgaggctgtgtagattttcctgcttcctgggaaaactggggcatatttacacttgcatgtg

SEQ ID NO: 15103 - DNA, 709 bp, Homo sapiens
ctgcaagccaaggagagaaatttcagaaggaaccaaccctaccgacatcttgatcttggactttaagctgccagaccttttatacattttctacagaaaatgcaccccatcattgcttatagcccacccacgtggactgctcattctgtgaatcatgttttacagatttgtttatgtggcattcctcgtttgaataaagcagaaccaaatgtcttggtttgaagattgagatgaaatgggagggccacaaatagtaatttatctttgagcatcgtatagataaacatgtaacctgatactaaacaaaagtaaatgctcatggactgtcagtgatgtggtgggatatgccagagggaagtgatttgtggactcactggagagagacttctactagaaaaattgccttgatgttaggaattaaaagaacaaaacaaaacaaaaaacatggagccgtatcctccagaagcttacatctgatttaacgagacaggtaagtacaatttcaacataatgcattaagtgctatgagagtagtatgatggtgataggtgctatacaagacaagggttctaggttaattgctttgagaaaattgccaccctttaacaaggttaaactggattctttaacgtcaaccttactgagagtttctaatatgtcactgtgctttgtgaatcttcatgtgtgtggagtagagatccagtctgcc

SEQ ID NO: 15104 - DNA, 373 bp, Homo sapiens
aaaggaaaggctagcttcaggccagaaggcgttgcaggatctaatatgtatgctaccatgggtgaccaagcataaagataaactaaggatttgaatatataagggctaatgtttgtgtccattgttatggaatttctgacaatcactctctagtctttcctaatatttggcctttaggaaaagtgttttggactgaattgttctctctcctcattatcctccttaatgtgtgaaagtctcaatgtaactgttgattacctgctctctatttcataaagaggaaaaacagatccagaggaccatttcatgattcatcctttttcaaaacgtttcttaaaacattaaataaagttttattattgtaaactgttta

SEQ ID NO: 15105 - DNA, 686 bp, Homo sapiens
ctgcaagccaaggagagaaatttcagaaggaaccaaccctaccgacatcttgatcttggactttaagctgccagaccttttatacattttctacagaaaatgcaccccatcattgcttatagcccacccacgtggactgctcattctgtgaatcatgttttacagatttgtttatgtggcattcctcgtttgaataaagcagaaccaaatgtcttggtttgaagattgagatgaaatgggagggccacaaatagtaatttatctttgagcatcgtatagataaacatgtaacctgatactaaacaaaagtaaatgctcatggactgtcagtgatgtggtgggatatgccagagggaagtgatttgtggactcactggagagagacttctactagaaaaattgccttgatgttaggaattaaaagaacaaaacaaaacaaaaaacatggagccgtatcctccagaagcttacatctgatttaacgagacaggaaaagtgttttggactgaattgttctctctcctcattatcctccttaatgtgtgaaagtctcaatgtaactgttgattacctgctctctatttcataaagaggaaaaacagatccagaggaccatttcatgattcatcctttttcaaaacgtttcttaaaacattaaataaagttttattattgtaaactgttta

SEQ ID NO: 15106 - DNA, 315 bp, Homo sapiens
aagcaaacttcacagtggggaaaccctgtgaagtcacccagctcatatgctctcatacccatcataacagccagcctgaaagtggctctaccccactggtgagatcctggcacagctgcccagccacctctggttcaatagctggcctagagatgtctcacctccctctccctacagagagagcaccacataaccactcaggcaccccacacacacccttggcctgacagcctgactggaggtggctcagaaagagccccatgcagccacacagcacaccacaccacaactcaacagccagtgcagcagtggctc

SEQ ID NO: 15107 - DNA, 466 bp, Homo sapiens
ctaaatctagctaattaacacaggtattatcgtttttgtggtaagaacacataactttaattctttagcattttttaagaatacaatctgttgttattaactatagtcaccatgttgtacgatagatgtttaacttattctttctatccaactgaaattttgtattctttgatcacccctctagtccctgttccccagccacccaagtccctggtaaccaccattctacgctctgctgcgatgagatcagattttttggatctgcatataagaagtgagatcatgcagcatttgttttttctgtgcctggcttattttgtttagcattacgtcctccagatttagctatattttgaagtggtagcttcacaaagatgtagaccatttgttagtctgggtcactgagtaagcaaccgtgccgacatacagtgttagacaggttcattctactgcaaatgacaggatt

SEQ ID NO: 15108 - DNA, 327 bp, Homo sapiens
gggagcttaaaactacaaaacttaatatggactctactaatttaagagttaaaattcaagtgtagttgcgtaaaatttattgcctgcattatctctgggggacacatatacttgaattaatcacataaaccaagatatatgtttggtccattaaaaatgaaagttgacaattttttcaaattccatttcaagagaaaatttacatagaaaagaatgaacttgaatgcatgtaattcttagatagacaaaataatctctgaactggtatgaaaaatacctgctactacctgccatgataatattagctttgtgatcttggacaaacca

SEQ ID NO: 15109 - DNA, 909 bp, Homo sapiens
tttttttagtagagacgggatttctccatgttggtcaggctggtctcgaactcccgaccacagttgatccgcctgcctgggcctctcaaagtcctggaattacaggcttgagccactgtacccggcaacattctgtcttaaaaaaaaaaaacacgggccgggctcagtggctcacgcctgtcatcccagcactttgggaggccgaggcaggcgaatcacgagacagatcacctgggcaagagagggagactccatctcaaaaaaagaaaaaaagaaaattaagtcccccccatgctcccgagtcttcttactcctcataggtgaccactgttcagtctaccgtttcttcccagaaatatgtgcacatacaagcatatacatatgtctactctttgcttagcaaaccatttattcagccaaattacaattgttgtctttgataaagcaggctacagacctccagatcctaaattggtggcaccaaaattagagaacttactttgtcttgaagagaacacttgcaaattgaccaggaacccctactgccagtgtacatgaattagacttccataaagattataacttaggtgccagaatacacattttgaaatgaatgtaggccatctaaaggcatttttagcttctaaacattaactttatgggggcataatttacagacaataaatatacctgcttacagtaaaaaaaacaaaaacaggacccacaaaaaaaaactttgtgggccggccctggcgccccggaagaaaggtctctctaagccccacccggttggggcgcggggcccccggattgggttacggggcacttgggccaagcgggtccaaaggagaccctgggccaagccctagcgcggggttccctcccaaaaaaaaacgcggggggccccgg

SEQ ID NO: 15110 - DNA, 1213 bp, Homo sapiens
cccagctgctgctgggagaagggacagactcagcttctgactgcaggggcatctgcaggaagatcggggaaactgaagacacttttaactgcaaaagccctagaaacagtaagtgcaaattgttccgtggattgttgacttcacattcaaaccatcgggaagtgatcgagactggaagcgtcgacaaggatccgcagggtctgggaccagagaccagcttgtgatcctgctgtggagtgctaggggtctgctctggggagggggctttggcctagaagagacatggtacagggtgggaactgttacagtcatgcaacacttaacatcaggtgattctgtcattgtacaaatatagaaagaactcacactaacccatacagcgtagcctctcaaagtcctggaattacaggcttgagccactgtacccggcaacattctgtcttaaaaaaaaaaaacacgggccgggctcagtggctcacgcctgtcatcccagcactttgggaggccgaggcaggcgaatcacgagacagatcacctgggcaagagagggagactccatctcaaaaaaagaaaaaaagaaaattaagtcccccccatgctcccgagtcttcttactcctcataggtgaccactgttcagtctaccgtttcttcccagaaatatgtgcacatacaagcatatacatatgtctactctttgcttagcaaaccatttattcagccaaattacaattgttgtctttgataaagcaggctacagacctccagatcctaaattggtggcaccaaaattagagaacttactttgtcttgaagagaacacttgcaaattgaccaggaacccctactgccagtgtacatgaattagacttccataaagattataacttaggtgccagaatacacattttgaaatgaatgtaggccatctaaaggcatttttagcttctaaacattaactttatgggggcataatttacagacaataaatatacctgcttacagtaaaaaaaacaaaaacaggacccacaaaaaaaaactttgtgggccggccctggcgccccggaagaaaggtctctctaagccccacccggttggggcgcggggcccccggattgggttacggggcacttgggccaagcgggtccaaaggagaccctgggccaagccctagcgcggggttccctcccaaaaaaaaacgcggggggccccgg

SEQ ID NO: 15111 - DNA, 429 bp, Homo sapiens
ggtctgtaaggaattgcaaatgagatggcacacatatttatgctgtatcaaggtcactgtcatcttaccatatcagactgaaaatgtcaccaccatctggacagtcagatatgttttatcgggaaaatggtttttctctttgtgtatatgctctgcagtagtagggtggtttagtaacaaatatgtgagaccttttatttgaaaaaaattgtttttaaataatgggaaaagcaatatgttagtagtaagtatctgggtaagtctatcttagcctttgttaacaaaaactaagaattgatggggccttgagattgaggtagagatgaaagaggagctgttaactacaatcttctacattatcagaaagagttgaagtgttaatttcactattagaaaaatgtaagataaagaatccttttggaaaatatc

SEQ ID NO: 15112 - DNA, 688 bp, Homo sapiens
tgggccatcccgggacagatttttaatagatcttttaatagtgataataaagtatgttactatgtcagcatcgacttttacttcaggttattgactaaattctgctagtgggaaaaatgagaagaaaaagtgtgctatccattattctgtgtggaaataaactggcagaactagtgacatcactaaaaaaaatggtgattttcaaattgtgttccaaaacctaggaagtggtagttctgaactttttttttaactagataactctttgaaaatctaatgaaaggtatgaacactctcctcagaagaaatgcacacatatgcatagagacgtagttttgtatacagttaaatgggcccccgggtattcctgaagccccaagtaaagaaccccttactgttaaccctttttgtatattctttgctatgcagtcatacctaagggatgtaataagtgtctgtttcatcagatccatacccttttccaacaccaatccagaaatgacatatttgtgggatgagcaccacattgaagactggcatagagagctcactgaaataatatcatccaggccaggcacgatgtctcaacgcctgtaatcccagtgctttgtggggctgaggctggaggatctcttgaggccaggagaccagcctgagcaacacagcaagaccctgtctctacaaaaaa

SEQ ID NO: 15113 - DNA, 405 bp, Homo sapiens
cacagggcttgccatgaagtggtttgttcatgatttgtttctgggaccctgggaaaaatgttctcagggtctgcctaggaaggctggttttggaagcttgtggatttctttctgggtgagtcaggaaagttgtgctcctgctgggcgcagtggctcatgcctgtaatcccagcactttgggaggctgaggcaggcggatcacaaggtcaggagatcgagaccatcctggctaacgtggtgaaaccccatctctactaaaaatacaaaaaattagccgagcgtggtggtgggcacctgtggtcccagctactcgggaggctgaggcaggagaatggtgtgaacccgggaggcggagtttgcagtgagccgagatcgtgccactgcactccagcctgggcgacagag

SEQ ID NO: 15114 - DNA, 1880 bp, Homo sapiens
acttgcctcccgtgccaggtgcttctggggctcagcaggagaggaaaggggcagaggggcatagggtccctcgggtacggtgggggcaggcgggcgcacagcgctccggctctgagccaggcctgtgagggaaggggctgcaggctggcagggtgccgacttcccccatggctgctgtgagcccgcagagtcatccttggccccgtcccgcccttggggaagaatgggcccctctgtcctcaggccccttcgacgtgctgagcatccagacgtggcgaggagcccgaagggtgtggggtcccctctgcagggtcctgcttgttgcctgtttccggcgggcggggtgcacaatggggtctctaaggaccgtttcccgccactggccccattgtcactgtctccgccttcctcctcggcctttcagccgcataaagggccagtgaggtttgggacagccacagcccaaggctccgaggctaaaagcccctgggtgggggtgttccaggacacctggccctgtgtgagctgcctcctctcaccccaacccctcggatcctgggaaagagacagccatggctcaagggccagggacccctgggctgagccccagaaatggctttccattctcgcctgggccggggtgggggtggaggccagagcctggcccaggcagatgaagcccccagctttcaagggggaaactgaggctgtgtgagggacacagctgtgcagggcccacaaacacggtcctttctctaggttagcggatgcagatgcctgatgagtgccatgccctctgtggacacctggggaggggggtcacctccagcgccgccctgggacttccactgcacgtgcaagagacttaccctttcacacagatcacctgcctgccgcagggctgatgaggatgggtgaggagcgcagccactgggtgtcatgcactgtgggggttctcccaccttctgcccctcctcaggttccttgctgcttctctcctctcccaactgtggcacgctgagggctcaggcacaggaccgctcctctggggcagcctccaataacccttggacaacctccactttttcatcttcagccctgaccactccctggggcccatagccttacatccatctgcccccagcccaaacacttctgcaaacactagaaaaggaggtagcccgtgtgccctcctgcaccgcctcctccactcctgtcttggagaggctttcccgtgggccgagcaacccccttacctttggcacttgccctgattctctggccagcttcctacaacctctccttttcagccacacccaagtccacctgttcacaaacaccctgggctgggccctggccgaaccctggcttctacctacctgtctcaggaagtgcctgagccttgcacctacagaccctcccagagaaagccctggctttgcaaccagctgtcttctcatgagacacagggccacaggagcaccacggtgcccaaatgggtcttggagcattagaccaggggcttcatgcctgccctggggacaggtggccaaagtggcatgggagatagggagacagtgtgggtgagcaggtgggcaggagctacaggagcctggggcctgtggatcacagacaccgccaggcaagtgccagttcacacaggtacaggtggctgcagagtgcccaaaggccaagcagcagagtgcctggtgtggacgggagaggagtggggaggttgggcgcagtggctcacgcctgtaatcccaacactttgggaggcccaggcaagcagatcatgaggtcaggagatggagaccatcctggccaacatggtgaaaccgtctctaataaaacacaaaaaattagccagacatggtggc

SEQ ID NO: 15115 - DNA, 560 bp, Homo sapiens
  misc_feature (67)..(67): n is a, c, g, or t
  misc_feature (282)..(282): n is a, c, g, or t
  misc_feature (534)..(534): n is a, c, g, or t
  misc_feature (537)..(537): n is a, c, g, or t
  misc_feature (544)..(544): n is a, c, g, or t
  misc_feature (556)..(558): n is a, c, g, or t
ttaacacccttatcttttttaatatgcaggtttggttgttttaactgaaagcatataacttaaatantgaaccaaaataacccaaactcttattcagcacatctcacagaatacacattttcaatattccagattagcaggatggagagttcaggagagagatcaaaatttaaatctgtcagtgacgaccacacacagcagcagactgcaaggttcttctcaataatgcaaaacatctttcatctatgaattttcccagttttcatgaatttaaatatctanagaaatgttataaaagctttaaaattcctaaatcccagtgctactctattccctattattccaggaccatttccaaaaccaaagctaccagaacagcttagaaatcattaggcggggttgaaaaatagactcttagatttaaatatacggttttggtggtttggttgtttctttagggttttttgttgtttttgttttgttttgttttttgttttggggttttgtttgtttgttgttttttgagacagagtntcnctctgtngcccaggctggnnntt

SEQ ID NO: 15116 - DNA, 434 bp, Homo sapiens
ccatatccattagcagccatttcccattaactctccttagccccttcttttttttttttgcaaccactaatttgctttctatctctatggatttgtctattctggatatttcagataaatggaatcatgtaacatgtggacttttgtaacttgcttttttcacttagtgtgtgtgtgtgtttctttttgagactgagtctttctctgtcgcccaggctggagagcagtggcgcgatctcagctcactgcaacctccctctcccaggctcaagcgattcttgtgtcttagcctcccaagtagctgggattacaggtgtgtgccaccacgccaggctaatttttgtatttttagtagagacgggttttcaccatgctggccacactggtcttgaactcctgaccacctcccaaagtgctcggattacaggcatgag

SEQ ID NO: 15117 - DNA, 589 bp, Homo sapiens
gtattgggggctcacagttagataaaggtctgaaacatatactattgggataccctgaaaagctagacttagtctacataaaaagattgaaaagattgaagatggatgtaaacaaggtgtgattttgtttttgaaacatggaaactgctgttatgtagctgccataataagcagagaaaagctgagtgttcggtctggtctgcactaagcctgcacagacatctcactcgagtctccacctgatggagggaaacttggaccacagagagggtgagtaactccctccagatcagacagctggccacagagccaggatttagggccagggctgaccccaaggtccatgtctttggaaaccaggctgtgaattcaggcccctcggcctattcttcagctctctgtcccaggacagataacttcatctcctcccagcccccacggaaaaaggaattctggataccagcgctaaaggataactcagcggaaagatttcaaaagctagattcattcaagggggtaggtaacttaacttcacttggttgtctgatgtttggaagatctaattagacctctgtatagcgtagggaca

SEQ ID NO: 15118 - DNA, 465 bp, Homo sapiens
gtgggcttcctaccagaaccatgagtaggtagggcagaatttcgatcctgagctgagagtggcacgtctggcctttgaacctggcccctaacctcacccagagactctgcactaaaacttgcagtccccgttctcccccaggggaggaagaatgggcctcttgcacgatgggatgttaggaacctctagtctattcatgaagctatttctctgctcttcattccactgttacagacttctttggtccctaaagattttatgcctccccagtcttcagctgaggcgcgaaacagattggatgacttttatcatggcctgattttcttttggcttgtcttggtttcatggaaacatatttcttttaaagtgaattctgggctgggtgccatggctcatgcctataatcccagcactttgggaggctgaggcaggaggatcacctgaggtcaggagatcaagtccagc

SEQ ID NO: 15119 - DNA, 397 bp, Homo sapiens
acattaaagacacaaaaagtatgtgtgctggagtcagaaatgttgggtcaggccttattttgactttgtgactagcagaagtcacttaacctttctgcattttggctccctcaactgaaaattaggggtgatgtgaataccttacaggtctgttataagcatcaagtgacatcatagctatgagagctctttgtagactgttggctcccttagctctctcagaggtctggggttaagtagaatatgacaaaacctagaacggttacatagggcagttagcatcatttatcactgataaatctttagaaagatatttcctgtcatttacatttctgcatcactaagtccaagatgatccttaatccatgatatacccggtaaaaattattgtttatta

SEQ ID NO: 15120 - DNA, 384 bp, Homo sapiens
tcattcactcaaattatctaattaaagcttcacagtgatcctcttaggttatttctcatcttacagatgtgcaaactgaggagaaggaagtgtaaggtcacgccgctggtagagttgggggccaaatccagatctgttggctctggaagctgtaaatcaaacacaaaaaggaaaaagtcaaaggcggtctggaaggcaagcctggaaggcacagaaaagagaagcgtcctcatactttgttcactctaaaccattgattcagggagagggaagcagtctgtggcaagtcggaagtgcgacgaggacgaagactgggtttgggttggggaacccctgtctgctgagccccttcactgcggtctcctctgcttgctccgcggagct

SEQ ID NO: 15121 - DNA, 2128 bp, Homo sapiens
gagctggtgctctcagccccctcatcatgggatgccttgcaccaccctggggccctgcagagtccctgccagcaagagggccctcaccagatgcaccccctagacttggacttcccagcctccagaaatgacttcatgtgcaagcgctttgccttaatgagtactgcagcaaatgcacagtgagggactcttacccaaggtgggaacagcaagcagtggattgaaagggctgggaccctggacccaggcttgttcttggatcacagaaacctagaatgaaatctgtgctgcctgctacaacctgtggctttggattttctcgaggccccagagcgtcagaggaagttttccgaatggcactctgcgtgggaaggagcttgtgcacgtgcacgctgccaccatctgccctcagcgctgattcaggaggcgcttctcaactatagcccacagtgtgacaactgaacgtgtcccctcacgtttccaaatacggggggtgcaggaggcactgctcactgttgcaccccctgacccacgctgccagtcctgccctcactgctgggtgctcactgggaccctggaaaggtctagctgagccttttagggcatgaggatgttgggagaatagaggtggctcctctgagaagcctgagaagtgatcaggccaaccttagaatctctgactactagaggcttgacttgcagtgaaacccgtcctaattgatgaagatcctgtatcgagttagagaaatggaagaaacgacgcgggggtctggtttgccagccaacagctgtggcttaaatctgagtcctttggaaagaaaggaaggcattccttttatttctaatatggctaaggtggaagttcttcatctctgtgtgcatgcagcttagttcctgctccttcagccaagctaacgcggaagccctagagcatctggaccaagcaaggaagccggcaggagcctctgcactgcctatgaatttgaccaacgggacttgggcctggaaaagagcatcccgaacagtggagaggaagagggagtgaggccctgtggacacagcagaggaatccacaatggatttgcagcaggctggtggaggcagagcagagaagggcgggagagggccagcgaaggcctgggaaggtggacccacaaactcgtctcctaatgaagctaaccagcaatgcgagggcacacagggagaccccctagaggctgccccaggccaggagtcacctgtgaactgaggtggccaaggcaggttctgtggcagagggtgaatgcctgcagatgagaaccagccgcggtgcccagaaaggaacagtgtgcgggcctgacgggagcccccatcaatacaaccagctcctgctcagaactctcttcaggcagacaaatagaagatatgtttctacttccccaggcctcagcaccatgactattctagtcccagtggataccctgcttcaggttttatgcagctgagttgaaaaagaataacagaataggaggaaaacaaggggaagaaggtaggtgggacgccccaaatcatcttgagtgcactccataaaagaaagaggcattaaagcagccccctctcctatctcaagccatccttcaacttatagggactttgcacatagttgctgcaggttggcctgcctctgtcagaggtgtttaaaccagattgactctctcttgtataggggctgggtaaaatgaggctgagacctactgggctgcattctcaggagattaggcattctaagtcacaggatgagataggaggtcggcacaagatacagatcacaaagaccttgctgataaaacaggttgcagtaaagaagccggccaaaacccaccaaaaccaagatggtgacgagagtgactctggtcgtcctcactgctacactcccatcagcgccatgacagtttacagatgccatagcaacgtctggaagttacctgtacggtctataaaggggaggcatgaataatccaccccttgtttagcatatcatcaagaaataaccataaaaatgggcaaccaggagcccttggggctcctctgcctatggagtggccattcttttattcctttactttctcaataaacttgctttcacttt

SEQ ID NO: 15122 - DNA, 1796 bp, Homo sapiens
tttgcagaacatggctttttagttataggattctccaaggtggtctcacaagtttctaatgaattgggttgggaagctactgctttagaaggcagaagcagtttcaagagtgtgctctgggtataaaagtcatgggtgcagaaggatatcagccccttcctaggtaattccatctctgctcactagtcctgagtctgagaaattgtcatcataaattaggcagacaggactgccagaagccaatccagaacatgaatttataacccagggctattgtatagcttcctgtgacctcttacacggagcctccctctgtcttcaggatcaggccaaccttagaatctctgactactagaggcttgacttgcagtgaaacccgtcctaattgatgaagatcctgtatcgagttagagaaatggaagaaacgacgcgggggtctggtttgccagccaacagctgtggcttaaatctgagtcctttggaaagaaaggaaggcattccttttatttctaatatggctaaggtggaagttcttcatctctgtgtgcatgcagcttagttcctgctccttcagccaagctaacgcggaagccctagagcatctggaccaagcaaggaagccggcaggagcctctgcactgcctatgaatttgaccaacgggacttgggcctggaaaagagcatcccgaacagtggagaggaagagggagtgaggccctgtggacacagcagaggaatccacaatggatttgcagcaggctggtggaggcagagcagagaagggcgggagagggccagcgaaggcctgggaaggtggacccacaaactcgtctcctaatgaagctaaccagcaatgcgagggcacacagggagaccccctagaggctgccccaggccaggagtcacctgtgaactgaggtggccaaggcaggttctgtggcagagggtgaatgcctgcagatgagaaccagccgcggtgcccagaaaggaacagtgtgcgggcctgacgggagcccccatcaatacaaccagctcctgctcagaactctcttcaggcagacaaatagaagatatgtttctacttccccaggcctcagcaccatgactattctagtcccagtggataccctgcttcaggttttatgcagctgagttgaaaaagaataacagaataggaggaaaacaaggggaagaaggtaggtgggacgccccaaatcatcttgagtgcactccataaaagaaagaggcattaaagcagccccctctcctatctcaagccatccttcaacttatagggactttgcacatagttgctgcaggttggcctgcctctgtcagaggtgtttaaaccagattgactctctcttgtataggggctgggtaaaatgaggctgagacctactgggctgcattctcaggagattaggcattctaagtcacaggatgagataggaggtcggcacaagatacagatcacaaagaccttgctgataaaacaggttgcagtaaagaagccggccaaaacccaccaaaaccaagatggtgacgagagtgactctggtcgtcctcactgctacactcccatcagcgccatgacagtttacagatgccatagcaacgtctggaagttacctgtacggtctataaaggggaggcatgaataatccaccccttgtttagcatatcatcaagaaataaccataaaaatgggcaaccaggagcccttggggctcctctgcctatggagtggccattcttttattcctttactttctcaataaacttgctttcacttt

SEQ ID NO: 15123 - DNA, 1191 bp, Homo sapiens
acacattaactccctgaggccgggaggagggtggatggtcatttattactgcggacacttatgtaacctggggtgtatataggagcctggctgaggacacactcgccagcctgtgctttgccacctgagcgccgctccctctcaggatgaaggtgacggtgggcccagacccttccctggtctaccgacctgatgtggacccagaggtggccaaagacaaggccagcttccggaactacacgtcaggtcccctcctggaccgtgtcttcaccacctacaagctcatgcacacgcaccagacagtggacttcgtcaggagcaagcatgcccagtttgggggcttctcctacaagaaaatgacagtcatggaggccgtggacctgctggatgggctggtggatgagtcggacccggacgtagatttccccaactccttccatgccttccagacagcggagggcatccggaaggcccacccagacaaggactggttccacctcgtcgggctcctgcacgacctggggaaggtcctggccctgttcggggagccccagtgggctgtcgtcggcgacaccttccccgtcggatgccgtccgcaggcctccgtggttttctgcgactccaccttccaggacaaccctgacctccaggatcctcgatacagcacagagctcgggatgtatcagccccactgtgggctcgacagggtcctcatgtcctggggccatgatgagtacatgtaccaggtgatgaagtttaacaagttctcactgccccctgaggctttctacatgatccggttccactccttctacccctggcacacgggccgcgactaccagcagctgtgcagccagcaggacctggccatgctgccctgggtgcgggagttcaacaagttcgacctctacaccaagtgcccggacctgccggacgtggacaagctgcggccctactaccaggggctcattgacaagtactgccctggcatcctgagctggtgaccctcctgccacccaagctgctgctggacctaggcctggccctccgcctgcctggagaggcctggccctgggcaaacagccgccatcagggttcacctcggtgggggaccccactcacccccttagggtcgccacccctcacggcaacttgtgcctggcgtcaataaagacctggaaggatgttgtg

SEQ ID NO: 15124 - DNA, 1556 bp, Homo sapiens
cagacattaagtagctatttaatgagaagcaggcactggaagcttgctccagaaaaacaatcacaggacatgttggtcctgagagaagtcattccttggtaggacctattgtttgaaggaggtgggggtgaatttcatcaaaatggacagtgtggatattgtgattcagaggattgagagactttgtttcctgctgttattaatttcaagccctttttaaagggattctcctagtgattggtacagtgggattcatttagagaaaaagccttgtgtaccagttggaagttaatgcccaagagcagggccagttgctggaggacaaagtggcctaattagttgcttttcaatacttagatcctacaggctaccccaaagataaaataggctactttgtagctcagatcttccagcctagtgcctagcaagctcactaagaagaggaggtgacctgtagaatccacacctcttaatctccctatttgccacctgagcgccgctccctctcaggatgaaggtgacggtgggcccagacccttccctggtctaccgacctgatgtggacccagaggtggccaaagacaaggccagcttccggaactacacgtcaggtcccctcctggaccgtgtcttcaccacctacaagctcatgcacacgcaccagacagtggacttcgtcaggagcaagcatgcccagtttgggggcttctcctacaagaaaatgacagtcatggaggccgtggacctgctggatgggctggtggatgagtcggacccggacgtagatttccccaactccttccatgccttccagacagcggagggcatccggaaggcccacccagacaaggactggttccacctcgtcgggctcctgcacgacctggggaaggtcctggccctgttcggggagccccagtgggctgtcgtcggcgacaccttccccgtcggatgccgtccgcaggcctccgtggttttctgcgactccaccttccaggacaaccctgacctccaggatcctcgatacagcacagagctcgggatgtatcagccccactgtgggctcgacagggtcctcatgtcctggggccatgatgagtacatgtaccaggtgatgaagtttaacaagttctcactgccccctgaggctttctacatgatccggttccactccttctacccctggcacacgggccgcgactaccagcagctgtgcagccagcaggacctggccatgctgccctgggtgcgggagttcaacaagttcgacctctacaccaagtgcccggacctgccggacgtggacaagctgcggccctactaccaggggctcattgacaagtactgccctggcatcctgagctggtgaccctcctgccacccaagctgctgctggacctaggcctggccctccgcctgcctggagaggcctggccctgggcaaacagccgccatcagggttcacctcggtgggggaccccactcacccccttagggtcgccacccctcacggcaacttgtgcctggcgtcaataaagacctggaaggatgttgtg

SEQ ID NO: 15125 - DNA, 1060 bp, Homo sapiens
acacattaactccctgaggccgggaggagggtggatggtcatttattactgcggacacttatgtaacctggggtgtatataggagcctggctgaggacacactcgccagcctgtgctttgccacctgagcgccgctccctctcaggatgaaggtgacggtgggcccagacccttccctggtctaccgacctgatgtggacccagaggtggccaaagacaaggccagcttccggaactacacgtcaggtcccctcctggaccgtgtcttcaccacctacaagctcatgcacacgcaccagacagtggacttcgtcaggagcaagcatgcccagtttgggggcttctcctacaagaaaatgacagtcatggaggccgtggacctgctggatgggctggtggatgagtcggacccggacgtagatttccccaactccttccatgccttccagacagcggagggcatccggaaggcccacccagacaaggtccccaacctgccctgtccatccccctcccagactggttccacctcgtcgggctcctgcacgacctggggaaggtcctggccctgttcggggagccccagtgggctgtcgtcggcgacaccttccccgtcggatgccgtccgcaggcctccgtggttttctgcgactccaccttccaggacaaccctgacctccaggatcctcgatacagcacagagctcgggatgtatcagccccactgtgggctcgacagggtcctcatgtcctggggccatgatgcaagttcgacctctacaccaagtgcccggacctgccggacgtggacaagctgcggccctactaccaggggctcattgacaagtactgccctggcatcctgagctggtgaccctcctgccacccaagctgctgctggacctaggcctggccctccgcctgcctggagaggcctggccctgggcaaacagccgccatcagggttcacctcggtgggggaccccactcacccccttagggtcgccacccctcacggcaacttgtgcctggcgtcaataaagacctggaaggatgttgtg

SEQ ID NO: 15126 - DNA, 509 bp, Homo sapiens
acacattaactccctgaggccgggaggagggtggatggtcatttattactgcggacacttatgtaacctggggtgtatataggagcctggctgaggacacactcgccagcctgtgctttgccacctgagcgccgctccctctcaggatgaaggtgacggtggtgagtacccagaccccatgcagagaggctctgctgactgctctcctggtggccagccactcccgccctcttctagtggcactggccagccctcctcctccgtccagctgggcaagagccagcggctgccgacccccaggctccctgtggactcagtctcctcccaaagccacttccacccctcaagggtggccatgggtgccgctcaggcgtggtgtcccctgtaccccggaagcagacgtctgctgactttcgctttgcagatgaggacctgggagtgagagctcctgggactcgctgaggccagggcaggggctgggatgatggcgcgggagaggctgtgtcctc

SEQ ID NO: 15127 - DNA, 1469 bp, Homo sapiens
acacattaactccctgaggccgggaggagggtggatggtcatttattactgcggacacttatgtaacctggggtgtatataggagcctggctgaggacacactcgccagcctgtgctttgccacctgagcgccgctccctctcaggatgaaggtgacggtgggcccagacccttccctggtctaccgacctgatgtggacccagaggtggccaaagacaaggccagcttccggaactacacgtcaggtcccctcctggaccgtgtcttcaccacctacaagctcatgcacacgcaccagacagtggacttcgtcaggagcaagcatgcccagtttgggggcttctcctacaagaaaatgacagtcatggaggccgtggacctgctggatgggctggtggatgagtcggacccggacgtagatttccccaactccttccatgccttccagacagcggagggcatccggaaggcccacccagacaaggactggttccacctcgtcgggctcctgcacgacctggggaaggtcctggccctgttcggggagccccagtgggctgtcgtcggcgacaccttccccgtcggatgccgtccgcaggcctccgtggttttctgcgactccaccttccaggacaaccctgacctccaggatcctcgatacagcacagagctcgggatgtatcagccccactgtgggctcgacagggtcctcatgtcctggggccatgatgagtacatgtaccaggtgatgaagtttaacaagttctcactgccccctgaggctttctacatgatccggttccactccttctacccctggcacacgggccgcgactaccagcagctgtgcagccagcaggacctggccatgctgccctgggtgcgggagttcaacaagttcgacctctacaccaagtgcccggacctgccggacgtggacaagctgcggccctactaccaggggctcattgacaagtactgccctggcatcctgagctggtgaccctcctgccacccaagctgctgctggacctaggcctggccctccgcctgcctggagaggcctggccctgggcaaacagccgccatcagggttcacctcggtgggggaccccactcacccccttagggtcgccacccctcacggcaacttgtgcctggcgtcaataaagacctggaaggatgttgtgcttctgaagccccactgggtgttactgcagcagggcgtggcccaggccgagggatggtgccagcagggtggaggccaagtcccaggctttcaggtgtgtgtgtcccaccacactggccgtggtaaacatctgcccatcctcccagctcctgtgtcagagcctgggggacgagtcacccagctcacccccacatgctcaaaacagtcaccaagtcctctgggctccgtccccttaaaaaataccccaatagctaaaataatacattcatagaaaacaac

SEQ ID NO: 15128 - DNA, 1223 bp, Homo sapiens
acacattaactccctgaggccgggaggagggtggatggtcatttattactgcggacacttatgtaacctggggtgtatataggagcctggctgaggacacactcgccagcctgtgctttgccacctgagcgccgctccctctcaggatgaaggtgacggtgggcccagacccttccctggtctaccgacctgatgtggacccagaggtggccaaagacaaggccagcttccggaactacacgtcaggtcccctcctggaccgtgtcttcaccacctacaagctcatgcacacgcaccagacagtggacttcgtcaggagcaagcatgcccagtttgggggcttctcctacaagaaaatgacagtcatggaggccgtggacctgctggatgggctggtggatgagtcggacccggacgtagatttccccaactccttccatgccttccagacagcggagggcatccggaaggcccacccagacaaggtccccaacctgccctgtccatccccctcccagactggttccacctcgtcgggctcctgcacgacctggggaaggtcctggccctgttcggggagccccagtgggctgtcgtcggcgacaccttccccgtcggatgccgtccgcaggcctccgtggttttctgcgactccaccttccaggacaaccctgacctccaggatcctcgatacagcacagagctcgggatgtatcagccccactgtgggctcgacagggtcctcatgtcctggggccatgatgagtacatgtaccaggtgatgaagtttaacaagttctcactgccccctgaggctttctacatgatccggttccactccttctacccctggcacacgggccgcgactaccagcagctgtgcagccagcaggacctggccatgctgccctgggtgcgggagttcaacaagttcgacctctacaccaagtgcccggacctgccggacgtggacaagctgcggccctactaccaggggctcattgacaagtactgccctggcatcctgagctggtgaccctcctgccacccaagctgctgctggacctaggcctggccctccgcctgcctggagaggcctggccctgggcaaacagccgccatcagggttcacctcggtgggggaccccactcacccccttagggtcgccacccctcacggcaacttgtgcctggcgtcaataaagacctggaaggatgttgtg

SEQ ID NO: 15129 - DNA, 1475 bp, Homo sapiens
cagacattaagtagctatttaatgagaagcaggcactggaagcttgctccagaaaaacaatcacaggacatgttggtcctgagagaagtcattccttggtaggacctattgtttgaaggaggtgggggtgaatttcatcaaaatggacagtgtggatattgtgattcagaggattgagagactttgtttcctgctgttattaatttcaagccctttttaaagggattctcctagtgattggtacagtgggattcatttagagaaaaagccttgtgtaccagttggaagttaatgcccaagagcagggccagttgctggaggacaaagtggcctaattagttgcttttcaatacttagatcctacaggctaccccaaagataaaataggctactttgtagctcagatcttccagcctagtgcctagcaagctcactaagaagaggaggtgacctgtagaatccacacctcttaatctccctatttgccacctgagcgccgctccctctcaggatgaaggtgacggtgggcccagacccttccctggtctaccgacctgatgtggacccagaggtggccaaagacaaggccagcttccggaactacacgcatgcccagtttgggggcttctcctacaagaaaatgacagtcatggaggccgtggacctgctggatgggctggtggatgagtcggacccggacgtagatttccccaactccttccatgccttccagacagcggagggcatccggaaggcccacccagacaaggactggttccacctcgtcgggctcctgcacgacctggggaaggtcctggccctgttcggggagccccagtgggctgtcgtcggcgacaccttccccgtcggatgccgtccgcaggcctccgtggttttctgcgactccaccttccaggacaaccctgacctccaggatcctcgatacagcacagagctcgggatgtatcagccccactgtgggctcgacagggtcctcatgtcctggggccatgatgagtacatgtaccaggtgatgaagtttaacaagttctcactgccccctgaggctttctacatgatccggttccactccttctacccctggcacacgggccgcgactaccagcagctgtgcagccagcaggacctggccatgctgccctgggtgcgggagttcaacaagttcgacctctacaccaagtgcccggacctgccggacgtggacaagctgcggccctactaccaggggctcattgacaagtactgccctggcatcctgagctggtgaccctcctgccacccaagctgctgctggacctaggcctggccctccgcctgcctggagaggcctggccctgggcaaacagccgccatcagggttcacctcggtgggggaccccactcacccccttagggtcgccacccctcacggcaacttgtgcctggcgtcaataaagacctggaaggatgttgtg

SEQ ID NO: 15130 - DNA, 1511 bp, Homo sapiens
cagacattaagtagctatttaatgagaagcaggcactggaagcttgctccagaaaaacaatcacaggacatgttggtcctgagagaagtcattccttggtaggacctattgtttgaaggaggtgggggtgaatttcatcaaaatggacagtgtggatattgtgattcagaggattgagagactttgtttcctgctgttattaatttcaagccctttttaaagggattctcctagtgattggtacagtgggattcatttagagaaaaagccttgtgtaccagttggaagttaatgcccaagagcagggccagttgctggaggacaaagtggcctaattagttgcttttcaatacttagatcctacaggctaccccaaagataaaataggctactttgtagctcagatcttccagcctagtgcctagcaagctcactaagaagaggaggtgacctgtagaatccacacctcttaatctccctatttgccacctgagcgccgctccctctcaggatgaaggtgacggtgggcccagacccttccctggtctaccgacctgatgtggacccagaggtggccaaagacaaggccagcttccggaactacacgtcaggtcccctcctggaccgtgtcttcaccacctacaagctcatgcacacgcaccagacagtggacttcgtcaggagcaagcatgcccagtttgggggcttctcctacaagaaaatgacagtcatggaggccgtggacctgctggatgggctggtggatgagtcggacccggacgtagatttccccaactccttccatgccttccagacagcggagggcatccggaaggcccacccagacaaggactggttccacctcgtcgggctcctgcacgacctggggaaggtcctggccctgttcggggagccccaggcctccgtggttttctgcgactccaccttccaggacaaccctgacctccaggatcctcgatacagcacagagctcgggatgtatcagccccactgtgggctcgacagggtcctcatgtcctggggccatgatgagtacatgtaccaggtgatgaagtttaacaagttctcactgccccctgaggctttctacatgatccggttccactccttctacccctggcacacgggccgcgactaccagcagctgtgcagccagcaggacctggccatgctgccctgggtgcgggagttcaacaagttcgacctctacaccaagtgcccggacctgccggacgtggacaagctgcggccctactaccaggggctcattgacaagtactgccctggcatcctgagctggtgaccctcctgccacccaagctgctgctggacctaggcctggccctccgcctgcctggagaggcctggccctgggcaaacagccgccatcagggttcacctcggtgggggaccccactcacccccttagggtcgccacccctcacggcaacttgtgcctggcgtcaataaagacctggaaggatgttgtg

SEQ ID NO: 15131 - DNA, 1276 bp, Homo sapiens
acacattaactccctgaggccgggaggagggtggatggtcatttattactgcggacacttatgtaacctggggtgtatataggagcctggctgaggacacactcgccagcctgtgctttgccacctgagcgccgctccctctcaggatgaaggtgacggtgggcccagacccttccctggtctaccgacctgatgtggacccagaggtggccaaagacaaggccagcttccggaactacacgtcaggtcccctcctggaccgtgtcttcaccacctacaagctcatgcacacgcaccagacagtggacttcgtcaggagcaagcatgcccagtttgggggcttctcctacaagaaaatgacagtcatggaggccgtggacctgctggatgggctggtggatgagtcggacccggacgtagatttccccaactccttccatgccttccagacagcggagggcatccggaaggcccacccagacaaggactggttccacctcgtcgggctcctgcacgacctggggaaggtcctggccctgttcggggagccccagtgggctgtcgtcggcgacaccttccccgtcggatgccgtccgcaggcctccgtggttttctgcgactccaccttccaggacaaccctgacctccaggatcctcgatacagcacagagctcgggatgtatcagccccactgtgggctcgacagggtcctcatgtcctggggccatgatgagtacatgtaccaggtgatgaagtttaacaagttctcactgccccctgaggtaggtggggggaggggcaacgcagcccgtccaccaggcccggtcctgcagccccaagtgagccgctgggtggccttgcccgcaggctttctacatgatccggttccactccttctacccctggcacacgggccgcgactaccagcagctgtgcagccagcaggacctggccatgctgccctgggtgcgggagttcaacaagttcgacctctacaccaagtgcccggacctgccggacgtggacaagctgcggccctactaccaggggctcattgacaagtactgccctggcatcctgagctggtgaccctcctgccacccaagctgctgctggacctaggcctggccctccgcctgcctggagaggcctggccctgggcaaacagccgccatcagggttcacctcggtgggggaccccactcacccccttagggtcgccacccctcacggcaacttgtgcctggcgtcaataaagacctggaaggatgttgtg

SEQ ID NO: 15132 - DNA, 1296 bp, Homo sapiens
acacattaactccctgaggccgggaggagggtggatggtcatttattactgcggacacttatgtaacctggggtgtatataggagcctggctgaggacacactcgccagcctgtgctttgccacctgagcgccgctccctctcaggatgaaggtgacggtgggcccagacccttccctggtctaccgacctgatgtggacccagaggtggccaaagacaaggccagcttccggaactacacgtcaggtcccctcctggaccgtgtcttcaccacctacaagctcatgcacacgcaccagacagtggacttcgtcaggagcaagcatgcccagtttgggggcttctcctacaagaaaatgacagtcatggaggccgtggacctgctggatgggctggtggatgagtcggacccggacgtagatttccccaactccttccatgccttccagacagcggagggcatccggaaggcccacccagacaaggactggttccacctcgtcgggctcctgcacgacctggggaaggtcctggccctgttcggggagccccagtgggctgtcgtcggcgacaccttccccgtcggatgccgtccgcaggcctccgtggttttctgcgactccaccttccaggacaaccctgacctccaggatcctcgatacagcacagagctcgggatgtatcagccccactgtgggctcgacagggtcctcatgtcctggggccatgatgagtacatgtaccaggtgatgaagtttaacaagttctcactgccccctgaggctttctacatgatccggttccactccttctacccctggcacacgggccgcgactaccagcagctgtgcagccagcaggacctggccatgctgccctgggtgcgggagttcaaaagtacgccccgctacccgccgaggggtgttgtgggagtgaaaaagggggttgggtggggggcctgggggttcttcacggggctcaccgcccctccctgctgcagcaagttcgacctctacaccaagtgcccggacctgccggacgtggacaagctgcggccctactaccaggggctcattgacaagtactgccctggcatcctgagctggtgaccctcctgccacccaagctgctgctggacctaggcctggccctccgcctgcctggagaggcctggccctgggcaaacagccgccatcagggttcacctcggtgggggaccccactcacccccttagggtcgccacccctcacggcaacttgtgcctggcgtcaataaagacctggaaggatgttgtg

SEQ ID NO: 15133 - DNA, 1381 bp, Homo sapiens
acacattaactccctgaggccgggaggagggtggatggtcatttattactgcggacacttatgtaacctggggtgtatataggagcctggctgaggacacactcgccagcctgtgctttgccacctgagcgccgctccctctcaggatgaaggtgacggtgggcccagacccttccctggtctaccgacctgatgtggacccagaggtggccaaagacaaggccagcttccggaactacacgtcaggtcccctcctggaccgtgtcttcaccacctacaagctcatgcacacgcaccagacagtggacttcgtcaggagcaagcatgcccagtttgggggcttctcctacaagaaaatgacagtcatggaggccgtggacctgctggatgggctggtggatgagtcggacccggacgtagatttccccaactccttccatgccttccagacagcggagggcatccggaaggcccacccagacaaggactggttccacctcgtcgggctcctgcacgacctggggaaggtcctggccctgttcggggagccccagtgggctgtcgtcggcgacaccttccccgtcggatgccgtccgcaggcctccgtggttttctgcgactccaccttccaggacaaccctgacctccaggatcctcgatacagcacagagctcgggatgtatcagccccactgtgggctcgacagggtcctcatgtcctggggccatgatgagtacatgtaccaggtgatgaagtttaacaagttctcactgccccctgaggtaggtggggggaggggcaacgcagcccgtccaccaggcccggtcctgcagccccaagtgagccgctgggtggccttgcccgcaggctttctacatgatccggttccactccttctacccctggcacacgggccgcgactaccagcagctgtgcagccagcaggacctggccatgctgccctgggtgcgggagttcaaaagtacgccccgctacccgccgaggggtgttgtgggagtgaaaaagggggttgggtggggggcctgggggttcttcacggggctcaccgcccctccctgctgcagcaagttcgacctctacaccaagtgcccggacctgccggacgtggacaagctgcggccctactaccaggggctcattgacaagtactgccctggcatcctgagctggtgaccctcctgccacccaagctgctgctggacctaggcctggccctccgcctgcctggagaggcctggccctgggcaaacagccgccatcagggttcacctcggtgggggaccccactcacccccttagggtcgccacccctcacggcaacttgtgcctggcgtcaataaagacctggaaggatgttgtg

SEQ ID NO: 15134 - DNA, 1145 bp, Homo sapiens
acacattaactccctgaggccgggaggagggtggatggtcatttattactgcggacacttatgtaacctggggtgtatataggagcctggctgaggacacactcgccagcctgtgctttgccacctgagcgccgctccctctcaggatgaaggtgacggtgggcccagacccttccctggtctaccgacctgatgtggacccagaggtggccaaagacaaggccagcttccggaactacacgtcaggtcccctcctggaccgtgtcttcaccacctacaagctcatgcacacgcaccagacagtggacttcgtcaggagcaagcatgcccagtttgggggcttctcctacaagaaaatgacagtcatggaggccgtggacctgctggatgggctggtggatgagtcggacccggacgtagatttccccaactccttccatgccttccagacagcggagggcatccggaaggcccacccagacaaggactggttccacctcgtcgggctcctgcacgacctggggaaggtcctggccctgttcggggagccccagtgggctgtcgtcggcgacaccttccccgtcggatgccgtccgcaggcctccgtggttttctgcgactccaccttccaggacaaccctgacctccaggatcctcgatacagcacagagctcgggatgtatcagccccactgtgggctcgacagggtcctcatgtcctggggccatgatgagtacatgtaccaggtgatgaagtttaacaagttctcactgccccctgaggccgcgactaccagcagctgtgcagccagcaggacctggccatgctgccctgggtgcgggagttcaacaagttcgacctctacaccaagtgcccggacctgccggacgtggacaagctgcggccctactaccaggggctcattgacaagtactgccctggcatcctgagctggtgaccctcctgccacccaagctgctgctggacctaggcctggccctccgcctgcctggagaggcctggccctgggcaaacagccgccatcagggttcacctcggtgggggaccccactcacccccttagggtcgccacccctcacggcaacttgtgcctggcgtcaataaagacctggaaggatgttgtg

SEQ ID NO: 15135 - DNA, 1059 bp, Homo sapiens
acacattaactccctgaggccgggaggagggtggatggtcatttattactgcggacacttatgtaacctggggtgtatataggagcctggctgaggacacactcgccagcctgtgctttgccacctgagcgccgctccctctcaggatgaaggtgacggtgggcccagacccttccctggtctaccgacctgatgtggacccagaggtggccaaagacaaggccagcttccggaactacacgtcaggtcccctcctggaccgtgtcttcaccacctacaagctcatgcacacgcaccagacagtggacttcgtcaggagcaagcatgcccagtttgggggcttctcctacaagaaaatgacagtcatggaggccgtggacctgctggatgggctggtggatgagtcggacccggacgtagatttccccaactccttccatgccttccagacagcggagggcatccggaaggcccacccagacaaggactggttccacctcgtcgggctcctgcacgacctggggaaggtcctggccctgttcggggagccccagtgggctgtcgtcggcgacaccttccccgtcggatgccgtccgcaggcctccgtggttttctgcgactccaccttccaggacaaccctgacctccaggatcctcgatacagcacagagctcgggatgtatcagccccactgtgggctcgacagggtcctcatgtcctggggccatgatgagtacatgtaccaggtgatgaagtttaacaacaagttcgacctctacaccaagtgcccggacctgccggacgtggacaagctgcggccctactaccaggggctcattgacaagtactgccctggcatcctgagctggtgaccctcctgccacccaagctgctgctggacctaggcctggccctccgcctgcctggagaggcctggccctgggcaaacagccgccatcagggttcacctcggtgggggaccccactcacccccttagggtcgccacccctcacggcaacttgtgcctggcgtcaataaagacctggaaggatgttgtg

SEQ ID NO: 15136 - DNA, 481 bp, Homo sapiens
caccctggtatctcactgcagcacagagctcgggatgtatcagccccactgtgggctcgacagggtcctcatgtcctggggccatgatggtgaggccagaggcgggcagtggggcggtggggggcggtgggggacggtggggggcggtggggcagaggcagtgcctgctggtgacaccctctccccacagagtacatgtaccaggtgatgaagtttaacaagttctcactgccccctgaggtaggtggggggaggggcaacgcagcccgtccaccaggcccggtcctgcagccccaagtgagccgctgggtggccttgcccgcaggctttctacatgatccggttccactccttctacccctggcacacgggccgcgactaccagcagctgtgcagccagcaggacctggccatgctgccctgggtgcgggagttcaaaagtacgccccgctacccgccgaggggtgttgtgggagtgaaa

SEQ ID NO: 15137 - DNA, 515 bp, Homo sapiens
aggctttctacatgatccggttccactccttctacccctggcacacgggccgcgactaccagcagctgtgcagccagcaggacctggccatgctgccctgggtgcgggagttcaaaagtacgccccgctacccgccgaggggtgttgtgggagtgaaaaagggggttgggtggggggcctgggggttcttcacggggctcaccgcccctccctgctgcagcaagttcgacctctacaccaagtgcccggacctgccggacgtggacaagctgcggccctactaccaggggctcattgacaagtactgccctggcatcctgagctggtgaccctcctgccacccaagctgctgctggacctaggcctggccctccgcctgcctggagaggcctggccctgggcaaacagccgccatcagggttcacctcggtgggggaccccactcacccccttagggtcgccacccctcacggcaacttgtgcctggcgtcaataaagacctggaaggatgttgt

SEQ ID NO: 15138 - DNA, 330 bp, Homo sapiens
ctctggtgactggtctcaccaagtcaccacctccaacccccaggcctggccaggcccccttcctctcttgcgtgggcaggtgccccaatgcttagcccttgctcagtggcagtagtcactcggggggcgtggggggggtggggggtgaccttgagtgaccttcccatggagcccagatgtccctggggccataaaaagtgcttattaaacaaatgaagaggccagctcatgctggtaatcccagaactttgggaggcggaggcaggaggatggcttgaaagccagaaattcaagactacccatagcaaccttgcaagaccccgtttctat

SEQ ID NO: 15139 - DNA, 261 bp, Homo sapiens
ccaatgtataaggacttccatattggttttccaaaaaccaaaggtagctttgaaaaccacgtctgaggccggatgcagtgctcatgcctgtaatcccagccctttgggaggccaaggcgggtggatcacgaggtcaggagttcaagaccagcctggccaacatgatgaaaccctatctgtactaaaaataccaaaattagccaggtgtgatggcacatgcctgtaatctcagctactaaggaggctgaggcaggagaatca

SEQ ID NO: 15140 - DNA, 525 bp, Homo sapiens
tgccacccaagctggagtgcagtagttgatcacagctcactgcaaacattgatctcctaggcctcaagcaatcctcccacctcagcctcctgagtagctggggctacaagtgcatgctaccatgcccagctaactaaaaaaaaaaaatcatggagacgaggtctcactatattgcccaggctggtcttgaactcctgggctcaagcaatcctcccatctcagcctctcaaagtactgggattaaaggcgtcagccatcatgcttggcagcgctattttcaaggtgcagtgttcttaaagacaagaaaaggaccccaaagacaattcaatcatcaaggctgccactcccaccacaggcccagagtgcacaggccggaaccaggttgccgccacctccgttttttttgttgttgttgctttttttctgagacggagttttgctcttgccacccaggctggctggagtgcaatggcgcaatctcggttcactacaacctgggcaacagaagtgagactccgtctcaaa

SEQ ID NO: 15141 - DNA, 416 bp, Homo sapiens
ataatgcatgtaaagcactcaacatagtacctgactcatgataagtgctcagtaaatactatttttctttagagattttgctaatttcttttaaaaagagtccttcttaccctggctagcagttgggagattggtgcttgggagagattaaaagggctcagattggccaagctcagtgtctcatggctgtaatcccagcactttgggagttcaagatcagcctgggtaacatagcaaaaccccatctctacaaaaaatacaaaaattagctgggtgtggtagtccatacctgtagtctcagctactcgtgagactgaggtgggagaatcacctgagcctgggaggctgaggctgcagtgaggtgtgattgtgccattgtactccagcctgggcaaataggagtgagaccatgcctg

SEQ ID NO: 15142 - DNA, 496 bp, Homo sapiens
gtgacttgttcttgggaactttgtatttaagaagtgtcatttcttcactttagtatctcagttggaaccaaccgcaaatcctgaatgcaatcaataaagtccaaaataggcccctgcactaaggtttgatttatttatcggaaagttgttcctaatttgttggcgtttcttttttttttttgagacaaggtccctgtctgtcacccaggttggagtgcagtggcaccatcttggctcactgcagcctcgaccacctgggcttaagcaatactcccacctttaccctcccaagtagctgggattgcaggcacatgccaccctgcctgtaccagtttttgtatttttttgtagagatgatttcaccatgttgtccagactggtcttgaactcctgggctcaagtgatcctcctggcttgccctcccaaagtgctggcattatgggcgtgacaaccgtacccagccaacattctttttttttttttttttgaggcggag

SEQ ID NO: 15143 - DNA, 720 bp, Homo sapiens
ccaggctggagttcaatagcgggatctcagctcactgcaacctccgcctcccaggttcaagcgattcttctgcttcagcctccctagtaactgggattacaggtgcctatcaccatgcccggttaatttttgtatttttagtagagatggggtttcaccgtgttggccaggctggtctcccaactcctgacctcaggtatctgcctgccccagcctcccaggattacacatgtgagccaccgtgcctggccaacattcatttttcaattttttataaagctttagtagattcttagaagccagcaatctagtatgctgatagcaataaaaactaagaagcattttcagacttccatgcgttgctgatgtagtttcttcttcctcccttcccatctggctggtatctttattctgtctgaaaggtatgcctcaaatatctttaccttttgtctattcccacaccattcctcactctcctcttacaaccgcccaccccccaaattaattcttctgtggtctgtgattttacagtgtcgtgttcataactcccaaaacattgatcacaaaatactaaaatacaaaaaaattagctgagcactgtggcatgcacctgtaatcccagctacttgggaggctgaagcaggacaattgcttgaacccgggaggctaaagttgcagtaagctgagatcaggccactgcactgactctgtctcaaaaag

SEQ ID NO: 15144 - DNA, 490 bp, Homo sapiens
gctagaggaaaaataatactataactgacatcattgggtcaatgacgaaatcagactattagataactgtgaatgttaatgttaaattgtctgaagttgataattctactatggttatgtaagagaatgtgagagactacccctgaagtatttaggggtaaagggggataatgaactatatgtaacttaagctcaaatggttcagcagtgagcctggtgtctgggcgcgtgcaagccctcttcatctgtctgtccctggcagtgctgcgccgttaattatgttatggctggggattggattgaattggaattgcactgctgtgactctgtagagaacaggagagaatataggattctctgttttcaaggcctggaaacaattagaatattgatcacctctaaccgctttttaaacagttaaaagttaaaagctccctttgggagtttgcctgtgtaaacttatgtgaagccaggcagctgaccagagcct

SEQ ID NO: 15145 - DNA, 580 bp, Homo sapiens
ccaaagaagtaaaataattgggtcaatataaaaagaaagtagaatattgcccagagaggagatgtggataattcctaacacggatcaaaggtgagctgtgtctaagacagtcagacctgcaccgtcccgtgcagtagacaccgtggccgctgtgtctgagatattcagaccctcgccgtcccgtgcagtagacacggtggccgctgtctgtaagatattcagaccctcgccgtcccgtgcagtagacacggtggccgctgtgtctaaaatattcagtcccgtgcagtagacacggtggccgctgtgtctaagatattcagacctgcaccatcctgagcagtagccacagtggcaagtagcctctgcactggacagtgcagctacagaatgatgctatcactagaaagttccatcagccagcactgatgcagacctttgcaaatgcccctcacactgaatagcacctagctgatagattgtccactactcagtgaaaagcctgtgttaaaagcagtatttggtagaaaagcaaaaaaggggaaaaaattaaaagtggtaagtcattgtcttccttactgaa

SEQ ID NO: 15146 - DNA, 367 bp, Homo sapiens
aggttacagtgagccgagatcatgccactgtactcccgcctgggcaacagagcaagaccctttaaaaaaaatatatatgtgaataagtggacccatgcagtccaaaaacgttattgtttaagggtcaacaataatgacctgatgtattttctactttttagaacaacagatgcttattaaattaataatatgtttattaaagcattatttcataatctgcctttctagaagtttggtgatgtccaagttcagctttaggcaacttaatttgctctcttttctctctgccttcctgggttaaagaaaaggataactgtagttaggctattaaaaataaagtatgtgaatgtaaaagagcttctaccaa

SEQ ID NO: 15147 - DNA, 364 bp, Homo sapiens
agaactgaaatctggcagatgaccctctagggaaatgaaaaacatgttgtctagctgacgttggtttttaaatttagatcaaataacattgtctttgaagtctcaagagtcctacttaaggtagctgtatcagataggctcgcctttgagagcatttcttgcaggccggcacccctaatatgaaaagttaagcctagtcaaaaataagtgaaaaagaaagttttattggagttattttctctaagatagctgtttcagaagaaccttgacgagtcatctccttgtctctagacaggaacacacaaggcatatgggtatctgtagtattttaaaagaccttaggggaccaggcttcttccataac

SEQ ID NO: 15148 - DNA, 414 bp, Homo sapiens
cgccctgcgacccccgccccactaccagcccgagctgggtccgccctctgagacagtagggccggtgaccgagctgctcgcgccaattcctactgctaggttcccacaagatcccaccctatcctgtgactgcttcacctgcaaggagttcttgaacttctggacttgactgagcgatggcatcttcaccctgtcatccactgaggcatctgaggccctgacggatccccaagggaaagtttcctggaggagccgcgacccggggatgcgcccccaaccttttgccctccggacaagagcacttcctgaagtgcagacgtactcactccccaggagatgtttaggaaactgaacattccaaccagacaagcaaaaaattaaaatcttaattctttgaaaatacagacttgcaaa

SEQ ID NO: 15149 - DNA, 372 bp, Homo sapiens
tactagacctctgaaatgcagacctaagaaatgcctggtgatggcactaaagctgacgtcactatgaaaagcaggcaggaggtattgtaccccttgtgaggaagtttaaaagtttcttatagcaactaacttctccattaacaaataaatagaccttccatagcagctagaaggtacctcatcccctttattgaactgtggccatggacttctcaatgatatccctgtaaccctaagacctagtgaaaaacctggtacaggaaaaagtatacagtaaatattagatgaagaataggcaggagaatcacttgaacccggggggtgaggtgcggaggttgcagtgagccaagatggtgccactgcactccagcc

SEQ ID NO: 15150 - DNA, 274 bp, Homo sapiens
aaaacttttttgctttttggaagagtagggaatcgaaatagtacaggactgtacagttttgaaaaacaaatcctttctagtcctcaaaaacctggcttccctttatccatttcttaccacagaaacagcagaacttgatactattctgcctacttttagaactgaatgtttaaggttttttcaaatttttctgagtttaaagagcctagcagcaggaaaaaaaaatggtagcgtgagaactgtgggaagggtctgttttgttttatttcaaaca

SEQ ID NO: 15151 - DNA, 1840 bp, Homo sapiens
ggcctagccggtggttcaggtggccggtcgggctggaagggcggggatgagggatgggacgcatccccgggggatgctcctccaaagcttttatcgggcgagcgcagtggctcacgcctgtaattcctgcactttgggaggctaagggtctcactctattgtctaggctcgaatgcagtgacgtgatcatggatcactgcagtcctcaacttactgggctcaggatgaaaggcttcctagcacaaacaccacccctggagttcccggtacatcaataccagcctggggatcacgttctcatcaagagttggaagagggaaagcttgaaccagcttaggaggacctcatctggtactcttgatgaatgaaacagcaatctgaatggctgaaaaaggatggacccagcactccagggagaaaacttggcattctttgggaatctaacaggatgcagtgaacccaagccttttgaagagctcaccaatcagactgcccttgtctatccatgagcagatgtttgatagtattgcggaggccctctagtgggtatgctgccaagcaactggagtggcacttgggctctaatccagttgtctatccctttcaccctggcatttcatcagccaaacaaaaaccaactaactcagaaaaaaaggaaagcccctcaagggtcctttgaccccgatatctacatagatgctatcggggtcccctgaggggtaccaaacgaattcaaagctcgaaatcaaatagctgctggattcaagtctgtccttttcttgtggtctactataaataaaaatgtagactggataaattacatatactataaccaacaacgatttgtcagttacaccagggatgccattaaaggaatagctgaacaattgggtttcaccagccaaatggcctgggaaaatagaatagctcttgacatgatattagtggaagtccaatgttgtacctgtatccccaataatacagcccctgatgtaactatcactaagggtctataaggcctcaccactctaggaaatgaactagctgaaaattcgggaatgaatgatccctttacaggtgtaatggaaaaaatggtttggtagatggaaaggactaatggcctctattctcacctcccttgtgatcataataggggtgctcattctcttagggtgctgtattataccctgtgtctgcggactagttcaaaagctcatagaaacagcccttaccaagacctcccacaactctcccccaccctattcagataaacgtttatttctaagcaaccaagaagagcagtgaagccagatcctgttagaaatatatgaagaggaaggactacaaaatcaaaaggggaaaattattagacaaaatgagttgctctacaaaggtccaacttcgttgtcctttgttctgtaacctttgttctgtaaactgcccttcccgcagaaactgtctttcccgccgaccaaaactgcccttcactatcactgtaatccatacccctactctatttgaaactgccaatcgggatcagcttacattgtgtggttcaaccaccagccaatgaggaaaaaacacagaagcaaaagctatgatgcattagggttaaaaaccccttcctttccctgtccaatgtgctcttgagactgctacaggcgcaagcagccaccttctgcagaagtaaaccttgccttgctgagaaatttttcttttgagtgctggtctctctctgtggcaccaagaacttatttctaacatggagtgatttccaagatagatggttaagtgaaaataaaaactgttgccaggcacggtagctcatgcctgtaatccc

SEQ ID NO: 15152 - DNA, 1524 bp, Homo sapiens
ggcctagccggtggttcaggtggccggtcgggctggaagggcggggatgagggatgggacgcatccccgggggatgctcctccaaagcttttatcgggcgagcgcagtggctcacgcctgtaattcctgcactttgggaggctaagggtctcactctattgtctaggctcgaatgcagtgacgtgatcatggatcactgcagtcctcaacttactgggctcaggatgaaaggcttcctagcacaaacaccacccctggagttcccggtacatcaataccagcctggggatcacgttctcatcaagagttggaagagggaaagcttgaaccagcttaggaggacctcatctggtactcttgatgaatgaaacagcaatctgaatggctgaaaaaggatggacccagcactccagagtctcacactgtcaccaggctggagtgccgtggcgcaatatcagctcactgtaacctccacctcccaggttgaagtgattctcccatctcagcccccaagtagctgggactacaggtgagtgccaccacacccagctaatttttgtatttttagtagagatgggggttcaccatgttgcccaaaatggtctcaatctcttggcctcgtgatccaaccatctcagcctcccaaagtgctgggtttaaaggcatgagccactgtgcctggcccagaattctttactgctaacacgagtgggcctggttctggaggatttcccagtgggtcctgaagaaccacagtttattggcttgtgggcaaagggggtatgtgtatcagttggcctttactgtgtaataaacagccacaaaaattactagctgaaaacagcagctacttaattagcagaagcctcttgaggatggacttgcaaaccaaagttgtgctggtttctactggtcaaagcaaggactggctcacataaaaaggagagagattgcaccttcagagagtaatctcaagacatctgtaatctaccacagggtgtcactgggcctctgtcaaggagcctattctttctgccaccagatctgtctaatagcttgtgtgacaatgcacttccttctgggtctctctccaagtgtagtaagtgtatatgggaatcactttattcaaacagtgtagtgcacttagttagaaagaaaaggtattaaggaagacttatatttaaaattgttatttatggtaacaacgaaaagtaacatacaaatttcaaacatcaagaataaaataaattaaaggtatgatcaatacacatcagtacaaagaggggaacacaatgaaacaaacaaaaaaaattagatgctagaaattaatccaaattattactaattaaatgtcaggcactaaatgtgcaacataaaaggattgttaattggtattattcaagtattttttcttttttttttttttttgtgacagagtttcactcttgttgcccaggctgcagtgcaatggcgtgatctcggctcactgcaacctctgcctcccgggttcaaatgattctcctg

SEQ ID NO: 15153 - DNA, 1763 bp, Homo sapiens
ggcctagccggtggttcaggtggccggtcgggctggaagggcggggatgagggatgggacgcatccccgggggatgctcctccaaagcttttatcgggcgagcgcagtggctcacgcctgtaattcctgcactttgggaggctaaggatgaaaggcttcctagcacaaacaccacccctggagttcccggtacatcaataccagcctggggatcacgttctcatcaagagttggaagagggaaagcttgaaccagcttaggaggacctcatctggtactcttgatgaatgaaacagcaatctgaatggctgaaaaaggatggacccagcactccagggagaaaacttggcattctttgggaatctaacaggatgcagtgaacccaagccttttgaagagctcaccaatcagactgcccttgtctatccatgagcagatgtttgatagtattgcggaggccctctagtgggtatgctgccaagcaactggagtggcacttgggctctaatccagttgtctatccctttcaccctggcatttcatcagccaaacaaaaaccaactaactcagaaaaaaaggaaagcccctcaagggtcctttgaccccgatatctacatagatgctatcggggtcccctgaggggtaccaaacgaattcaaagctcgaaatcaaatagctgctggattcaagtctgtccttttcttgtggtctactataaataaaaatgtagactggataaattacatatactataaccaacaacgatttgtcagttacaccagggatgccattaaaggaatagctgaacaattgggtttcaccagccaaatggcctgggaaaatagaatagctcttgacatgatattagtggaagtccaatgttgtacctgtatccccaataatacagcccctgatgtaactatcactaagggtctataaggcctcaccactctaggaaatgaactagctgaaaattcgggaatgaatgatccctttacaggtgtaatggaaaaaatggtttggtagatggaaaggactaatggcctctattctcacctcccttgtgatcataataggggtgctcattctcttagggtgctgtattataccctgtgtctgcggactagttcaaaagctcatagaaacagcccttaccaagacctcccacaactctcccccaccctattcagataaacgtttatttctaagcaaccaagaagagcagtgaagccagatcctgttagaaatatatgaagaggaaggactacaaaatcaaaaggggaaaattattagacaaaatgagttgctctacaaaggtccaacttcgttgtcctttgttctgtaacctttgttctgtaaactgcccttcccgcagaaactgtctttcccgccgaccaaaactgcccttcactatcactgtaatccatacccctactctatttgaaactgccaatcgggatcagcttacattgtgtggttcaaccaccagccaatgaggaaaaaacacagaagcaaaagctatgatgcattagggttaaaaaccccttcctttccctgtccaatgtgctcttgagactgctacaggcgcaagcagccaccttctgcagaagtaaaccttgccttgctgagaaatttttcttttgagtgctggtctctctctgtggcaccaagaacttatttctaacatggagtgatttccaagatagatggttaagtgaaaataaaaactgttgccaggcacggtagctcatgcctgtaatccc

SEQ ID NO: 15154 - DNA, 1701 bp, Homo sapiens
ggcctagccggtggttcaggtggccggtcgggctggaagggcggggatgagggatgggacgcatccccgggggatgctcctccaaagcttttatcgggcgagcgcagtggctcacgcctgtaattcctgcactttgggaggctaaggggatcacgttctcatcaagagttggaagagggaaagcttgaaccagcttaggaggacctcatctggtactcttgatgaatgaaacagcaatctgaatggctgaaaaaggatggacccagcactccagggagaaaacttggcattctttgggaatctaacaggatgcagtgaacccaagccttttgaagagctcaccaatcagactgcccttgtctatccatgagcagatgtttgatagtattgcggaggccctctagtgggtatgctgccaagcaactggagtggcacttgggctctaatccagttgtctatccctttcaccctggcatttcatcagccaaacaaaaaccaactaactcagaaaaaaaggaaagcccctcaagggtcctttgaccccgatatctacatagatgctatcggggtcccctgaggggtaccaaacgaattcaaagctcgaaatcaaatagctgctggattcaagtctgtccttttcttgtggtctactataaataaaaatgtagactggataaattacatatactataaccaacaacgatttgtcagttacaccagggatgccattaaaggaatagctgaacaattgggtttcaccagccaaatggcctgggaaaatagaatagctcttgacatgatattagtggaagtccaatgttgtacctgtatccccaataatacagcccctgatgtaactatcactaagggtctataaggcctcaccactctaggaaatgaactagctgaaaattcgggaatgaatgatccctttacaggtgtaatggaaaaaatggtttggtagatggaaaggactaatggcctctattctcacctcccttgtgatcataataggggtgctcattctcttagggtgctgtattataccctgtgtctgcggactagttcaaaagctcatagaaacagcccttaccaagacctcccacaactctcccccaccctattcagataaacgtttatttctaagcaaccaagaagagcagtgaagccagatcctgttagaaatatatgaagaggaaggactacaaaatcaaaaggggaaaattattagacaaaatgagttgctctacaaaggtccaacttcgttgtcctttgttctgtaacctttgttctgtaaactgcccttcccgcagaaactgtctttcccgccgaccaaaactgcccttcactatcactgtaatccatacccctactctatttgaaactgccaatcgggatcagcttacattgtgtggttcaaccaccagccaatgaggaaaaaacacagaagcaaaagctatgatgcattagggttaaaaaccccttcctttccctgtccaatgtgctcttgagactgctacaggcgcaagcagccaccttctgcagaagtaaaccttgccttgctgagaaatttttcttttgagtgctggtctctctctgtggcaccaagaacttatttctaacatggagtgatttccaagatagatggttaagtgaaaataaaaactgttgccaggcacggtagctcatgcctgtaatccc

SEQ ID NO: 15155 - DNA, 1803 bp, Homo sapiens
ggcctagccggtggttcaggtggccggtcgggctggaagggcggggatgagggatgggacgcatccccgggggatgctcctccaaagcttttatcgggcgagcgcagtggctcacgcctgtaattcctgcactttgggaggctaagggtctcactctattgtctaggctcgaatgcagtgacgtgatcatggatcactgcagtcctcaacttactgggctcaggatgaaaggcttcctagcacaaacaccacccctggagttcccggtacatcaataccagcctggggatcacgttctcatcaagagttggaagagggaaagcttgaaccagcttaggaggacctcatctggtactcttgatgaatgaaacagcaatctgaatggctgaaaaaggatggacccagcactccagggagaaaacttggcattctttgggaatctaacaggatgcagtgaacccaagccttttgaagagctcaccaatcagactgcccttgtctatccatgagcagatgtttgatagtattgcggaggccctctagtgggtatgctgccaagcaactggagtggcacttgggctctaatccagttgtctatccctttcaccctggcatttcatcagccaaacaaaaaccaactaactcagaaaaaaaggaaagcccctcaagggtcccctgaggggtaccaaacgaattcaaagctcgaaatcaaatagctgctggattcaagtctgtccttttcttgtggtctactataaataaaaatgtagactggataaattacatatactataaccaacaacgatttgtcagttacaccagggatgccattaaaggaatagctgaacaattgggtttcaccagccaaatggcctgggaaaatagaatagctcttgacatgatattagtggaagtccaatgttgtacctgtatccccaataatacagcccctgatgtaactatcactaagggtctataaggcctcaccactctaggaaatgaactagctgaaaattcgggaatgaatgatccctttacaggtgtaatggaaaaaatggtttggtagatggaaaggactaatggcctctattctcacctcccttgtgatcataataggggtgctcattctcttagggtgctgtattataccctgtgtctgcggactagttcaaaagctcatagaaacagcccttaccaagacctcccacaactctcccccaccctattcagataaacgtttatttctaagcaaccaagaagagcagtgaagccagatcctgttagaaatatatgaagaggaaggactacaaaatcaaaaggggaaaattattagacaaaatgagttgctctacaaaggtccaacttcgttgtcctttgttctgtaacctttgttctgtaaactgcccttcccgcagaaactgtctttcccgccgaccaaaactgcccttcactatcactgtaatccatacccctactctatttgaaactgccaatcgggatcagcttacattgtgtggttcaaccaccagccaatgaggaaaaaacacagaagcaaaagctatgatgcattagggttaaaaaccccttcctttccctgtccaatgtgctcttgagactgctacaggcgcaagcagccaccttctgcagaagtaaaccttgccttgctgagaaatttttcttttgagtgctggtctctctctgtggcaccaagaacttatttctaacatggagtgatttccaagatagatggttaagtgaaaataaaaactgttgccaggcacggtagctcatgcctgtaatccc

SEQ ID NO: 15156 - DNA, 936 bp, Homo sapiens
tgcttggccctttattcttttacatatttaattttttaaaaaatcaacaaagatagagggaaaacccaaaatggaatacgaacaggaacaatcaatctgaactttgtatcaaatgggtaataagactatgtaacaggaacaacacaacaacagttgctgcctagacattagaaatagaggccaggcacaggggtatgtgtatcagttggcctttactgtgtaataaacagccacaaaaattactagctgaaaacagcagctacttaattagcagaagcctcttgaggatggacttgcaaaccaaagttgtgctggtttctactggtcaaagcaaggactggctcacataaaaaggagagagattgcaccttcagagagtaatctcaagacatctgtaatctaccacagggtgtcactgggcctctgtcaaggagcctattctttctgccaccagatctgtctaatagcttgtgtgacaatgcacttccttctgggtctctctccaagtgtagtaagtgtatatgggaatcactttattcaaacagtgtagtgcacttagttagaaagaaaaggtattaaggaagacttatatttaaaattgttatttatggtaacaacgaaaagtaacatacaaatttcaaacatcaagaataaaataaattaaaggtatgatcaatacacatcagtacaaagaggggaacacaatgaaacaaacaaaaaaaattagatgctagaaattaatccaaattattactaattaaatgtcaggcactaaatgtgcaacataaaaggattgttaattggtattattcaagtattttttcttttttttttttttttgtgacagagtttcactcttgttgcccaggctgcagtgcaatggcgtgatctcggctcactgcaacctctgcctcccgggttcaaatgattctcctg

SEQ ID NO: 15157 - DNA, 447 bp, Homo sapiens
ggcctagccggtggttcaggtggccggtcgggctggaagggcggggatgagggatgggacgcatccccgggggatgctcctccaaagcttttatcgggcgagcgcagtggctcacgcctgtaattcctgcactttgggaggctaagggtctcactctattgtctaggctcgaatgcagtgacgtgatcatggatcactgcagtcctcaacttactgggctcaggtaatcctcccacctcaacctcccaggtagcagagattacaggtgcatgccaccaccatccttggctgaattaaaaaaaatttttttgtaaagaccatatttcaccatatgcccaggctggtcctgaagtcctaatctcaaggaatcccctggcctcagcctcccgaagtgctgggattacaggctggagtgcagtggcacaatctcagctcactgcaaactct

SEQ ID NO: 15158 - DNA, 418 bp, Homo sapiens
agtagactgtgttgatctgttagcgagtttattgtttcaaaggaggaaaacatattgaggtcagttacagaaatggaatatttgaagtcgatgaattcaaggaaatatattcaggtcaccaataccttgtgcagaaatagataaaaagaagagggtaaaagtgcaaattatttacattcttgaaaccacaaaagtgaactgagccaagaacacagctggaatgtgacccagtggggtagggagtcccacagagcctgaacacaagcccacttaggcttccttggttaagacctgaacttccccatctgataatgggaaaaaacacatccaaaggaagtaaatagtaattacatgtggagctagtggttgtctttctagttccaccttgggattgaggttacaaaagataacgtagaga

SEQ ID NO: 15159 - DNA, 435 bp, Homo sapiens
gacgcagcaagaaggccctcacaagatgccaggccctcgaccttggacttcccagcctccaggaccaggagccaagaactgtctgtcctttataaattgcctgatctcagggtaggagatgtcagccagagggtacagaatcataaaggccaaaagcaaaagggaaaacacaacaaaacaaccctgcttgagagagctgaaggttcaatctcacgtgttaatttctggccatcacatggtgcttgagaccacttctggggtgttctccatacctgagaaaagtgactggggacagtttgcctctattcctgacatccacaggactgagaccttgcctttcaccaattagggtatgtaagggagagtcctgcaaaaactacttctgtgtcttttgtaaaattgctaccaaaacactagtgcccacaaattactggc

SEQ ID NO: 15160 - DNA, 372 bp, Homo sapiens
atggtgtggattaatgacattagttcctaggaggaggtccagggtgagtggggcttgatgcctctgtatttgattacattacattgatgtccaaatgcttcctgcctccatcatctgtctccttcctgtgacatcggagggaaaacaagggagaggatgttctaagctgtgagctcagttagcagggacaatttcttaatctgttcactctgcatatggtttattgaagctggatttctggactcatgactttgtcaggtcagtatcataaattattagatatagactttaatttgctattgaggtaccgaggatacatatgctgtttttgagagatgaaaacagtaattgtgctggaaaaatagaaagcta

SEQ ID NO: 15161 - DNA, 1355 bp, Homo sapiens
gcatgctcttaagtggcagcggcggggacggggtcagtgccaagatgtcgacggcggcggttccggagctgaagcagatcagccgggtggaggcgatgcgcctagggccgggctggagccactcgtgccacgccatgctgtacgccgccaaccctgggcagctcttcggccgcatccccatgcgcttctcggtgctgatgcagatgcgtttcgacgggctgctgggcttccccgggggcttcgtggaccggcgcttctggtcgctggaggacggcctgaaccgggtgctgggcctgggcctgggctgcctgcgcctcaccgaggccgactacctgagctcgcacctgaccgagggcccacaccgcgtcgtggcgcacctgtacgcgcggcagctgacgctggagcagctgcacgccgtggagatcagcgcggtgcactcgcgcgaccacggcctggaggtgctgggcctcgtgcgggtcccgctgtacacccagaaggaccgagtcggaggcttccccaacttcctgagcaacgccttcgtgagcacggctaagtgccagctcctctttgccctcaaggtgctcaacatgatgcccgaggagaagctggttgaggccctggctgcagccaccgagaagcagaagaaggccctggagaagttgctcccggcctcctcttgagggctgcctgagctggtggcaccctcccctgggccggaagactgggaattcctgctaagtgtggcttctagagtgtttgtgtgtaccccgcttctgactgcctagggcgagtgggcatcctgtcatcatctccactgtcccaagcagtcactaggtggcggccgggccagctggaacccagcccatcctctcaggcagagcagggtggtccgggcacactgggcctgcctctccagcctcaggatgctcttgtttattctgggctcagaccctcctcttgtacgtctcatcacagctggtagagacccaggagtgcctgattgtcccacaggggtggcgcacagctctgggaccactcagaagatgggatgtgtgggtggaggatgccttgtctcggtcagctcattcctgcctccttcctgagccagttcagggcctgggggagagccagcttggggtaggaagttaataatactgttaatttgggttgttgttggatttactttgctagattttctctttcaccacgtgtgaactgtgggtgaggtttcaaagtagcttcaccccacgtggcttggttcccagggacagtcagggcctcgggggcccagctatgtacaacgaagctgtcgaaggagaagacaataaagtcgctccgcagctgctctgtgtgtt

SEQ ID NO: 15162 - DNA, 1359 bp, Homo sapiens
  misc_feature (22)..(22): n is a, c, g, or t
  misc_feature (24)..(24): n is a, c, g, or t
aaactagctagtcgaggctggntngaatcggccggggtcagtgccaagatgtcgacggcggcggttccggagctgaagcagatcagccgggtggaggcgatgcgcctagggccgggctggagccactcgtgccacgccatgctgtacgccgccaaccctgggcagctcttcggccgcatccccatgcgcttctcggtgctgatgcagatgcgtttcgacgggctgctgggcttccccgggggcttcgtggaccggcgcttctggtcgctggaggacggcctgaaccgggtgctgggcctgggcctgggctgcctgcgcctcaccgaggccgactacctgagctcgcacctgaccgagggcccacaccgcgtcgtggcgcacctgtacgcgcggcagctgacgctggagcagctgcacgccgtggagatcagcgcggtgcactcgcgcgaccacggcctggaggtgctgggcctcgtgcgggtcccgctgtacacccagaaggaccgagtcggaggcttccccaacttcctgagcaacgccttcgtgagcacggctaagtgccagctcctctttgccctcaaggtgctcaacatgatgcccgaggagaagctggttgaggccctggctgcagccaccgagaagcagaagaaggccctggagaagttgctcccggcctcctcttgagggctgcctgagctggtggcaccctcccctgggccggaagactgggaattcctgctaagtgtggcttctagagtgtttgtgtgtaccccgcttctgactgcctagggcgagtgggcatcctgtcatcatctccactgtcccaagcagtcactaggtggcggccgggccagctggaacccagcccatcctctcaggcagagcagggtggtccgggcacactgggcctgcctctccagcctcaggatgctcttgtttattctgggctcagaccctcctcttgtacgtctcatcacagctggtagagacccaggagtgcctgattgtcccacaggggtggcgcacagctctgggaccactcagaagatgggatgtgtgggtggaggatgccttgtctcggtcagctcattcctgcctccttcctgagccagttcagggcctgggggagagccagcttggggtaggaagttaataatactgttaatttgggttgttgttggatttactttgctagattttctctttcaccacgtgtgaactgtgggtgaggtttcaaagtagcttcaccccacgtggcttggttcccagggacagtcagggcctcgggggcccagctatgtacaacgaagctgtcgaaggagaagacaataaagtcgctccgcagctgctctgtgtgtt

SEQ ID NO: 15163 - DNA, 2077 bp, Homo sapiens
  misc_feature (22)..(22): n is a, c, g, or t
  misc_feature (24)..(24): n is a, c, g, or t
aaactagctagtcgaggctggntngaatcggccggggtcagtgccaagatgtcgacggcggcggttccggagctgaagcagatcagccgggtggaggcgatgcgcctagggccgggctggagccactcgtgccacgccatgctgtacgccgccaaccctgggcagctcttcggccgcatccccatgcgcttctcggtgctgatgcagatgcgtttcgacgggctgctgggcttccccgggggcttcgtggaccggcgcttctggtcgctggaggacggcctgaaccgggtgctgggcctgggcctgggctgcctgcgcctcaccgaggccgactacctgagctcgcacctgaccgagggcccacaccgcgtcgtggcgcacctgtacgcgcggcagctgacgctggagcagctgcacgccgtggagatcagcgcggtgcactcgcgcgaccacggcctggaggtggggccgccgcccgggccccgccccccgccccggggtttggctctggccccgtggaaggcaccgatgggtaacacgtctcctgagggtcccctggccgggctgggtcgggtgtcgctgtctccagcaatggggtggggagaggggtctggggctgggaggccgggaaaggaggggcgggggtgggggccggcgctggggctccctcagggctgtgttacatccgccttgctgcctgccattgccaatcctgggagtggggagtgggatcggtggggaggaagggatgggggaggagcggggattgcttggggagttgggaaacttgagcacagcgggggttgtaaaacttgggaacctcatgttgggcgtgaaggctcttgggatttgtactttgtggtctggaagggctggactgcgggtgttcaggcttcgttgggtggacggggggagcatggggtgcggaccccggggtggggtggcctgggtacgaggggggggagtgcatggggtcagcctccacacttgcttggggaggagggggctgcactgctccgagggagctggctggcttctgccaggccctgcgtgggtctcccattaagtccttggcaaagctggctgctcataccctggcctcatagcttccaggcccctcctgctggaggtgccattgtgtggcaggcctggccccaacccctacctcctgtctgcgcaggtgctgggcctcgtgcgggtcccgctgtacacccagaaggaccgagtcggaggcttccccaacttcctgagcaacgccttcgtgagcacggctaagtgccagctcctctttgccctcaaggtgctcaacatgatgcccgaggagaagctggttgaggccctggctgcagccaccgagaagcagaagaaggccctggagaagttgctcccggcctcctcttgagggctgcctgagctggtggcaccctcccctgggccggaagactgggaattcctgctaagtgtggcttctagagtgtttgtgtgtaccccgcttctgactgcctagggcgagtgggcatcctgtcatcatctccactgtcccaagcagtcactaggtggcggccgggccagctggaacccagcccatcctctcaggcagagcagggtggtccgggcacactgggcctgcctctccagcctcaggatgctcttgtttattctgggctcagaccctcctcttgtacgtctcatcacagctggtagagacccaggagtgcctgattgtcccacaggggtggcgcacagctctgggaccactcagaagatgggatgtgtgggtggaggatgccttgtctcggtcagctcattcctgcctccttcctgagccagttcagggcctgggggagagccagcttggggtaggaagttaataatactgttaatttgggttgttgttggatttactttgctagattttctctttcaccacgtgtgaactgtgggtgaggtttcaaagtagcttcaccccacgtggcttggttcccagggacagtcagggcctcgggggcccagctatgtacaacgaagctgtcgaaggagaagacaataaagtcgctccgcagctgctctgtgtgtt

SEQ ID NO: 15164 - DNA, 1429 bp, Homo sapiens
  misc_feature (22)..(22): n is a, c, g, or t
  misc_feature (24)..(24): n is a, c, g, or t
aaactagctagtcgaggctggntngaatcggccggggtcagtgccaagatgtcgacggcggcggttccggagctgaagcagatcagccgggtggaggcgatgcgcctagggccgggctggagccactcgtgccacgccatgctgtacgccgccaaccctgggcagctcttcggccgcatccccatgcgcttctcggtgctgatgcagatgcgtttcgacgggctgctgggcttccccgggggcttcgtggaccggcgcttctggtcgctggaggacggcctgaaccgggtgctgggcctgggcctgggctgcctgcgcctcaccgaggccgactacctgagctcgcacctgaccgagggcccacaccgcgtcgtggcgcacctgtacgcgcggcagctgacgctggagcagctgcacgccgtggagatcagcgcggtgcactcgcgcgaccacggcctggaggtggggccgccgcccgggccccgccccccgccccggggtttggctctggccccgtggaaggcaccgatgggtgctgggcctcgtgcgggtcccgctgtacacccagaaggaccgagtcggaggcttccccaacttcctgagcaacgccttcgtgagcacggctaagtgccagctcctctttgccctcaaggtgctcaacatgatgcccgaggagaagctggttgaggccctggctgcagccaccgagaagcagaagaaggccctggagaagttgctcccggcctcctcttgagggctgcctgagctggtggcaccctcccctgggccggaagactgggaattcctgctaagtgtggcttctagagtgtttgtgtgtaccccgcttctgactgcctagggcgagtgggcatcctgtcatcatctccactgtcccaagcagtcactaggtggcggccgggccagctggaacccagcccatcctctcaggcagagcagggtggtccgggcacactgggcctgcctctccagcctcaggatgctcttgtttattctgggctcagaccctcctcttgtacgtctcatcacagctggtagagacccaggagtgcctgattgtcccacaggggtggcgcacagctctgggaccactcagaagatgggatgtgtgggtggaggatgccttgtctcggtcagctcattcctgcctccttcctgagccagttcagggcctgggggagagccagcttggggtaggaagttaataatactgttaatttgggttgttgttggatttactttgctagattttctctttcaccacgtgtgaactgtgggtgaggtttcaaagtagcttcaccccacgtggcttggttcccagggacagtcagggcctcgggggcccagctatgtacaacgaagctgtcgaaggagaagacaataaagtcgctccgcagctgctctgtgtgtt

SEQ ID NO: 15165 - DNA, 1287 bp, Homo sapiens
gcatgctcttaagtggcagcggcggggacggggtcagtgccaagatgtcgacggcggcggttccggagctgaagcagatcagccgggtggaggcgatgcgcctagggccgggctggagccactcgtgccacgccatgctgtacgccgccaaccctgggcagctcttcggccgcatccccatgcgcttctcggtgctgatgcagatgcgtttcgacgggctgctgggcttccccgggggcttcgtggaccggcgcttctggtcgctggaggacggcctgaaccgggtgctgggcctgggcctgggctgcctgcgcctcaccgaggccgactacctgagctcgcacctgaccgagggcccacaccgcgtcgtggcgcacctgtacgcgcggcagctgacgctggagcagctgcacgccgtggagatcagcgcggtgcactcgcgcgaccacggcctggaggtgctgggcctcgtgcgggtcccgctgtacacccagaaggaccgagtcggaggcttccccaacttcctgagcaacgccttcgtgagcacggctaagtgccagctcctctttgccctcaaggtgctcaacatgatgcccgaggagaagctggttgaggccctggctgcagccaccgagaagcagaagaaggccctggagaagttgctcccggcctcctcttgagggctgcctgagctggtggcaccctcccctgggccggaagactgggaattcctgctaagtgtggcttctagagtgtttgtgtgtaccccgcttctgactgcctagggcgagtgggcatcctgtcatcatctccactgtcccaagcagtcactaggtggcggccgggccagctggaacccagcccatcctctcaggcagagcagggtggtccgggcacactgggcctgcctctccagcctcaggattgcctgattgtcccacaggggtggcgcacagctctgggaccactcagaagatgggatgtgtgggtggaggatgccttgtctcggtcagctcattcctgcctccttcctgagccagttcagggcctgggggagagccagcttggggtaggaagttaataatactgttaatttgggttgttgttggatttactttgctagattttctctttcaccacgtgtgaactgtgggtgaggtttcaaagtagcttcaccccacgtggcttggttcccagggacagtcagggcctcgggggcccagctatgtacaacgaagctgtcgaaggagaagacaataaagtcgctccgcagctgctctgtgtgtt

SEQ ID NO: 15166 - DNA, 1239 bp, Homo sapiens
  misc_feature (22)..(22): n is a, c, g, or t
  misc_feature (24)..(24): n is a, c, g, or t
aaactagctagtcgaggctggntngaatcggccggggtcagtgccaagatgtcgacggcggcggttccggagctgaagcagatcagccgggtggaggcgatgcgcctagggccgggctggagccactcgtgccacgccatgctgtacgccgccaaccctgggcagctcttcggccgcatccccatgcgcttctcggtgctgatgcagatgcgtttcgacgggctgctgggcttccccgggggcttcgtggaccggcgcttctggtcgctggaggacggcctgaaccgggtgctgggcctgggcctgggctgcctgcgcctcaccgaggccgactacctgagctcgcacctgaccgagggcccacaccgcgtcgtggcgcacctgtacgcgcggcagctgacgctggagcagctgcacgccgtggagatcagcgcggtgcactcgcgcgaccacggcctggaggtgctcaacatgatgcccgaggagaagctggttgaggccctggctgcagccaccgagaagcagaagaaggccctggagaagttgctcccggcctcctcttgagggctgcctgagctggtggcaccctcccctgggccggaagactgggaattcctgctaagtgtggcttctagagtgtttgtgtgtaccccgcttctgactgcctagggcgagtgggcatcctgtcatcatctccactgtcccaagcagtcactaggtggcggccgggccagctggaacccagcccatcctctcaggcagagcagggtggtccgggcacactgggcctgcctctccagcctcaggatgctcttgtttattctgggctcagaccctcctcttgtacgtctcatcacagctggtagagacccaggagtgcctgattgtcccacaggggtggcgcacagctctgggaccactcagaagatgggatgtgtgggtggaggatgccttgtctcggtcagctcattcctgcctccttcctgagccagttcagggcctgggggagagccagcttggggtaggaagttaataatactgttaatttgggttgttgttggatttactttgctagattttctctttcaccacgtgtgaactgtgggtgaggtttcaaagtagcttcaccccacgtggcttggttcccagggacagtcagggcctcgggggcccagctatgtacaacgaagctgtcgaaggagaagacaataaagtcgctccgcagctgctctgtgtgtt

SEQ ID NO: 15167 - DNA, 311 bp, Homo sapiens
gcctggctaatttttttaattttggtagagacggggtttcaccatgttggccaggctggtctcgatctcttgacctggtgatccacctgccttggcctcccaaagtgctgggattacaggcgtgagccaccgtgcccggcctggtactgtagttttgttgaccccaagtgtatgtgttgggcctgtccagcattgagatgtggtccctgggctgaggcaggagaatcaattgaacccgggaggtggaggttgcagtgagctgagatcgtgtcactgcactccaacctggcaacagagcgagactccttctg

SEQ ID NO: 15168 - DNA, 364 bp, Homo sapiens
atgattaaatgaatattaccaatatttgacatgttttgtaatatgtagattatattcctgagagattaaataagaactctgtaggccgggcatggtggctcatgcctgtaatcccagcactttgggaggccgaagtgggtgaatcacttgaggtcaggagttcaagaccagcctggctaacatggtgaaaccccatctctcctaaaatacaaaaattagccaagtgtggtggtgggtgcctataaccccagctactctggaggctgaggcaggagaattgctggaacccgggaggcggagcttgcagtgggccgagatcgcgccattgcactccagtctggggaacaaaaagagcctccatctc

SEQ ID NO: 15169 - DNA, 356 bp, Homo sapiens
aggctgaaaaaacaatcacatcagaattagtaaggcaaaagacaaagagagagaaatgaaaacaagccagtattcaatggggctagggggaaaattacctgggcttcaggaattacaggagagttggggttttgagaaggtaaaaaagtgggccaggtgcggtggctcaagcttgtaatcccagcactttggaacgccaaggcaggtggatcacgagctcaagagattgagaccagcctggccaacatggtgaaaccctgtctctactaaaaacacaaaaattagccgggcgtggtggcgggcgcctgtagtcccagctactccagaggctgaggcaggagaatcgcttgaacccg

SEQ ID NO: 15170 - DNA, 283 bp, Homo sapiens
gtaatttacattttttagcaccctgtgaacacatccttggggatgaataatagcagcataaatataagctgaagtaggacttataagcaagaatagatgacaaataaggataggaccctaaggaacctagcatcacaggacatgaatgagtggaggctaaaggggactggaataccttaatcttgaaagctaagggattccttccagattctaatcattattcacctttctctcagaggaagattttgtgtcaggtatatgtcagctttttattctctaagca

SEQ ID NO: 15171 - DNA, 591 bp, Homo sapiens
ggctgactccgccagccttcacgttgggcaggcccggggtggctcactgtgggagcccttgtgaaataccctggatggggtggggcaggggctgcttcctgcaacccaaagccacaggatggttactccatcagtggaggaggccgactgggaggtctagaggggcctcgggccaggctcctcccagctgatggcctgccacctggaaggtgggggaactccctggtcagtcctgccaacagaccagagctagatggacggcccacccccagcttttcaaagttaggaggctgggagactcggggttccctgtagcctcctctctggccaggtcccccgtggggcccctgtgcacccagggagcagggggctttgtccgaggccggctcaggggaggtggctgtagaaggtaggaccctggaagatgcacacacagggtcactggctggccctcacctgctattggccaggctgggggctgcggctctcgtggggcgctgttggctggcgggccagggagtgcgggcgcggcggggaggcagaggcaatgtgctgagtcagcgtgactcgccaggaacagccgcgctctgg

SEQ ID NO: 15172 - DNA, 617 bp, Homo sapiens
tctgcattatgtaatacatatacaaactttgtgcttgttgttctgctcccctgggaaatgggcttcctgggggttctggactgctgaaggcaatgaacctctctgggttgtccagacctttgttttactttgaccagctgtgtgaggataaggtagttcaggaactaggagagcctgctgaatgtaaaattccatgaacagaagcaagagaatgacgagactgtgctagttctttcagaataacagcagcacccttgcactgcacagagttaaacatcccagatctggaaggaccctaccttgtgtcaccagcagctgcaagatctatattagggcctctgaaccacgagaagccatgcatctattcctgctctaggtcgaaatgtttatttctataaatttttgtggccttggctgaatgactcaggaactgagagtgagagtgggggtgtgtgcagaagtgttggcctagcaagatatccttaggatggcacatttgcaaggttggcccttagctggtttctggagaattggagttttggaggggtcccaccattcctaaaacttttaagagtggttcatcaaggccaaactgtttgttcaaacaatatggttta

SEQ ID NO: 15173 - DNA, 334 bp, Homo sapiens
aaagatctggaatttctttttttggacatttgttttgcagctttctacgtcttaaggcagagaatagccaggataaggtgccagctcaaagctgtgtgccaaccacgatgcaaacatggtgaatgtatcgggccaaacaagtgcaagtgtcatcctggttatgctggaaaaacctgtaatcaaggtaggaaaacagtctgacataaatacacaatcgaagacacctctatcactcccaaattaaaaatattcttatctcaaactactttccatggctatttttccaaaatatgtgagctgccattttgctgataaataaaaatatattaatgat

SEQ ID NO: 15174 - DNA, 347 bp, Homo sapiens
aggcttccagcgtgttgggacagtcagaggagttgtagatgattggaggaaaggaagaagacggcagcccagggtatttccccttctccctgcctcagatggcatctccagcatctccttcatgacctctgtctcctccgtgtgaccttccatcccctcaaagcaggactgcgccctgatgttgctaatctgataggttgctcctatttgtccttctataatcccaaagtcttcctaattggtttctcatcttgaacttcctctgtggaattacctaaaatgtattttgctttcctgactaggtcttgattaatatatacttcaaactaaaagttagtaaaaaaaat

SEQ ID NO: 15175 - DNA, 795 bp, Homo sapiens
gagtcctcctatagcttattaaatatgtatatttgaccacccatttagcagaaattcctattttctttgcctctctcttgaagtgtctgtttctagacttcacctctcctactcttcagtgcacatgtgtgtatgcatcctgccatctcaccactgtcagtgggagcacaactctcagtcccacccctactaacatgcaggcaccccaccatgccaccaggacgggcatgaatgctgggcaacactgtctctgccagcaaactacccctgctatgccaccactgcaatcatgtgcaagaatgcttccaccccactcccattggtgccccaccaaagccaatgcacatgcaccccaacatgccactgttgaggaccaaccaaaatattcaggacctgaactagacacttgaccaaatggaactaacagatatctacagaactctccaccaaaaaataacagagtatacattctgtgccattgtgactgctgagacacacaagtgagcatgggttctgctgtcactgccaagatgaagtgctttggccaacaccatccactgaagtgctgtggtcagcagactgagaactcctcaggccctccatcacaacaagttcccaacccaccaggggccagaaaacagagctggggacctgttaccagccccagagttagagtacacagcccaggagtgctgaggtgtgctttggtcccctaacatgttccagaagcaaaaccagtcaacccactttataccacaatcaaacctccaagggcatcaaagaagaaaaaggcaa

SEQ ID NO: 15176 - DNA, 871 bp, Homo sapiens
  misc_feature (868)..(869): n is a, c, g, or t
  misc_feature (871)..(871): n is a, c, g, or t
gggctgcaggaattcggcacggattccttccttaaaatctttcagtttcattctctgacattcttttttgctcgctggattccactgaaactagtctttcacatgctgctttcagatgcataccaaacttttgtgccttaacacactttgcaatacttttctctccactggggctttcttcctcattgttttgacttggctatctcctattgctgtcaggcttagtttaaatgtcatttcagagagacctttcttattcatcctgtctgtagtagatccttgtgcccatattctctatctcagccttttgtttgtgtcataggtcttaccacaatatgtaattgctttatttgttccccacaaaagaatgtaagagaccatgtatgcttgtttaccagtgtgtccctagctcttaaccgcatgcctggaacataactgttcaatatttatttgttggatgaatgagaaaccaaatattgttaacaagcttgttagattgtttaagattttcttctatagtagtctgagttgcatgaactttatgatatctacctcattagggctgtcgggctcacgaccttttcagatgattaatgttcccaaaatttaatattcaaataagagaaaaacaatacaaaagcaccattgggttgagcatggtggctcatgcctgtaatcctagcactttgggaagctgaggtggacggatcacttgaggtcagaagtttgagaccagggccgggcacagtggctcacgcctgtaatcccagcactttgagaggccgagttgggaggatcacgaggtcaggagatcgagaccatcctggctaacatggcgaaaccgtgtctctactaaaatacaaaaaannan

SEQ ID NO: 15177 - DNA, 1480 bp, Homo sapiens
  misc_feature (1477)..(1478): n is a, c, g, or t
  misc_feature (1480)..(1480): n is a, c, g, or t
tttgtttcttcctcagacctgttccccttttctttcctagtctttctccgcatttcaataaatgctgtctttccaatttctctagaggaacctaagagttatcttttctctccttttgcttgtggtgtcccctccagcccccattattttggccttgagtttaagttacattcactgctactgcaatgctcctggccaccaacactttttaaaaatctagaatattgcacaagtttcataaagtatctttatccccttactacccattatcctaagccattctcctcttagcgctaagaatggccttcttgccgggtgcggtggctcacgcctgtaatcccagcactttgggaagccaaggcaggcggatcacgaggtcaggagatggagaccatcctgtctaacacggtgaaaccctgtctctactaaaaaagaaaccctgtctctactaaaaaatacaaaaaaaaattagccgggcttggtggctggcacctgtacaggagaatggcaggaacccaggaggcggagcttgcagtgagccaagaacgcgccactgcactccagcctgggagacagagcaagactccatctcgaaaaaaagaatggccttcttaaaacataggtcatgatgattccttccttaaaatctttcagtttcattctctgacattcttttttgctcgctggattccactgaaactagtctttcacatgctgctttcagatgcataccaaacttttgtgccttaacacactttgcaatacttttctctccactggggctttcttcctcattgttttgacttggctatctcctattgctgtcaggcttagtttaaatgtcatttcagagagacctttcttattcatcctgtctgtagtagatccttgtgcccatattctctatctcagccttttgtttgtgtcataggtcttaccacaatatgtaattgctttatttgttccccacaaaagaatgtaagagaccatgtatgcttgtttaccagtgtgtccctagctcttaaccgcatgcctggaacataactgttcaatatttatttgttggatgaatgagaaaccaaatattgttaacaagcttgttagattgtttaagattttcttctatagtagtctgagttgcatgaactttatgatatctacctcattagggctgtcgggctcacgaccttttcagatgattaatgttcccaaaatttaatattcaaataagagaaaaacaatacaaaagcaccattgggttgagcatggtggctcatgcctgtaatcctagcactttgggaagctgaggtggacggatcacttgaggtcagaagtttgagaccagggccgggcacagtggctcacgcctgtaatcccagcactttgagaggccgagttgggaggatcacgaggtcaggagatcgagaccatcctggctaacatggcgaaaccgtgtctctactaaaatacaaaaaannan

SEQ ID NO: 15178 - DNA, 1426 bp, Homo sapiens
  misc_feature (1423)..(1424): n is a, c, g, or t
  misc_feature (1426)..(1426): n is a, c, g, or t
tttgtttcttcctcagacctgttccccttttctttcctagtctttctccgcatttcaataaatgctgtctttccaatttctctagaggaacctaagagttatcttttctctccttttgcttgtggtgtcccctccagcccccattattttggccttgagtttaagttacattcactgctactgcaatgctcctggccaccaacactttttaaaaatctagaatattgcacaagtttcataaagtatctttatccccttactacccattatcctaagccattctcctcttagcgctaagaatggccttcttgccgggtgcggtggctcacgcctgtaatcccagcactttgggaagccaaggcaggcggatcacgaggtcaggagatggagaccatcctgtctaacacggtgaaaccctgtctctactaaaaaagaaaccctgtctctactaaaaaatacaaaaaaaaattagccgggcttggtggctggcacctgtacaggagaatggcaggaacccaggaggcggagcttgcagtgagccaagaacgcgccactgcactccagcctgggagacagagcaagactccatctcgaaaaaaagaatggccttcttaaaacataggtcatgatgattccttccttaaaatctttcagtttcattctctgacattcttttttgctcgctggattccactgaaactagtctttcacatgctgctttcagatgcataccaaacttttgtgccttaacacactttgcaatacttttctctccactggggctttcttcctcattgttttgacttggctatctcctattgctgtcaggcttagtttaaatgtcatttcagagagacctttcttattcatcctgtctgtagtagatccttgtgcccatattctctatctcagccttttgtttgtgtcataggtcttaccacaatatgtaattgctttatttgttccccacaacgcatgcctggaacataactgttcaatatttatttgttggatgaatgagaaaccaaatattgttaacaagcttgttagattgtttaagattttcttctatagtagtctgagttgcatgaactttatgatatctacctcattagggctgtcgggctcacgaccttttcagatgattaatgttcccaaaatttaatattcaaataagagaaaaacaatacaaaagcaccattgggttgagcatggtggctcatgcctgtaatcctagcactttgggaagctgaggtggacggatcacttgaggtcagaagtttgagaccagggccgggcacagtggctcacgcctgtaatcccagcactttgagaggccgagttgggaggatcacgaggtcaggagatcgagaccatcctggctaacatggcgaaaccgtgtctctactaaaatacaaaaaannan

SEQ ID NO: 15179 - DNA, 395 bp, Homo sapiens
  misc_feature (8)..(8): n is a, c, g, or t
  misc_feature (14)..(14): n is a, c, g, or t
  misc_feature (57)..(57): n is a, c, g, or t
  misc_feature (78)..(78): n is a, c, g, or t
  misc_feature (101)..(101): n is a, c, g, or t
attgtatngggggnatccccctgagagcccttgcccccttaaaatccaattggccanttccccccagcaatgggaacngggaaaccttgggatttcccccnaaaaaccatattccgctgaattaatccatttccagaggtgttccaaatttaggtagcaagaatccagctgaaaactttacaagaggttcactttcctgctgcaccccgagtgatcatgaaaatattcaggcattttcagatgaatttgccagaagggctaatggaaatctcgtcagtgacaaaattccgaaggctaaagatacacaaggttcagtaaagcttctaaattgagaagtgatttctagttgctaagtaactgttcattggcaggtaaaagacagtagtgataatttt

SEQ ID NO: 15180 - DNA, 5439 bp, Homo sapiens
tataaattgctttttaacttcgttgaacaaaacatgaaaatagagagactggttgaagtaaagccttccttagttattgactatttaaagacagaaaagaagctattctggccaaagataaagaaggtaaatgtgcaggtaagtttcaatcctgagaacaaacaaaaaggcattttactaactggctcaaagaccgaagtactgaaggcagtggacattgtcaagcaagtctgggattcagtctgtgttaaaagtgtccatactgataagccaggagccaagcagttcttccaggataaagcacggttttatcaaagtgagatcaaacggttgtttggttgttacattgaactacaggagaatgaagtaatgaaggagggaggcagccccgctgggcagaagtgcttctctcggacagtcttggcccctggcgttgtgctgattgtgcagcagggtgacttggcacggcttcctgtcgatgtggtggtgaatgcatctaatgaggaccttaagcattatggtggcctggccgctgcgctctcaaaagcagctggccctgagctccaggccgactgtgaccagatagtgaagagagagggcagactcctaccgggcaatgccaccatctccaaggcaggaaagctgccctaccaccacgtgatccatgcagtggggccccgctggagcggatatgaggccccgaggtgtgtgtacctattaaggagagctgtgcaactcagtctctgtctagccgaaaaatacaagtaccgatccatagccatcccagctattagttctggagtctttggctttcccttaggccgatgcgtggagaccattgtttctgccatcaaggaaaacttccaattcaagaaggatggacactgcttgaaagaaatctaccttgtggatgtatctgagaagactgttgaggcctttgcagaagctgtgaaaactgtatttaaagccaccctgccagatacagctgccccgccaggtttaccaccagcagcagcggggcctgggaaaacatcatgggaaaaaggaagcctggtgtccccgggaggcctgcagatgctgttggtgaaagagggtgtgcagaatgctaagaccgatgttgttgtcaactccgttcccttggatctcgtgcttagtagagggcctctttctaagtccctcttggaaaaagctggaccagagctccaggaggaattggacacagttggacaaggggtggctgtcagcatgggcacagtgctcaaaaccagcagctggaatctggactgtcgctatgtgcttcacgtggtagctccggagtggagaaatggtagcacatcttcactcaagataatggaagacataatcagagaatgtatggagatcactgagagcttgtccttaaaatcaattgcatttccagcaataggaacaggaaacttgggatttcctaaaaacatattcgctgaattaatcatttcagaggtgttcaaatttagtagcaagaatcagctgaaaactttacaagaggttcactttctgctgcacccgagtgatcatgaaaatattcaggcattttcagatgaatttgccagaagggctaatggaaatctcgtcagtgacaaaattccgaaggctaaagatacacaaggtttttatgggactgtttctagccctgattcaggtgtgtatgaaatgaagattggctccatcatcttccaggtggcttctggagatatcacgaaagaagaggcagatgtgattgtaaattcaacatcaaactcattcaatctcaaagcaggggtctccaaagcaattttagaatgtgctggacaaaatgtagaaagggaatgttctcagcaagctcagcagcgcaaaaatgattatataatcaccggaggtggatttttgaggtgcaagaatatcattcatgtaattggtggaaatgatgtcaagagttcagtttcctctgttttgcaggagtgtgaaaaaaaaaattactcatccatttgcctcccagccattgggacaggaaatgccaaacaacacccagataaggttgctgaagccataattgatgccattgaagactttgtccagaaaggatcagcccagtctgtgaaaaaagttaaagttgttatctttctgcctcaagtactggatgtgttttatgccaacatgaagaaaagagaagggactcagctttcttcccaacagtctgtgatgtctaaacttgcatcatttttgggcttttcaaagcaatctccccaaaaaaagaatcatttggttttggaaaagaaaacagaatcagcaacttttcgggtgtgtggtgaaaatgtcacgtgtgtggaatacgctatctcctggctacaagacctgattgaaaaagaacagtgtccttacaccagtgaagatgagtgcatcaaagactttgatgaaaaggagtatcaggagttgaatgagctgcagaagaagttaaatattaacatttccctggaccataagagacctttgattaaggttttgggaattagcagagatgtgatgcaggctagagatgaaattgaggcgatgatcaagagagttcgattggccaaagaacaggaatcccgggcagattgtatcagtgagtttatagaatggcagtataatgacaataacacttctcattgttttaacaaaatgaccaatctgaaattagaggatgcaaggagagaaaagaaaaaaacagttgatgtcaaaattaatcatcggcactacacagtgaacttgaacacatacactgccacagacacaaagggccacagtttatctgttcagcgcctcacgaaatccaaagttgacatccctgcacactggagtgatatgaagcagcagaatttctgtgtggtggagctgctgcctagtgatcctgagtacaacacggtggcaagcaagtttaatcagacctgctcacacttcagaatagagaaggtaagccttctgctagaatgcagtttctggatggtggaaataagttctgtcatggtcctatataaaatccattttcattcacttcctatcacatttttttaaacccagaattagaatttgtatggtaattagtagttctagattctactcatgtgaccataattactgaggcattaagattcttgtgtcagtgattacaatatttgattgtaatatgatagaacactaaagacatatatttactttgtgaagcaagctaatacaaattcaaagatatggctttaaaattggatttgatagctagcaaattccacagagagccatgcagaggctccttagatcaggaccatgttactctgccccattattcacagatcaacagtgcttccttgataaagccagcaggccttttctcgtttatcataattattttgggcaggtgaatgtgatgattcgtgcctgtagtcccagctattgggaggctgaggtggaaggattgcatgagcccaggagtttgacgccagtctgggtaacatagtgagatcctgctctcaaataaaaacaaccaattattttggcatcttcttccatttttaaacatttttgatattgctgtttgatattatattttccttgacttctctagcaaaattattatgatttttttttccttgactaattttcttttcatttttgcaggcacgctgtttctcttccaaacccctaattctagctttattcacgccatttatgcttaaacggtcttttgtctctgtacctcaccagggaatatatttacccttcttggattcaactattagttcaatgtcgatagctcccaaatcaacattaccaacctgggtctttgactcaagctctagaacatactcccagtggcctaaaaaaatctccacttgaggctgggcacagtggctcacgcctgtaatcccagcactttgggaggccgaggtgggtggatcacgaggtcaggggttcaagaccatcctggtgaagatggtgaaaccacgtctctactaaaactacaaaaattagccgggcatgttggcaggtgcctataatcccacctacttgggaggctgaggcaggataattgcttgaacatgggcggcagagattgcagtgagccaagatcacgccactgcactccagcctggtcgacagagtgagactccgtctcaaaaaaaaaatctccacttgaatatctaactgcaaaatcaacttctctaaaatctaatgcatcatacgtaagtaattctctttccctttccttcctcatttctgtttttggttctaccactttctgagtaaagccggagatctttgatccaccataagtctgccagtaagacctacattttctttgcaaatttttcttactctctatttgaactgccaacactgtttattcatgttgttaagtacatcataatttaaaaagattcaaagtgccctacaaagatataaactataccttcagataaaataaatatacaaagaaaaatggttaaagagaaaagaatggcagggaaaataagataatacagacgaactgctagttctcaaaaatatataacatgaggttaccaatttgtccctgagcttcctagtagacaaagcaagaagtaaacattcaggtacaagactcataatgtccgtaaatcaaaaagcaaaccatttgataaggaggctcacagctcctcacaatactgagactgactcctgagagatttctcttgtggatcaagtactagagaatatcctcaacgtcatcctcacaataaattaaatatcaacttttatatcactgtttttttttaatgtaaaactggttgaacaaaaccgatgcctgattgaatgaaaacaattctatgaggcaccaagacaatatgattcaagtatgcagctctatgatggtctatttctgagataacaagtaagtctcactccaagtaccaattactactaactggtagtggctgattggcacattgtgatgagatgctaagtttagattgagcaggaatgaatgttctgcttgaccagcaatatctacagtgggccctgtggatgcctgctgtgtattggcagaccctggccagagaattgatttcaacacttttttgcagtgaaaccttttttttcaataaaatcttatgtgaaatcccagtgtatgaaccagataaaagcagaggtgtgggtagtacttaaggtgcctccatggaggtccctagaattgtgaaaataacataaaaaatgggtggtctgtcatcctctatgactattatgtcttatgattaaggtttttaatatccataagccttccacttagattcaacaattgtgccacttttgctttctctccctgtctgtttttgctgaagcatttgaaggtaagttgcagacatcatgatactcctattttagcaagtatctcccaattaaagacat

SEQ ID NO: 15181 - DNA, 253 bp, Homo sapiens
ctattacagcataaactattacagctaactattcgtgagccaccgtgaccagccaatgtgccttcttatagtgtctactcattggtctttgttctgcccagtgataacaatgggataacgcctgctacacatcttcattgtgaaacccttcccctgtgctgagattaaatgaactctaagattattaaatagtatatgctgtaatagtttatggtgtaatagttatgctgtaatagtgttaggctgtaatagt

SEQ ID NO: 15182 - DNA, 458 bp, Homo sapiens
cttttggggtctttgctgtctttgctctttgggtctttgctcagaaagtggtagaaccaaaaacagaaatgaggaaggaaagggaaagagaattacttacgtatgatgcattagattttagagaagttttttgcagtgaaaccttttttttcaataaaatcttatgtgaaatcccagtgtatgaaccagataaaagcagaggtgtgggtagtacttaaggtgcctccatggaggtccctagaattgtgaaaataacataaaaaatgggtggtctgtcatcctctatgactattatgtcttatgattaaggtttttaatatccataagccttccacttagattcaacaattgtgccacttttgctttctctccctgtctgtttttgctgaagcatttgaaggtaagttgcagacatcatgatactcctattttagcaagtatctcccaattaaagacat

SEQ ID NO: 15183 - DNA, 5546 bp, Homo sapiens
gtgaacttgaacacatacactgccacagacacaaagggccacagtttatctgttcagcgcctcacgaaatccaaagttgacatccctgcacactggagtgatatgaagcagcagaatttctgtgtggtggagctgctgcctagtgatcctgagtacaacacggtggcaagcaagtttaatcagacctgctcacacttcagaatcattgaactacaggagaatgaagtaatgaaggagggaggcagccccgctgggcagaagtgcttctctcggacagtcttggcccctggcgttgtgctgattgtgcagcagggtgacttggcacggcttcctgtcgatgtggtggtgaatgcatctaatgaggaccttaagcattatggtggcctggccgctgcgctctcaaaagcagctggccctgagctccaggccgactgtgaccagatagtgaagagagagggcagactcctaccgggcaatgccaccatctccaaggcaggaaagctgccctaccaccacgtgatccatgcagtggggccccgctggagcggatatgaggccccgaggtgtgtgtacctattaaggagagctgtgcaactcagtctctgtctagccgaaaaatacaagtaccgatccatagccatcccagctattagttctggagtctttggctttcccttaggccgatgcgtggagaccattgtttctgccatcaaggaaaacttccaattcaagaaggatggacactgcttgaaagaaatctaccttgtggatgtatctgagaagactgttgaggcctttgcagaagctgtgaaaactgtatttaaagccaccctgccagatacagctgccccgccaggtttaccaccagcagcagcggggcctgggaaaacatcatgggaaaaaggaagcctggtgtccccgggaggcctgcagatgctgttggtgaaagagggtgtgcagaatgctaagaccgatgttgttgtcaactccgttcccttggatctcgtgcttagtagagggcctctttctaagtccctcttggaaaaagctggaccagagctccaggaggaattggacacagttggacaaggggtggctgtcagcatgggcacagtgctcaaaaccagcagctggaatctggactgtcgctatgtgcttcacgtggtagctccggagtggagaaatggtagcacatcttcactcaagataatggaagacataatcagagaatgtatggagatcactgagagcttgtccttaaaatcaattgcatttccagcaataggaacaggaaacttgggatttcctaaaaacatattcgctgaattaatcatttcagaggtgttcaaatttagtagcaagaatcagctgaaaactttacaagaggttcactttctgctgcacccgagtgatcatgaaaatattcaggcattttcagatgaatttgccagaagggctaatggaaatctcgtcagtgacaaaattccgaaggctaaagatacacaaggtttttatgggactgtttctagccctgattcaggtgtgtatgaaatgaagattggctccatcatcttccaggtggcttctggagatatcacgaaagaagaggcagatgtgattgtaaattcaacatcaaactcattcaatctcaaagcaggggtctccaaagcaattttagaatgtgctggacaaaatgtagaaagggaatgttctcagcaagctcagcagcgcaaaaatgattatataatcaccggaggtggatttttgaggtgcaagaatatcattcatgtaattggtggaaatgatgtcaagagttcagtttcctctgttttgcaggagtgtgaaaaaaaaaattactcatccatttgcctcccagccattgggacaggaaatgccaaacaacacccagataaggttgctgaagccataattgatgccattgaagactttgtccagaaaggatcagcccagtctgtgaaaaaagttaaagttgttatctttctgcctcaagtactggatgtgttttatgccaacatgaagaaaagagaagggactcagctttcttcccaacagtctgtgatgtctaaacttgcatcatttttgggcttttcaaagcaatctccccaaaaaaagaatcatttggttttggaaaagaaaacagaatcagcaacttttcgggtgtgtggtgaaaatgtcacgtgtgtggaatacgctatctcctggctacaagacctgattgaaaaagaacagtgtccttacaccagtgaagatgagtgcatcaaagactttgatgaaaaggagtatcaggagttgaatgagctgcagaagaagttaaatattaacatttccctggaccataagagacctttgattaaggttttgggaattagcagagatgtgatgcaggctagagatgaaattgaggcgatgatcaagagagttcgattggccaaagaacaggaatcccgggcagattgtatcagtgagtttatagaatggcagtataatgacaataacacttctcattgttttaacaaaatgaccaatctgaaattagaggatgcaaggagagaaaagaaaaaaacagttgatgtcaaaattaatcatcggcactacacagtgaacttgaacacatacactgccacagacacaaagggccacagtttatctgttcagcgcctcacgaaatccaaagttgacatccctgcacactggagtgatatgaagcagcagaatttctgtgtggtggagctgctgcctagtgatcctgagtacaacacggtggcaagcaagtttaatcagacctgctcacacttcagaatagagaagattgagaggatccagaatccagatctctggaatagctaccaggcaaagaaaaaaactatggatgccaagaatggccagacaatgaatgagaagcaactcttccatgggacagatgccggctccgtgccacacgtcaatcgaaatggctttaaccgcagctatgccggaaagaatgctgtggcatatggaaagggaacctattttgctgtcaatgccaattattctgccaatgatacgtactccagaccagatgcaaatgggagaaagcatgtgtattatgtgcgagtacttactggaatctatacacatggaaatcattcattaattgtgcctccttcaaagaaccctcaaaatcctactgacctgtatgacactgtcacagataatgtgcaccatccaagtttatttgtggcattttatgactaccaagcatacccagagtaccttattacgtttagaaaataacactttggtatccttcccacaaaattattctccatttgtacatatctagttgtaaaacaagttttagcttttttttttaattcctcttaacagatttttctaatatccaaggatcattctttgtcgctgcagtcagtctttcttcagcttctctttcataatggaaatgaacttattatcttgagagcaaataacttggaaaatttaaatgagataatgcagttgcaactgtgtgtccacaagtatggacatcaaatctgtgggaaaagaacaggtttgtattttcaggaaggagagaataacagtcttatagacagagggcacagctaagcacagctgccactgcaggagacaggccccatgtcaggatgccatagtgctgtggggagcacagtattacccagtgggtagggcttctgtcttccctgggagcagggatggtatcttagtcaatttttttcccttgagatgaggtctgtgcctgatgtacaacggatactccataaatgtttgacaaaccaacgaagaatgaaaaaaagcctagtcagactcccatccaaagtaggaactatctctttaacattcttgactcactatcactttacctcaaattgaacagattccatgacggaacttcattcttcacaaactagccagtgacatgtgggacagctctggccagggctctgggactgcagtgtacttgcgctctgcacggtccaggagctgtgatgtggctgtggtctaggggaatcctgcctgccccatggagttgcgcagcacaaccctggctccaattgccagaaggctctttttaatgctgaaccaaaatgtgcctttttttttttttttgagatggagtttcactcttgttgcccaggctggagtgcaatggcgcgatctcagctcactgcagccactgcctcccaggttcaagtgattctcctgcctcagcctcccgagtagctgggattacaggcatgcgctaacacacccagctaattttgtatttttagtagagacgaggtttctccatgttcgacaggctggtctcgaactcccacctcagcctcccaaactgctgggattacaggtgtgagccaccgtgaccagccaatgtgccttcttatagtgtctactcattggtctttgttctgcccagtgataacaatgggataacgcctgctacacatcttcattgtgaaacccttcccctgtgctgagattaaatgaactctaagattattaaatagtatattttccttgacagcctagcgtttgatgattttaaagccttatgtataaataaaccaaaggaagtaagcagtcatattgctaatttgctaactcctatctattgaatggtgaagttttaaaaatttccccaggtaagtttaagattcaaacaccatctattgagcacctacattgtgtgccaggtagtaaaataggtgctttcatacacattgtctcaattcctgtgaggtcagaattatctctgcatttgaaacttgaggaaacatgctcagagtgcaagaagcttccttgcctgagatcacctagaaaggaaccctcagagccggcaactgaatcttggtccctgtgatgtcaagcccattgctctcccactgcagaacatggcctctagattaatgccaccgattcaggaacacctccgacagtcttgaaatacccccatgttgccttgtttgttttttccttctggcttcttctattacagtctcttcattggaagctctgtaggccaaggccagagctgatactgacacggagccaatgcagatagcacatcagatgctaggggtcgctgggaggattaagggacttaatctgctaggaacacctgtacttgaagtggaggaggctagggggccacagttgctgcttcattaacatagaggttttggatttttttctcttgtggtttgttttttaagtggattggcagactccttgttgcttaagagtggctttctaggcaggccactggcatctgaattcatcattgacaataaatgtaagaaattggaataaaaaagagagacctgctgttattcgcttttgttctccagtgatttgattaactcagggcaaggctgaatatcagagtgtatcgcactgaagaataataatccattcagtaatgttatagttatcctcaatctaaatatgtcaactgtcattttgctacttttcaaataaaatacttgaaaactgtcaaaaaaaaaaaa

SEQ ID NO: 15184 - DNA, 5415 bp, Homo sapiens
gtgaacttgaacacatacactgccacagacacaaagggccacagtttatctgttcagcgcctcacgaaatccaaagttgacatccctgcacactggagtgatatgaagcagcagaatttctgtgtggtggagctgctgcctagtgatcctgagtacaacacggtggcaagcaagtttaatcagacctgctcacacttcagaatcattgaactacaggagaatgaagtaatgaaggagggaggcagccccgctgggcagaagtgcttctctcggacagtcttggcccctggcgttgtgctgattgtgcagcagggtgacttggcacggcttcctgtcgatgtggtggtgaatgcatctaatgaggaccttaagcattatggtggcctggccgctgcgctctcaaaagcagctggccctgagctccaggccgactgtgaccagatagtgaagagagagggcagactcctaccgggcaatgccaccatctccaaggcaggaaagctgccctaccaccacgtgatccatgcagtggggccccgctggagcggatatgaggccccgaggtgtgtgtacctattaaggagagctgtgcaactcagtctctgtctagccgaaaaatacaagtaccgatccatagccatcccagctattagttctggagtctttggctttcccttaggccgatgcgtggagaccattgtttctgccatcaaggaaaacttccaattcaagaaggatggacactgcttgaaagaaatctaccttgtggatgtatctgagaagactgttgaggcctttgcagatgctgttggtgaaagagggtgtgcagaatgctaagaccgatgttgttgtcaactccgttcccttggatctcgtgcttagtagagggcctctttctaagtccctcttggaaaaagctggaccagagctccaggaggaattggacacagttggacaaggggtggctgtcagcatgggcacagtgctcaaaaccagcagctggaatctggactgtcgctatgtgcttcacgtggtagctccggagtggagaaatggtagcacatcttcactcaagataatggaagacataatcagagaatgtatggagatcactgagagcttgtccttaaaatcaattgcatttccagcaataggaacaggaaacttgggatttcctaaaaacatattcgctgaattaatcatttcagaggtgttcaaatttagtagcaagaatcagctgaaaactttacaagaggttcactttctgctgcacccgagtgatcatgaaaatattcaggcattttcagatgaatttgccagaagggctaatggaaatctcgtcagtgacaaaattccgaaggctaaagatacacaaggtttttatgggactgtttctagccctgattcaggtgtgtatgaaatgaagattggctccatcatcttccaggtggcttctggagatatcacgaaagaagaggcagatgtgattgtaaattcaacatcaaactcattcaatctcaaagcaggggtctccaaagcaattttagaatgtgctggacaaaatgtagaaagggaatgttctcagcaagctcagcagcgcaaaaatgattatataatcaccggaggtggatttttgaggtgcaagaatatcattcatgtaattggtggaaatgatgtcaagagttcagtttcctctgttttgcaggagtgtgaaaaaaaaaattactcatccatttgcctcccagccattgggacaggaaatgccaaacaacacccagataaggttgctgaagccataattgatgccattgaagactttgtccagaaaggatcagcccagtctgtgaaaaaagttaaagttgttatctttctgcctcaagtactggatgtgttttatgccaacatgaagaaaagagaagggactcagctttcttcccaacagtctgtgatgtctaaacttgcatcatttttgggcttttcaaagcaatctccccaaaaaaagaatcatttggttttggaaaagaaaacagaatcagcaacttttcgggtgtgtggtgaaaatgtcacgtgtgtggaatacgctatctcctggctacaagacctgattgaaaaagaacagtgtccttacaccagtgaagatgagtgcatcaaagactttgatgaaaaggagtatcaggagttgaatgagctgcagaagaagttaaatattaacatttccctggaccataagagacctttgattaaggttttgggaattagcagagatgtgatgcaggctagagatgaaattgaggcgatgatcaagagagttcgattggccaaagaacaggaatcccgggcagattgtatcagtgagtttatagaatggcagtataatgacaataacacttctcattgttttaacaaaatgaccaatctgaaattagaggatgcaaggagagaaaagaaaaaaacagttgatgtcaaaattaatcatcggcactacacagtgaacttgaacacatacactgccacagacacaaagggccacagtttatctgttcagcgcctcacgaaatccaaagttgacatccctgcacactggagtgatatgaagcagcagaatttctgtgtggtggagctgctgcctagtgatcctgagtacaacacggtggcaagcaagtttaatcagacctgctcacacttcagaatagagaagattgagaggatccagaatccagatctctggaatagctaccaggcaaagaaaaaaactatggatgccaagaatggccagacaatgaatgagaagcaactcttccatgggacagatgccggctccgtgccacacgtcaatcgaaatggctttaaccgcagctatgccggaaagaatgctgtggcatatggaaagggaacctattttgctgtcaatgccaattattctgccaatgatacgtactccagaccagatgcaaatgggagaaagcatgtgtattatgtgcgagtacttactggaatctatacacatggaaatcattcattaattgtgcctccttcaaagaaccctcaaaatcctactgacctgtatgacactgtcacagataatgtgcaccatccaagtttatttgtggcattttatgactaccaagcatacccagagtaccttattacgtttagaaaataacactttggtatccttcccacaaaattattctccatttgtacatatctagttgtaaaacaagttttagcttttttttttaattcctcttaacagatttttctaatatccaaggatcattctttgtcgctgcagtcagtctttcttcagcttctctttcataatggaaatgaacttattatcttgagagcaaataacttggaaaatttaaatgagataatgcagttgcaactgtgtgtccacaagtatggacatcaaatctgtgggaaaagaacaggtttgtattttcaggaaggagagaataacagtcttatagacagagggcacagctaagcacagctgccactgcaggagacaggccccatgtcaggatgccatagtgctgtggggagcacagtattacccagtgggtagggcttctgtcttccctgggagcagggatggtatcttagtcaatttttttcccttgagatgaggtctgtgcctgatgtacaacggatactccataaatgtttgacaaaccaacgaagaatgaaaaaaagcctagtcagactcccatccaaagtaggaactatctctttaacattcttgactcactatcactttacctcaaattgaacagattccatgacggaacttcattcttcacaaactagccagtgacatgtgggacagctctggccagggctctgggactgcagtgtacttgcgctctgcacggtccaggagctgtgatgtggctgtggtctaggggaatcctgcctgccccatggagttgcgcagcacaaccctggctccaattgccagaaggctctttttaatgctgaaccaaaatgtgcctttttttttttttttgagatggagtttcactcttgttgcccaggctggagtgcaatggcgcgatctcagctcactgcagccactgcctcccaggttcaagtgattctcctgcctcagcctcccgagtagctgggattacaggcatgcgctaacacacccagctaattttgtatttttagtagagacgaggtttctccatgttcgacaggctggtctcgaactcccacctcagcctcccaaactgctgggattacaggtgtgagccaccgtgaccagccaatgtgccttcttatagtgtctactcattggtctttgttctgcccagtgataacaatgggataacgcctgctacacatcttcattgtgaaacccttcccctgtgctgagattaaatgaactctaagattattaaatagtatattttccttgacagcctagcgtttgatgattttaaagccttatgtataaataaaccaaaggaagtaagcagtcatattgctaatttgctaactcctatctattgaatggtgaagttttaaaaatttccccaggtaagtttaagattcaaacaccatctattgagcacctacattgtgtgccaggtagtaaaataggtgctttcatacacattgtctcaattcctgtgaggtcagaattatctctgcatttgaaacttgaggaaacatgctcagagtgcaagaagcttccttgcctgagatcacctagaaaggaaccctcagagccggcaactgaatcttggtccctgtgatgtcaagcccattgctctcccactgcagaacatggcctctagattaatgccaccgattcaggaacacctccgacagtcttgaaatacccccatgttgccttgtttgttttttccttctggcttcttctattacagtctcttcattggaagctctgtaggccaaggccagagctgatactgacacggagccaatgcagatagcacatcagatgctaggggtcgctgggaggattaagggacttaatctgctaggaacacctgtacttgaagtggaggaggctagggggccacagttgctgcttcattaacatagaggttttggatttttttctcttgtggtttgttttttaagtggattggcagactccttgttgcttaagagtggctttctaggcaggccactggcatctgaattcatcattgacaataaatgtaagaaattggaataaaaaagagagacctgctgttattcgcttttgttctccagtgatttgattaactcagggcaaggctgaatatcagagtgtatcgcactgaagaataataatccattcagtaatgttatagttatcctcaatctaaatatgtcaactgtcattttgctacttttcaaataaaatacttgaaaactgtcaaaaaaaaaaaa

SEQ ID NO: 15185 - DNA, 4489 bp, Homo sapiens
gccacccttgggtcaaagctgggagagaaaagaggaaaaattttaaaacagaacaaaatggaaaactgccccacttagcagattgcttctgcaagttttggcacctttcttcaatctgtctgctgttattgtaacttttcagagctcttgggtggtggctttttgtatttgtcctgtttttagttgtaatcaacgggagagataggctatagtacgctaacttcaccttggtcagcaccagagttcatgtttgatatggattctatgttctaattcttttttcttaaacagatcatcactgaggctgaggagcagggccaggttaaagaccagaggtcacagaaagagagggagagggaagacatccaagagggtcccatgtgagcaggatacccaagtcattcttgctgtggctgactcggttattgactttacttcttttcttttcaggtttttatgggactgtttctagccctgattcaggtgtgtatgaaatgaagattggctccatcatcttccaggtggcttctggagatatcacgaaagaagaggcagatgtgattgtaaattcaacatcaaactcattcaatctcaaagcaggggtctccaaagcaattttagaatgtgctggacaaaatgtagaaagggaatgttctcagcaagctcagcagcgcaaaaatgattatataatcaccggaggtggatttttgaggtgcaagaatatcattcatgtaattggtggaaatgatgtcaagagttcagtttcctctgttttgcaggagtgtgaaaaaaaaaattactcatccatttgcctcccagccattgggacaggaaatgccaaacaacacccagataaggttgctgaagccataattgatgccattgaagactttgtccagaaaggatcagcccagtctgtgaaaaaagttaaagttgttatctttctgcctcaagtactggatgtgttttatgccaacatgaagaaaagagaagggactcagctttcttcccaacagtctgtgatgtctaaacttgcatcatttttgggcttttcaaagcaatctccccaaaaaaagaatcatttggttttggaaaagaaaacagaatcagcaacttttcgggtgtgtggtgaaaatgtcacgtgtgtggaatacgctatctcctggctacaagacctgattgaaaaagaacagtgtccttacaccagtgaagatgagtgcatcaaagactttgatgaaaaggagtatcaggagttgaatgagctgcagaagaagttaaatattaacatttccctggaccataagagacctttgattaaggttttgggaattagcagagatgtgatgcaggctagagatgaaattgaggcgatgatcaagagagttcgattggccaaagaacaggaatcccgggcagattgtatcagtgagtttatagaatggcagtataatgacaataacacttctcattgttttaacaaaatgaccaatctgaaattagaggatgcaaggagagaaaagaaaaaaacagttgatgtcaaaattaatcatcggcactacacagtgaacttgaacacatacactgccacagacacaaagggccacagtttatctgttcagcgcctcacgaaatccaaagttgacatccctgcacactggagtgatatgaagcagcagaatttctgtgtggtggagctgctgcctagtgatcctgagtacaacacggtggcaagcaagtttaatcagacctgctcacacttcagaatagagaagattgagaggatccagaatccagatctctggaatagctaccaggcaaagaaaaaaactatggatgccaagaatggccagacaatgaatgagaagcaactcttccatgggacagatgccggctccgtgccacacgtcaatcgaaatggctttaaccgcagctatgccggaaagaatgctgtggcatatggaaagggaacctattttgctgtcaatgccaattattctgccaatgatacgtactccagaccagatgcaaatgggagaaagcatgtgtattatgtgcgagtacttactggaatctatacacatggaaatcattcattaattgtgcctccttcaaagaaccctcaaaatcctactgacctgtatgacactgtcacagataatgtgcaccatccaagtttatttgtggcattttatgactaccaagcatacccagagtaccttattacgtttagaaaataacactttggtatccttcccacaaaattattctccatttgtacatatctagttgtaaaacaagttttagcttttttttttaattcctcttaacagatttttctaatatccaaggatcattctttgtcgctgcagtcagtctttcttcagcttctctttcataatggaaatgaacttattatcttgagagcaaataacttggaaaatttaaatgagataatgcagttgcaactgtgtgtccacaagtatggacatcaaatctgtgggaaaagaacaggtttgtattttcaggaaggagagaataacagtcttatagacagagggcacagctaagcacagctgccactgcaggagacaggccccatgtcaggatgccatagtgctgtggggagcacagtattacccagtgggtagggcttctgtcttccctgggagcagggatggtatcttagtcaatttttttcccttgagatgaggtctgtgcctgatgtacaacggatactccataaatgtttgacaaaccaacgaagaatgaaaaaaagcctagtcagactcccatccaaagtaggaactatctctttaacattcttgactcactatcactttacctcaaattgaacagattccatgacggaacttcattcttcacaaactagccagtgacatgtgggacagctctggccagggctctgggactgcagtgtacttgcgctctgcacggtccaggagctgtgatgtggctgtggtctaggggaatcctgcctgccccatggagttgcgcagcacaaccctggctccaattgccagaaggctctttttaatgctgaaccaaaatgtgcctttttttttttttttgagatggagtttcactcttgttgcccaggctggagtgcaatggcgcgatctcagctcactgcagccactgcctcccaggttcaagtgattctcctgcctcagcctcccgagtagctgggattacaggcatgcgctaacacacccagctaattttgtatttttagtagagacgaggtttctccatgttcgacaggctggtctcgaactcccacctcagcctcccaaactgctgggattacaggtgtgagccaccgtgaccagccaatgtgccttcttatagtgtctactcattggtctttgttctgcccagtgataacaatgggataacgcctgctacacatcttcattgtgaaacccttcccctgtgctgagattaaatgaactctaagattattaaatagtatattttccttgacagcctagcgtttgatgattttaaagccttatgtataaataaaccaaaggaagtaagcagtcatattgctaatttgctaactcctatctattgaatggtgaagttttaaaaatttccccaggtaagtttaagattcaaacaccatctattgagcacctacattgtgtgccaggtagtaaaataggtgctttcatacacattgtctcaattcctgtgaggtcagaattatctctgcatttgaaacttgaggaaacatgctcagagtgcaagaagcttccttgcctgagatcacctagaaaggaaccctcagagccggcaactgaatcttggtccctgtgatgtcaagcccattgctctcccactgcagaacatggcctctagattaatgccaccgattcaggaacacctccgacagtcttgaaatacccccatgttgccttgtttgttttttccttctggcttcttctattacagtctcttcattggaagctctgtaggccaaggccagagctgatactgacacggagccaatgcagatagcacatcagatgctaggggtcgctgggaggattaagggacttaatctgctaggaacacctgtacttgaagtggaggaggctagggggccacagttgctgcttcattaacatagaggttttggatttttttctcttgtggtttgttttttaagtggattggcagactccttgttgcttaagagtggctttctaggcaggccactggcatctgaattcatcattgacaataaatgtaagaaattggaataaaaaagagagacctgctgttattcgcttttgttctccagtgatttgattaactcagggcaaggctgaatatcagagtgtatcgcactgaagaataataatccattcagtaatgttatagttatcctcaatctaaatatgtcaactgtcattttgctacttttcaaataaaatacttgaaaactgtcaaaaaaaaaaaa

SEQ ID NO: 15186 - DNA, 3517 bp, Homo sapiens
cggccccactacctcatctgcggactcagctttcttcccaacagtctgtgatgtctaaacttgcatcatttttgggcttttcaaagcaatctccccaaaaaaagaatcatttggttttggaaaagaaaacagaatcagcaacttttcgggtgtgtggtgaaaatgtcacgtgtgtggaatacgctatctcctggctacaagacctgattgaaaaagaacagtgtccttacaccagtgaagatgagtgcatcaaagactttgatgaaaaggagtatcaggagttgaatgagctgcagaagaagttaaatattaacatttccctggaccataagagacctttgattaaggttttgggaattagcagagatgtgatgcaggctagagatgaaattgaggcgatgatcaagagagttcgattggccaaagaacaggaatcccgggcagattgtatcagtgagtttatagaatggcagtataatgacaataacacttctcattgttttaacaaaatgaccaatctgaaattagaggatgcaaggagagaaaagaaaaaaacagttgatgtcaaaattaatcatcggcactacacagtgaacttgaacacatacactgccacagacacaaagggccacagtttatctgttcagcgcctcacgaaatccaaagttgacatccctgcacactggagtgatatgaagcagcagaatttctgtgtggtggagctgctgcctagtgatcctgagtacaacacggtggcaagcaagtttaatcagacctgctcacacttcagaatagagaagattgagaggatccagaatccagatctctggaatagctaccaggcaaagaaaaaaactatggatgccaagaatggccagacaatgaatgagaagcaactcttccatgggacagatgccggctccgtgccacacgtcaatcgaaatggctttaaccgcagctatgccggaaagaatgctgtggcatatggaaagggaacctattttgctgtcaatgccaattattctgccaatgatacgtactccagaccagatgcaaatgggagaaagcatgtgtattatgtgcgagtacttactggaatctatacacatggaaatcattcattaattgtgcctccttcaaagaaccctcaaaatcctactgacctgtatgacactgtcacagataatgtgcaccatccaagtttatttgtggcattttatgactaccaagcatacccagagtaccttattacgtttagaaaataacactttggtatccttcccacaaaattattctccatttgtacatatctagttgtaaaacaagttttagcttttttttttaattcctcttaacagatttttctaatatccaaggatcattctttgtcgctgcagtcagtctttcttcagcttctctttcataatggaaatgaacttattatcttgagagcaaataacttggaaaatttaaatgagataatgcagttgcaactgtgtgtccacaagtatggacatcaaatctgtgggaaaagaacaggtttgtattttcaggaaggagagaataacagtcttatagacagagggcacagctaagcacagctgccactgcaggagacaggccccatgtcaggatgccatagtgctgtggggagcacagtattacccagtgggtagggcttctgtcttccctgggagcagggatggtatcttagtcaatttttttcccttgagatgaggtctgtgcctgatgtacaacggatactccataaatgtttgacaaaccaacgaagaatgaaaaaaagcctagtcagactcccatccaaagtaggaactatctctttaacattcttgactcactatcactttacctcaaattgaacagattccatgacggaacttcattcttcacaaactagccagtgacatgtgggacagctctggccagggctctgggactgcagtgtacttgcgctctgcacggtccaggagctgtgatgtggctgtggtctaggggaatcctgcctgccccatggagttgcgcagcacaaccctggctccaattgccagaaggctctttttaatgctgaaccaaaatgtgcctttttttttttttttgagatggagtttcactcttgttgcccaggctggagtgcaatggcgcgatctcagctcactgcagccactgcctcccaggttcaagtgattctcctgcctcagcctcccgagtagctgggattacaggcatgcgctaacacacccagctaattttgtatttttagtagagacgaggtttctccatgttcgacaggctggtctcgaactcccacctcagcctcccaaactgctgggattacaggtgtgagccaccgtgaccagccaatgtgccttcttatagtgtctactcattggtctttgttctgcccagtgataacaatgggataacgcctgctacacatcttcattgtgaaacccttcccctgtgctgagattaaatgaactctaagattattaaatagtatattttccttgacagcctagcgtttgatgattttaaagccttatgtataaataaaccaaaggaagtaagcagtcatattgctaatttgctaactcctatctattgaatggtgaagttttaaaaatttccccaggtaagtttaagattcaaacaccatctattgagcacctacattgtgtgccaggtagtaaaataggtgctttcatacacattgtctcaattcctgtgaggtcagaattatctctgcatttgaaacttgaggaaacatgctcagagtgcaagaagcttccttgcctgagatcacctagaaaggaaccctcagagccggcaactgaatcttggtccctgtgatgtcaagcccattgctctcccactgcagaacatggcctctagattaatgccaccgattcaggaacacctccgacagtcttgaaatacccccatgttgccttgtttgttttttccttctggcttcttctattacagtctcttcattggaagctctgtaggccaaggccagagctgatactgacacggagccaatgcagatagcacatcagatgctaggggtcgctgggaggattaagggacttaatctgctaggaacacctgtacttgaagtggaggaggctagggggccacagttgctgcttcattaacatagaggttttggatttttttctcttgtggtttgttttttaagtggattggcagactccttgttgcttaagagtggctttctaggcaggccactggcatctgaattcatcattgacaataaatgtaagaaattggaataaaaaagagagacctgctgttattcgcttttgttctccagtgatttgattaactcagggcaaggctgaatatcagagtgtatcgcactgaagaataataatccattcagtaatgttatagttatcctcaatctaaatatgtcaactgtcattttgctacttttcaaataaaatacttgaaaactgtcaaaaaaaaaaaa

SEQ ID NO: 15187 - DNA, 3389 bp, Homo sapiens
gaggatcccggctcttagccagtgttgtgacaactgtcatgactggggaaaaccttggtgtcctggctacaagacctgattgaaaaagaacagtgtccttacaccagtgaagatgagtgcatcaaagactttgatgaaaaggagtatcaggagttgaatgagctgcagaagaagttaaatattaacatttccctggaccataagagacctttgattaaggttttgggaattagcagagatgtgatgcaggctagagatgaaattgaggcgatgatcaagagagttcgattggccaaagaacaggaatcccgggcagattgtatcagtgagtttatagaatggcagtataatgacaataacacttctcattgttttaacaaaatgaccaatctgaaattagaggatgcaaggagagaaaagaaaaaaacagttgatgtcaaaattaatcatcggcactacacagtgaacttgaacacatacactgccacagacacaaagggccacagtttatctgttcagcgcctcacgaaatccaaagttgacatccctgcacactggagtgatatgaagcagcagaatttctgtgtggtggagctgctgcctagtgatcctgagtacaacacggtggcaagcaagtttaatcagacctgctcacacttcagaatagagaagattgagaggatccagaatccagatctctggaatagctaccaggcaaagaaaaaaactatggatgccaagaatggccagacaatgaatgagaagcaactcttccatgggacagatgccggctccgtgccacacgtcaatcgaaatggctttaaccgcagctatgccggaaagaatgctgtggcatatggaaagggaacctattttgctgtcaatgccaattattctgccaatgatacgtactccagaccagatgcaaatgggagaaagcatgtgtattatgtgcgagtacttactggaatctatacacatggaaatcattcattaattgtgcctccttcaaagaaccctcaaaatcctactgacctgtatgacactgtcacagataatgtgcaccatccaagtttatttgtggcattttatgactaccaagcatacccagagtaccttattacgtttagaaaataacactttggtatccttcccacaaaattattctccatttgtacatatctagttgtaaaacaagttttagcttttttttttaattcctcttaacagatttttctaatatccaaggatcattctttgtcgctgcagtcagtctttcttcagcttctctttcataatggaaatgaacttattatcttgagagcaaataacttggaaaatttaaatgagataatgcagttgcaactgtgtgtccacaagtatggacatcaaatctgtgggaaaagaacaggtttgtattttcaggaaggagagaataacagtcttatagacagagggcacagctaagcacagctgccactgcaggagacaggccccatgtcaggatgccatagtgctgtggggagcacagtattacccagtgggtagggcttctgtcttccctgggagcagggatggtatcttagtcaatttttttcccttgagatgaggtctgtgcctgatgtacaacggatactccataaatgtttgacaaaccaacgaagaatgaaaaaaagcctagtcagactcccatccaaagtaggaactatctctttaacattcttgactcactatcactttacctcaaattgaacagattccatgacggaacttcattcttcacaaactagccagtgacatgtgggacagctctggccagggctctgggactgcagtgtacttgcgctctgcacggtccaggagctgtgatgtggctgtggtctaggggaatcctgcctgccccatggagttgcgcagcacaaccctggctccaattgccagaaggctctttttaatgctgaaccaaaatgtgcctttttttttttttttgagatggagtttcactcttgttgcccaggctggagtgcaatggcgcgatctcagctcactgcagccactgcctcccaggttcaagtgattctcctgcctcagcctcccgagtagctgggattacaggcatgcgctaacacacccagctaattttgtatttttagtagagacgaggtttctccatgttcgacaggctggtctcgaactcccacctcagcctcccaaactgctgggattacaggtgtgagccaccgtgaccagccaatgtgccttcttatagtgtctactcattggtctttgttctgcccagtgataacaatgggataacgcctgctacacatcttcattgtgaaacccttcccctgtgctgagattaaatgaactctaagattattaaatagtatattttccttgacagcctagcgtttgatgattttaaagccttatgtataaataaaccaaaggaagtaagcagtcatattgctaatttgctaactcctatctattgaatggtgaagttttaaaaatttccccaggtaagtttaagattcaaacaccatctattgagcacctacattgtgtgccaggtagtaaaataggtgctttcatacacattgtctcaattcctgtgaggtcagaattatctctgcatttgaaacttgaggaaacatgctcagagtgcaagaagcttccttgcctgagatcacctagaaaggaaccctcagagccggcaactgaatcttggtccctgtgatgtcaagcccattgctctcccactgcagaacatggcctctagattaatgccaccgattcaggaacacctccgacagtcttgaaatacccccatgttgccttgtttgttttttccttctggcttcttctattacagtctcttcattggaagctctgtaggccaaggccagagctgatactgacacggagccaatgcagatagcacatcagatgctaggggtcgctgggaggattaagggacttaatctgctaggaacacctgtacttgaagtggaggaggctagggggccacagttgctgcttcattaacatagaggttttggatttttttctcttgtggtttgttttttaagtggattggcagactccttgttgcttaagagtggctttctaggcaggccactggcatctgaattcatcattgacaataaatgtaagaaattggaataaaaaagagagacctgctgttattcgcttttgttctccagtgatttgattaactcagggcaaggctgaatatcagagtgtatcgcactgaagaataataatccattcagtaatgttatagttatcctcaatctaaatatgtcaactgtcattttgctacttttcaaataaaatacttgaaaactgtcaaaaaaaaaaaa

SEQ ID NO: 15188 - DNA, 2863 bp, Homo sapiens
tttctgaatgcagaaagctgccgtctggcattggatttgctgtttagtgtgcttttatttatgaaacatagtgatcatgtttcatttgctgtatattggcaagtgctcttggaactggcagaatattatcctttattaatttgcagattgagaggatccagaatccagatctctggaatagctaccaggcaaagaaaaaaactatggatgccaagaatggccagacaatgaatgagaagcaactcttccatgggacagatgccggctccgtgccacacgtcaatcgaaatggctttaaccgcagctatgccggaaagaatgctgtggcatatggaaagggaacctattttgctgtcaatgccaattattctgccaatgatacgtactccagaccagatgcaaatgggagaaagcatgtgtattatgtgcgagtacttactggaatctatacacatggaaatcattcattaattgtgcctccttcaaagaaccctcaaaatcctactgacctgtatgacactgtcacagataatgtgcaccatccaagtttatttgtggcattttatgactaccaagcatacccagagtaccttattacgtttagaaaataacactttggtatccttcccacaaaattattctccatttgtacatatctagttgtaaaacaagttttagcttttttttttaattcctcttaacagatttttctaatatccaaggatcattctttgtcgctgcagtcagtctttcttcagcttctctttcataatggaaatgaacttattatcttgagagcaaataacttggaaaatttaaatgagataatgcagttgcaactgtgtgtccacaagtatggacatcaaatctgtgggaaaagaacaggtttgtattttcaggaaggagagaataacagtcttatagacagagggcacagctaagcacagctgccactgcaggagacaggccccatgtcaggatgccatagtgctgtggggagcacagtattacccagtgggtagggcttctgtcttccctgggagcagggatggtatcttagtcaatttttttcccttgagatgaggtctgtgcctgatgtacaacggatactccataaatgtttgacaaaccaacgaagaatgaaaaaaagcctagtcagactcccatccaaagtaggaactatctctttaacattcttgactcactatcactttacctcaaattgaacagattccatgacggaacttcattcttcacaaactagccagtgacatgtgggacagctctggccagggctctgggactgcagtgtacttgcgctctgcacggtccaggagctgtgatgtggctgtggtctaggggaatcctgcctgccccatggagttgcgcagcacaaccctggctccaattgccagaaggctctttttaatgctgaaccaaaatgtgcctttttttttttttttgagatggagtttcactcttgttgcccaggctggagtgcaatggcgcgatctcagctcactgcagccactgcctcccaggttcaagtgattctcctgcctcagcctcccgagtagctgggattacaggcatgcgctaacacacccagctaattttgtatttttagtagagacgaggtttctccatgttcgacaggctggtctcgaactcccacctcagcctcccaaactgctgggattacaggtgtgagccaccgtgaccagccaatgtgccttcttatagtgtctactcattggtctttgttctgcccagtgataacaatgggataacgcctgctacacatcttcattgtgaaacccttcccctgtgctgagattaaatgaactctaagattattaaatagtatattttccttgacagcctagcgtttgatgattttaaagccttatgtataaataaaccaaaggaagtaagcagtcatattgctaatttgctaactcctatctattgaatggtgaagttttaaaaatttccccaggtaagtttaagattcaaacaccatctattgagcacctacattgtgtgccaggtagtaaaataggtgctttcatacacattgtctcaattcctgtgaggtcagaattatctctgcatttgaaacttgaggaaacatgctcagagtgcaagaagcttccttgcctgagatcacctagaaaggaaccctcagagccggcaactgaatcttggtccctgtgatgtcaagcccattgctctcccactgcagaacatggcctctagattaatgccaccgattcaggaacacctccgacagtcttgaaatacccccatgttgccttgtttgttttttccttctggcttcttctattacagtctcttcattggaagctctgtaggccaaggccagagctgatactgacacggagccaatgcagatagcacatcagatgctaggggtcgctgggaggattaagggacttaatctgctaggaacacctgtacttgaagtggaggaggctagggggccacagttgctgcttcattaacatagaggttttggatttttttctcttgtggtttgttttttaagtggattggcagactccttgttgcttaagagtggctttctaggcaggccactggcatctgaattcatcattgacaataaatgtaagaaattggaataaaaaagagagacctgctgttattcgcttttgttctccagtgatttgattaactcagggcaaggctgaatatcagagtgtatcgcactgaagaataataatccattcagtaatgttatagttatcctcaatctaaatatgtcaactgtcattttgctacttttcaaataaaatacttgaaaactgtcaaaaaaaaaaaa

SEQ ID NO: 15189 - DNA, 5492 bp, Homo sapiens
gtgaacttgaacacatacactgccacagacacaaagggccacagtttatctgttcagcgcctcacgaaatccaaagttgacatccctgcacactggagtgatatgaagcagcagaatttctgtgtggtggagctgctgcctagtgatcctgagtacaacacggtggcaagcaagtttaatcagacctgctcacacttcagaatcattgaactacaggagaatgaagtaatgaaggagggaggcagccccgctgggcagaagtgcttctctcggacagtcttggcccctggcgttgtgctgattgtgcagcagggtgacttggcacggcttcctgtcgatgtggtggtgaatgcatctaatgaggaccttaagcattatggtggcctggccgctgcgctctcaaaagcagctggccctgagctccaggccgactgtgaccagatagtgaagagagagggcagactcctaccgggcaatgccaccatctccaaggcaggaaagctgccctaccaccacgtgatccatgcagtggggccccgctggagcggatatgaggccccgaggtgtgtgtacctattaaggagagctgtgcaactcagtctctgtctagccgaaaaatacaagtaccgatccatagccatcccagctattagttctggagtctttggctttcccttaggccgatgcgtggagaccattgtttctgccatcaaggaaaacttccaattcaagaaggatggacactgcttgaaagaaatctaccttgtggatgtatctgagaagactgttgaggcctttgcagaagctgtgaaaactgtatttaaagccaccctgccagatacagctgccccgccaggtttaccaccagcagcagcggggcctgggaaaacatcatgggaaaaaggaagcctggtgtccccgggaggcctgcagatgctgttggtgaaagagggtgtgcagaatgctaagaccgatgttgttgtcaactccgttcccttggatctcgtgcttagtagagggcctctttctaagtccctcttggaaaaagctggaccagagctccaggaggaattggacacagttggacaaggggtggctgtcagcatgggcacagtgctcaaaaccagcagctggaatctggactgtcgctatgtgcttcacgtggtagctccggagtggagaaatggtagcacatcttcactcaagataatggaagacataatcagagaatgtatggagatcactgagagcttgtccttaaaatcaattgcatttccagcaataggaacaggaaacttgggatttcctaaaaacatattcgctgaattaatcatttcagaggtgttcaaatttagtagcaagaatcagctgaaaactttacaagaggttcactttctgctgcacccgagtgatcatgaaaatattcaggcattttcagatgaatttgccagaagggctaatggaaatctcgtcagtgacaaaattccgaaggctaaagatacacaaggtttttatgggactgtttctagccctgattcaggtgtgtatgaaatgaagattggctccatcatcttccaggtggcttctggagatatcacgaaagaagaggcagatgtgattgtaaattcaacatcaaactcattcaatctcaaagcaggggtctccaaagcaattttagaatgtgctggacaaaatgtagaaagggaatgttctcagcaagctcagcagcgcaaaaatgattatataatcaccggaggtggatttttgaggtgcaagaatatcattcatgtaattggtggaaatgatgtcaagagttcagtttcctctgttttgcaggagtgtgaaaaaaaaaattactcatccatttgcctcccagccattgggacaggaaatgccaaacaacacccagataaggttgctgaagccataattgatgccattgaagactttgtccagaaaggatcagcccagtctgtgaaaaaagttaaagttgttatctttctgcctcaagtactggatgtgttttatgccaacatgaagaaaagagaagggactcagctttcttcccaacagtctgtgatgtctaaacttgcatcatttttgggcttttcaaagcaatctccccaaaaaaagaatcatttggttttggaaaagaaaacagaatcagcaacttttcgggtgtgtggtgaaaatgtcacgtgtgtggaatacgctatctcctggctacaagacctgattgaaaaagaacagtgtccttacaccagtgaagatgagtgcatcaaagactttgatgaaaaggagtatcaggagttgaatgagctgcagaagaagttaaatattaacatttccctggaccataagagacctttgattaaggttttgggaattagcagagatgtgatgcaggctagagatgaaattgaggcgatgatcaagagagttcgattggccaaagaacaggaatcccgggcagattgtatcagtgagtttatagaatggcagtataatgacaataacacttctcattgttttaacaaaatgaccaatctgaaattagaggatgcaaggagagaaaagaaaaaaacagttgatgtcaaaattaatcatcggcactacacagtgaacttgaacacatacactgccacagacacaaagggccacagtttatctgttcagcgcctcacgaaatccaaagttgacatccctgcacactggagtgatatgaagcagcagaatttctgtgtggtggagctgctgcctagtgatcctgagtacaacacggtggcaagcaagtttaatcagacctgctcacacttcagaatagagaagattgagaggatccagaatccagatctctggaatagctaccaggcaaagaaaaaaactatggatgccaagaatggccagacaatgaatgagaagcaactcttccatgggacagatgccggctccgtgccacacgtcaatcgaaatggctttaaccgcagctatgccggaaagaatgctgtggcatatggaaagggaacctattttgctgtcaatgccaattattctgccaatgatacgtactccagaccagatgcaaatgggagaaagcatgtgtattatgtgcgagtacttactggaatctatacacatggaaatcattcattaattgtgcctccttcaaagaaccctcaaaatcctactgacctgtatgacactgtcacagataatgtgcaccatccaagtttatttgtggcattttatgactaccaagcatacccagagtaccttattacgtttagaaaataacactttggtatccttcccacaaaattattctccatttgtacatatctagttgtaaaacaagttttagcttttttttttaattcctcttaacagatttttctaatatccaaggatcattctttgtcgctgcagtcagtctttcttcagcttctctttcataatggaaatgaacttattatcttgagagcaaataacttggaaaatttaaatgagataatgcagttgcaactgtgtgtccacaagtatggacatcaaatctgtgggaaaagaacaggtttgtattttcaggaaggagagaataacagtcttatagacagagggcacagctaagcacagctgccactgcaggagacaggccccatgtcaggatgccatagtgctgtggggagcacagtattacccagtgggtagggcttctgtcttccctgggagcagggatggtatcttagtcaatttttttcccttgagatgaggtctgtgcctgatgtacaacggatactccataaatgtttgacaaaccaacgaagaatgaaaaaaagcctagtcagactcccatccaaagtaggaactatctctttaacattcttgactcactatcactttacctcaaattgaacagattccatgacggaacttcattcttcacaaactagccagtgacatgtgggacagctctggccagggctctgggactgcagtgtacttgcgctctgcacggtccaggagctgtgatgtggctgtggtctaggggaatcctgcctgccccatggagttgcgcagcacaaccctggctccaattgccagaaggctctttttaatgctgaaccaaaatgtgcctttttttttttttttgagatggagtttcactcttgttgcccaggctggagtgcaatggcgcgatctcagctcactgcagccactgcctcccaggttcaagtgattctcctgcctcagcctcccgagtagctgggattacaggcatgcgctaacacacccagctaattttgtatttttagtagagacgaggtttctccatgttcgacaggctggtctcgaactcccacctcagcctcccaaactgctgggattacaggtgtgagccaccgtgaccagccaatgtgccttcttatagtgtctactcattggtctttgttctgcccagtgataacaatgggataacgcctgctacacatcttcattgtgaaacccttcccctgtgctgagattaaatgaactctaagattattaaatagtatattttccttgacagcctagcgtttgatgattttaaagccttatgtataaataaaccaaaggaagtaagcagtcatattgctaatttgctaactcctatctattgaatggtgaagttttaaaaatttccccaggtaagtttaagattcaaacaccatctattgagcacctacattgtgtgccaggtactctgcatttgaaacttgaggaaacatgctcagagtgcaagaagcttccttgcctgagatcacctagaaaggaaccctcagagccggcaactgaatcttggtccctgtgatgtcaagcccattgctctcccactgcagaacatggcctctagattaatgccaccgattcaggaacacctccgacagtcttgaaatacccccatgttgccttgtttgttttttccttctggcttcttctattacagtctcttcattggaagctctgtaggccaaggccagagctgatactgacacggagccaatgcagatagcacatcagatgctaggggtcgctgggaggattaagggacttaatctgctaggaacacctgtacttgaagtggaggaggctagggggccacagttgctgcttcattaacatagaggttttggatttttttctcttgtggtttgttttttaagtggattggcagactccttgttgcttaagagtggctttctaggcaggccactggcatctgaattcatcattgacaataaatgtaagaaattggaataaaaaagagagacctgctgttattcgcttttgttctccagtgatttgattaactcagggcaaggctgaatatcagagtgtatcgcactgaagaataataatccattcagtaatgttatagttatcctcaatctaaatatgtcaactgtcattttgctacttttcaaataaaatacttgaaaactgtcaaaaaaaaaaaa

SEQ ID NO: 15190 - DNA, 5479 bp, Homo sapiens
gtgaacttgaacacatacactgccacagacacaaagggccacagtttatctgttcagcgcctcacgaaatccaaagttgacatccctgcacactggagtgatatgaagcagcagaatttctgtgtggtggagctgctgcctagtgatcctgagtacaacacggtggcaagcaagtttaatcagacctgctcacacttcagaatcattgaactacaggagaatgaagtaatgaaggagggaggcagccccgctgggcagaagtgcttctctcggacagtcttggcccctggcgttgtgctgattgtgcagcagggtgacttggcacggcttcctgtcgatgtggtggtgaatgcatctaatgaggaccttaagcattatggtggcctggccgctgcgctctcaaaagcagctggccctgagctccaggccgactgtgaccagatagtgaagagagagggcagactcctaccgggcaatgccaccatctccaaggcaggaaagctgccctaccaccacgtgatccatgcagtggggccccgctggagcggatatgaggccccgaggtgtgtgtacctattaaggagagctgtgcaactcagtctctgtctagccgaaaaatacaagtaccgatccatagccatcccagctattagttctggagtctttggctttcccttaggccgatgcgtggagaccattgtttctgccatcaaggaaaacttccaattcaagaaggatggacactgcttgaaagaaatctaccttgtggatgtatctgagaagactgttgaggcctttgcagaagctgtgaaaactgtatttaaagccaccctgccagatacagctgccccgccaggtttaccaccagcagcagcggggcctgggaaaacatcatgggaaaaaggaagcctggtgtccccgggaggcctgcagatgctgttggtgaaagagggtgtgcagaatgctaagaccgatgttgttgtcaactccgttcccttggatctcgtgcttagtagagggcctctttctaagtccctcttggaaaaagctggaccagagctccaggaggaattggacacagttggacaaggggtggctgtcagcatgggcacagtgctcaaaaccagcagctggaatctggactgtcgctatgtgcttcacgtggtagctccggagtggagaaatggtagcacatcttcactcaagataatggaagacataatcagagaatgtatggagatcactgagagcttgtccttaaaatcaattgcatttccagcaataggaacaggaaacttgggatttcctaaaaacatattcgctgaattaatcatttcagaggtgttcaaatttagtagcaagaatcagctgaaaactttacaagaggttcactttctgctgcacccgagtgatcatgaaaatattcaggcattttcagatgaatttgccagaagggctaatggaaatctcgtcagtgacaaaattccgaaggctaaagatacacaaggtttttatgggactgtttctagccctgattcaggtgtgtatgaaatgaagattggctccatcatcttccaggtggcttctggagatatcacgaaagaagaggcagatgtgattgtaaattcaacatcaaactcattcaatctcaaagcaggggtctccaaagcaattttagaatgtgctggacaaaatgtagaaagggaatgttctcagcaagctcagcagcgcaaaaatgattatataatcaccggaggtggatttttgaggtgcaagaatatcattcatgtaattggtggaaatgatgtcaagagttcagtttcctctgttttgcaggagtgtgaaaaaaaaaattactcatccatttgcctcccagccattgggacaggaaatgccaaacaacacccagataaggttgctgaagccataattgatgccattgaagactttgtccagaaaggatcagcccagtctgtgaaaaaagttaaagttgttatctttctgcctcaagtactggatgtgttttatgccaacatgaagaaaagagaagggactcagctttcttcccaacagtctgtgatgtctaaacttgcatcatttttgggcttttcaaagcaatctccccaaaaaaagaatcatttggttttggaaaagaaaacagaatcagcaacttttcgggtgtgtggtgaaaatgtcacgtgtgtggaatacgctatctcctggctacaagacctgattgaaaaagaacagtgtccttacaccagtgaagatgagtgcatcaaagactttgatgaaaaggagtatcaggagttgaatgagctgcagaagaagttaaatattaacatttccctggaccataagagacctttgattaaggttttgggaattagcagagatgtgatgcaggctagagatgaaattgaggcgatgatcaagagagttcgattggccaaagaacaggaatcccgggcagattgtatcagtgagtttatagaatggcagtataatgacaataacacttctcattgttttaacaaaatgaccaatctgaaattagaggatgcaaggagagaaaagaaaaaaacagttgatgtcaaaattaatcatcggcactacacagtgaacttgaacacatacactgccacagacacaaagggccacagtttatctgttcagcgcctcacgaaatccaaagttgacatccctgcacactggagtgatatgaagcagcagaatttctgtgtggtggagctgctgcctagtgatcctgagtacaacacggtggcaagcaagtttaatcagacctgctcacacttcagaatagagaagattgagaggatccagaatccagatctctggaatagctaccaggcaaagaaaaaaactatggatgccaagaatggccagacaatgaatgagaagcaactcttccatgggacagatgccggctccgtgccacacgtcaatcgaaatggctttaaccgcagctatgccggaaagaatgctgtggcatatggaaagggaacctattttgctgtcaatgccaattattctgccaatgatacgtactccagaccagatgcaaatgggagaaagcatgtgtattatgtgcgagtacttactggaatctatacacatggaaatcattcattaattgtgcctccttcaaagaaccctcaaaatcctactgacctgtatgacactgtcacagataatgtgcaccatccaagtttatttgtggcattttatgactaccaagcatacccagagtaccttattacgtttagaaaataacactttggtatccttcccacaaaattattctccatttgtacatatctagttgtaaaacaagttttagcttttttttttaattcctcttaacagatttttctaatatccaaggatcattctttgtcgctgcagtcagtctttcttcagcttctctttcataatggaaatgaacttattatcttgagagcaaataacttggaaaatttaaatgagataatgcagttgcaactgtgtgtccacaagtatggacatcaaatctgtgggaaaagaacaggtttgtattttcaggaaggagagaataacagtcttatagacagagggcacagctaagcacagctgccactgcaggagacaggccccatgtcaggatgccatagtgctgtggggagcacagtattacccagtgggtagggcttctgtcttccctgggagcagggatggtatcttagtcaatttttttcccttgagatgaggtctgtgcctgatgtacaacggatactccataaatgtttgacaaaccaacgaagaatgaaaaaaagcctagtcagactcccatccaaagtaggaactatctctttaacattcttgactcactatcactttacctcaaattgaacagattccatgacggaacttcattcttcacaaactagccagtgacatgtgggacagctctggccagggctctgggactgcagtgtacttgcgctctgcacggtccaggagctgtgatgtggctgtggtctaggggaatcctgcctgccccatggagttgcgcagcacaaccctggctccaattgccagaaggctctttttaatgctgaaccaaaatgtgcctttttttttttttttgagatggagtttcactcttgttgcccaggctggagtgcaatggcgcgatctcagctcactgcagccactgcctcccaggttcaagtgattctcctgcctcagcctcccgagtagctgggattacaggcatgcgctaacacacccagctaattttgtatttttagtagagacgaggtttctccatgttcgacaggctggtctcgaactcccacctcagcctcccaaactgctgggattacaggtgtgagccaccgtgaccagccaatgtgccttcttatagtgtctactcattggtctttgttctgcccagtgataacaatgggataacgcctgctacacatcttcattgtgaaacccttcccctgtgctgagattaaatgaactctaagattattaaatagtatattttccttgacagcctagcgtttgatgattttaaagccttatgtataaataaaccaaaggaagtaagcagtcatattgctaatttgctaactcctatctattgaatggtgaagttttaaaaatttccccaggtaagtttaagattcaaacaccatctattgagcacctacattgtgtgccaggtagtaaaataggtgctttcatacacattgtctcaattcctgtgaggtcagaattatctctgcatttgaaacttgaggaaacatgctcagagtgcaagaagcttccttgcctgagatcacctagaaaggaaccctcagagccggcaactgaatcttggtccctgtgatgtcaagcccattgctctcccactgcagaacatggcctctagattaatgccaccgattcaggaacacctccgacagtcttgaaatacccccatgttgccttgtttgttttttccttctggcttcttctattacagtctcttcattggaagctctgtaggccaaggccagagctgatactgacacggagccaatgcagatagcacatcagatgctagggggccacagttgctgcttcattaacatagaggttttggatttttttctcttgtggtttgttttttaagtggattggcagactccttgttgcttaagagtggctttctaggcaggccactggcatctgaattcatcattgacaataaatgtaagaaattggaataaaaaagagagacctgctgttattcgcttttgttctccagtgatttgattaactcagggcaaggctgaatatcagagtgtatcgcactgaagaataataatccattcagtaatgttatagttatcctcaatctaaatatgtcaactgtcattttgctacttttcaaataaaatacttgaaaactgtcaaaaaaaaaaaa

SEQ ID NO: 15191 - DNA, 5357 bp, Homo sapiens
gtgaacttgaacacatacactgccacagacacaaagggccacagtttatctgttcagcgcctcacgaaatccaaagttgacatccctgcacactggagtgatatgaagcagcagaatttctgtgtggtggagctgctgcctagtgatcctgagtacaacacggtggcaagcaagtttaatcagacctgctcacacttcagaatcattgaactacaggagaatgaagtaatgaaggagggaggcagccccgctgggcagaagtgcttctctcggacagtcttggcccctggcgttgtgctgattgtgcagcagggtgacttggcacggcttcctgtcgatgtggtggtgaatgcatctaatgaggaccttaagcattatggtggcctggccgctgcgctctcaaaagcagctggccctgagctccaggccgactgtgaccagatagtgaagagagagggcagactcctaccgggcaatgccaccatctccaaggcaggaaagctgccctaccaccacgtgatccatgcagtggggccccgctggagcggatatgaggccccgaggtgtgtgtacctattaaggagagctgtgcaactcagtctctgtctagccgaaaaatacaagtaccgatccatagccatcccagctattagttctggagtctttggctttcccttaggccgatgcgtggagaccattgtttctgccatcaaggaaaacttccaattcaagaaggatggacactgcttgaaagaaatctaccttgtggatgtatctgagaagactgttgaggcctttgcagaagctgtgaaaactgtatttaaagccaccctgccagatacagctgccccgccaggtttaccaccagcagcagcggggcctgggaaaacatcatgggaaaaaggaagcctggtgtccccgggaggcctgcagatgctgttggtgaaagagggtgtgcagaatgctaagaccgatgttgttgtcaactccgttcccttggatctcgtgcttagtagagggcctctttctaagtccctcttggaaaaagctggaccagagctccaggaggaattggacacagttggacaaggggtggctgtcagcatgggcacagtgctcaaaaccagcagctggaatctggactgtcgctatgtgcttcacgtggtagctccggagtggagaaatggtagcacatcttcactcaagataatggaagacataatcagagaatgtatggagatcactgagagcttgtccttaaaatcaattgcatttccagcaataggaacaggaaacttgggatttcctaaaaacatattcgctgaattaatcatttcagaggtgttcaaatttagtagcaagaatcagctgaaaactttacaagaggttcactttctgctgcacccgagtgatcatgaaaatattcaggcattttcagatgaatttgccagaagggctaatggaaatctcgtcagtgacaaaattccgaaggctaaagatacacaaggtttttatgggactgtttctagccctgattcaggtgtgtatgaaatgaagattggctccatcatcttccaggtggcttctggagatatcacgaaagaagaggcagatgtgattgtaaattcaacatcaaactcattcaatctcaaagcaggggtctccaaagcaattttagaatgtgctggacaaaatgtagaaagggaatgttctcagcaagctcagcagcgcaaaaatgattatataatcaccggaggtggatttttgaggtgcaagaatatcattcatgtaattggtggaaatgatgtcaagagttcagtttcctctgttttgcaggagtgtgaaaaaaaaaattactcatccatttgcctcccagccattgggacaggaaatgccaaacaacacccagataaggttgctgaagccataattgatgccattgaagactttgtccagaaaggatcagcccagtctgtgaaaaaagttaaagttgttatctttctgcctcaagtactggatgtgttttatgccaacatgaagaaaagagaagggactcagctttcttcccaacagtctgtgatgtctaaacttgcatcatttttgggcttttcaaagcaatctccccaaaaaaagaatcatttggttttggaaaagaaaacagaatcagcaacttttcgggtgtgtggtgaaaatgtcacgtgtgtggaatacgctatctcctggctacaagacctgattgaaaaagaacagtgtccttacaccagtgaagatgagtgcatcaaagactttgatgaaaaggagtatcaggagttgaatgagctgcagaagaagttaaatattaacatttccctggaccataagagacctttgattaaggttttgggaattagcagagatgtgatgcaggctagagatgaaattgaggcgatgatcaagagagttcgattggccaaagaacaggaatcccgggcagattgtatcagtgagtttatagaatggcagtataatgacaataacacttctcattgttttaacaaaatgaccaatctgaaattagaggatgcaaggagagaaaagaaaaaaacagttgatgtcaaaattaatcatcggcactacacagtgaacttgaacacatacactgccacagacacaaagggccacagtttatctgttcagcgcctcacgaaatccaaagttgacatccctgcacactggagtgatatgaagcagcagaatttctgtgtggtggagctgctgcctagtgatcctgagtacaacacggtggcaagcaagtttaatcagacctgctcacacttcagaatagagaagattgagaggatccagaatccagatctctggaatagctaccaggcaaagaaaaaaactatggatgccaagaatggccagacaatgaatgagaagcaactcttccatgggacagatgccggctccgtgccacacgtcaatcgaaatggctttaaccgcagctatgccggaaagaatgctgtggcatatggaaagggaacctattttgctgtcaatgccaattattctgccaatgatacgtactccagaccagatgcaaatgggagaaagcatgtgtattatgtgcgagtacttactggaatctatacacatggaaatcattcattaattgtgcctccttcaaagaaccctcaaaatcctactgacctgtatgacactgtcacagataatgtgcaccatccaagtttatttgtggcattttatgactaccaagcatacccagagtaccttattacgtttagaaaataacactttggtatccttcccacaaaattattctccatttgtacatatctagttgtaaaacaagttttagcttttttttttaattcctcttaacagatttttctaatatccaaggatcattctttgtcgctgcagtcagtctttcttcagcttctctttcataatggaaatgaacttattatcttgagagcaaataacttggaaaatttaaatgagataatgcagttgcaactgtgtgtccacaagtatggacatcaaatctgtgggaaaagaacaggtttgtattttcaggaaggagagaataacagtcttatagacagagggcacagctaagcacagctgccactgcaggagacaggccccatgtcaggatgccatagtgctgtggggagcacagtattacccagtgggtagggcttctgtcttccctgggagcagggatggtatcttagtcaatttttttcccttgagatgaggtctgtgcctgatgtacaacggatactccataaatgtttgacaaaccaacgaagaatgaaaaaaagcctagtcagactcccatccaaagtaggaactatctctttaacattcttgactcactatcactttacctcaaattgaacagattccatgacggaacttcattcttcacaaactagccagtgacatgtgggacagctctggccagggctctgggactgcagtgtacttgcgctctgcacggtccaggagctgtgatgtggctgtggtctaggggaatcctgcctgccccatggagttgcgcagcacaaccctggctccaattgccagaaggctctttttaatgctgaaccaaaatgtgcctttttttttttttttgagatggagtttcactcttgttgcccaggctggagtgcaatggcgcgatctcagctcactgcagccactgcctcccaggttcaagtgattctcctgcctcagcctcccgagtagctgggattacaggcatgcgctaacacacccagctaattttgtatttttagtagagacgaggtttctccatgttcgacaggctggtctcgaactcccacctcagcctcccaaactgctgggattacaggtgtgagccaccgtgaccagccaatgtgccttcttatagtgtctactcattggtctttgttctgcccagtgataacaatgggataacgcctgctacacatcttcattgtgaaacccttcccctgtgctgagattaaatgaactctaagattattaaatagtatattttccttgacagcctagcgtttgatgattttaaagccttatgtataaataaaccaaaggaagtaagcagtcatattgctaatttgctaactcctatctattgaatggtgaagttttaaaaatttccccaggtaagtttaagattcaaacaccatctattgagcacctacattgtgtgccaggtagtaaaataggtgctttcatacacattgtctcaattcctgtgaggtcagaattatctctgcatttgaaacttgaggaaacatgctcagagtgcaagaagcttccttgcctgagatcacctagaaaggaaccctcagagccggcaactgaatcttggtccctgtgatgtcaagcccattgctctcccactgcagaacatggcctctagattaatgccaccgattcaggaacacctccgacagtcttgaaatacccccatgttgccttgtttgttttttccttctggcttcttctattacagtctcttcattggaagctctgtaggccaaggccagagctgatactgacacggagccaatgcagatagcacatcagatgctaggggtcgctgggaggattaagggacttaatctgctaggaacacctgtacttgaagtggaggaggctagggggccacagttgctgcttcattaacatagaggttttggatttttttctcttgtggtttgttttttaagtggattggcagactccttgttgcttaagagtggctttctaggcaggccactggcatctgaattcatcattgacaataaatgtaagaaattggaataaaaaagaga

SEQ ID NO: 15192 - DNA, 4879 bp, Homo sapiens
gtgaacttgaacacatacactgccacagacacaaagggccacagtttatctgttcagcgcctcacgaaatccaaagttgacatccctgcacactggagtgatatgaagcagcagaatttctgtgtggtggagctgctgcctagtgatcctgagtacaacacggtggcaagcaagtttaatcagacctgctcacacttcagaatcattgaactacaggagaatgaagtaatgaaggagggaggcagccccgctgggcagaagtgcttctctcggacagtcttggcccctggcgttgtgctgattgtgcagcagggtgacttggcacggcttcctgtcgatgtggtggtgaatgcatctaatgaggaccttaagcattatggtggcctggccgctgcgctctcaaaagcagctggccctgagctccaggccgactgtgaccagatagtgaagagagagggcagactcctaccgggcaatgccaccatctccaaggcaggaaagctgccctaccaccacgtgatccatgcagtggggccccgctggagcggatatgaggccccgaggtgtgtgtacctattaaggagagctgtgcaactcagtctctgtctagccgaaaaatacaagtaccgatccatagccatcccagctattagttctggagtctttggctttcccttaggccgatgcgtggagaccattgtttctgccatcaaggaaaacttccaattcaagaaggatggacactgcttgaaagaaatctaccttgtggatgtatctgagaagactgttgaggcctttgcagaagctgtgaaaactgtatttaaagccaccctgccagatacagctgccccgccaggtttaccaccagcagcagcggggcctgggaaaacatcatgggaaaaaggaagcctggtgtccccgggaggcctgcagatgctgttggtgaaagagggtgtgcagaatgctaagaccgatgttgttgtcaactccgttcccttggatctcgtgcttagtagagggcctctttctaagtccctcttggaaaaagctggaccagagctccaggaggaattggacacagttggacaaggggtggctgtcagcatgggcacagtgctcaaaaccagcagctggaatctggactgtcgctatgtgcttcacgtggtagctccggagtggagaaatggtagcacatcttcactcaagataatggaagacataatcagagaatgtatggagatcactgagagcttgtccttaaaatcaattgcatttccagcaataggaacaggaaacttgggatttcctaaaaacatattcgctgaattaatcatttcagaggtgttcaaatttagtagcaagaatcagctgaaaactttacaagaggttcactttctgctgcacccgagtgatcatgaaaatattcaggcattttcagatgaatttgccagaagggctaatggaaatctcgtcagtgacaaaattccgaaggctaaagatacacaaggtttttatgggactgtttctagccctgattcaggtgtgtatgaaatgaagattggctccatcatcttccaggtggcttctggagatatcacgaaagaagaggcagatgtgattgtaaattcaacatcaaactcattcaatctcaaagcaggggtctccaaagcaattttagaatgtgctggacaaaatgtagaaagggaatgttctcagcaagctcagcagcgcaaaaatgattatataatcaccggaggtggatttttgaggtgcaagaatatcattcatgtaattggtggaaatgatgtcaagagttcagtttcctctgttttgcaggagtgtgaaaaaaaaaattactcatccatttgcctcccagccattgggacaggaaatgccaaacaacacccagataaggttgctgaagccataattgatgccattgaagactttgtccagaaaggatcagcccagtctgtgaaaaaagttaaagttgttatctttctgcctcaagtactggatgtgttttatgccaacatgaagaaaagagaagggactcagctttcttcccaacagtctgtgatgtctaaacttgcatcatttttgggcttttcaaagcaatctccccaaaaaaagaatcatttggttttggaaaagaaaacagaatcagcaacttttcgggtgtgtggtgaaaatgtcacgtgtgtggaatacgctatctcctggctacaagacctgattgaaaaagaacagtgtccttacaccagtgaagatgagtgcatcaaagactttgatgaaaaggagtatcaggagttgaatgagctgcagaagaagttaaatattaacatttccctggaccataagagacctttgattaaggttttgggaattagcagagatgtgatgcaggctagagatgaaattgaggcgatgatcaagagagttcgattggccaaagaacaggaatcccgggcagattgtatcagtgagtttatagaatggcagtataatgacaataacacttctcattgttttaacaaaatgaccaatctgaaattagaggatgcaaggagagaaaagaaaaaaacagttgatgtcaaaattaatcatcggcactacacagtgaacttgaacacatacactgccacagacacaaagggccacagtttatctgttcagcgcctcacgaaatccaaagttgacatccctgcacactggagtgatatgaagcagcagaatttctgtgtggtggagctgctgcctagtgatcctgagtacaacacggtggcaagcaagtttaatcagacctgctcacacttcagaatagagaaggtaagccttctgctagaatgcagtttctggatggtggaaataagttctgtcatggtcctatataaaatccattttcattcacttcctatcacatttttttaaacccagaattagaatttgtatggtaattagtagttctagattctactcatgtgaccataattactgaggcattaagattcttgtgtcagtgattacaatatttgattgtaatatgatagaacactaaagacatatatttactttgtgaagcaagctaatacaaattcaaagatatggctttaaaattggatttgatagctagcaaattccacagagagccatgcagaggctccttagatcaggaccatgttactctgccccattattcacagatcaacagtgcttccttgataaagccagcaggccttttctcgtttatcataattattttgggcaggtgaatgtgatgattcgtgcctgtagtcccagctattgggaggctgaggtggaaggattgcatgagcccaggagtttgacgccagtctgggtaacatagtgagatcctgctctcaaataaaaacaaccaattattttggcatcttcttccatttttaaacatttttgatattgctgtttgatattatattttccttgacttctctagcaaaattattatgatttttttttccttgactaattttcttttcatttttgcaggcacgctgtttctcttccaaacccctaattctagctttattcacgccatttatgcttaaacggtcttttgtctctgtacctcaccagggaatatatttacccttcttggattcaactattagttcaatgtcgatagctcccaaatcaacattaccaacctgggtctttgactcaagctctagaacatactcccagtgagccaccgtgaccagccaatgtgccttcttatagtgtctactcattggtctttgttctgcccagtgataacaatgggataacgcctgctacacatcttcattgtgaaacccttcccctgtgctgagattaaatgaactctaagattattaaatagtatattttccttgacagcctagcgtttgatgattttaaagccttatgtataaataaaccaaaggaagtaagcagtcatattgctaatttgctaactcctatctattgaatggtgaagttttaaaaatttccccaggtaagtttaagattcaaacaccatctattgagcacctacattgtgtgccaggtagtaaaataggtgctttcatacacattgtctcaattcctgtgaggtcagaattatctctgcatttgaaacttgaggaaacatgctcagagtgcaagaagcttccttgcctgagatcacctagaaaggaaccctcagagccggcaactgaatcttggtccctgtgatgtcaagcccattgctctcccactgcagaacatggcctctagattaatgccaccgattcaggaacacctccgacagtcttgaaatacccccatgttgccttgtttgttttttccttctggcttcttctattacagtctcttcattggaagctctgtaggccaaggccagagctgatactgacacggagccaatgcagatagcacatcagatgctaggggtcgctgggaggattaagggacttaatctgctaggaacacctgtacttgaagtggaggaggctagggggccacagttgctgcttcattaacatagaggttttggatttttttctcttgtggtttgttttttaagtggattggcagactccttgttgcttaagagtggctttctaggcaggccactggcatctgaattcatcattgacaataaatgtaagaaattggaataaaaaagagagacctgctgttattcgcttttgttctccagtgatttgattaactcagggcaaggctgaatatcagagtgtatcgcactgaagaataataatccattcagtaatgttatagttatcctcaatctaaatatgtcaactgtcattttgctacttttcaaataaaatacttgaaaactgtcaaaaaaaaaaaa

SEQ ID NO: 15193 - DNA, 4440 bp, Homo sapiens
gtgaacttgaacacatacactgccacagacacaaagggccacagtttatctgttcagcgcctcacgaaatccaaagttgacatccctgcacactggagtgatatgaagcagcagaatttctgtgtggtggagctgctgcctagtgatcctgagtacaacacggtggcaagcaagtttaatcagacctgctcacacttcagaatcattgaactacaggagaatgaagtaatgaaggagggaggcagccccgctgggcagaagtgcttctctcggacagtcttggcccctggcgttgtgctgattgtgcagcagggtgacttggcacggcttcctgtcgatgtggtggtgaatgcatctaatgaggaccttaagcattatggtggcctggccgctgcgctctcaaaagcagctggccctgagctccaggccgactgtgaccagatagtgaagagagagggcagactcctaccgggcaatgccaccatctccaaggcaggaaagctgccctaccaccacgtgatccatgcagtggggccccgctggagcggatatgaggccccgaggtgtgtgtacctattaaggagagctgtgcaactcagtctctgtctagccgaaaaatacaagtaccgatccatagccatcccagctattagttctggagtctttggctttcccttaggccgatgcgtggagaccattgtttctgccatcaaggaaaacttccaattcaagaaggatggacactgcttgaaagaaatctaccttgtggatgtatctgagaagactgttgaggcctttgcagaagctgtgaaaactgtatttaaagccaccctgccagatacagctgccccgccaggtttaccaccagcagcagcggggcctgggaaaacatcatgggaaaaaggaagcctggtgtccccgggaggcctgcagatgctgttggtgaaagagggtgtgcagaatgctaagaccgatgttgttgtcaactccgttcccttggatctcgtgcttagtagagggcctctttctaagtccctcttggaaaaagctggaccagagctccaggaggaattggacacagttggacaaggggtggctgtcagcatgggcacagtgctcaaaaccagcagctggaatctggactgtcgctatgtgcttcacgtggtagctccggagtggagaaatggtagcacatcttcactcaagataatggaagacataatcagagaatgtatggagatcactgagagcttgtccttaaaatcaattgcatttccagcaataggaacaggaaacttgggatttcctaaaaacatattcgctgaattaatcatttcagaggtgttcaaatttagtagcaagaatcagctgaaaactttacaagaggttcactttctgctgcacccgagtgatcatgaaaatattcaggcattttcagatgaatttgccagaagggctaatggaaatctcgtcagtgacaaaattccgaaggctaaagatacacaaggtttttatgggactgtttctagccctgattcaggtgtgtatgaaatgaagattggctccatcatcttccaggtggcttctggagatatcacgaaagaagaggcagatgtgattgtaaattcaacatcaaactcattcaatctcaaagcaggggtctccaaagcaattttagaatgtgctggacaaaatgtagaaagggaatgttctcagcaagctcagcagcgcaaaaatgattatataatcaccggaggtggatttttgaggtgcaagaatatcattcatgtaattggtggaaatgatgtcaagagttcagtttcctctgttttgcaggagtgtgaaaaaaaaaattactcatccatttgcctcccagccattgggacaggaaatgccaaacaacacccagataaggttgctgaagccataattgatgccattgaagactttgtccagaaaggatcagcccagtctgtgaaaaaagttaaagttgttatctttctgcctcaagtactggatgtgttttatgccaacatgaagaaaagagaagggactcagctttcttcccaacagtctgtgatgtctaaacttgcatcatttttgggcttttcaaagcaatctccccaaaaaaagaatcatttggttttggaaaagaaaacagaatcagcaacttttcgggtgtgtggtgaaaatgtcacgtgtgtggaatacgctatctcctggctacaagacctgattgaaaaagaacagtgtccttacaccagtgaagatgagtgcatcaaagactttgatgaaaaggagtatcaggagttgaatgagctgcagaagaagttaaatattaacatttccctggaccataagagacctttgattaaggttttgggaattagcagagatgtgatgcaggctagagatgaaattgaggcgatgatcaagagagttcgattggccaaagaacaggaatcccgggcagattgtatcagtgagtttatagaatggcagtataatgacaataacacttctcattgttttaacaaaatgaccaatctgaaattagaggatgcaaggagagaaaagaaaaaaacagttgatgtcaaaattaatcatcggcactacacagtgaacttgaacacatacactgccacagacacaaagggccacagtttatctgttcagcgcctcacgaaatccaaagttgacatccctgcacactggagtgatatgaagcagcagaatttctgtgtggtggagctgctgcctagtgatcctgagtacaacacggtggcaagcaagtttaatcagacctgctcacacttcagaatagagaaggtgaatgtgatgattcgtgcctgtagtcccagctattgggaggctgaggtggaaggattgcatgagcccaggagtttgacgccagtctgggtaacatagtgagatcctgctctcaaataaaaacaaccaattattttggcatcttcttccatttttaaacatttttgatattgctgtttgatattatattttccttgacttctctagcaaaattattatgatttttttttccttgactaattttcttttcatttttgcaggcacgctgtttctcttccaaacccctaattctagctttattcacgccatttatgcttaaacggtcttttgtctctgtacctcaccagggaatatatttacccttcttggattcaactattagttcaatgtcgatagctcccaaatcaacattaccaacctgggtctttgactcaagctctagaacatactcccagtgagccaccgtgaccagccaatgtgccttcttatagtgtctactcattggtctttgttctgcccagtgataacaatgggataacgcctgctacacatcttcattgtgaaacccttcccctgtgctgagattaaatgaactctaagattattaaatagtatattttccttgacagcctagcgtttgatgattttaaagccttatgtataaataaaccaaaggaagtaagcagtcatattgctaatttgctaactcctatctattgaatggtgaagttttaaaaatttccccaggtaagtttaagattcaaacaccatctattgagcacctacattgtgtgccaggtagtaaaataggtgctttcatacacattgtctcaattcctgtgaggtcagaattatctctgcatttgaaacttgaggaaacatgctcagagtgcaagaagcttccttgcctgagatcacctagaaaggaaccctcagagccggcaactgaatcttggtccctgtgatgtcaagcccattgctctcccactgcagaacatggcctctagattaatgccaccgattcaggaacacctccgacagtcttgaaatacccccatgttgccttgtttgttttttccttctggcttcttctattacagtctcttcattggaagctctgtaggccaaggccagagctgatactgacacggagccaatgcagatagcacatcagatgctaggggtcgctgggaggattaagggacttaatctgctaggaacacctgtacttgaagtggaggaggctagggggccacagttgctgcttcattaacatagaggttttggatttttttctcttgtggtttgttttttaagtggattggcagactccttgttgcttaagagtggctttctaggcaggccactggcatctgaattcatcattgacaataaatgtaagaaattggaataaaaaagagagacctgctgttattcgcttttgttctccagtgatttgattaactcagggcaaggctgaatatcagagtgtatcgcactgaagaataataatccattcagtaatgttatagttatcctcaatctaaatatgtcaactgtcattttgctacttttcaaataaaatacttgaaaactgtcaaaaaaaaaaaa

SEQ ID NO: 15194 - DNA, 5393 bp, Homo sapiens
  misc_feature (5375)..(5375): n is a, c, g, or t
gtgaacttgaacacatacactgccacagacacaaagggccacagtttatctgttcagcgcctcacgaaatccaaagttgacatccctgcacactggagtgatatgaagcagcagaatttctgtgtggtggagctgctgcctagtgatcctgagtacaacacggtggcaagcaagtttaatcagacctgctcacacttcagaatcattgaactacaggagaatgaagtaatgaaggagggaggcagccccgctgggcagaagtgcttctctcggacagtcttggcccctggcgttgtgctgattgtgcagcagggtgacttggcacggcttcctgtcgatgtggtggtgaatgcatctaatgaggaccttaagcattatggtggcctggccgctgcgctctcaaaagcagctggccctgagctccaggccgactgtgaccagatagtgaagagagagggcagactcctaccgggcaatgccaccatctccaaggcaggaaagctgccctaccaccacgtgatccatgcagtggggccccgctggagcggatatgaggccccgaggtgtgtgtacctattaaggagagctgtgcaactcagtctctgtctagccgaaaaatacaagtaccgatccatagccatcccagctattagttctggagtctttggctttcccttaggccgatgcgtggagaccattgtttctgccatcaaggaaaacttccaattcaagaaggatggacactgcttgaaagaaatctaccttgtggatgtatctgagaagactgttgaggcctttgcagaagctgtgaaaactgtatttaaagccaccctgccagatacagctgccccgccaggtttaccaccagcagcagcggggcctgggaaaacatcatgggaaaaaggaagcctggtgtccccgggaggcctgcagatgctgttggtgaaagagggtgtgcagaatgctaagaccgatgttgttgtcaactccgttcccttggatctcgtgcttagtagagggcctctttctaagtccctcttggaaaaagctggaccagagctccaggaggaattggacacagttggacaaggggtggctgtcagcatgggcacagtgctcaaaaccagcagctggaatctggactgtcgctatgtgcttcacgtggtagctccggagtggagaaatggtagcacatcttcactcaagataatggaagacataatcagagaatgtatggagatcactgagagcttgtccttaaaatcaattgcatttccagcaataggaacaggaaacttgggatttcctaaaaacatattcgctgaattaatcatttcagaggtgttcaaatttagtagcaagaatcagctgaaaactttacaagaggttcactttctgctgcacccgagtgatcatgaaaatattcaggcattttcagatgaatttgccagaagggctaatggaaatctcgtcagtgacaaaattccgaaggctaaagatacacaaggtttttatgggactgtttctagccctgattcaggtgtgtatgaaatgaagattggctccatcatcttccaggtggcttctggagatatcacgaaagaagaggcagatgtgattgtaaattcaacatcaaactcattcaatctcaaagcaggggtctccaaagcaattttagaatgtgctggacaaaatgtagaaagggaatgttctcagcaagctcagcagcgcaaaaatgattatataatcaccggaggtggatttttgaggtgcaagaatatcattcatgtaattggtggaaatgatgtcaagagttcagtttcctctgttttgcaggagtgtgaaaaaaaaaattactcatccatttgcctcccagccattgggacaggaaatgccaaacaacacccagataaggttgctgaagccataattgatgccattgaagactttgtccagaaaggatcagcccagtctgtgaaaaaagttaaagttgttatctttctgcctcaagtactggatgtgttttatgccaacatgaagaaaagagaagggactcagctttcttcccaacagtctgtgatgtctaaacttgcatcatttttgggcttttcaaagcaatctccccaaaaaaagaatcatttggttttggaaaagaaaacagaatcagcaacttttcgggtgtgtggtgaaaatgtcacgtgtgtggaatacgctatctcctggctacaagacctgattgaaaaagaacagtgtccttacaccagtgaagatgagtgcatcaaagactttgatgaaaaggagtatcaggagttgaatgagctgcagaagaagttaaatattaacatttccctggaccataagagacctttgattaaggttttgggaattagcagagatgtgatgcaggctagagatgaaattgaggcgatgatcaagagagttcgattggccaaagaacaggaatcccgggcagattgtatcagtgagtttatagaatggcagtataatgacaataacacttctcattgttttaacaaaatgaccaatctgaaattagaggatgcaaggagagaaaagaaaaaaacagttgatgtcaaaattaatcatcggcactacacagtgaacttgaacacatacactgccacagacacaaagggccacagtttatctgttcagcgcctcacgaaatccaaagttgacatccctgcacactggagtgatatgaagcagcagaatttctgtgtggtggagctgctgcctagtgatcctgagtacaacacggtggcaagcaagtttaatcagacctgctcacacttcagaatagagaagattgagaggatccagaatccagatctctggaatagctaccaggcaaagaaaaaaactatggatgccaagaatggccagacaatgaatgagaagcaactcttccatgggacagatgccggctccgtgccacacgtcaatcgaaatggctttaaccgcagctatgccggaaagaatgctgtggcatatggaaagggaacctattttgctgtcaatgccaattattctgccaatgatacgtactccagaccagatgcaaatgggagaaagcatgtgtattatgtgcgagtacttactggaatctatacacatggaaatcattcattaattgtgcctccttcaaagaaccctcaaaatcctactgacctgtatgacactgtcacagataatgtgcaccatccaagtttatttgtggcattttatgactaccaagcatacccagagtaccttattacgtttagaaaataacactttggtatccttcccacaaaattattctccatttgtacatatctagttgtaaaacaagttttagcttttttttttaattcctcttaacagatttttctaatatccaaggatcattctttgtcgctgcagtcagtctttcttcagcttctctttcataatggaaatgaacttattatcttgagagcaaataacttggaaaatttaaatgagataatgcagttgcaactgtgtgtccacaagtatggacatcaaatctgtgggaaaagaacaggtttgtattttcaggaaggagagaataacagtcttatagacagagggcacagctaagcacagctgccactgcaggagacaggccccatgtcaggatgccatagtgctgtggggagcacagtattacccagtgggtagggcttctgtcttccctgggagcagggatggtatcttagtcaatttttttcccttgagatgaggtctgtgcctgatgtacaacggatactccataaatgtttgacaaaccaacgaagaatgaaaaaaagcctagtcagactcccatccaaagtaggaactatctctttaacattcttgactcactatcactttacctcaaattgaacagattccatgacggaacttcattcttcacaaactagccagtgacatgtgggacagctctggccagggctctgggactgcagtgtacttgcgctctgcacggtccaggagctgtgatgtggctgtggtctaggggaatcctgcctgccccatggagttgcgcagcacaaccctggctccaattgccagaaggctctttttaatgctgaaccaaaatgtgcctttttttttttttttgagatggagtttcactcttgttgcccaggctggagtgcaatggcgcgatctcagctcactgcagccactgcctcccaggttcaagtgattctcctgcctcagcctcccgagtagctgggattacaggcatgcgctaacacacccagctaattttgtatttttagtagagacgaggtttctccatgttcgacaggctggtctcgaactcccacctcagcctcccaaactgctgggattacaggtgtgagccaccgtgaccagccaatgtgccttcttatagtgtctactcattggtctttgttctgcccagtgataacaatgggataacgcctgctacacatcttcattgtgaaacccttcccctgtgctgagattaaatgaactctaagattattaaatagtatattttccttgacagcctagcgtttgatgattttaaagccttatgtataaataaaccaaaggaagtaagcagtcatattgctaatttgctaactcctatctattgaatggtgaagttttaaaaatttccccaggtaagtttaagattcaaacaccatctattgagcacctacattgtgtgccaggtagtaaaataggtgctttcatacacattgtctcaattcctgtgaggtcagaattatctctgcatttgaaacttgaggaaacatgctcagagtgcaagaagcttccttgcctgagatcacctagaaaggaaccctcagagccggcaactgaatcttggtccctgtgatgtcaagcccattgctctcccactgcagaacatggcctctagattaatgccaccgattcaggaacacctccgacagtcttgaaatacccccatgttgccttgtttgttttttccttctggcttcttctattacagtctcttcattggaagctctgtaggccaaggccagagctgatactgacacggagccaatgcagatagcacatcagatgctaggggtcgctgggaggattaagggacttaatctgctaggaacacctgtacttgaagtggaggaggctagggggccacagttgctgcttcattaacatagaggttttggatttttttctcttgtggtttgttttttaagtggattggcagactccttgttgcttaagagtggctttctaggcaggccactggcatctgaattcatcattgacaataaatgtaagaaattggaataaaaaagagaaccgtcgattcgagggantcctctggagtcgccgcg

SEQ ID NO: 15195 - DNA, 4910 bp, Homo sapiens
gtgaacttgaacacatacactgccacagacacaaagggccacagtttatctgttcagcgcctcacgaaatccaaagttgacatccctgcacactggagtgatatgaagcagcagaatttctgtgtggtggagctgctgcctagtgatcctgagtacaacacggtggcaagcaagtttaatcagacctgctcacacttcagaatcattgaactacaggagaatgaagtaatgaaggagggaggcagccccgctgggcagaagtgcttctctcggacagtcttggcccctggcgttgtgctgattgtgcagcagggtgacttggcacggcttcctgtcgatgtggtggtgaatgcatctaatgaggaccttaagcattatggtggcctggccgctgcgctctcaaaagcagctggccctgagctccaggccgactgtgaccagatagtgaagagagagggcagactcctaccgggcaatgccaccatctccaaggcaggaaagctgccctaccaccacgtgatccatgcagtggggccccgctggagcggatatgaggccccgaggtgtgtgtacctattaaggagagctgtgcaactcagtctctgtctagccgaaaaatacaagtaccgatccatagccatcccagctattagttctggagtctttggctttcccttaggccgatgcgtggagaccattgtttctgccatcaaggaaaacttccaattcaagaaggatggacactgcttgaaagaaatctaccttgtggatgtatctgagaagactgttgaggcctttgcagaagctgtgaaaactgtatttaaagccaccctgccagatacagctgccccgccaggtttaccaccagcagcagcggggcctgggaaaacatcatgggaaaaaggaagcctggtgtccccgggaggcctgcagatgctgttggtgaaagagggtgtgcagaatgctaagaccgatgttgttgtcaactccgttcccttggatctcgtgcttagtagagggcctctttctaagtccctcttggaaaaagctggaccagagctccaggaggaattggacacagttggacaaggggtggctgtcagcatgggcacagtgctcaaaaccagcagctggaatctggactgtcgctatgtgcttcacgtggtagctccggagtggagaaatggtagcacatcttcactcaagataatggaagacataatcagagaatgtatggagatcactgagagcttgtccttaaaatcaattgcatttccagcaataggaacaggaaacttgggatttcctaaaaacatattcgctgaattaatcatttcagaggtgttcaaatttagtagcaagaatcagctgaaaactttacaagaggttcactttctgctgcacccgagtgatcatgaaaatattcaggcattttcagatgaatttgccagaagggctaatggaaatctcgtcagtgacaaaattccgaaggctaaagatacacaaggtttttatgggactgtttctagccctgattcaggtgtgtatgaaatgaagattggctccatcatcttccaggtggcttctggagatatcacgaaagaagaggcagatgtgattgtaaattcaacatcaaactcattcaatctcaaagcaggggtctccaaagcaattttagaatgtgctggacaaaatgtagaaagggaatgttctcagcaagctcagcagcgcaaaaatgattatataatcaccggaggtggatttttgaggtgcaagaatatcattcatgtaattggtggaaatgatgtcaagagttcagtttcctctgttttgcaggagtgtgaaaaaaaaaattactcatccatttgcctcccagccattgggacaggaaatgccaaacaacacccagataaggttgctgaagccataattgatgccattgaagactttgtccagaaaggatcagcccagtctgtgaaaaaagttaaagttgttatctttctgcctcaagtactggatgtgttttatgccaacatgaagaaaagagaagggactcagctttcttcccaacagtctgtgatgtctaaacttgcatcatttttgggcttttcaaagcaatctccccaaaaaaagaatcatttggttttggaaaagaaaacagaatcagcaacttttcgggtgtgtggtgaaaatgtcacgtgtgtggaatacgctatctcctggctacaagacctgattgaaaaagaacagtgtccttacaccagtgaagatgagtgcatcaaagactttgatgaaaaggagtatcaggagttgaatgagctgcagaagaagttaaatattaacatttccctggaccataagagacctttgattaaggttttgggaattagcagagatgtgatgcaggctagagatgaaattgaggcgatgatcaagagagttcgattggccaaagaacaggaatcccgggcagattgtatcagtgagtttatagaatggcagtataatgacaataacacttctcattgttttaacaaaatgaccaatctgaaattagaggatgcaaggagagaaaagaaaaaaacagttgatgtcaaaattaatcatcggcactacacagtgaacttgaacacatacactgccacagacacaaagggccacagtttatctgttcagcgcctcacgaaatccaaagttgacatccctgcacactggagtgatatgaagcagcagaatttctgtgtggtggagctgctgcctagtgatcctgagtacaacacggtggcaagcaagtttaatcagacctgctcacacttcagaatagagaaggtaagccttctgctagaatgcagtttctggatggtggaaataagttctgtcatggtcctatataaaatccattttcattcacttcctatcacatttttttaaacccagaattagaatttgtatggtaattagtagttctagattctactcatgtgaccataattactgaggcattaagattcttgtgtcagtgattacaatatttgattgtaatatgatagaacactaaagacatatatttactttgtgaagcaagctaatacaaattcaaagatatggctttaaaattggatttgatagctagcaaattccacagagagccatgcagaggctccttagatcaggaccatgttactctgccccattattcacagatcaacagtgcttccttgataaagccagcaggccttttctcgtttatcataattattttgggcaggtgaatgtgatgattcgtgcctgtagtcccagctattgggaggctgaggtggaaggattgcatgagcccaggagtttgacgccagtctgggtaacatagtgagatcctgctctcaaataaaaacaaccaattattttggcatcttcttccatttttaaacatttttgatattgctgtttgatattatattttccttgacttctctagcaaaattattatgatttttttttccttgactaattttcttttcatttttgcaggcacgctgtttctcttccaaacccctaattctagctttattcacgccatttatgcttaaacggtcttttgtctctgtacctcaccagggaatatatttacccttcttggattcaactattagttcaatgtcgatagctcccaaatcaacattaccaacctgggtctttgactcaagctctagaacatactcccagtggcctaaaaaaatctccacttgaggctgggtgagccaccgtgaccagccaatgtgccttcttatagtgtctactcattggtctttgttctgcccagtgataacaatgggataacgcctgctacacatcttcattgtgaaacccttcccctgtgctgagattaaatgaactctaagattattaaatagtatattttccttgacagcctagcgtttgatgattttaaagccttatgtataaataaaccaaaggaagtaagcagtcatattgctaatttgctaactcctatctattgaatggtgaagttttaaaaatttccccaggtaagtttaagattcaaacaccatctattgagcacctacattgtgtgccaggtagtaaaataggtgctttcatacacattgtctcaattcctgtgaggtcagaattatctctgcatttgaaacttgaggaaacatgctcagagtgcaagaagcttccttgcctgagatcacctagaaaggaaccctcagagccggcaactgaatcttggtccctgtgatgtcaagcccattgctctcccactgcagaacatggcctctagattaatgccaccgattcaggaacacctccgacagtcttgaaatacccccatgttgccttgtttgttttttccttctggcttcttctattacagtctcttcattggaagctctgtaggccaaggccagagctgatactgacacggagccaatgcagatagcacatcagatgctaggggtcgctgggaggattaagggacttaatctgctaggaacacctgtacttgaagtggaggaggctagggggccacagttgctgcttcattaacatagaggttttggatttttttctcttgtggtttgttttttaagtggattggcagactccttgttgcttaagagtggctttctaggcaggccactggcatctgaattcatcattgacaataaatgtaagaaattggaataaaaaagagagacctgctgttattcgcttttgttctccagtgatttgattaactcagggcaaggctgaatatcagagtgtatcgcactgaagaataataatccattcagtaatgttatagttatcctcaatctaaatatgtcaactgtcattttgctacttttcaaataaaatacttgaaaactgtcaaaaaaaaaaaa

SEQ ID NO: 15196 - DNA, 2318 bp, Homo sapiens
atcccacatagtgtctgaccacgactggccgtcgtatacaagtaccttattacgtttagaaaataacactttggtatccttcccacaaaattattctccatttgtacatatctagttgtaaaacaagttttagcttttttttttaattcctcttaacagatttttctaatatccaaggatcattctttgtcgctgcagtcagtctttcttcagcttctctttcataatggaaatgaacttattatcttgagagcaaataacttggaaaatttaaatgagataatgcagttgcaactgtgtgtccacaagtatggacatcaaatctgtgggaaaagaacaggtttgtattttcaggaaggagagaataacagtcttatagacagagggcacagctaagcacagctgccactgcaggagacaggccccatgtcaggatgccatagtgctgtggggagcacagtattacccagtgggtagggcttctgtcttccctgggagcagggatggtatcttagtcaatttttttcccttgagatgaggtctgtgcctgatgtacaacggatactccataaatgtttgacaaaccaacgaagaatgaaaaaaagcctagtcagactcccatccaaagtaggaactatctctttaacattcttgactcactatcactttacctcaaattgaacagattccatgacggaacttcattcttcacaaactagccagtgacatgtgggacagctctggccagggctctgggactgcagtgtacttgcgctctgcacggtccaggagctgtgatgtggctgtggtctaggggaatcctgcctgccccatggagttgcgcagcacaaccctggctccaattgccagaaggctctttttaatgctgaaccaaaatgtgcctttttttttttttttgagatggagtttcactcttgttgcccaggctggagtgcaatggcgcgatctcagctcactgcagccactgcctcccaggttcaagtgattctcctgcctcagcctcccgagtagctgggattacaggcatgcgctaacacacccagctaattttgtatttttagtagagacgaggtttctccatgttcgacaggctggtctcgaactcccacctcagcctcccaaactgctgggattacaggtgtgagccaccgtgaccagccaatgtgccttcttatagtgtctactcattggtctttgttctgcccagtgataacaatgggataacgcctgctacacatcttcattgtgaaacccttcccctgtgctgagattaaatgaactctaagattattaaatagtatattttccttgacagcctagcgtttgatgattttaaagccttatgtataaataaaccaaaggaagtaagcagtcatattgctaatttgctaactcctatctattgaatggtgaagttttaaaaatttccccaggtaagtttaagattcaaacaccatctattgagcacctacattgtgtgccaggtagtaaaataggtgctttcatacacattgtctcaattcctgtgaggtcagaattatctctgcatttgaaacttgaggaaacatgctcagagtgcaagaagcttccttgcctgagatcacctagaaaggaaccctcagagccggcaactgaatcttggtccctgtgatgtcaagcccattgctctcccactgcagaacatggcctctagattaatgccaccgattcaggaacacctccgacagtcttgaaatacccccatgttgccttgtttgttttttccttctggcttcttctattacagtctcttcattggaagctctgtaggccaaggccagagctgatactgacacggagccaatgcagatagcacatcagatgctaggggtcgctgggaggattaagggacttaatctgctaggaacacctgtacttgaagtggaggaggctagggggccacagttgctgcttcattaacatagaggttttggatttttttctcttgtggtttgttttttaagtggattggcagactccttgttgcttaagagtggctttctaggcaggccactggcatctgaattcatcattgacaataaatgtaagaaattggaataaaaaagagagacctgctgttattcgcttttgttctccagtgatttgattaactcagggcaaggctgaatatcagagtgtatcgcactgaagaataataatccattcagtaatgttatagttatcctcaatctaaatatgtcaactgtcattttgctacttttcaaataaaatacttgaaaactgtcaaaaaaaaaaaa

SEQ ID NO: 15197 - DNA, 5430 bp, Homo sapiens
gtgaacttgaacacatacactgccacagacacaaagggccacagtttatctgttcagcgcctcacgaaatccaaagttgacatccctgcacactggagtgatatgaagcagcagaatttctgtgtggtggagctgctgcctagtgatcctgagtacaacacggtggcaagcaagtttaatcagacctgctcacacttcagaatcattgaactacaggagaatgaagtaatgaaggagggaggcagccccgctgggcagaagtgcttctctcggacagtcttggcccctggcgttgtgctgattgtgcagcagggtgacttggcacggcttcctgtcgatgtggtggtgaatgcatctaatgaggaccttaagcattatggtggcctggccgctgcgctctcaaaagcagctggccctgagctccaggccgactgtgaccagatagtgaagagagagggcagactcctaccgggcaatgccaccatctccaaggcaggaaagctgccctaccaccacgtgatccatgcagtggggccccgctggagcggatatgaggccccgaggtgtgtgtacctattaaggagagctgtgcaactcagtctctgtctagccgaaaaatacaagtaccgatccatagccatcccagctattagttctggagtctttggctttcccttaggccgatgcgtggagaccattgtttctgccatcaaggaaaacttccaattcaagaaggatggacactgcttgaaagaaatctaccttgtggatgtatctgagaagactgttgaggcctttgcagaagctgtgaaaactgtatttaaagccaccctgccagatacagctgccccgccaggtttaccaccagcagcagcggggcctgggaaaacatcatgggaaaaaggaagcctggtgtccccgggaggcctgcagatgctgttggtgaaagagggtgtgcagaatgctaagaccgatgttgttgtcaactccgttcccttggatctcgtgcttagtagagggcctctttctaagtccctcttggaaaaagctggaccagagctccaggaggaattggacacagttggacaaggggtggctgtcagcatgggcacagtgctcaaaaccagcagctggaatctggactgtcgctatgtgcttcacgtggtagctccggagtggagaaatggtagcacatcttcactcaagataatggaagacataatcagagaatgtatggagatcactgagagcttgtccttaaaatcaattgcatttccagcaataggaacaggaaacttgggatttcctaaaaacatattcgctgaattaatcatttcagaggtgttcaaatttagtagcaagaatcagctgaaaactttacaagaggttcactttctgctgcacccgagtgatcatgaaaatattcaggcattttcagatgaatttgccagaagggctaatggaaatctcgtcagtgacaaaattccgaaggctaaagatacacaaggtttttatgggactgtttctagccctgattcaggtgtgtatgaaatgaagattggctccatcatcttccaggtggcttctggagatatcacgaaagaagaggcagatgtgattgtaaattcaacatcaaactcattcaatctcaaagcaggggtctccaaagcaattttagaatgtgctggacaaaatgtagaaagggaatgttctcagcaagctcagcagcgcaaaaatgattatataatcaccggaggtggatttttgaggtgcaagaatatcattcatgtaattggtggaaatgatgtcaagagttcagtttcctctgttttgcaggagtgtgaaaaaaaaaattactcatccatttgcctcccagccattgggacaggaaatgccaaacaacacccagataaggttgctgaagccataattgatgccattgaagactttgtccagaaaggatcagcccagtctgtgaaaaaagttaaagttgttatctttctgcctcaagtactggatgtgttttatgccaacatgaagaaaagagaagggactcagctttcttcccaacagtctgtgatgtctaaacttgcatcatttttgggcttttcaaagcaatctccccaaaaaaagaatcatttggttttggaaaagaaaacagaatcagcaacttttcgggtgtgtggtgaaaatgtcacgtgtgtggaatacgctatctcctggctacaagacctgattgaaaaagaacagtgtccttacaccagtgaagatgagtgcatcaaagactttgatgaaaaggagtatcaggagttgaatgagctgcagaagaagttaaatattaacatttccctggaccataagagacctttgattaaggttttgggaattagcagagatgtgatgcaggctagagatgaaattgaggcgatgatcaagagagttcgattggccaaagaacaggaatcccgggcagattgtatcagtgagtttatagaatggcagtataatgacaataacacttctcattgttttaacaaaatgaccaatctgaaattagaggatgcaaggagagaaaagaaaaaaacagttgatgtcaaaattaatcatcggcactacacagtgaacttgaacacatacactgccacagacacaaagggccacagtttatctgttcagcgcctcacgaaatccaaagttgacatccctgcacactggagtgatatgaagcagcagaatttctgtgtggtggagctgctgcctagtgatcctgagtacaacacggtggcaagcaagtttaatcagacctgctcacacttcagaatagagaagattgagaggatccagaatccagatctctggaatagctaccaggcaaagaaaaaaactatggatgccaagaatggccagacaatgaatgagaagcaactcttccatgggacagatgccggctccgtgccacacgtcaatcgaaatggctttaaccgcagctatgccggaaagaatgctgtggcatatggaaagggaacctattttgctgtcaatgccaattattctgccaatgatacgtactccagaccagatgcaaatgggagaaagcatgtgtattatgtgcgagtacttactggaatctatacacatggaaatcattcattaattgtgcctccttcaaagaaccctcaaaatcctactgacctgtatgacactgtcacagataatgtgcaccatccaagtttatttgtggcattttatgactaccaagcatacccagagtaccttattacgtttagaaaataacactttggtatccttcccacaaaattattctccatttgtacatatctagttgtaaaacaagttttagcttttttttttaattcctcttaacagatttttctaatatccaaggatcattctttgtcgctgcagtcagtctttcttcagcttctctttcataatggaaatgaacttattatcttgagagcaaataacttggaaaatttaaatgagataatgcagttgcaactgtgtgtccacaagtatggacatcaaatctgtgggaaaagaacaggtttgtattttcaggaaggagagaataacagtcttatagacagagggcacagctaagcacagctgccactgcaggagacaggccccatgtcaggatgccatagtgctgtggggagcacagtattacccagtgggtagggcttctgtcttccctgggagcagggatggtatcttagtcaatttttttcccttgagatgaggtctgtgcctgatgtacaacggatactccataaatgtttgacaaaccaacgaagaatgaaaaaaagcctagtcagactcccatccaaagtaggaactatctctttaacattcttgactcactatcactttacctcaaattgaacagattccatgacggaacttcattcttcacaaactagccagtgacatgtgggacagctctggccagggctctgggactgcagtgtacttgcgctctgcacggtccaggagctgtgatgtggctgtggtctaggggaatcctgcctgccccatggagttgcgcagcacaaccctggctccaattgccagaaggctctttttaatgctgaaccaaaatgtgcctttttttttttttttgagatggagtttcactcttgttgcccaggctggagtgcaatggcgcgatctcagctcactgcagccactgcctcccaggttcaagtgattctcctgcctcagcctcccgagtagctgggattacaggcatgcgctaacacacccagctaattttgtatttttagtagagacgaggtttctccatgttcgacaggctggtctcgaactcccacctcagcctcccaaactgctgggattacaggtgtgagccaccgtgaccagccaatgtgccttcttatagtgtctactcattggtctttgttctgcccagtgataacaatgggataacgcctgctacacatcttcattgtgaaacccttcccctgtgctgagattaaatgaactctaagattattaaatagtatattttccttgacagcctagcgtttgatgattttaaagccttatgtataaataaaccaaaggaagtaagcagtcatattgctaatttgctaactcctatctattgaatggtgaagttttaaaaatttccccaggtaagtttaagattcaaacaccatctattgagcacctacattgtgtgccaggtagtaaaataggtgctttcatacacattgtctcaattcctgtgaggtcagaattatctctgcatttgaaacttgaggaaacatgctcagagtgcaagaagcttccttgcctgagatcacctagaaaggaaccctcagagccggcaactgaatcttggtccctgtgatgtcaagcccattgctctcccactgcagaacatggcctctagattaatgccaccgattcaggaacacctccgacagtcttgaaatacccccatgttgccttgtttgttttttccttctggcttcttctattacagtctcttcattggaagctctgtaggccaaggccagagctgatactgacacggagccaatgcagatagcacatcagatgctaggggtcgctgggaggattaagtggattggcagactccttgttgcttaagagtggctttctaggcaggccactggcatctgaattcatcattgacaataaatgtaagaaattggaataaaaaagagagacctgctgttattcgcttttgttctccagtgatttgattaactcagggcaaggctgaatatcagagtgtatcgcactgaagaataataatccattcagtaatgttatagttatcctcaatctaaatatgtcaactgtcattttgctacttttcaaataaaatacttgaaaactgtcaaaaaaaaaaaa

SEQ ID NO: 15198 - DNA, 5678 bp, Homo sapiens
  misc_feature (5486)..(5486): n is a, c, g, or t
gtgaacttgaacacatacactgccacagacacaaagggccacagtttatctgttcagcgcctcacgaaatccaaagttgacatccctgcacactggagtgatatgaagcagcagaatttctgtgtggtggagctgctgcctagtgatcctgagtacaacacggtggcaagcaagtttaatcagacctgctcacacttcagaatcattgaactacaggagaatgaagtaatgaaggagggaggcagccccgctgggcagaagtgcttctctcggacagtcttggcccctggcgttgtgctgattgtgcagcagggtgacttggcacggcttcctgtcgatgtggtggtgaatgcatctaatgaggaccttaagcattatggtggcctggccgctgcgctctcaaaagcagctggccctgagctccaggccgactgtgaccagatagtgaagagagagggcagactcctaccgggcaatgccaccatctccaaggcaggaaagctgccctaccaccacgtgatccatgcagtggggccccgctggagcggatatgaggccccgaggtgtgtgtacctattaaggagagctgtgcaactcagtctctgtctagccgaaaaatacaagtaccgatccatagccatcccagctattagttctggagtctttggctttcccttaggccgatgcgtggagaccattgtttctgccatcaaggaaaacttccaattcaagaaggatggacactgcttgaaagaaatctaccttgtggatgtatctgagaagactgttgaggcctttgcagaagctgtgaaaactgtatttaaagccaccctgccagatacagctgccccgccaggtttaccaccagcagcagcggggcctgggaaaacatcatgggaaaaaggaagcctggtgtccccgggaggcctgcagatgctgttggtgaaagagggtgtgcagaatgctaagaccgatgttgttgtcaactccgttcccttggatctcgtgcttagtagagggcctctttctaagtccctcttggaaaaagctggaccagagctccaggaggaattggacacagttggacaaggggtggctgtcagcatgggcacagtgctcaaaaccagcagctggaatctggactgtcgctatgtgcttcacgtggtagctccggagtggagaaatggtagcacatcttcactcaagataatggaagacataatcagagaatgtatggagatcactgagagcttgtccttaaaatcaattgcatttccagcaataggaacaggaaacttgggatttcctaaaaacatattcgctgaattaatcatttcagaggtgttcaaatttagtagcaagaatcagctgaaaactttacaagaggttcactttctgctgcacccgagtgatcatgaaaatattcaggcattttcagatgaatttgccagaagggctaatggaaatctcgtcagtgacaaaattccgaaggctaaagatacacaaggtttttatgggactgtttctagccctgattcaggtgtgtatgaaatgaagattggctccatcatcttccaggtggcttctggagatatcacgaaagaagaggcagatgtgattgtaaattcaacatcaaactcattcaatctcaaagcaggggtctccaaagcaattttagaatgtgctggacaaaatgtagaaagggaatgttctcagcaagctcagcagcgcaaaaatgattatataatcaccggaggtggatttttgaggtgcaagaatatcattcatgtaattggtggaaatgatgtcaagagttcagtttcctctgttttgcaggagtgtgaaaaaaaaaattactcatccatttgcctcccagccattgggacaggaaatgccaaacaacacccagataaggttgctgaagccataattgatgccattgaagactttgtccagaaaggatcagcccagtctgtgaaaaaagttaaagttgttatctttctgcctcaagtactggatgtgttttatgccaacatgaagaaaagagaagggactcagctttcttcccaacagtctgtgatgtctaaacttgcatcatttttgggcttttcaaagcaatctccccaaaaaaagaatcatttggttttggaaaagaaaacagaatcagcaacttttcgggtgtgtggtgaaaatgtcacgtgtgtggaatacgctatctcctggctacaagacctgattgaaaaagaacagtgtccttacaccagtgaagatgagtgcatcaaagactttgatgaaaaggagtatcaggagttgaatgagctgcagaagaagttaaatattaacatttccctggaccataagagacctttgattaaggttttgggaattagcagagatgtgatgcaggctagagatgaaattgaggcgatgatcaagagagttcgattggccaaagaacaggaatcccgggcagattgtatcagtgagtttatagaatggcagtataatgacaataacacttctcattgttttaacaaaatgaccaatctgaaattagaggatgcaaggagagaaaagaaaaaaacagttgatgtcaaaattaatcatcggcactacacagtgaacttgaacacatacactgccacagacacaaagggccacagtttatctgttcagcgcctcacgaaatccaaagttgacatccctgcacactggagtgatatgaagcagcagaatttctgtgtggtggagctgctgcctagtgatcctgagtacaacacggtggcaagcaagtttaatcagacctgctcacacttcagaatagagaagattgagaggatccagaatccagatctctggaatagctaccaggcaaagaaaaaaactatggatgccaagaatggccagacaatgaatgagaagcaactcttccatgggacagatgccggctccgtgccacacgtcaatcgaaatggctttaaccgcagctatgccggaaagaatgctgtggcatatggaaagggaacctattttgctgtcaatgccaattattctgccaatgatacgtactccagaccagatgcaaatgggagaaagcatgtgtattatgtgcgagtacttactggaatctatacacatggaaatcattcattaattgtgcctccttcaaagaaccctcaaaatcctactgacctgtatgacactgtcacagataatgtgcaccatccaagtttatttgtggcattttatgactaccaagcatacccagagtaccttattacgtttagaaaataacactttggtatccttcccacaaaattattctccatttgtacatatctagttgtaaaacaagttttagcttttttttttaattcctcttaacagatttttctaatatccaaggatcattctttgtcgctgcagtcagtctttcttcagcttctctttcataatggaaatgaacttattatcttgagagcaaataacttggaaaatttaaatgagataatgcagttgcaactgtgtgtccacaagtatggacatcaaatctgtgggaaaagaacaggtttgtattttcaggaaggagagaataacagtcttatagacagagggcacagctaagcacagctgccactgcaggagacaggccccatgtcaggatgccatagtgctgtggggagcacagtattacccagtgggtagggcttctgtcttccctgggagcagggatggtatcttagtcaatttttttcccttgagatgaggtctgtgcctgatgtacaacggatactccataaatgtttgacaaaccaacgaagaatgaaaaaaagcctagtcagactcccatccaaagtaggaactatctctttaacattcttgactcactatcactttacctcaaattgaacagattccatgacggaacttcattcttcacaaactagccagtgacatgtgggacagctctggccagggctctgggactgcagtgtacttgcgctctgcacggtccaggagctgtgatgtggctgtggtctaggggaatcctgcctgccccatggagttgcgcagcacaaccctggctccaattgccagaaggctctttttaatgctgaaccaaaatgtgcctttttttttttttttgagatggagtttcactcttgttgcccaggctggagtgcaatggcgcgatctcagctcactgcagccactgcctcccaggttcaagtgattctcctgcctcagcctcccgagtagctgggattacaggcatgcgctaacacacccagctaattttgtatttttagtagagacgaggtttctccatgttcgacaggctggtctcgaactcccacctcagcctcccaaactgctgggattacaggtgtgagccaccgtgaccagccaatgtgccttcttatagtgtctactcattggtctttgttctgcccagtgataacaatgggataacgcctgctacacatcttcattgtgaaacccttcccctgtgctgagattaaatgaactctaagattattaaatagtatattttccttgacagcctagcgtttgatgattttaaagccttatgtataaataaaccaaaggaagtaagcagtcatattgctaatttgctaactcctatctattgaatggtgaagttttaaaaatttccccaggtaagtttaagattcaaacaccatctattgagcacctacattgtgtgccaggtagtaaaataggtgctttcatacacattgtctcaattcctgtgaggtcagaattatctctgcatttgaaacttgaggaaacatgctcagagtgcaagaagcttccttgcctgagatcacctagaaaggaaccctcagagccggcaactgaatcttggtccctgtgatgtcaagcccattgctctcccactgcagaacatggcctctagattaatgccaccgattcaggaacacctccgacagtcttgaaatacccccatgttgccttgtttgttttttccttctggcttcttctattacagtctcttcattggaagctctgtaggccaaggccagagctgatactgacacggagccaatgcagatagcacatcagatgctaggggtcgctgggaggattaagtggattggcagactccttgttgcttaagagtggctttctaggcaggccactggcatctgaattcatcattgacaataaatgtaagaaattggaataaaaaagagagacctgctgttattcgcttttgttctccagtgatttgattaactcagggcaaggctgaatatcagagtgtatcgcactgaagaataataatccattcagtaatgttatagttatcctcaatctaaatatgtcaactgtcattttgctacttttcaaataaaatacttgagcaatggggggagaaagaggaatttatcttcttgacctctagtcccttgattgaaaatttaactctgatttaaggnagccgttgggtaagccagattccacatcccactaaactgcctggaagaggtgggaggagagcagccattaaggtatgaggtacagagtcccatcaggtgagacccatgtctgtagccactgaggttcctgttgcaacaggtgagatgtgatcttcccaaagccgcagcttcttccgcaggaggctgagacag

SEQ ID NO: 15199 - DNA, 1887 bp, Homo sapiens
aaaatccgcggtaccggttcgcatgttcctattacccagtgggtagggcttctgtcttccctgggagcagggatggtatcttagtcaatttttttcccttgagatgaggtctgtgcctgatgtacaacggatactccataaatgtttgacaaaccaacgaagaatgaaaaaaagcctagtcagactcccatccaaagtaggaactatctctttaacattcttgactcactatcactttacctcaaattgaacagattccatgacggaacttcattcttcacaaactagccagtgacatgtgggacagctctggccagggctctgggactgcagtgtacttgcgctctgcacggtccaggagctgtgatgtggctgtggtctaggggaatcctgcctgccccatggagttgcgcagcacaaccctggctccaattgccagaaggctctttttaatgctgaaccaaaatgtgcctttttttttttttttgagatggagtttcactcttgttgcccaggctggagtgcaatggcgcgatctcagctcactgcagccactgcctcccaggttcaagtgattctcctgcctcagcctcccgagtagctgggattacaggcatgcgctaacacacccagctaattttgtatttttagtagagacgaggtttctccatgttcgacaggctggtctcgaactcccacctcagcctcccaaactgctgggattacaggtgtgagccaccgtgaccagccaatgtgccttcttatagtgtctactcattggtctttgttctgcccagtgataacaatgggataacgcctgctacacatcttcattgtgaaacccttcccctgtgctgagattaaatgaactctaagattattaaatagtatattttccttgacagcctagcgtttgatgattttaaagccttatgtataaataaaccaaaggaagtaagcagtcatattgctaatttgctaactcctatctattgaatggtgaagttttaaaaatttccccaggtaagtttaagattcaaacaccatctattgagcacctacattgtgtgccaggtagtaaaataggtgctttcatacacattgtctcaattcctgtgaggtcagaattatctctgcatttgaaacttgaggaaacatgctcagagtgcaagaagcttccttgcctgagatcacctagaaaggaaccctcagagccggcaactgaatcttggtccctgtgatgtcaagcccattgctctcccactgcagaacatggcctctagattaatgccaccgattcaggaacacctccgacagtcttgaaatacccccatgttgccttgtttgttttttccttctggcttcttctattacagtctcttcattggaagctctgtaggccaaggccagagctgatactgacacggagccaatgcagatagcacatcagatgctaggggtcgctgggaggattaagggacttaatctgctaggaacacctgtacttgaagtggaggaggctagggggccacagttgctgcttcattaacatagaggttttggatttttttctcttgtggtttgttttttaagtggattggcagactccttgttgcttaagagtggctttctaggcaggccactggcatctgaattcatcattgacaataaatgtaagaaattggaataaaaaagagagacctgctgttattcgcttttgttctccagtgatttgattaactcagggcaaggctgaatatcagagtgtatcgcactgaagaataataatccattcagtaatgttatagttatcctcaatctaaatatgtcaactgtcattttgctacttttcaaataaaatacttgaaaactgtcaaaaaaaaaaaa

SEQ ID NO: 15200 - DNA, 5189 bp, Homo sapiens
gtgaacttgaacacatacactgccacagacacaaagggccacagtttatctgttcagcgcctcacgaaatccaaagttgacatccctgcacactggagtgatatgaagcagcagaatttctgtgtggtggagctgctgcctagtgatcctgagtacaacacggtggcaagcaagtttaatcagacctgctcacacttcagaatcattgaactacaggagaatgaagtaatgaaggagggaggcagccccgctgggcagaagtgcttctctcggacagtcttggcccctggcgttgtgctgattgtgcagcagggtgacttggcacggcttcctgtcgatgtggtggtgaatgcatctaatgaggaccttaagcattatggtggcctggccgctgcgctctcaaaagcagctggccctgagctccaggccgactgtgaccagatagtgaagagagagggcagactcctaccgggcaatgccaccatctccaaggcaggaaagctgccctaccaccacgtgatccatgcagtggggccccgctggagcggatatgaggccccgaggtgtgtgtacctattaaggagagctgtgcaactcagtctctgtctagccgaaaaatacaagtaccgatccatagccatcccagctattagttctggagtctttggctttcccttaggccgatgcgtggagaccattgtttctgccatcaaggaaaacttccaattcaagaaggatggacactgcttgaaagaaatctaccttgtggatgtatctgagaagactgttgaggcctttgcagaagctgtgaaaactgtatttaaagccaccctgccagatacagctgccccgccaggtttaccaccagcagcagcggggcctgggaaaacatcatgggaaaaaggaagcctggtgtccccgggaggcctgcagatgctgttggtgaaagagggtgtgcagaatgctaagaccgatgttgttgtcaactccgttcccttggatctcgtgcttagtagagggcctctttctaagtccctcttggaaaaagctggaccagagctccaggaggaattggacacagttggacaaggggtggctgtcagcatgggcacagtgctcaaaaccagcagctggaatctggactgtcgctatgtgcttcacgtggtagctccggagtggagaaatggtagcacatcttcactcaagataatggaagacataatcagagaatgtatggagatcactgagagcttgtccttaaaatcaattgcatttccagcaataggaacaggaaacttgggatttcctaaaaacatattcgctgaattaatcatttcagaggtgttcaaatttagtagcaagaatcagctgaaaactttacaagaggttcactttctgctgcacccgagtgatcatgaaaatattcaggcattttcagatgaatttgccagaagggctaatggaaatctcgtcagtgacaaaattccgaaggctaaagatacacaaggtttttatgggactgtttctagccctgattcaggtgtgtatgaaatgaagattggctccatcatcttccaggtggcttctggagatatcacgaaagaagaggcagatgtgattgtaaattcaacatcaaactcattcaatctcaaagcaggggtctccaaagcaattttagaatgtgctggacaaaatgtagaaagggaatgttctcagcaagctcagcagcgcaaaaatgattatataatcaccggaggtggatttttgaggtgcaagaatatcattcatgtaattggtggaaatgatgtcaagagttcagtttcctctgttttgcaggagtgtgaaaaaaaaaattactcatccatttgcctcccagccattgggacaggaaatgccaaacaacacccagataaggttgctgaagccataattgatgccattgaagactttgtccagaaaggatcagcccagtctgtgaaaaaagttaaagttgttatctttctgcctcaagtactggatgtgttttatgccaacatgaagaaaagagaagggactcagctttcttcccaacagtctgtgatgtctaaacttgcatcatttttgggcttttcaaagcaatctccccaaaaaaagaatcatttggttttggaaaagaaaacagaatcagcaacttttcgggtgtgtggtgaaaatgtcacgtgtgtggaatacgctatctcctggctacaagacctgattgaaaaagaacagtgtccttacaccagtgaagatgagtgcatcaaagactttgatgaaaaggagtatcaggagttgaatgagctgcagaagaagttaaatattaacatttccctggaccataagagacctttgattaaggttttgggaattagcagagatgtgatgcaggctagagatgaaattgaggcgatgatcaagagagttcgattggccaaagaacaggaatcccgggcagattgtatcagtgagtttatagaatggcagtataatgacaataacacttctcattgttttaacaaaatgaccaatctgaaattagaggatgcaaggagagaaaagaaaaaaacagttgatgtcaaaattaatcatcggcactacacagtgaacttgaacacatacactgccacagacacaaagggccacagtttatctgttcagcgcctcacgaaatccaaagttgacatccctgcacactggagtgatatgaagcagcagaatttctgtgtggtggagctgctgcctagtgatcctgagtacaacacggtggcaagcaagtttaatcagacctgctcacacttcagaatagagaagattgagaggatccagaatccagatctctggaatagctaccaggcaaagaaaaaaactatggatgccaagaatggccagacaatgaatgagaagcaactcttccatgggacagatgccggctccgtgccacacgtcaatcgaaatggctttaaccgcagctatgccggaaagaatgctgtggcatatggaaagggaacctattttgctgtcaatgccaattattctgccaatgatacgtactccagaccagatgcaaatgggagaaagcatgtgtattatgtgcgagtacttactggaatctatacacatggaaatcattcattaattgtgcctccttcaaagaaccctcaaaatcctactgacctgtatgacactgtcacagataatgtgcaccatccaagtttatttgtggcattttatgactaccaagcatacccagagtaccttattacgtttagaaaataacactttggtatccttcccacaaaattattctccatttgtacatatctagttgtaaaacaagttttagcttttttttttaattcctcttaacagatttttctaatatccaaggatcattctttgtcgctgcagtcagtctttcttcagcttctctttcataatggaaatgaacttattatcttgagagcaaataacttggaaaatttaaatgagataatgcagttgcaactgtgtgtccacaagtatggacatcaaatctgtgggaaaagaacaggtttgtattttcaggaaggagagaataacagtcttatagacagagggcacagctaagcacagctgccactgcaggagacaggccccatgtcaggatgccatagtgctgtggggagcacagtattacccagtgggtagggcttctgtcttccctgggagcagggatggtatcttagtcaatttttttcccttgagatgaggtctgtgcctgatgtacaacggatactccataaatgtttgacaaaccaacgaagaatgaaaaaaagcctagtcagactcccatccaaagtaggaactatctctttaacattcttgactcactatcactttacctcaaattgaacagattccatgacggaacttcattcttcacaaactagccagtgacatgtgggacagctctggccagggctctgggactgcagtgtacttgcgctctgcacggtccaggagctgtgatgtggctgtggtctaggggaatcctgcctgccccatggagttgcgcagcacaaccctggctccaattgccagaaggctctttttaatgctgaaccaaaatgtgcctttttttttttttttgagatggagtttcactcttgttgcccaggctggagtgcaatggcgcgatctcagctcactgcagccactgcctcccaggttcaagtgattctcctgcctcagcctcccgagtagctgggattacaggcatgcgctaacacacccagctaattttgtatttttagtagagacgaggtttctccatgttcgacaggctggtctcgaactcccacctcagcctcccaaactgctgggattacaggtgtgagccaccgtgaccagccaatgtgccttcttatagtgtctactcattggtctttgttctgcccagtgataacaatgggataacgcctgctacacatcttcattgtgaaacccttcccctgtgctgagattaaatgaactctaagattattaaatagtatattttccttgacagcctagcgtttgatgattttaaagccttatgtataaataaaccaaaggaagtaagcagtcatattgctaatttgctaactcctatctattgaatggtgaagttttaaaaatttccccaggtaagtttaagattcaaacaccatctattgagcacctacattgtgtgccaggtagtaaaataggtgctttcatacacattgtctcaattcctgtgaggtcagaattatctctgcatttgaaacttgaggaaacatgctcagagtgcaagaagcttccttgcctgagatcacctagaaaggaaccctcagagccggcaactgaatcttggtccctgtgatgtcaagcccattgctctcccactgcagaacatggcctctagattaatgccaccgattcaggaacacctccgacagtcttgaaatacccccatgttgccttgtttgttttttccttctggcttcttctattacagtctcttcattggaagctctgtaggccaaggccagagctgatactgacacggagccaatgcagatagcacatcagatgctaggggtcgctgggaggattaaggggtttgtattttctggaaggagagaataacagtctataacaaaggacaccgt

SEQ ID NO: 15201 - DNA, 1262 bp, Homo sapiens
gagctcggtaccgaattcatccagcgtagagacgaggtttctccatgttcgacaggctggtctcgaactcccacctcagcctcccaaactgctgggattacaggtgtgagccaccgtgaccagccaatgtgccttcttatagtgtctactcattggtctttgttctgcccagtgataacaatgggataacgcctgctacacatcttcattgtgaaacccttcccctgtgctgagattaaatgaactctaagattattaaatagtatattttccttgacagcctagcgtttgatgattttaaagccttatgtataaataaaccaaaggaagtaagcagtcatattgctaatttgctaactcctatctattgaatggtgaagttttaaaaatttccccaggtaagtttaagattcaaacaccatctattgagcacctacattgtgtgccaggtagtaaaataggtgctttcatacacattgtctcaattcctgtgaggtcagaattatctctgcatttgaaacttgaggaaacatgctcagagtgcaagaagcttccttgcctgagatcacctagaaaggaaccctcagagccggcaactgaatcttggtccctgtgatgtcaagcccattgctctcccactgcagaacatggcctctagattaatgccaccgattcaggaacacctccgacagtcttgaaatacccccatgttgccttgtttgttttttccttctggcttcttctattacagtctcttcattggaagctctgtaggccaaggccagagctgatactgacacggagccaatgcagatagcacatcagatgctaggggtcgctgggaggattaagggacttaatctgctaggaacacctgtacttgaagtggaggaggctagggggccacagttgctgcttcattaacatagaggttttggatttttttctcttgtggtttgttttttaagtggattggcagactccttgttgcttaagagtggctttctaggcaggccactggcatctgaattcatcattgacaataaatgtaagaaattggaataaaaaagagagacctgctgttattcgcttttgttctccagtgatttgattaactcagggcaaggctgaatatcagagtgtatcgcactgaagaataataatccattcagtaatgttatagttatcctcaatctaaatatgtcaactgtcattttgctacttttcaaataaaatacttgaaaactgtcaaaaaaaaaaaa

SEQ ID NO: 15202 - DNA, 1333 bp, Homo sapiens
  misc_feature (173)..(173): n is a, c, g, or t
gatttcaggctgcagaatggatggtgtgtaacaggcatgaaaatttcatcttgtaaatctccattagagactttgggtgaccaggtgcgttaccaatgagcagtaatatttttaaagaactcttcttttctaagaggtagatctcaacaatggcttaaaatattcagtaaacncaggtgagccaccgtgaccagccaatgtgccttcttatagtgtctactcattggtctttgttctgcccagtgataacaatgggataacgcctgctacacatcttcattgtgaaacccttcccctgtgctgagattaaatgaactctaagattattaaatagtatattttccttgacagcctagcgtttgatgattttaaagccttatgtataaataaaccaaaggaagtaagcagtcatattgctaatttgctaactcctatctattgaatggtgaagttttaaaaatttccccaggtaagtttaagattcaaacaccatctattgagcacctacattgtgtgccaggtagtaaaataggtgctttcatacacattgtctcaattcctgtgaggtcagaattatctctgcatttgaaacttgaggaaacatgctcagagtgcaagaagcttccttgcctgagatcacctagaaaggaaccctcagagccggcaactgaatcttggtccctgtgatgtcaagcccattgctctcccactgcagaacatggcctctagattaatgccaccgattcaggaacacctccgacagtcttgaaatacccccatgttgccttgtttgttttttccttctggcttcttctattacagtctcttcattggaagctctgtaggccaaggccagagctgatactgacacggagccaatgcagatagcacatcagatgctaggggtcgctgggaggattaagggacttaatctgctaggaacacctgtacttgaagtggaggaggctagggggccacagttgctgcttcattaacatagaggttttggatttttttctcttgtggtttgttttttaagtggattggcagactccttgttgcttaagagtggctttctaggcaggccactggcatctgaattcatcattgacaataaatgtaagaaattggaataaaaaagagagacctgctgttattcgcttttgttctccagtgatttgattaactcagggcaaggctgaatatcagagtgtatcgcactgaagaataataatccattcagtaatgttatagttatcctcaatctaaatatgtcaactgtcattttgctacttttcaaataaaatacttgaaaactgtcaaaaaaaaaaaa

SEQ ID NO: 15203 - DNA, 1288 bp, Homo sapiens
  misc_feature (56)..(56): n is a, c, g, or t
cgtgcagtcatacggactatctccagatgtgatctctgatgtatagtcacgctgtncttattgccaaataatttcccacatacctcacacgcatatggcctttctccagtgtgaactctctcatgaacgagaagatgatacttcctgttaaataatttcccacattccctacaattgtaaggtctttgttctgcccagtgataacaatgggataacgcctgctacacatcttcattgtgaaacccttcccctgtgctgagattaaatgaactctaagattattaaatagtatattttccttgacagcctagcgtttgatgattttaaagccttatgtataaataaaccaaaggaagtaagcagtcatattgctaatttgctaactcctatctattgaatggtgaagttttaaaaatttccccaggtaagtttaagattcaaacaccatctattgagcacctacattgtgtgccaggtagtaaaataggtgctttcatacacattgtctcaattcctgtgaggtcagaattatctctgcatttgaaacttgaggaaacatgctcagagtgcaagaagcttccttgcctgagatcacctagaaaggaaccctcagagccggcaactgaatcttggtccctgtgatgtcaagcccattgctctcccactgcagaacatggcctctagattaatgccaccgattcaggaacacctccgacagtcttgaaatacccccatgttgccttgtttgttttttccttctggcttcttctattacagtctcttcattggaagctctgtaggccaaggccagagctgatactgacacggagccaatgcagatagcacatcagatgctaggggtcgctgggaggattaagggacttaatctgctaggaacacctgtacttgaagtggaggaggctagggggccacagttgctgcttcattaacatagaggttttggatttttttctcttgtggtttgttttttaagtggattggcagactccttgttgcttaagagtggctttctaggcaggccactggcatctgaattcatcattgacaataaatgtaagaaattggaataaaaaagagagacctgctgttattcgcttttgttctccagtgatttgattaactcagggcaaggctgaatatcagagtgtatcgcactgaagaataataatccattcagtaatgttatagttatcctcaatctaaatatgtcaactgtcattttgctacttttcaaataaaatacttgaaaactgtcaaaaaaaaaaaa

SEQ ID NO: 15204 - DNA, 1446 bp, Homo sapiens
gtgagccaccgcacccagccctctctcttcctcaatgcactctgcttcttccgttcttccgaaacattcagctgactgtatccaggcttcctggactcctgggaccccacgtcctgcaccccggcttctgactcatttcctaagggcccctttgtgtatcataaagggtttgatttttatagtcacatttacaaccatcttgagatttttatttttttgaggcagggtctctctctgtcatccaggctggagtgcagtggcaccatctcggctcactgcaacctccgccccctgggttcaagtgattctcccacctcagcctcccgagtagctgggactacaggtgagccaccgtgaccagccaatgtgccttcttatagtgtctactcattggtctttgttctgcccagtgataacaatgggataacgcctgctacacatcttcattgtgaaacccttcccctgtgctgagattaaatgaactctaagattattaaatagtatattttccttgacagcctagcgtttgatgattttaaagccttatgtataaataaaccaaaggaagtaagcagtcatattgctaatttgctaactcctatctattgaatggtgaagttttaaaaatttccccaggtaagtttaagattcaaacaccatctattgagcacctacattgtgtgccaggtactctgcatttgaaacttgaggaaacatgctcagagtgcaagaagcttccttgcctgagatcacctagaaaggaaccctcagagccggcaactgaatcttggtccctgtgatgtcaagcccattgctctcccactgcagaacatggcctctagattaatgccaccgattcaggaacacctccgacagtcttgaaatacccccatgttgccttgtttgttttttccttctggcttcttctattacagtctcttcattggaagctctgtaggccaaggccagagctgatactgacacggagccaatgcagatagcacatcagatgctaggggtcgctgggaggattaagggacttaatctgctaggaacacctgtacttgaagtggaggaggctagggggccacagttgctgcttcattaacatagaggttttggatttttttctcttgtggtttgttttttaagtggattggcagactccttgttgcttaagagtggctttctaggcaggccactggcatctgaattcatcattgacaataaatgtaagaaattggaataaaaaagagagacctgctgttattcgcttttgttctccagtgatttgattaactcagggcaaggctgaatatcagagtgtatcgcactgaagaataataatccattcagtaatgttatagttatcctcaatctaaatatgtcaactgtcattttgctacttttcaaataaaatacttgaaaactgtcaaaaaaaaaaaa

SEQ ID NO: 15205 - DNA, 3466 bp, Homo sapiens
gtgaacttgaacacatacactgccacagacacaaagggccacagtttatctgttcagcgcctcacgaaatccaaagttgacatccctgcacactggagtgatatgaagcagcagaatttctgtgtggtggagctgctgcctagtgatcctgagtacaacacggtggcaagcaagtttaatcagacctgctcacacttcagaatcattgaactacaggagaatgaagtaatgaaggagggaggcagccccgctgggcagaagtgcttctctcggacagtcttggcccctggcgttgtgctgattgtgcagcagggtgacttggcacggcttcctgtcgatgtggtggtgaatgcatctaatgaggaccttaagcattatggtggcctggccgctgcgctctcaaaagcagctggccctgagctccaggccgactgtgaccagatagtgaagagagagggcagactcctaccgggcaatgccaccatctccaaggcaggaaagctgccctaccaccacgtgatccatgcagtggggccccgctggagcggatatgaggccccgaggtgtgtgtacctattaaggagagctgtgcaactcagtctctgtctagccgaaaaatacaagtaccgatccatagccatcccagctattagttctggagtctttggctttcccttaggccgatgcgtggagaccattgtttctgccatcaaggaaaacttccaattcaagaaggatggacactgcttgaaagaaatctaccttgtggatgtatctgagaagactgttgaggcctttgcagaagctgtgaaaactgtatttaaagccaccctgccagatacagctgccccgccaggtttaccaccagcagcagcggggcctgggaaaacatcatgggaaaaaggaagcctggtgtccccgggaggcctgcagatgctgttggtgaaagagggtgtgcagaatgctaagaccgatgttgttgtcaactccgttcccttggatctcgtgcttagtagagggcctctttctaagtccctcttggaaaaagctggaccagagctccaggaggaattggacacagttggacaaggggtggctgtcagcatgggcacagtgctcaaaaccagcagctggaatctggactgtcgctatgtgcttcacgtggtagctccggagtggagaaatggtagcacatcttcactcaagataatggaagacataatcagagaatgtatggagatcactgagagcttgtccttaaaatcaattgcatttccagcaataggaacaggaaacttgggatttcctaaaaacatattcgctgaattaatcatttcagaggtgttcaaatttagtagcaagaatcagctgaaaactttacaagaggttcactttctgctgcacccgagtgatcatgaaaatattcaggcattttcagatgaatttgccagaagggctaatggaaatctcgtcagtgacaaaattccgaaggctaaagatacacaaggtttttatgggactgtttctagccctgattcaggtgtgtatgaaatgaagattggctccatcatcttccaggtggcttctggagatatcacgaaagaagaggcagatgtgattgtaaattcaacatcaaactcattcaatctcaaagcaggggtctccaaagcaattttagaatgtgctggacaaaatgtagaaagggaatgttctcagcaagctcagcagcgcaaaaatgattatataatcaccggaggtggatttttgaggtgcaagaatatcattcatgtaattggtggaaatgatgtcaagagttcagtttcctctgttttgcaggagtgtgaaaaaaaaaattactcatccatttgcctcccagccattgggacaggaaatgccaaacaacacccagataaggttgctgaagccataattgatgccattgaagactttgtccagaaaggatcagcccagtctgtgaaaaaagttaaagttgttatctttctgcctcaagtactggatgtgttttatgccaacatgaagaaaagagaagggactcagctttcttcccaacagtctgtgatgtctaaacttgcatcatttttgggcttttcaaagcaatctccccaaaaaaagaatcatttggttttggaaaagaaaacagaatcagcaacttttcgggtgtgtggtgaaaatgtcacgtgtgtggaatacgctatctcctggctacaagacctgattgaaaaagaacagtgtccttacaccagtgaagatgagtgcatcaaagactttgatgaaaaggagtatcaggagttgaatgagctgcagaagaagttaaatattaacatttccctggaccataagagacctttgattaaggttttgggaattagcagagatgtgatgcaggctagagatgaaattgaggcgatgatcaagagagttcgattggccaaagaacaggaatcccgggcagattgtatcagtgagtttatagaatggcagtataatgacaataacacttctcattgttttaacaaaatgaccaatctgaaattagaggatgcaaggagagaaaagaaaaaaacagttgatgtcaaaattaatcatcggcactacacagtgaacttgaacacatacactgccacagacacaaagggccacagtttatctgttcagcgcctcacgaaatccaaagttgacatccctgcacactggagtgatatgaagcagcagaatttctgtgtggtggagctgctgcctagtgatcctgagtacaacacggtggcaagcaagtttaatcagacctgctcacacttcagaatagagaagattgagaggatccagaatccagatctctggaatagctaccaggcaaagaaaaaaactatggatgccaagaatggccagacaatgaatgagaagcaactcttccatgggacagatgccggctccgtgccacacgtcaatcgaaatggctttaaccgcagctatgccggaaagaatgctgtggcatatggaaagggaacctattttgctgtcaatgccaattattctgccaatgatacgtactccagaccagatgcaaatgggagaaagcatgtgtattatgtgcgagtacttactggaatctatacacatggaaatcattcattaattgtgcctccttcaaagaaccctcaaaatcctactgacctgtatgacactgtcacagataatgtgcaccatccaagtttatttgtggcattttatgactaccaagcatacccagagtaccttattacgtttagaaaataacactttggtatccttcccacaaaattattctccatttgtacatatctagttgtaaaacaagttttagcttttttttttaattcctcttaacagatttttctaatatccaaggatcattctttgtcgctgcagtcagtctttagtgagggttaataatccatatgactagtag

SEQ ID NO: 15206 - DNA, 4779 bp, Homo sapiens
gtgaacttgaacacatacactgccacagacacaaagggccacagtttatctgttcagcgcctcacgaaatccaaagttgacatccctgcacactggagtgatatgaagcagcagaatttctgtgtggtggagctgctgcctagtgatcctgagtacaacacggtggcaagcaagtttaatcagacctgctcacacttcagaatcattgaactacaggagaatgaagtaatgaaggagggaggcagccccgctgggcagaagtgcttctctcggacagtcttggcccctggcgttgtgctgattgtgcagcagggtgacttggcacggcttcctgtcgatgtggtggtgaatgcatctaatgaggaccttaagcattatggtggcctggccgctgcgctctcaaaagcagctggccctgagctccaggccgactgtgaccagatagtgaagagagagggcagactcctaccgggcaatgccaccatctccaaggcaggaaagctgccctaccaccacgtgatccatgcagtggggccccgctggagcggatatgaggccccgaggtgtgtgtacctattaaggagagctgtgcaactcagtctctgtctagccgaaaaatacaagtaccgatccatagccatcccagctattagttctggagtctttggctttcccttaggccgatgcgtggagaccattgtttctgccatcaaggaaaacttccaattcaagaaggatggacactgcttgaaagaaatctaccttgtggatgtatctgagaagactgttgaggcctttgcagaagctgtgaaaactgtatttaaagccaccctgccagatacagctgccccgccaggtttaccaccagcagcagcggggcctgggaaaacatcatgggaaaaaggaagcctggtgtccccgggaggcctgcagatgctgttggtgaaagagggtgtgcagaatgctaagaccgatgttgttgtcaactccgttcccttggatctcgtgcttagtagagggcctctttctaagtccctcttggaaaaagctggaccagagctccaggaggaattggacacagttggacaaggggtggctgtcagcatgggcacagtgctcaaaaccagcagctggaatctggactgtcgctatgtgcttcacgtggtagctccggagtggagaaatggtagcacatcttcactcaagataatggaagacataatcagagaatgtatggagatcactgagagcttgtccttaaaatcaattgcatttccagcaataggaacaggaaacttgggatttcctaaaaacatattcgctgaattaatcatttcagaggtgttcaaatttagtagcaagaatcagctgaaaactttacaagaggttcactttctgctgcacccgagtgatcatgaaaatattcaggcattttcagatgaatttgccagaagggctaatggaaatctcgtcagtgacaaaattccgaaggctaaagatacacaaggtttttatgggactgtttctagccctgattcaggtgtgtatgaaatgaagattggctccatcatcttccaggtggcttctggagatatcacgaaagaagaggcagatgtgattgtaaattcaacatcaaactcattcaatctcaaagcaggggtctccaaagcaattttagaatgtgctggacaaaatgtagaaagggaatgttctcagcaagctcagcagcgcaaaaatgattatataatcaccggaggtggatttttgaggtgcaagaatatcattcatgtaattggtggaaatgatgtcaagagttcagtttcctctgttttgcaggagtgtgaaaaaaaaaattactcatccatttgcctcccagccattgggacaggaaatgccaaacaacacccagataaggttgctgaagccataattgatgccattgaagactttgtccagaaaggatcagcccagtctgtgaaaaaagttaaagttgttatctttctgcctcaagtactggatgtgttttatgccaacatgaagaaaagagaagggactcagctttcttcccaacagtctgtgatgtctaaacttgcatcatttttgggcttttcaaagcaatctccccaaaaaaagaatcatttggttttggaaaagaaaacagaatcagcaacttttcgggtgtgtggtgaaaatgtcacgtgtgtggaatacgctatctcctggctacaagacctgattgaaaaagaacagtgtccttacaccagtgaagatgagtgcatcaaagactttgatgaaaaggagtatcaggagttgaatgagctgcagaagaagttaaatattaacatttccctggaccataagagacctttgattaaggttttgggaattagcagagatgtgatgcaggctagagatgaaattgaggcgatgatcaagagagttcgattggccaaagaacaggaatcccgggcagattgtatcagtgagtttatagaatggcagtataatgacaataacacttctcattgttttaacaaaatgaccaatctgaaattagaggatgcaaggagagaaaagaaaaaaacagttgatgtcaaaattaatcatcggcactacacagtgaacttgaacacatacactgccacagacacaaagggccacagtttatctgttcagcgcctcacgaaatccaaagttgacatccctgcacactggagtgatatgaagcagcagaatttctgtgtggtggagctgctgcctagtgatcctgagtacaacacggtggcaagcaagtttaatcagacctgctcacacttcagaatagagaaggtaagccttctgctagaatgcagtttctggatggtggaaataagttctgtcatggtcctatataaaatccattttcattcacttcctatcacatttttttaaacccagaattagaatttgtatggtaattagtagttctagattctactcatgtgaccataattactgaggcattaagattcttgtgtcagtgattacaatatttgattgtaatatgatagaacactaaagacatatatttactttgtgaagcaagctaatacaaattcaaagatatggctttaaaattggatttgatagctagcaaattccacagagagccatgcagaggctccttagatcaggaccatgttactctgccccattattcacagatcaacagtgcttccttgataaagccagcaggccttttctcgtttatcataattattttgggcaggtgaatgtgatgattcgtgcctgtagtcccagctattgggaggctgaggtggaaggattgcatgagcccaggagtttgacgccagtctgggtaacatagtgagatcctgctctcaaataaaaacaaccaattattttggcatcttcttccatttttaaacatttttgatattgctgtttgatattatattttccttgacttctctagcaaaattattatgatttttttttccttgactaattttcttttcatttttgcaggcacgctgtttctcttccaaacccctaattctagctttattcacgccatttatgcttaaacggtcttttgtctctgtacctcaccagggaatatatttacccttcttggattcaactattagttcaatgtcgatagctcccaaatcaacattaccaacctgggtctttgactcaagctctagaacatactcccagtggcctaaaaaaatctccacttgaggctgggcacagtggctcacgcctgtaatcccagcactttgggaggccgaggtgggtggatcacgaggtcaggggttcaagaccatcctggtgaagatggtgaaaccacgtctctactaaaactacaaaaattagccgggcatgttggcaggtgcctataatcccacctacttgggaggctgaggcaggataattgcttgaacatgggcggcagagattgcagtgagccaagatcacgccactgcactccagcctggtcgacagagtgagactccgtctcaaaaaaaaaatctccacttgaatatctaactgcaaaatcaacttctctaaaatctaatgcatcatacgtaagtaattctctttccctttccttcctcatttctgtttttggttctaccactttctgagtaaagccggagatctttgatccaccataagtctgccagtaagacctacattttctttgcaaatttttcttactctctatttgaactgccaacactgtttattcatgttgttaagtacatcataatttaaaaagattcaaagtgccctacaaagatataaactataccttcagataaaataaatatacaaagaaaaatggttaaagagaaaagaatggcagggaaaataagataatacagacgaactgctagttctcaaaaatatataacatgaggttaccaatttgtccctgagcttcctagtagacaaagcaagaagtaaacattcaggtacaagactcataatgtccgtaaatcaaaaagcaaaccatttgataaggaggctcacagctcctcacaatactgagactgactcctgagagatttctcttgtggatcaagtactagagaatatcctcaacgtcatcctcacaataaattaaatatcaacttttatatcactgtttttttttaatgtaaaactggttgaacaaaaccgatgcctgattgaatgaaaacaattctatgaggcaccaagacaatatgattcaagtatgcgtatgctcagcgcggggtaccgagctcg

SEQ ID NO: 15207 - DNA, 1224 bp, Homo sapiens
gtgaacttgaacacatacactgccacagacacaaagggccacagtttatctgttcagcgcctcacgaaatccaaagttgacatccctgcacactggagtgatatgaagcagcagaatttctgtgtggtggagctgctgcctagtgatcctgagtacaacacggtggcaagcaagtttaatcagacctgctcacacttcagaatcattgaactacaggagaatgaagtaatgaaggagggaggcagccccgctgggcagaagtgcttctctcggacagtcttggcccctggcgttgtgctgattgtgcagcagggtgacttggcacggcttcctgtcgatgtggtggtgaatgcatctaatgaggaccttaagcattatggtggcctggccgctgcgctctcaaaagcagctggccctgagctccaggccgactgtgaccagatagtgaagagagagggcagactcctaccgggcaatgccaccatctccaaggcaggaaagctgccctaccaccacgtgatccatgcagtggggccccgctggagcggatatgaggccccgaggtgtgtgtacctattaaggagagctgtgcaactcagtctctgtctagccgaaaaatacaagtaccgatccatagccatcccagctattagttctggagtctttggctttcccttaggccgatgcgtggagaccattgtttctgccatcaaggaaaacttccaattcaagaaggatggacactgcttgaaagaaatctaccttgtggatgtatctgagaagactgttgaggcctttgcagaagctgtgaaaactgtatttaaagccaccctgccagatacagctgccccgccaggtttaccaccagcagcagcggggcctgggaaaacatcatgggaaaaaggaagcctggtgtccccgggaggcctgcagatgctgttggtgaaagagggtgtgcagaatgctaaggtgagtgtcgcttttacagaacaccaccagggcactgtgactttacttagtcagtggctctctcatggagggctgaagaaagataaggaccaaggtgagaatcaagggagagaatcccatgccttccacccctgccttgaaacaattttccttagataattgggcttcttaccaaatcatttactaatagagatcggccaattatttgtgagaactgaaagggtatagaggtcagattgctagatttccagtaga

SEQ ID NO: 15208 - DNA, 271 bp, Homo sapiens
gtagtcatcttagttgtctccaattgtgccaagcccagtgcctcaaatatagtaatcattgatgaatgctttttgttaaaatttgaaacaaatttttggttttgtctttaagaccgatgttgttgtcaactccgttcccttggatctcgtgcttagtagagggcctctttctaagtccctcttggaaaaagctggaccagagctccaggaggaattggacacagttggacaaggggtggctgtcagcatgggcacagtgctcaaaaccagc

SEQ ID NO: 15209 - DNA, 332 bp, Homo sapiens
accaaaccctctggatcagaaggcacgaagatgtagacagcgtctcttatgccttatgtaggaagtgcctaatgatttctttgcaaattctgactagtataagtcctaaacaagaggcaaatgtcttagtgtcgtccaagtgctataaatgaagttaaatggggaacatacggttaacatttctataggactgtatgtttgccaaaaggttaataatcacttgttccttaatattcataacatccctctaaagcagaatttcccacactgggactgggaggcctcagggatggtggaggaatttcaagagggtcatggggattggagctgta

SEQ ID NO: 15210 - DNA, 291 bp, Homo sapiens
tagggaaaggataccagcacattttcttagagccagcttcctttagtggaggttgatcttcatgagacttttagattcacttcagacatagatagcttttaaaatttttggttgcatgttttttctttatttaactaatttccttactgttattatttgagctgctctgaaacggaaataaccaccatttttcagtcctcagcacaatttaagtcaatttttctatttttattttttattgtcaagtatatatacagaagggtgtataaaacatacattttaaaaaattat

SEQ ID NO: 15211 - DNA, 618 bp, Homo sapiens
gcaattctcaagccttttacactgcaatcattgtaaaataatgctcagatatgcaaaactttcttaggtataatttccagttcactaaccacaactcctctttttctgttaataaagcatttcagaatatgagtaaatcacttgcaaacgttgctattttaactgttagcaacttacctccttgaccttgcccaacaattttatcctgtgcctttcttaacaacttagtcttatggccataccctacaccatcaaaccatgccatacccaatcactgcaactcctgtgtaatctcacttcattcctttcagtctctgagtactacctcctatttttccagcttgcacccctttagtctgttctcaacatagtagccagtgaacctatgaacacttaagtctagctttgtcgcccaggctagagtgcagtggcgggatcctcattactgtgttggtcaggctgatctcgaactcctgacctcaagtgatccacccgcctcagcctcccaaagtgctgggattacaggcgtgagccagtgcacctggcctatgtttgatcttattcagagtaaaaaccagagcccttaaaatggctatgagaccccatatgatctaaacc

SEQ ID NO: 15212 - DNA, 307 bp, Homo sapiens
tctggagcacatggccttgccttgacctcttagattgttactaacctatataaacccttcaataattggtaaaaattaattttttaagctcatttacatatttttaccaaagacaggtccgacaattttgtaacctgcttttctacttacacgtttgtgtcattaaatatttttctctaatattatttaaatgctgtatggtgtactataatatagatttaccattatttatttaatactgaagttaatatatagtcatgatctaagctccatcctaattttgtaccatatctcatttagtcctcac

SEQ ID NO: 15213 - DNA, 1350 bp, Homo sapiens
agcggctcttccgcggccgcggtgggaatggaaacatctgccccacgtgcaggaagccgggtggtggccacgacagcgcgccactccgcagcgtaacctcgcagatcccctgcgtgtgtcctcgcaagactagctcaccgaaatggccgcgtccagtcaaggaaactttgagggagatattgagtcagtggaccttgcagaatttgctaagcagcagccgtggtggcgtaagctgtttgggccagaatctggactctcagccgaaaagtatagcgtggcaacccacctgttcattggaggtgtcactggatggtgcacgggttttatattccagaaggttggaaagttggctgcaacagctgtgggaggtggattttttctccttcagcttgcaaaccattctgggtacatcaaagttgattggcaacgagtggagaaggacatgaagaaagccaaagagcagctgaagatccctaagagcactcagatacctaaccaggtcaggagcaaagctgaggaggtggtgtcatttgtgaagaaaaatgttctagtgactgggggatttttcggaggctttctgcttggcatggcatcctaaagaagatacctcattttcattgttcctggttttttccagccagcagcctctacactccatcacaggacattgagtccctcctcctcttctcccatgccttcctccctgctgtggcaaatccgagtggcttctataagcatccgttggtacaagttaatgtggcaccatgagcctgactggcttctataagcatctgttggcacaagttaatgtggcaccatgagcttgatggcggcagaagagacaatagtccttagctcttcttccagtacgccccctacttagtcagtctgtaggtcatcaagaaggtccctctacccctatgcaagacacttacaagaacacattgcaagatagctgaccgtggaggatgagtggatcctgaaatgttgtcccgaactgttgatttggaaaagaaataagcacatagataaccttattgtgtgctgcatggaaaggaactgaatacaattgcctttaagcattaaaaaaaaaaggatgaaaaattggggtgtcacatttgcaaaatggatggacaaatgtggtcagggcagatcaaggatcatttcactgattacaagccaggtgcacgccctgtcccaggcatttagaagaacaggggccagacttacatgtggtcacagttttggaagagaagatctaattggctgaacttatgtcatatgctgcttgctggaggttgtgggaacttccatttatacccttttgattagaagtacaggtgacaacct

SEQ ID NO: 15214 - DNA, 2329 bp, Homo sapiens
gcaggggccgagtctctcggaagccctcgtgaggactcggacctattcggactgattcggcttcccacttcggggaacttcgaccctcctcggttcaggactcggtctcggctcggcggcttcgtgcaggttcggctcctactcgggcagcctctgttcgcctcggctccgctccgcgggcggactcggctcggctctgctcggcggctggctgccttttcggtccctattcgggcggcggcttcgggcggcctcggcccagctcgggcgtcctcttcgggccccgcttcgggctccgcgaccggcgcttcgggcggtcccggacggcgccttcgggaaggctcggcggagtccggatggaggactcggactcggcggcaaagcagctgggcctggctgacgcggccgcggcaggaggcgaggcggaggagccggtgctgagcagggacgaggactcggaggaggacgcagactcggaggcggagcgggagacgccgcgggtcacggcagtggcggtgatggcggcggagcccgggcacatggacatgggcgccgaggccctgcccggccccgacgaggccgccgctgccgcagccttcgcagaggtgaccacagtgacagtggccaacgtgggggctgctgcagacaatgtcttcaccacgtctgtggcgaacgcggcatccatctcaggacatgttctgtctggtaggacggcccttcagatcggggacagcctgaacaccgaaaaagcgacactgattgtcgtccacacagatgggagcatcgtggagaccaccgggctgaaaggcccggcagctcccctcaccccaggtcctcagtctcctccaacccctctggctcccggccaagaaaaaggtggaactaaatacaactgggacccttctgtgtacgacagtgagctgcccgtacggtgccggaacatcagcggcactctgtacaagaacaggctcggctcaggcggccggggacggtgcatcaagcagggggagaactggtacagtcccaccgagtttgaggccatggcaggaagagccagcagtaaggactggaaaagaagcattcgctacgcgggccgacccttgcagtgcctcatccaggatgggatcttaaaccctcacgctgcctcttgcacctgtgctgcctgctgcgacgacatgaccttaagtggcccagtcaggctttttgtgccttacaaaaggcgcaagaaggagaatgaactgcccacaactcccgtgaagaaggactcccccaagaacatcacattgcttccagccaccgcggctaccaccttcaccgtgaccccctcgggacagatcacgacctcgggggcactgacctttgaccgagcgtccacggtagaggccactgctgtcatatcagagagtccggcccagggcgacgtcttcgcaggggccacagtccaagaggccagcgtgcagcccccatgcagggccagccaccctgagcctcactaccccggctatcaggacagctgccagatcgcaccgtttccagaagctgcgttgccaacgtcacatcccaaaatagtgttgacatccctgcctgcgctggcggtcccacccccgactcccaccaaagcggcacctcccgcgttggtcaatgggctggagctgtcagagccgcggagctggctgtacctagaagagatggtcaactccttgctcaacacagcgcagcagctgaagacgctgtttgagcaagccaagcatgccagcacctaccgagaagctgccacaaaccaggccaagatccacgctgacgcagagcggaaggagcagtcctgcgttaactgcggccgggaggctatgagcgagtgcaccggctgccacaaggtcaactactgctccaccttctgccaacgcaaggactggaaggatcaccagcacatatgcggccagtcagcagctgtcaccgtccaggcagacgaagtccacgtggctgaaagcgtgatggagaaggtgaccgtgtgaggctccatcggccgccctgggagctggggcccctcgcactcctgtgaggcttttgcaggtcgaaggcccccctgaggactctggggggacgttgagaagaggggtgtgggaaggtaaagaaacttgctggacaagtcattaacacactttaagcgaatggtgccctgggaagcgcactccccctgcccgggccccctgcccgctcgcggacagattttttatccctgggatcatgagcgtccggtcttgcccacagggcctgtgctgcgacgcacatacatacgtgttgtgtctgtcaataaagtgtaaataaggtc

SEQ ID NO: 15215 - DNA, 2371 bp, Homo sapiens
gcaggggccgagtctctcggaagccctcgtgaggactcggacctattcggactgattcggcttcccacttcggggaacttcgaccctcctcggttcaggactcggtctcggctcggcggcttcgtgcaggttcggctcctactcgggcagcctctgttcgcctcggctccgctccgcgggcggactcggctcggctctgctcggcggctggctgccttttcggtccctattcgggcggcggcttcgggcggcctcggcccagctcgggcgtcctcttcgggccccgcttcgggctccgcgaccggcgcttcgggcggtcccggacggcgccttcgggaaggctcggcggagtccggatggaggactcggactcggcggcaaagcagctgggcctggctgaggcggcggcggtggcggccgcggccgctgtggcggcggcggccgcggccgcggcaggaggcgaggcggaggagccggtgctgagcagggacgaggactcggaggaggacgcagactcggaggcggagcgggagacgccgcgggtcacggcagtggcggtgatggcggcggagcccgggcacatggacatgggcgccgaggccctgcccggccccgacgaggccgccgctgccgcagccttcgcagaggtgaccacagtgacagtggccaacgtgggggctgctgcagacaatgtcttcaccacgtctgtggcgaacgcggcatccatctcaggacatgttctgtctggtaggacggcccttcagatcggggacagcctgaacaccgaaaaagcgacactgattgtcgtccacacagatgggagcatcgtggagaccaccgggctgaaaggcccggcagctcccctcaccccaggtcctcagtctcctccaacccctctggctcccggccaagaaaaaggtggaactaaatacaactgggacccttctgtgtacgacagtgagctgcccgtacggtgccggaacatcagcggcactctgtacaagaacaggctcggctcaggcggccggggacggtgcatcaagcagggggagaactggtacagtcccaccgagtttgaggccatggcaggaagagccagcagtaaggactggaaaagaagcattcgctacgcgggccgacccttgcagtgcctcatccaggatgggatcttaaaccctcacgctgcctcttgcacctgtgctgcctgctgcgacgacatgaccttaagtggcccagtcaggctttttgtgccttacaaaaggcgcaagaaggagaatgaactgcccacaactcccgtgaagaaggactcccccaagaacatcacattgcttccagccaccgcggctaccaccttcaccgtgaccccctcgggacagatcacgacctcgggggcactgacctttgaccgagcgtccacggtagaggccactgctgtcatatcagagagtccggcccagggcgacgtcttcgcaggggccacagtccaagaggccagcgtgcagcccccatgcagggccagccaccctgagcctcactaccccggctatcaggacagctgccagatcgcaccgtttccagaagctgcgttgccaacgtcacatcccaaaatagtgttgacatccctgcctgcgctggcggtcccacccccgactcccaccaaagcggcacctcccgcgttggtcaatgggctggagctgtcagagccgcggagctggctgtacctagaagagatggtcaactccttgctcaacacagcgcagcagctgaagacgctgtttgagcaagccaagcatgccagcacctaccgagaagctgccacaaaccaggccaagatccacgctgacgcagagcggaaggagcagtcctgcgttaactgcggccgggaggctatgagcgagtgcaccggctgccacaaggtcaactactgctccaccttctgccaacgcaaggactggaaggatcaccagcacatatgcggccagtcagcagctgtcaccgtccaggcagacgaagtccacgtggctgaaagcgtgatggagaaggtgaccgtgtgaggctccatcggccgccctgggagctggggcccctcgcactcctgtgaggcttttgcaggtcgaaggcccccctgaggactctggggggacgttgagaagaggggtgtgggaaggtaaagaaacttgctggacaagtcattaacacactttaagcgaatggtgccctgggaagcgcactccccctgcccgggccccctgcccgctcgcggacagattttttatccctgggatcatgagcgtccggtcttgcccacagggcctgtgctgcgacgcacatacatacgtgttgtgtctgtcaataaagtgtaaataaggtc

SEQ ID NO: 15216 - DNA, 2378 bp, Homo sapiens
  misc_feature (2353)..(2353): n is a, c, g, or t
gcaggggccgagtctctcggaagccctcgtgaggactcggacctattcggactgattcggcttcccacttcggggaacttcgaccctcctcggttcaggactcggtctcggctcggcggcttcgtgcaggttcggctcctactcgggcagcctctgttcgcctcggctccgctccgcgggcggactcggctcggctctgctcggcggctggctgccttttcggtccctattcgggcggcggcttcgggcggcctcggcccagctcgggcgtcctcttcgggccccgcttcgggctccgcgaccggcgcttcgggcggtcccggacggcgccttcgggaaggctcggcggagtccggatggaggactcggactcggcggcaaagcagctgggcctggctgaggcggcggcggtggcggccgcggccgctgtggcggcggcggccgcggccgcggcaggaggcgaggcggaggagccggtgctgagcagggacgaggactcggaggaggacgcagactcggaggcggagcgggagacgccgcgggtcacggcagtggcggtgatggcggcggagcccgggcacatggacatgggcgccgaggccctgcccggccccgacgaggccgccgctgccgcagccttcgcagaggtgaccacagtgacagtggccaacgtgggggctgctgcagacaatgtcttcaccacgtctgtggcgaacgcggcatccatctcaggacatgttctgtctggtaggacggcccttcagatcggggacagcctgaacaccgaaaaagcgacactgattgtcgtccacacagatgggagcatcgtggagaccaccgggctgaaaggcccggcagctcccctcaccccaggtcctcagtctcctccaacccctctggctcccggccaagaaaaaggtggaactaaatacaactgggacccttctgtgtacgacagtgagctgcccgtacggtgccggaacatcagcggcactctgtacaagaacaggctcggctcaggcggccggggacggtgcatcaagcagggggagaactggtacagtcccaccgagtttgaggccatggcaggaagagccagcagtaaggactggaaaagaagcattcgctacgcgggccgacccttgcagtgcctcatccaggatgggatcttaaaccctcacgctgcctcttgcacctgtgctgcctgctgcgacgacatgaccttaagtggcccagtcaggctttttgtgccttacaaaaggcgcaagaaggagaatgaactgcccacaactcccgtgaagaaggactcccccaagaacatcacattgcttccagccaccgcggctaccaccttcaccgtgaccccctcgggacagatcacgacctcgggggcactgacctttgaccgagcgtccacggtagaggccactgctgtcatatcagagagtccggcccagggcgacgtcttcgcaggggccacagtccaagaggccagcgtgcagcccccatgcagggccagccaccctgagcctcactaccccggctatcaggacagctgccagatcgcaccgtttccagaagctgcgttgccaacgtcacatcccaaaatagtgttgacatccctgcctgcgctggcggtcccacccccgactcccaccaaagcggcacctcccgcgttggtcaatgggctggagctgtcagagccgcggagctggctgtacctagaagagatggtcaactccttgctcaacacagcgcagcagctgaagacgctgtttgagcaagccaagcatgccagcacctaccgagaagctgccacaaaccaggccaagatccacgctgacgcagagcggaaggagcagtcctgcgttaactgcggccgggaggctatgagcgagtgcaccggctgccacaaggtcaactactgctccaccttctgccaacgcaaggactggaaggatcaccagcacatatgcggccagtcagcagctgtcaccgtccaggcagacgaagtccacgtggctgaaagcgtgatggagaaggtgaccgtgtgaggctccatcggccgccctgggagctggggcccctcgcactcctgtgaggcttttgcaggtcgaaggcccccctgaggactctggggggacgttgagaagaggggtgtgggaaggtaaagaaacttgctggacaagtcattaacacactttaagcgaatggtgccctgggaagcgcactccccctgcccgggccccctgcccgctcgcggacagattttttatccctgggatcatgagcgtccggtcttgcccacagggcctgtgctgcgacgcacatacatacgtgttgtgtctgccgnattcggtaccgagctcgattctatc

SEQ ID NO: 15217 - DNA, 549 bp, Homo sapiens
tgagattgtgccgcggcactccagcctgggcggcagacagtcctgcgttaactgcggccgggaggctatgagcgagtgcaccggctgccacaaggtcaactactgctccaccttctgccaacgcaaggactggaaggatcaccagcacatatgcggccagtcagcagctgtcaccgtccaggcagacgaagtccacgtggctgaaagcgtgatggagaaggtgaccgtgtgaggctccatcggccgccctgggagctggggcccctcgcactcctgtgaggcttttgcaggtcgaaggcccccctgaggactctggggggacgttgagaagaggggtgtgggaaggtaaagaaacttgctggacaagtcattaacacactttaagcgaatggtgccctgggaagcgcactccccctgcccgggccccctgcccgctcgcggacagattttttatccctgggatcatgagcgtccggtcttgcccacagggcctgtgctgcgacgcacatacatacgtgttgtgtctgtcaataaagtgtaaataaggtc

SEQ ID NO: 15218 - DNA, 1601 bp, Homo sapiens
gcaggggccgagtctctcggaagccctcgtgaggactcggacctattcggactgattcggcttcccacttcggggaacttcgaccctcctcggttcaggactcggtctcggctcggcggcttcgtgcaggttcggctcctactcgggcagcctctgttcgcctcggctccgctccgcgggcggactcggctcggctctgctcggcggctggctgccttttcggtccctattcgggcggcggcttcgggcggcctcggcccagctcgggcgtcctcttcgggccccgcttcgggctccgcgaccggcgcttcgggcggtcccggacggcgccttcgggaaggctcggcggagtccggatggaggactcggactcggcggcaaagcagctgggcctggctgaggcggcggcggtggcggccgcggccgctgtggcggcggcggccgcggccgcggcaggaggcgaggcggaggagccggtgctgagcagggacgaggactcggaggaggacgcagactcggaggcggagcgggagacgccgcgggtcacggcagtggcggtgatggcggcggagcccgggcacatggacatgggcgccgaggccctgcccggccccgacgaggccgccgctgccgcagccttcgcagaggtgaccacagtgacagtggccaacgtgggggctgctgcagacaatgtcttcaccacgtctgtggcgaacgcggcatccatctcaggacatgttctgtctggtaggacggcccttcagatcggggacagcctgaacaccgaaaaagcgacactgattgtcgtccacacagatgggagcatcgtggagaccaccgggctgaaaggcccggcagctcccctcaccccaggtcctcagtctcctccaacccctctggctcccggccaagaaaaaggtggaactaaatacaactgggacccttctgtgtacgacagtgagctgcccgtacggtgccggaacatcagcggcactctgtacaagaacaggctcggctcaggcggccggggacggtgcatcaagcagggggagaactggtacagtcccaccgagtttgaggccatggcaggaagagccagcagtaaggactggaaaagaagcattcgctacgcgggccgacccttgcagtgcctcatccaggatgggatcttaaaccctcacgctgcctcttgcacctgtgctgcctgctgcgacgacatgaccttaagtggcccagtcaggctttttgtgccttacaaaaggcgcaagaaggagaatgaactgcccacaactcccgtgaagaaggactcccccaagaacatcacattgcttccagccaccgcggctaccaccttcaccgtgaccccctcgggacgttgagaagaggggtgtgggaaggtaaagaaacttgctggacaagtcattaacacactttaagcgaatggtgccctgggaagcgcactccccctgcccgggccccctgcccgctcgcggacagattttttatccctgggatcatgagcgtccggtcttgcccacagggcctgtgctgcgacgcacatacatacgtgttgtgtctgtcaataaagtgtaaataaggtc

SEQ ID NO: 15219 - DNA, 248 bp, Homo sapiens
cccaatctgtgcagctgacaaatagaaagaataaaggatcagaattgaaggcaggctataagagtatctacgaaattcttaaaaaccagcgagtgattggaagcgcactccccctgcccgggccccctgcccgctcgcggacagattttttatccctgggatcatgagcgtccggtcttgcccacagggcctgtgctgcgacgcacatacatacgtgttgtgtctgtcaataaagtgtaaataaggtc

SEQ ID NO: 15220 - DNA, 401 bp, Homo sapiens
gaatttcagtacactatctgcctgggggacacacctgttggggaaggggatgaagtgtgggccctgaccatgggatcccctggtcgtatcaccacctgcgcctctcaagtgctgccaggcacacagagtcatggacaggactctacaggcacaattcagtaccagcttggatgaaaccctctgaggaatgggtgccatctttcaggatgtgatgcatgtattgaatcaaagacgtctctaaggcactgttttcagaaggaagaatacgcgggtccaaaaaccaagaagtcaaagcaggtgtgtctcattccttatattcacccccagggtgatttacttataagtaaataaatacataacatgaatacttaaataaatttatttatgcatgtatgtatgta

SEQ ID NO: 15221 - DNA, 403 bp, Homo sapiens
tcacatcatcctttacaactttacctccaacccttttattcctgctttcgccatccacgttggcatctcatgctagactaggactgaaaacccctaactcctctacctactggtagaaactcacatttctggccgggcgcggtggctcacgcctgtaatcccagcactttgggaggccgaggcgggtggatcatgaggtcaggagatcgagaccatcctggctaacaaggtgaaaccccgtctctactaaaaatacaaaaaattagccgggcgcggtggcgggcgcctgtagtcccagctactcgggaggctgaggcaggagaatggcgtgaacccgggaagcggagcttgcagtgagccgagattgcgccactgcagtccgcagtccggcctgggcgacaga

SEQ ID NO: 15222 - DNA, 285 bp, Homo sapiens
gtacagctgaggaaatagattttatgaggacaaactgcacaagatgttatgactagtaaggagtagaatcaggatttgaacctaagtcagaatagcttcaaagacaactctttatattccagtgtgttgccttttttgagtaggaagtataatgcagtacgatggtgctctaattgtcctgaaccttagctttttaaggaagaagtatctcaggagagggggaggctgaatggacagggctttgaaatcccctactttaagctgaggagctcagcccttttacat

SEQ ID NO: 15223 - DNA, 1021 bp, Homo sapiens
ctccactgcatgattcttctgctgattttgtctggagttaattcatctggcttcagtgagctaggaacacatctggggctgaatcatccaggagggtctgttatcctgcaaggttccagccacatggtctctcatcattcaatagtctgggtcaagcttttgtacagcatggctgatagcttccaccaagaggaaaaactccaatgtgcaaaggtttaccaagtttctgctggcatcatgcttgctaatgtcacattggtcaaagcaaatcacaaggttaaggcccacatcatagggaaatgaagcccagaagttgtggtttactgggggtcatcattgtttaccattatctcctctcttaccctttatcttcaatttttccttatttacctgtcttttcccttcagcacagaagggaaatctggggccgggcatggtggctcatgcctgtaatcccagtacttccagggggctgaggcaggtggatcacctgaggtcaggagtttgagaccagcctgaccaacatggtgaaacccccatctctactaaaaatacaaaaaaattagctgggtttggtggcgcatgcctataatcccagctactcaggaggctgaggcacgagaattgcttgaaccctggaggtggaggttgcagtgagcctagatcacgccactgcactccagcctggaaaacagagtgagactctgtctcaaaaaaaaaaaaaaagagaaagaaagaggaaaggaaaggaaaggaatctgaatgatcacattcaaatacaaatataaatttcctgtaactgcatattccctttaagctaccacgttactctcctttgcacagccaatcatttttagagtggtctacactcactgccctcacttcatcactgcctgttcattctccaatcactgcaggctggcatccaccgacaccacagcaacaaaactgctctccctgagatcctcaataacctctgcacttccagaggcaatggataatttcctgaccttgtttgctt

SEQ ID NO: 15224 - DNA, 228 bp, Homo sapiens
gcctcaggtgagcagctttagtcaatgttgtgaattttagattttaattagacatgcaacagtttcactacctttcaggatttttgtcctgtaacagaggctcttgctttttgacagagaggtaggcaggtggagaggttatcctgctgctgcagttctcaagttgttaagtttcctctggaaggctaacccttgttgggaactaacagtttcaataccagcaagtct

SEQ ID NO: 15225 - DNA, 614 bp, Homo sapiens
aatatccaggctgactagtggttcgagaggagaaagaaatatttgtcttttacagggtatggtaacttccgcagacagcaaaaccataggctgtgtttctacacactcaataggaagtaaaaactgaaactgatagctatgtggttcagctctcataacctagagtcctatgttgaagatctgtgagatctagatgattgccctgattttctgatgctctttgtatgggaagcatgccctcaaagatctaaggtaaagtattaccttgaaagataagctattcttctcactgattggattggatttgattcattgaatttgagtaagtaattaagtgatgattccacttgggtttctcaaagggcaagaatgagaaagagaagaattaaagtctacttagttggttttctcctgaaatgattctgattcctaaaaaacatgaatgagtctatagcaaaatggcattgccgaagccctgatttacagaccttacaggatgcagtgtatgtatgtttctggcctgctgtaactgtatataaatataacatttatgcattatcaaatagtaacagactattacaagcattcatatatatgttgaaccaattaggata

SEQ ID NO: 15226 - DNA, 492 bp, Homo sapiens
aggcgaggataaaaaatgtgcccgaggccacaaagcacaaggatagagtcagaatttgaagccagcttttccaaagtctaagtcttgctccttccctgtaccttgcaagctttcatccctcagtggataccagggctgaggaaactgatttgtaacacgttcctgtcacagagttttggctctacatttaagacataaaacttggcctggcgcagtggctcacgcctgtaatcccagcactttggggggccaaggcaggtggatcacctgaggtcaggagttcgaaaccagcctgaccaatatggcaaaaccctgtctctactaaaaataaaatttagccgggcgtggtggcgggtgcctgtaatcccagctactcaggaggctgaggcaggagaactgcttgaagacaggaggcagaggtagcagtgaacaaagatcgcaccactgcactccagcctgggtgacagagcaagactccatctcaaaaaaaaa

SEQ ID NO: 15227 - DNA, 934 bp, Homo sapiens
ggcagccaagacagaatgaaagccaagtgagaggggaaacctcgtatgaaaacatcagatctcatgagacttattcactaccacgagaacagtatggaggaaaccgtccccatgattcagttatctcccacctggtccctcccacaacacgtggaaattatgggagctacagttcaagatgagatttgggtgaggacacagccaaaccatatcagggtctatggcagggaatgacttgacccaatttgcatgacaagaggcttagtgtggctgccacacagagaaggtaggagggagtgagaagcaggccagccgtgtcatgtagctttctgagtgagatcagtcacctaaaatggaaaagcattttggaaatataagtggtgagtccagttgtaaagtgtagtaaaatgtgacacgtggttgcctccagcatccccaagaggccagtgtcgtccatccctctcaccggagacagccagacggactcggacatcatcgccttcatcaaggccagacagagcattctgcagaagcaatgtttgggaagcaattgaatttccaggaaatatccatccatgaattatgccagcaagaatgaagcacagatgaaggcagcgcccctcacttgctctggcttcagaagtgaactatgggctgctgggagcaactagtgactttgattcccatggaggggactgtgtttctttaaggatgctgacctggaggccaccgagaggctggggctggggctgaccacaacatccttcctgtggttgctggagctgctggcagggccaggcaaggccagagtgctaggggcagggtgaaggcttcagctcactgttgtagtgacgttttgtgtagatctttataagcttttgagaatgtgaaatagcaccatcaaaatataatgtcagaggatgctcacaccagt

SEQ ID NO: 15228 - DNA, 1445 bp, Homo sapiens
ggtatgcatctgagatataaagaagaaaaagccacagctccttccttcgtgatgctcatagtctggtagaggaagaattcagtgtcctggcaggttacaatggtaccatctttgcatatgggcaaacaggcagcgggaagacattcactatcacagggggtgcagagcgttacagtgacagaggcattatcccaaggacactgtcatacatttttgaacagttacaaaaggacagcagcaaaatatatacaacacacatttcctatttggaaatctacaatgaatgtggttatgatcttttggatccaagacatgaagcctccagtttggaagatttgccactcctatgaaccaagcttcaacccgttcccactgcattttcaccattcatttgtcaagcaaggaaccaggatctgcaactgtacgacatgccaaactccatctggttgacctggctggttcagagcgagttgcaaagactggagtagggggccatcttctaacagaggccaagtatatcaacttgtcactacattacttagaacaggttatcattgccctttcagaaaagcaccgttcgcacattccttatagaaactccatgatgaccagtgtcctaagagacagtttgggagggaactgcatgacaactatgattgcaacactctccttggagaaaaggaatcttgatgagtctatatcaacctgcagatttgcacagcgagtggcactcataaagaatgaagctgttcttaatgaagaaattaaccccagattagtgattaaacgcctacaaaaggaaatccaggaactgaaggatgaactggccatggtcactggggagcagaggacagaggcactcacagaagcagagctccttcagctggaaaaactaataacatcctttttggaagaccaggattcagacagtagattagaggttggcgcggatatgcgtaaagttcatcactgttttcatcatttaaagaaactattgaatgacaagaagatccttgaaaacaatacagtctcctctgaaagcaaagaccaagattgtcaagaaccattaaaagaagaagaatatagaaagctacgagatattctgaaacagagagataacgaaatcaatatcctttctgaagtgatgaagaaacttcctctatcctggtttgaaaggggtaaacagcagtctttcctgagccacatggctgagctccccacccagcttccatttcacattgcttctttccattgagaagtcaaaggtcccttcagcaaagtattgcaaccagtgaaaaagagtttctataaaagaaaaaaatgtgtttgtttttatcctgacatagttactcttgcagggaacattttagtttatttcaaagtatgagcctttttacaccatcttttaacattaattttttaaaatatattttttggctcctctg

SEQ ID NO: 15229 - DNA, 2330 bp, Homo sapiens
ggtatgcatctgagatataaagaagaaaaagccacagctccttccttcgtgatgctcatagtctggtagaggaagaattcagtgtcctggcaggttacaatggtaccatctttgcatatgggcaaacaggcagcgggaagacattcactatcacagggggtgcagagcgttacagtgacagaggcattatcccaaggacactgtcatacatttttgaacagttacaaaaggacagcagcaaaatatatacaacacacatttcctatttggaaatctacaatgaatgtggttatgatcttttggatccaagacatgaagcctccagtttggaagatttgccactcctatgaaccaagcttcaacccgttcccactgcattttcaccattcatttgtcaagcaaggaaccaggatctgcaactgtacgacatgccaaactccatctggttgacctggctggttcagagcgagttgcaaagactggagtagggggccatcttctaacagaggccaagtatatcaacttgtcactacattacttagaacaggttatcattgccctttcagaaaagcaccgttcgcacattccttatagaaactccatgatgaccagtgtcctaagagacagtttgggagggaactgcatgacaactatgattgcaacactctccttggagaaaaggaatcttgatgagtctatatcaacctgcagatttgcacagcgagtggcactcataaagaatgaagctgttcttaatgaagaaattaaccccagattagtgattaaacgcctacaaaaggaaatccaggaactgaaggatgaactggccatggtcactggggagcagaggacagaggcactcacagaagcagagctccttcagctggaaaaactaataacatcctttttggaagaccaggattcagacagtagattagaggttggcgcggatatgcgtaaagttcatcactgttttcatcatttaaagaaactattgaatgacaagaagatccttgaaaacaatacagtctcctctgaaagcaaagaccaagattgtcaagaaccattaaaagaagaagaatatagaaagctacgagatattctgaaacagagagataacgaaatcaatatcctggtcaacatgttaaaaaaagaaaagaagaaagctcaggaggctctccacttggctggcatggatagacgtgaattcagacagtcccagagcccacccttccgcctaggaaacccagaagaaggtcaaagaatgcgactatcctcagctccctcacaggcccaggacttcagcattttggggaaaagatccagtttgctccacaagaaaataggaatgagagaggaaatgtcattaggatgccaggaggcttttgaaatcttcaagagggaccacgctgacagcgttaccatcgatgacaacaaacagattctgaaacagagattttctgaagccaaggccctgggagaaagtataaatgaagcaagaagtaaaattggtcacctgaaggaagaaatcacccagcggcatatacagcaagtagccctaggaatctcggaaaacatggccgtgcctctgatgccagaccagcaggaggagaagctgcgatcacaactggaggaagaaaagagaaggtataaaacaatgttcactcgcctgaaagccctgaaggtggagatcgagcacttgcagctgctcatggacaaagccaaggtgaagctacagaaagagtttgaagtctggtgggcagaggaggccaccaacctgcaggtaaattctccagcagtgaattcactcgatcacacgaagccatttctccagacatctgactcccagcatgaatggtcccaactcctctctaacaaaagttctggaggctgggaagtccaagatcaaggcactggcagattcgatgtctgtgatgtgaatgccaggaaaatcctgccctcgccttgccccagtccacacagccagaaacagagcagcaccagcaccccactggaagacagcatccccaagaggccagtgtcgtccatccctctcaccggagacagccagacggactcggacatcatcgccttcatcaaggccagacagagcattctgcagaagcaatatcttcagctcctttgttctctgttcccaaagtcagctgtctcctctgctcaggcttctacaaacaggaaggggctgagtgatgttttggtaactcgttgaacccctggcttaaagtctcactcccctatcagagtgtggttcttgccaaagagctgtgagtgtaaacactgcttgaaggcccaggcccgaggacaccata

SEQ ID NO: 15230 - DNA, 1338 bp, Homo sapiens
agcggagctggaagagcctggggccacctgtctggtcagagtctctctgctgtgggcctcttggagccaggctggttttgtggtctgactgaagtgacaatgaaattaataggatcctgatgctgtgactgaggccatttccctgtgtctccaaacaggaatgagagaggaaatgtcattaggatgccaggaggcttttgaaatcttcaagagggaccacgctgacagcgttaccatcgatgacaacaaacagattctgaaacagagattttctgaagccaaggccctgggagaaagtataaatgaagcaagaagtaaaattggtcacctgaaggaagaaatcacccagcggcatatacagcaagtagccctaggaatctcggaaaacatggccgtgcctctgatgccagaccagcaggaggagaagctgcgatcacaactggaggaagaaaagagaaggtataaaacaatgttcactcgcctgaaagccctgaaggtggagatcgagcacttgcagctgctcatggacaaagccaaggtgaagctacagaaagagtttgaagtctggtgggcagaggaggccaccaacctgcaggtaaattctccagcagtgaattcactcgatcacacgaagccatttctccagacatctgactcccagcatgaatggtcccaactcctctctaacaaaagttctggaggctgggaagtccaagatcaaggcactggcagattcgatgtctgtgatgtgaatgccaggaaaatcctgccctcgccttgccccagtccacacagccagaaacagagcagcaccagcaccccactggaagacagcatccccaagaggccagtgtcgtccatccctctcaccggagacagccagacggactcggacatcatcgccttcatcaaggccagacagagcattctgcagaagcaatgtttgggaagcaattgaatttccaggaaatatccatccatgaattatgccagcaagaatgaagcacagatgaaggcagcgcccctcacttgctctggcttcagaagtgaactatgggctgctgggagcaactagtgactttgattcccatggaggggactgtgtttctttaaggatgctgacctggaggccaccgagaggctggggctggggctgaccacaacatccttcctgtggttgctggagctgctggcagggccaggcaaggccagagtgctaggggcagggtgaaggcttcagctcactgttgtagtgacgttttgtgtagatctttataagcttttgagaatgtgaaatagcaccatcaaaatataatgtcagaggatgctcacaccagt

SEQ ID NO: 15231 - DNA, 321 bp, Homo sapiens
tccttcgtgatgctcatagtctggtagaggaagaattcaggtaagcaaaaaagccagtcatatgatcatctctttctgcattttgctcaggatcaacttctacacgactgatctatagcttatggcccctgtcctctttcctttcttgctaagtcatagacataccagttgaatttatacaattcatctgtggggaaagtttcacaaggctgatttttccatatatcttctctgtataatttattgttaataaattcatttaagtattttaaaatcctaaaatatatgtcagtaaagggtgctaaaatgttaaacaaatat

SEQ ID NO: 15232 - DNA, 1142 bp, Homo sapiens
agcggagctggaagagcctggggccacctgtctggtcagagtctctctgctgtgggcctcttggagccaggctggttttgtggtctgactgaagtgacaatgaaattaataggatcctgatgctgtgactgaggccatttccctgtgtctccaaacaggaatgagagaggaaatgtcattaggatgccaggaggcttttgaaatcttcaagagggaccacgctgacagcgttaccatcgatgacaacaaacagattctgaaacagagattttctgaagccaaggccctgggagaaagtataaatgaagcaagaagtaaaattggtcacctgaaggaagaaatcacccagcggcatatacagcaagtagccctaggaatctcggaaaacatggccgtgcctctgatgccagaccagcaggaggagaagctgcgatcacaactggaggaagaaaagagaaggtataaaacaatgttcactcgcctgaaagccctgaaggtggagatcgagcacttgcagctgctcatggacaaagccaaggtgaagctacagaaagagtttgaagtctggtgggcagaggaggccaccaacctgcaggtaaattctccagcagtgaattcactcgatcacacgaagccatttctccagacatctgactcccagcatgaatggtcccaactcctctctaacaaaagttctggaggctgggaagtccaagatcaaggcactggcagattcgatgtctgtgatgtgaatgccaggaaaatcctgccctcgccttgccccagtccacacagccagaaacagagcagcaccagcaccccactggaagacagcatccccaagaggccagtgtcgtccatccctctcaccggagacagccagacggactcggacatcatcgccttcatcaaggccagacagagcattctgcagaagcaatatcttcagctcctttgttctctgttcccaaagtcagctgtctcctctgctcaggcttctacaaacaggaaggggctgagtgatgttttggtaactcgttgaacccctggcttaaagtctcactcccctatcagagtgtggttcttgccaaagagctgtgagtgtaaacactgcttgaaggcccaggcccgaggacaccata

SEQ ID NO: 15233 - DNA, 1669 bp, Homo sapiens
cattacccatttttgtgtccataaaattgtccataattttaagagctgtatgttctctgtcaccaagttcaccttaatgagaagttgacattttctctgcctctttgccatttgtaggtgattaaacgcctacaaaaggaaatccaggaactgaaggatgaactggccatggtcactggggagcagaggacagaggcactcacagaagcagagctccttcagctggaaaaactaataacatcctttttggaagaccaggattcagacagtagattagaggttggcgcggatatgcgtaaagttcatcactgttttcatcatttaaagaaactattgaatgacaagaagatccttgaaaacaatacagtctcctctgaaagcaaagaccaagattgtcaagaaccattaaaagaagaagaatatagaaagctacgagatattctgaaacagagagataacgaaatcaatatcctggtcaacatgttaaaaaaagaaaagaagaaagctcaggaggctctccacttggctggcatggatagacgtgaattcagacagtcccagagcccacccttccgcctaggaaacccagaagaaggtcaaagaatgcgactatcctcagctccctcacaggcccaggacttcagcattttggggaaaagatccagtttgctccacaagaaaataggaatgagagaggaaatgtcattaggatgccaggaggcttttgaaatcttcaagagggaccacgctgacagcgttaccatcgatgacaacaaacagattctgaaacagagattttctgaagccaaggccctgggagaaagtataaatgaagcaagaagtaaaattggtcacctgaaggaagaaatcacccagcggcatatacagcaagtagccctaggaatctcggaaaacatggccgtgcctctgatgccagaccagcaggaggagaagctgcgatcacaactggaggaagaaaagagaaggtataaaacaatgttcactcgcctgaaagccctgaaggtggagatcgagcacttgcagctgctcatggacaaagccaaggtgaagctacagaaagagtttgaagtctggtgggcagaggaggccaccaacctgcaggtaaattctccagcagtgaattcactcgatcacacgaagccatttctccagacatctgactcccagcatgaatggtcccaactcctctctaacaaaagttctggaggctgggaagtccaagatcaaggcactggcagattcgatgtctgtgatgtgaatgccaggaaaatcctgccctcgccttgccccagtccacacagccagaaacagagcagcaccagcaccccactggaagacagcatccccaagaggccagtgtcgtccatccctctcaccggagacagccagacggactcggacatcatcgccttcatcaaggccagacagagcattctgcagaagcaatatcttcagctcctttgttctctgttcccaaagtcagctgtctcctctgctcaggcttctacaaacaggaaggggctgagtgatgttttggtaactcgttgaacccctggcttaaagtctcactcccctatcagagtgtggttcttgccaaagagctgtgagtgtaaacactgcttgaaggcccaggcccgaggacaccata

SEQ ID NO: 15234 - DNA, 1085 bp, Homo sapiens
ggtatgcatctgagatataaagaagaaaaagccacagctccttccttcgtgatgctcatagtctggtagaggaagaattcagtgtcctggcaggttacaatggtaccatctttgcatatgggcaaacaggcagcgggaagacattcactatcacagggggtgcagagcgttacagtgacagaggcattatcccaaggacactgtcatacatttttgaacagttacaaaaggacagcagcaaaatatatacaacacacatttcctatttggaaatctacaatgaatgtggttatgatcttttggatccaagacatgaagcctccagtttggaagatttgccactcctatgaaccaagcttcaacccgttcccactgcattttcaccattcatttgtcaagcaaggaaccaggatctgcaactgtacgacatgccaaactccatctggttgacctggctggttcagagcgagttgcaaagactggagtagggggccatcttctaacagaggccaagtatatcaacttgtcactacattacttagaacaggttatcattgccctttcagaaaagcaccgttcgcacattccttatagaaactccatgatgaccagtgtcctaagagacagtttgggagggaactgcatgacaactatgattgcaacactctccttggagaaaaggaatcttgatgagtctatatcaacctgcagatttgcacagcgagtggcactcataaagaatgaagctgttcttaatgaagaaattaaccccagattaaaagcaccaagctcctctgatggagttctcttctgcagaaaccaatgagtgaggcaggatctgtttcagcaaaggccctggtcaggtatcagcatcacacagtgttcctgctggagagaggagacagcatgcaaagtcaagattcaggtggaactgaactgctagggtggattttgttgctgtccctacccttccagaagccctatagcattacagtgctgaatgagaaagagagttaacaaagttattagccccaagacaaaaactagttcagaatttaaggaaaataaacatattagacattgga

SEQ ID NO: 15235 - DNA, 4819 bp, Homo sapiens
tccctcagtaaaagtttaaggcgagaagtgtcagaggcagcggagcgaggaggcgcggaggagagccggcgagcaggggactgggctggcacgacctccgaaggctgagatctcattattaatatcactatatttttggagggagaggcacctttctcatcctctcttcctctccgcccacccttactccctccccctcatctacctgtcaaagtcactgatcttttgcatttcggaagaggacgtcaacgggaaggaattccccctctgggtgcgggctccgagagggggcgacttgcaggaggctccccccgggggcggaggcgaagggtgttggtgccagaagaaaagaatgattgatgggaaacagacaccgggctatagacactcatccttttgcttcagatactgatatctcagcctgcttgagcatcccttgtgagctgtgaacattgaggatcactcagggttatcggatgtacaacgggagagccatcgctttgctaaattattatctgcaattggacatcttttacaaaaaccaaactagacctgagtctaatagatatgttctaagacaaagaaaaagctgcaagttgttaacgcctaacacacaagtatgttaggcttccaccaaagtcctcaatatacctgaatacgcacaatatcttaactcttcatatttggttttgggatctgctttgaggtcccatcttcatttaaaaaaaaatacagagacctacctacccgtacgcatacatacatatgtgtatatatatgtaaactagacaaagatcgcagatcataaagcaagctctgctttagtttccaagaagattacaaagaatttagagatgtatttgtcaagattcctgtcgattcatgccctttgggttacggtgtcctcagtgatgcagccctaccctttggtttggggacattatgatttgtgtaagactcagatttacacggaagaagggaaagtttgggattacatggcctgccagccggaatccacggacatgacaaaatatctgaaagtgaaactcgatcctccggatattacctgtggagaccctcctgagacgttctgtgcaatgggcaatccctacatgtgcaataatgagtgtgatgcgagtacccctgagctggcacacccccctgagctgatgtttgattttgaaggaagacatccctccacattttggcagtctgccacttggaaggagtatcccaagcctctccaggttaacatcactctgtcttggagcaaaaccattgagctaacagacaacatagttattacctttgaatctgggcgtccagaccaaatgatcctggagaagtctctcgattatggacgaacatggcagccctatcagtattatgccacagactgcttagatgcttttcacatggatcctaaatccgtgaaggatttatcacagcatacggtcttagaaatcatttgcacagaagagtactcaacagggtatacaacaaatagcaaaataatccactttgaaatcaaagacaggttcgcgttttttgctggacctcgcctacgcaatatggcttccctctacggacagctggatacaaccaagaaactcagagatttctttacagtcacagacctgaggataaggctgttaagaccagccgttggggaaatatttgtagatgagctacacttggcacgctacttttacgcgatctcagacataaaggtgcgaggaaggtgcaagtgtaatctccatgccactgtatgtgtgtatgacaacagcaaattgacatgcgaatgtgagcacaacactacaggtccagactgtgggaaatgcaagaagaattatcagggccgaccttggagtccaggctcctatctccccatccccaaaggcactgcaaatacctgtatccccagtatttccagtattggtagtaagtaaaaacaaaaacaaaaaaaacaccaaaccaagtctaggctagctttgctttgttgttcacctcctcagatctattttcccagtgtccatttctgatgtaatagggtattttctttgtgaattgcatttttgtgttggttttctgcacagatctggtgagaacacagataaagtgattatttgtgcataactccatgaacatggcagtgctatgacttttctgactactcttaaccagtgagggctacctagactcaggtgcaattccttagataatcatcattcaggaaaaatataagtagtcctatttatccatacttagcaaccaacaaacaaattgaactctctcttagactggatttggatgtctgacataattttaaaaagcagaaaatgaaagccaatgaatgccttgggtatatgcatcagaacccaagaaaaagtccatgataccaagggaagggaattttgttaatgcattaaattctatgttttgtgaaggcctgaaacaggcaaatttgtgatcagtagtctctctggagagataaaggaaaaagagaatctgtacattcatttctccttcctaaaatacgatgatctatgtcttcttgactacttagctttgagtttgatatagaaagagtataaaaaatatgtgcagaatttgggagtgagagtactagaaattcctttaataaatctgttagtatgaatccaagcaattgaagagaaaccgctcttcaaccatctgtagaacacttccccggtatcactacaaagaactttcttccagctatcatgggagaaccaggtgtagctcccgcttcatgtgtaaaataatgatgccctcatgccaagcctgaaattcacattaagaaaatgcccagtaactttacagagcaaaattttaaattttttttttatacattgcaccctttatctctaatggctaaaatctttgaacaactactaagtaactgattacaaataaattaccgagaaagcaagattacgcatggtaagcggagagaattttcactgtagtgtcatcccctcacaggcttgtgtcataggtgctgtgccaggcagggtgatcgcagtgtaaatagccattgaatgattgcgattcccagcatccatctaaaaagcaatactctgataatttggataaagcaacttcctgcttcttataaatgcgcagtcaggtgtcccaatttataaatcaacccagtttacttgagcttgtgaataggcctggacactgatttgttaagcgctagatgtggtaaatgccatgaaaattggccactttgtaaatagaagtagtgttcacatccatttagagataccagcctaatgctacagcatcctctttgtgatcttgttgaaacagcatcagtgttaaaaacttgcaaatgaaaaccttcagctctaatagtctaatttttctgctttagtatcccccttggcatttgcctaactgtatatataccccacaatgtgctcctttcaggccttgacaattgcatttgcacgtgcattttagtgcaacagggaagcaagtagaagcaagctgacacagattattgaggctgctatagtgatctggcctgtcagaagtttcagaaatggatggatggaaaagtagttctttggcgttggggtgtctttctgtttggagtgtcagttgtatgttgcatggcccctctaactgtactgctcactcgacatcccattcggccgcctccaccacattccccatatctgagcatcagcagatgttgaccttttacacatcaaatcaggaaatttctgttttgttttgttttgttttgttttgaaatcagtggtgacctgaaaggatgcttcgttgtgcctttgaaaaaaatatattaacctttattatcgagaacctaggaaaatttactcctaataaaaaccctctgactaaaagtgatattttggactctcccttcaatatgcctctggctgttccgcttagaatgcaatgggtattttctcagatttccagcaaacaggatgtaagagcttccagaggtcacccaacatcacacatgactagcttacctgtttcctggcttttaaggtaaagagttacagtaaaaccatcaaacgtgattgtatcttctaggctgctttaatggcattcgaaagttccttctttgtgggcttataagttgctttttgcgtgcactcgtggattcctttcccctccaaagggcaagaattcacacgtagacgacactgccggttccagagggcacgggaatggggttttcaaggtgcaagccagagaaaaggaagctgtttggatatttagctaagttatgggtgtttgccagtgctttttgcattaccccaaagaaggaatcaatgactataattccactaactatatagaaagataccattatagcagatgtaacacccctgagaccccgattatcacagcatagctcaaggaaaataaatgatgtatattatcgatgtagattattgatgtatataaccatcagtttacatacatattctgtatacacagtgattaaaggttttggagccctaataaatttcagtatagatctcaaaatgccaacgcctgtattaaggttcaaatgcatggatagggtggtcatcctttccgatcatctgctaaaaatgtttttgaaacaaatttcccattaaggtcattcgtacctgctgttgtctatctattaacaaataggtttcccataatcctaaggatacttgacttagaactcagtcattctgatctgctttggccatggctgaaaaaatgctggtgatattgtcagcaattaatgaatcccaaaataaatctgtagcctttg

SEQ ID NO: 15236 - DNA, 1744 bp, Homo sapiens
tgcagccggagcagcaccagcaacagcaacagcgagcgggacggagttaggaccgctcggagcgcacaggtctcgagggtgttggtgccagaagaaaagaatgattgatgggaaacagacaccgggctatagacactcatccttttgcttcagatactgatatctcagcctgcttgagcatcccttgtgagctgtgaacattgaggatcactcagggttatcggatgtacaacgggagagccatcgctttgctaaattattatctgcaattggacatcttttacaaaaaccaaactagacctgagtctaatagatatgttctaagacaaagaaaaagctgcaagttgttaacgcctaacacacaagtatgttaggcttccaccaaagtcctcaatatacctgaatacgcacaatatcttaactcttcatatttggttttgggatctgctttgaggtcccatcttcatttaaaaaaaaatacagagacctacctacccgtacgcatacatacatatgtgtatatatatgtaaactagacaaagatcgcagatcataaagcaagctctgctttagtttccaagaagattacaaagaatttagagatgtatttgtcaagattcctgtcgattcatgccctttgggttacggtgtcctcagtgatgcagccctaccctttggtttggggacattatgatttgtgtaagactcagatttacacggaagaagggaaagtttgggattacatggcctgccagccggaatccacggacatgacaaaatatctgaaagtgaaactcgatcctccggatattacctgtggagaccctcctgagacgttctgtgcaatgggcaatccctacatgtgcaataatgagtgtgatgcgagtacccctgagctggcacacccccctgagctgatgtttgattttgaaggaagacatccctccacattttggcagtctgccacttggaaggagtatcccaagcctctccaggttaacatcactctgtcttggagcaaaaccattgagctaacagacaacatagttattacctttgaatctgggcgtccagaccaaatgatcctggagaagtctctcgattatggacgaacatggcagccctatcagtattatgccacagactgcttagatgcttttcacatggatcctaaatccgtgaaggatttatcacagcatacggtcttagaaatcatttgcacagaagagtactcaacagggtatacaacaaatagcaaaataatccactttgaaatcaaagacaggttcgcgttttttgctggacctcgcctacgcaatatggcttccctctacggacagctggatacaaccaagaaactcagagatttctttacagtcacagacctgaggataaggctgttaagaccagccgttggggaaatatttgtagatgagctacacttggcacgctacttttacgcgatctcagacataaaggtgcgaggaaggtaagagaaaatctgtctgccttcaatgggaacgggtgtgtccaaagaaaatgccagagtgtctcacagctgtaaagtgacatttgtcaatttctactgcaacgttttcttcaggaactccactgtagaagtaggttctgaaggcattctgagatccctcatcctcagcagtaatttgtaatcccaaacttgctgtccctgaacctggcatgattcttcagaatttaaataaaagtgaattttaaaaagtaactc

SEQ ID NO: 15237 - DNA, 1763 bp, Homo sapiens
tcggcccgccgaggcggaccaggctggctgcgcagggccgccgccccgcgccgtcggctcggctcccgcccggcgcaagggcaaacgagccacacgggtgttggtgccagaagaaaagaatgattgatgggaaacagacaccgggctatagacactcatccttttgcttcagatactgatatctcagcctgcttgagcatcccttgtgagctgtgaacattgaggatcactcagggttatcggatgtacaacgggagagccatcgctttgctaaattattatctgcaattggacatcttttacaaaaaccaaactagacctgagtctaatagatatgttctaagacaaagaaaaagctgcaagttgttaacgcctaacacacaagtatgttaggcttccaccaaagtcctcaatatacctgaatacgcacaatatcttaactcttcatatttggttttgggatctgctttgaggtcccatcttcatttaaaaaaaaatacagagacctacctacccgtacgcatacatacatatgtgtatatatatgtaaactagacaaagatcgcagatcataaagcaagctctgctttagtttccaagaagattacaaagaatttagagatgtatttgtcaagattcctgtcgattcatgccctttgggttacggtgtcctcagtgatgcagccctaccctttggtttggggacattatgatttgtgtaagactcagatttacacggaagaagggaaagtttgggattacatggcctgccagccggaatccacggacatgacaaaatatctgaaagtgaaactcgatcctccggatattacctgtggagaccctcctgagacgttctgtgcaatgggcaatccctacatgtgcaataatgagtgtgatgcgagtacccctgagctggcacacccccctgagctgatgtttgattttgaaggaagacatccctccacattttggcagtctgccacttggaaggagtatcccaagcctctccaggttaacatcactctgtcttggagcaaaaccattgagctaacagacaacatagttattacctttgaatctgggcgtccagaccaaatgatcctggagaagtctctcgattatggacgaacatggcagccctatcagtattatgccacagactgcttagatgcttttcacatggatcctaaatccgtgaaggatttatcacagcatacggtcttagaaatcatttgcacagaagagtactcaacagggtatacaacaaatagcaaaataatccactttgaaatcaaagacaggttcgcgttttttgctggacctcgcctacgcaatatggcttccctctacggacagctggatacaaccaagaaactcagagatttctttacagtcacagacctgaggataaggctgttaagaccagccgttggggaaatatttgtagatgagctacacttggcacgctacttttacgcgatctcagacataaaggtgcgaggaaggtaagagaaaatctgtctgccttcaatgggaacgggtgtgtccaaagaaaatgccagagtgtctcacagctgtaaagtgacatttgtcaatttctactgcaacgttttcttcaggaactccactgtagaagtaggttctgaaggcattctgagatccctcatcctcagcagtaatttgtaatcccaaacttgctgtccctgaacctggcatgattcttcagaatttaaataaaagtgaattttaaaaagtaactc

SEQ ID NO: 15238 - DNA, 337 bp, Homo sapiens
gatctcctgggcgcaagtggtgacttcaagctgggagacaaactatctttgtttagcaaggacagagaagttaaccagttgcatgactttcagtaaaaaaaatgagagagtcctggacaaaccaagacagttggttgacctgtgagtggtttcagtgtgcaagaacacactggcagttttgacattttgagatgtggtggctctcctagataataaactgtcttccacttctgtgtaagcttttcttagggataactcaccctgcttcagcaaatccgggcgattgtctctatcagccaaattctgcacatgtagcctctgaatctaaaataaaaat

SEQ ID NO: 15239 - DNA, 459 bp, Homo sapiens
ataatttgccatgtaaaagaaagccagatggccttcaaaccttgacagaagtcatactccagtttatattttaggaaagtatatttttccctcccaaatacagaattttaagaaaatatttccagaatacctactgaaggtgaaactacttcatcgggaggtatttacgttctgccagacttaaagtctataactaaatgactgcaagttcctcattaaagagcacagagacaacatctataaatgtcaccaaggacacttagtaagattaagccctccttttttcaaagaaactgaggagagtctaaaaccaccttggtacatgttcccttaattttctatttaatttctttaaggtaatttatcttatttctctgtcttttgaagacaagctaatgaaaaacaatgtccttttatccaacaagaggtattaaaaaccaaaattctggacaaaaaaaa

SEQ ID NO: 15240 - DNA, 328 bp, Homo sapiens
gaaattctactcattttcagatcaaactagaagtaagctttagtctgtcagtcttcaaagcatatacgacttggatttactttggataattggctaggaaaagcatgtcactgaagattgtgaaatcttataaaatgaattaaaacctcatttattcattcaacaaatttttatcatccatttgccgtgctatgtgccagatactattttaggtgctagagatacgggagtggataaatcagataaaaattctgtttcttctagggcaggggtcaaaaatactcagatagcaaatatttcaggctttgggggccaagtagttacgctg

SEQ ID NO: 15241 - DNA, 446 bp, Homo sapiens
ttccaaaaagccaggcacatgtgactatgaaaagggaactggaagagggagtctctggagaggcctgtggaaactgctgcctccgagtggaccagtggcaggctgctgttggtcagcagggccaacagttgggaaaacaagctgagcacagagcaccagagagagaacagctgggacctgctgggcaggtctgtgtctgttaccaagtctggccaggtccaagaataatgacttcttcacttccaaatcttgtacaagtttctcttttggttgactctacctcagaaccatccagagaaggagatttctgtgaaatacaggtgctagccgtaaccaaactgacatttcaatctagcatcattaatataaacaaagttagagtgggaaaagatatttccagtgcatgtaattgataaataattaatatccaaaaagcactacaaatc

SEQ ID NO: 15242 - DNA, 413 bp, Homo sapiens
cataaatgtaccattatttaaaatttaaagactgcttcttgatttatatcagcagtttccatcttattaaacatatgacatttaaaattctattgaaaatagtaagaaaaaagggtacaaaataaaaggaaagaaaagggtgtggctgagaaaattaaaactggcacaaggagcaagtccagggttctggtcccagctctaaggttaactccataacactggaaaaaacatgtcatctgtccaaagagcccaggccctcacacacaggggtagaatcactgtgtagttaagacctcttcaaaatatatacaccactctctccctcccccatctcccaagaattgtcctgggagcctgttttttgccagaatgtaacctaacctgctcaagtatgctggggcacgaaaaaaaaa

SEQ ID NO: 15243 - DNA, 777 bp, Homo sapiens
gttagaaagttctgtagtcagaaaaactgagtttgcttttagctttaaataaaatacatctatagtgatgcctcttcaactggagttttcatcattttgcgcaggagttcatggcactttattggcaacaagcaatgtttttttcttgaccttggcagaggagctctcaaggcagtgtcatctgttggccacgtgcatctgaacttctaaagagagtggctcaaatgcaggttccaaggccctaccccagtcagaatctctggaggtggaacccagactccacatttgtaaagagaacctccaagtgattttgatggaatcttcagtttgagaaccactgatcaagggaatagatttgtgccaaattgcaaatcaatgtagagacccagctagaatcccttcagcctcctccacaacctggcccacttcttggtcctcacatcaaaacaatctcttcctttcttcagtctttcatggactttcagttctccagtatgctcaggggctccctctccaagaagaagtcttcaatctgcaaaccccacctggtgcccctttacctgaagaacatagaagagtcccacatccactgcctccactgcccccattcatgcctcagcacctccatccctccttctcccaccccagcctcagagcgaggttccagaagtgtcaccaggggccacacagtggtatcctccttgacctcctgtagcacctagcagtgctcccaactcccttcctttacagggtcatcctcatccagaggaggtgggg

SEQ ID NO: 15244 - DNA, 517 bp, Homo sapiens
atgatgctgtgagacaatctaagaagaattaaaatttaaattcatgtattcctacttttttctctgttctctaactgtaatatattttaattacagatggaggaacagacagatgttagataaatagatatataatatatagatcatccaaaattcttattcttatggttttatgtagtcagtatttacctctatttttctacatgtttatccttccaatttagttcattatttcctgcacctttgatttcatatatataaacaggaaataacacatggtggccgttatgtagagagagccacaggacttgtgaataaaatccacaggcaaggacgtggcgattccttttgcaatattggagggaatgccaaaccctatgtttgctgtggaaaagagtatggtagttcctcaaaacatcaaaatggtattgccttacgattcagcagccccacatctcaagacagcaaaagaattgaaagcagagtcttgaaaaaatatttgcacatccatgtttgc

SEQ ID NO: 15245 - DNA, 443 bp, Homo sapiens
aagcagtattcatgttaaaaagcaatgagggactccttccctggtgcacaattttcttcacttgtgatctctaaactgttttcaaattggaagactgggaagcattgctacagccccagccagtctcagccactgctcagcccagtggtggaaagctgagcacacagcgggtgcttactgcccccacttgccgtctgctctccagtagatcaagggacctcagacagggatctgagaagtggcaggttccaataaactgatcaacagaatgaagtcactctgggaagccatgaggtgactttacagcccaagcatgtaaatatacacacagaggataatatatattctttttttttttttttttgagacagagtctcactctgtcagcccaagctggactgcagtggcgcaatcacagcccattgcaacctccacctcctggg

SEQ ID NO: 15246 - DNA, 234 bp, Homo sapiens
agtgagaggatagggtttttggctggggacagtaagaccatcatcactgcgtgaaaaccttctcaaagagtccatctttcagtcaggccgctataaatttatctctatagatcattcgttgttaaaattaagcccagggggaaaatcagactcattcaggatcaaggaaagtcacagaatctgatccattcctaccagggtcccacgtcggcccccccaagagcgacggacagg

SEQ ID NO: 15247 - DNA, 394 bp, Homo sapiens
gtgagggtagtaggtcgggtgagagtgggttcacatagtcttttaggaacctgatgaaagctgtggcagtctactatccagagcttaacacaaaattctgcatatagttttgggggcatatgagttcactgatgccaggtcaaaccccttgctttatagatataaattcactttaggatgcaaatgtaaagcagtggttttccatcaggcgtgcgcacacacacatacaccccttctgaattggaatttacatgtgtactggagtccttagatgactctgatatgtattttggattcagagccactgtataaagaaatggttaggaagaaaagatacttggttagtataaaagtgttacatacaatcacgtcctcccacgtgagtccttactac

SEQ ID NO: 15248 - DNA, 312 bp, Homo sapiens
atttgtatttccctgctgattagtgatgttgaatatcttcatatacctgttgcccatttgtatttcttaggttgctttttcactctgttgattattttctttcccatgcagatgctttttagtttgatgtcctcccatttgcctatttttatttttgtcatgtaaatttttatattaatgatttatattaattatataacactatatatatagtgtttgaagtgattgggttgatatctccagaatattattttgtgtctattatatatcataccacataactaaagtagatatttgtttcattttattttt

SEQ ID NO: 15249 - DNA, 728 bp, Homo sapiens
gaatatgtccaccaaagacacctcgttggtcatgttctatcacctcttcgtcaaattgacatcaggtcctaacaggtcactttcaagatacagaagaggcaaattttgttttgagacttggccattcctagggtcagcaaagtgtattcctggcagccagaccttcagtcacttatcaggaaatgcttgacctaaagacagacaattctttccccaaactttgctgtttcttttttgagtctttgttgaaagatttcttttaaaaggcgttcgtgtgagaagatcacagcaacaaatctggcttgttctgttttagacttactttcttaactcttgggcagaagaaaatgaatgagatttgaagacctttgataccttgagtagacaaagcttgccttgaaactagaaataagacgaaactagattttaaggggaaaaaatttgctagtggtaatataattggttttgtttcatttttttatgagtctgaggagttgacattaaacgttgggatgttgctttgttaatgaagtcatttcaatttttgcaactcttaacatctgcatgcttccataaacagtgggttggaacaaaagaaaatgtgactaagggatattccttaaattcttttttatgttatgagagagaatattggaatataaagaatgttactttatctggtaaaccatctcataggccagaagcactaacagtttgaatggttggct

SEQ ID NO: 15250 - DNA, 402 bp, Homo sapiens
gccgcttggtgacactgcagccgcggctcagcactgtcacccagaaaggcccgccgacgtctgtatgcagggaacgtggctcttagcagagcctggacaggcgcagggccaaggaagtctttgtttttgtttctttctctagcccttcctgccaatacatcagggatataactccttggtgtttctgccttacaatcgctccttataccccacccagatcctcagcactgcagctcccactgccactgcccgctgtgagtcacctccccctctcccttttttaaaccaaacggcaaggccatattgcagttatccataaatggaaaagcaagaagccaccaatacctgtttgagaagatggcattttaattagcacactccggctgccataaacccgggctc

SEQ ID NO: 15251 - DNA, 491 bp, Homo sapiens
atagaattacagatgaggcaaacgtagaatctggaaatctctggttgatttggttaaccttctgctgtgataatattgatacttaccacatctctctcacacacacacactcccacatagaaatatattcctaattttgatgtatgagcattttagcagtgactccattcctgaagtttactgcagctcacaaatcactaatggtatttgggcaaacagaaaaggacccttgggacacagcaacacagtttttgcctttagctgggtgaactgatggctacctgtcccataaccatgggtgtctccactcctagagtgactcctgctacgcacccactcctgacctccctccctgcctcccagcaggccacagcacatctgtggatggccaagagcaagaccttctgggtctgggtggggaggctgggttcttgagggcctagggtagtaggtagtaagggccagttgggtttgccctgtgcctgcctaat

SEQ ID NO: 15252 - DNA, 393 bp, Homo sapiens
cttttcttccacatgaatgtgaaattctggaagtcaagaaccatgtttgttcacatttttatctctagtacacagtacagtgcctggtataagaaaaactcaatgtattttaccatcctaacatattaagtagagctctacggcagataaatgttaactctcatgatcatatcactaagaagatgtggctgtaacagcctgtcgttgctctgaaaataaagagccaaattctcaccgctgctgcaaaggcctgcctgatgggtgcccttccttcctgtctacattctcgctttgcccatccctcctcccttctcagcctggttaccacctacccttccttcaaaacctgttgaagcctcacttccccttggatgcttccctgccacccttgaa

SEQ ID NO: 15253 - DNA, 368 bp, Homo sapiens
atggataccggggggccatgatggtgtcccgaggcggggtgtgccaaggtggcagtgctctccctgcccagctcctgctcctcccctccccagtcctcacataccagctgcagagcatttgacaccaggcatccacaagacacagaccctgctcctcagaatcttgggctcatcgtggaaatcaaggaacaatacaggggaagacagaatatgagtctcagaaagttgtctattttgtcccttttaaaaacaagatttctcatacctgcagtcctagtactttgggaggctgaggctggtggatctcagagcccaggagttccagataccagcctgggcaacatggtgagtgagaccccgtcttcaca

SEQ ID NO: 15254 - DNA, 680 bp, Homo sapiens
ctcttcctctcaccttcatggatctagatatgtcaccgtgagattccctatgcagaggcccatgtggcaacaaactgatgtgtccttccaacaaccaggcctgagacctcacaagacccaactggatctcccagacagagcaggcagaacaccatttctgctgccccacagccctcaaagttgttactccccgactctggaaggttctcagtgactagagactggtgcggacccccagcacagtgtagccacccccatgaaaacgtgggaaccctcaagagacaactgaaaaaatctctctcacaaccatcatcaagatcccattccctgctgcctccaagctggggagagaacataaagcttgagctcgcctcagaccagtggtatacagctcaggacagccaagcatgcatttgtatgtgagtgccagtgcgggtcatcacagcttgcatccatttcaagtcttcatctaacatacagaaggtcttcagattgagaggagcagaacatgaggtactgaactcaagaggtctcacgtgcacttggacctgatttacatgacaaggttctggcctgattcagtaacatgatacaatcttatgtggggtattgggaggttgagtatgtatttttcatggggaagaatgtaaataatccatggaataaaaaatatgactttt

SEQ ID NO: 15255 - DNA, 351 bp, Homo sapiens
aagtgagaacgttcagtatttgacttttggttcctgaattaaatgtatttctttaattcacaggtcttcagattgagaggagcagaacatgaggtactgaactcaagaggtctcacgtgcacttggacctgatttacatgacaagttctcccccattggcatgctgataaatgagagtctgaagctttgacataaaaacctaaactctacctgtgtacagaacagaaacagaatgagagcgaaaaaacaactatactgaaagcaaattgaagagaattgtgaactttcttctgaatgcatatattttgctcgacaagtttagcttccataaaaatctgaaatctagaatgt

SEQ ID NO: 15256 - DNA, 681 bp, Homo sapiens
ctcttcctctcaccttcatggatctagatatgtcaccgtgagattccctatgcagaggcccatgtggcaacaaactgatgtgtccttccaacaaccaggcctgagacctcacaagacccaactggatctcccagacagagcaggcagaacaccatttctgctgccccacagccctcaaagttgttactccccgactctggaaggttctcagtgactagagactggtgcggacccccagcacagtgtagccacccccatgaaaacgtgggaaccctcaagagacaactgaaaaaatctctctcacaaccatcatcaagatcccattccctgctgcctccaagctggggagagaacataaagcttgagctcgcctcagaccagtggtatacagctcaggacagccaaggtgagatctgcaaccaacactcaagtggaagaggagcacacactttcagaccactgagggggtgcatgactgcaatcatgagcaaaatacagatgagcatgtggctgaagaagagtctacctactggccattatatttaagcaccatctactgcatcacagtgtaacatcaacagcaaaaatactttgttaatataccccctggggaactaaggacaataatttaactacaaataaagaccctacctaaagccttagccctctgaaaatatccag

SEQ ID NO: 15257 - DNA, 450 bp, Homo sapiens
aacctttatgaacctgtgtgaacctgtgtgaacctgcatgaacctgcgtgaacctgtgtgaacctgtgtgaagtgcttcagagatacccataggcatttgttttcctctgtgggaagatttcaggcctgcagctgttaatgttgggttgccgggtcctttgagttctctgtcccttctggtgtcacagttgcctagcagttgctggtttgcctggctccactacatgccctgggtggggatgtcctgttcatcccttggtgccaagcactgagcactgagcctttgtggcctctgtgctcactccagaggggccagccttcctagccctgctcagctggtgtgtgtctgtacattataagtaagaaactggctgggcgctgcctgtaatcccagcactgtgggaagttgaggtgggcagatcacatgagtttgggtgttcgagaccagcc

SEQ ID NO: 15258 - DNA, 132 bp, Homo sapiens
ttgagtgtttattacatattctggataaaaccttttgtaagatatatgacctgcaaatattttcttcccatttgtagcttgtcctttcattcccttaaccatttttgataaagcaaacgttttaaattttga

SEQ ID NO: 15259 - DNA, 776 bp, Homo sapiens
aacagaaatgagggaagggtgtaggaagtagaatatttactaagtggaagaagaatacaataatttctttaattttggttgattttaactaggaagaaaagactttggaaaccatcctttagaaaggcaggctttagtcttaaatcccacaaactagtaaaagaagctttagaagaacaaaatataagcttaagttataaacattgagaaaactttctttttaccctatttataatatcaggacaatattaaaatataatgtttaaacaatagatagctaagaatactccagatgtcaagtacctgggtgacccccttggtctgctggcctcctggacttagcctgtcccaagatatttgaataaaaggggccctgtcccctatcaagggaagagggaaaccagcctgcctcttgcctccccacacatatgtatccagagagtctcagctctagttggctgttgcctattctggttgttacatatttttgttttgttttgtttttgagacatcgagtctcactctgttgtccaggttggagtgcagcggcgcgatctcagctcactgcagcctctgcttcccgggttcaaacgattcccctgcctcagcctccctagtagctgggattgcaggtgtggtgacattcgcctgtagtcccagggaggctgaggtgggaggatcacttgagcctgggaggtcgaggctgcagtgagataggattgtgccactgcactccagcctgggtgacagagtgagaccgtctcaaaaaaaaaaaa

SEQ ID NO: 15260 - DNA, 157 bp, Homo sapiens
tacctatcagaattttttttcttcagtttttattaaatggctggctggttgtcacatcgtttactgaataattccatcgtgttccaaaaaccataaaatgctgtctttatcttagactaaatatctattaataattgggtatgtttctggactttga

SEQ ID NO: 15261 - DNA, 513 bp, Homo sapiens
gtccacaattcttaagtgtctaaggagcacctactgtgataggcacctcctgtgataggcactcttctaggtgttgggaatacctcactgaacaaaacaaactgcttatggagcgcttctatttggggatataatatactatacttatatgtggggatataaacaaatgtgtgtgtcaggtgttaagtgtcttggaaaaaaaagtagttggtaaaaagatgaataaaagaatgggaggaggcaagttgctattttgctatttgtagctaggatggtcagggaagatctatttgataaaatggcatttaaacaaagaaacctgcaagaagtgagagagtgaaccataaggaagagtgttttaggcaaagaacagcagatacaaaaaccttgtggtggctgggtgtggtggctcacagctgtaatcctaggactttggatggctgaggagggaggattgcttgaggccaggagttcaaaaccagccttggcaacatagtgagacttttctacaaa

SEQ ID NO: 15262 - DNA, 596 bp, Homo sapiens
atatcatgtcttctttggccttttcactgagggcctgtgccattctcgatgcaaataatcttttctgaatatgggagaattactaacaaatttatacctgctcaccaggacgctatacatacttgcacatgtaattttgcttatagcttcagaagattcgtgggcccttccttcgccaaccatttcatgaacccatgagccccagattaagaactctttctcttggttgttgttaaaatataactacgtagcaggaagaggaccattgtgatccactaccaatagaacatttatagttgaaaatgcaatttgagttgtttgttcaccagtgatgctatgttatgcatttgtttacatctcataacatgtggtaaatatttatgcaagatggctagccagacaaaaagaaaaaaaaaaaggaaaaacaaccgtgaaatagagaatgcagggtgacccatgtaaacaggctagagatacatttgaaaaagatgagggttaaagagtgtgtagatgttggcaggtaaagagatagcatcctctagggaggatattatcaggagtcagagtaatcttggtaaatgggagaatatgtaaga

SEQ ID NO: 15263 - DNA, 300 bp, Homo sapiens
tatagttgtccttgcagtattgtacagtgtctctgaggccaatttttcctttgtaagtagtaagcataacttggaaattaggttctcagaaacagtgttcaaccataagtaaccactgaagacacctgtctgtgccgtcatctctctgtagttaattgggtctcctaactacagccctgtagttagttaggcttgtagttcagctataggcttgtgctgtagcttgttttgatcacatatagcaattatttatttatatatttcaaaacattgctcaattcacctatccagggattcctt

SEQ ID NO: 15264 - DNA, 315 bp, Homo sapiens
gtattgctcacacatttaaaaaatcagaagacaaggcagacactttactactgttaatatgagaatcaaacatacaaataatttgtgaagcataaatagaggtaaaaaagagagataatggctaattcctggtaaacctaacaagggcaggaaccatgtctgtttaatccaataatgtatacctagcacttagctgagtgttggctagcaaatgtttaacaaatatttttgaaaaaaatgtaagaattcctggatgtaaacatttacttttccgaaacctagtgaaaagcattaaatgttattggtgtttaaagt

SEQ ID NO: 15265 - DNA, 903 bp, Homo sapiens
tatgcgaaaaccttctaatgttttcttcttgttaaacaggtaatatatgcacattgtacaaaaatcagaaagttgaaaaaggtggggaaaagaagtccttctctcactcatttcccttccctgaatccaaactctgttaccagttatctttctagaaatggccccatgcacatataaacatatatgaaacacaaattatagcataacatacagacttttgcacattcagcaatttattctgtagccttacctagaattgtcccatttttttcaccaattgcatagaactccattatatggatgtattttgattttttcaaagaatcagttctgttactgcacgttgttggttttcagtcttgctaatacagacaaggctgaaattaagacagtaatcaagaatttgccaagacttccttccctcctcccaaaatgcctccactccaggttccaggtctagatccttgggattttctaggtgatggaagtatctttgttattcatagtgagctctgatagttacgctaaccagatgactcaaataggggctagccacaccagaagaccaaccattggattagagggttggagttttgagtcatatgatattagcccaacctctgaggtggagagaggggttagagatggagttcagctttatatagagattgagtcaattaatcatgcctgtcatgaaaccccgagagaaactctggtcagtgatgctcaagtgaacttccctggttggcaatactctggtgtgttctaggagggtgacatgtccctgagggcacagaaactttgtgtttgggatcctcttacaccttgctctatgtatgtcttcttttggctgttctgatttgtatccttttgctataataaactgtaatagtacgcatagca

SEQ ID NO: 15266 - DNA, 2449 bp, Homo sapiens
tatgcgaaaaccttctaatgttttcttcttgttaaacaggtaatatatgcacattgtacaaaaatcagaaagttgaaaaaggtggggaaaagaagtccttctctcactcatttcccttccctgaatccaaactctgttaccagttatctttctagaaatggccccatgcacatataaacatatatgaaacacaaattatagcataacatacagacttttgcacattcagcaatttattctgtagccttacctagaattgtcccatttttttcaccaattgcatagaactccattatatggatgtattttgattttttcaaagaatcagttctgttactgcacgttgttggttttcagtcttgctaatacagacaaggctgaaattaagacagtaatcaagaatttgccaagacttccttccctcctcccaaaatgcctccactccaggttccaggtctagatccttgggattttctaggtgatggaagtatctttgttattcatagtgagctctgatagttacgctaaccagatgactcaaataggggctagccacaccagaagaccaaccattggattagagggttggagttttgagtcatatgatattagcccaacctctgaggtggagagaggggttagagatggagttcagctttatatagagattgagtcaattaatcatgcctgtcatgaaaccccgagagaaactctggtcagtgatgctcaagtgaacttccctggttggcaatactctggtgtgttctaggagggtgacatgtccctgagggcacagaaactttgtgtttgggatcctcttacaccttgctctatgtatgtcttcttttggctgttctgatttgtatccttttgctataataaactgtaatagtacgcatagcactttgctgagttctgtgagttgttctatttaattatagaacctgaaggtattgtggggacccctgaacttgcagccagttggtcagaagtaaggatggtcctgggaatgcccaaagttgctagtttctgaagtgagggcagtcatatggaggactgggcccttaatctgtgaagtttggcttaacttcaggcagttggtgtcagaagccattgcaaatatcctgatgatccgtgcaaaacaaaaacacttaacagaaaattacgttgtactctctgtacggataattttcggttaagtgtttttgttttccatggattgtactagatatcaatctgataaataacttttattcattatagttttaatttgcatttctcttattaatttttgttttaaaaccattttctttccagttctacgatctgttaacatatttttcccacttttctattgggttggttgtctttttcttattgatttgttaaaactctttataacagaaattggtcatttgtgatatgagtctgaactgtgtttctcaatttgtgatttttctctttacttttttaatggtgtctttttcttgtagtttttttaatgcaggtggaattatcagtctttcatttttttcttctgtgttctacctgtttcacaggtagaaaagccttagctctttgagattatgtttaaatgccctgtattttcatctagtggttttatggttttattttgtatgtttttttcatccacctggaatttattttgctgttaaaatatgaattagagatccaacttaatttttttcagatggttgttgacttattgcaatatcatgtgttatataatccatctttactgattcgttgctaattggtttctggacttttaaggctatctgatgaactgttgatctggtaccacactgtttcaattattgtagtcttaaaattgctgtacgctttggtagggataattttctgttaagtgtttttgttttttataattttccaattagtcttgctcattttttatataaactttgaaatcaatttttctgattttcaaaagaaaaaaaatcctgtttagtattcttagtggaatgaattaaatttccatagcaatttagggaaatttgactttcttaacgtgttgagtgttaaacccacaggtggtagcatgacattgactcctcagccaagcatattatcaactgtcggaaactaggttttcccatagtgatccaagaaactagtacgaaatgcctttctgattttttaaaacttgtatacatatatagtacatattatatatacttatatattaagtaatcagaagtatgtgtttctcaatcaccttttaaagacttctttatatagctcttgtacatttcttgatatgaatatgttaatgttttctttcattatgttgcatatggcttttgttttctgcatgaaaactattgatttctgcattctaattttgttcccagtcacctaactgaattcttctaacagttgtaataaatttctggttggctctcttgtg

SEQ ID NO: 15267 - DNA, 484 bp, Homo sapiens
tacaataacaataccaaaatacctaggtagtggcatgatcatccattaaagtattgccccaaattcctaacaattagattaacttttcaactcttaagtaaattcacattccatctctattgcatttagccaagaaactgatctttgttatgggaacatttttctatgtaaaagttttacaaataatgtaaatggaaaattgtagccaggtgcagtgggtcatgcttgtaatcccagcagtttggcagactgagttaggaggattgcttgagcccaggagtttgagaccaacctgggcaacatggcgaaacaccatttctacaaaaaatacaaaaattagccaggcttggtggtacactcctgtaatcccagctacttgggaagctgaagtaggaggatcaattgagcccaggaggtggaggctgcagtgagccatgatcatgccactgcactctgcctggatgacagagtgagaccctgtctc

SEQ ID NO: 15268 - DNA, 511 bp, Homo sapiens
tacaataacaataccaaaatacctaggtagtggcatgatcatccattaaagtattgccccaaattcctaacaattagattaacttttcaactcttaagtaaattcacattccatctctattgcatttagccaagaaactgatctttgttatgggaacatttttctatgtaaaagttttacaaataatgtaaatggaaaattgtagccaggtgcagtgggtcatgcttgtaatcccagcagtttggcagactgagttaggaggattgcttgagcccaggagtttgagaccaacctgggcaacatggcgaaacaccatttctacaaaaaatacaaaaattagccaggcttggtggtacactcctgtaatccaggcagagtgcagtggcatgatcatggctcactgcagcctccacctcctgggctcaattgatcctcctacttcagctacccaagtagctgggattacaggagtggttcgcacggccgcgaatttagtagtagtaggggcagc

SEQ ID NO: 15269 - DNA, 222 bp, Homo sapiens
cactggccagattttccttacctccccttccactgaccatccttgtttctttcaactagtgagttctgtgctagcttcaggctctaggcatgcccttctcttctgtccataccaaggaattgtggatggaaagtgacctggtgataaaaacccatcttccttaaagtaccctccctgcttccaaacccccagcttttttcaactcaaacaatgcccagattt

SEQ ID NO: 15270 - DNA, 470 bp, Homo sapiens
attacagatttcagtcacattttgtcagtactgactcttgctgcttgtgttctgttgatatgggtctccaattatatcctgtcagcagatgctttttcatttaatgattggtaatgtagaagggggtaaaatactattaattttatttttgtgccaggtgcagtggctcactcctgtaatcctaacactttgggaggctgaggcgggtgggtcacttgaactcaggagtttaagaccagcctgggcaacatgacaacatgacaaaaccctgtctctataaaaaatacaaaaattagcttggcgttgtggcatgcgcctgtagtcccagctacttgggatgctgaatcgggaggattgcttgagccagggaggttgaggctgcagtgagccatgtttgcaccactgcagtccagcctggactgcaagtagacgccggcgcgaatttagtagtagtagtagttgacccggca

SEQ ID NO: 15271 - DNA, 359 bp, Homo sapiens
taaacgtctacttttctcctaatgttgtgtctcctttgctggggaaaacttttataattgctgcctaactcctgttgtttcactctgtctgccctctctcctaccctgcttttacccccagcctggagtccacttgggtggaaatgcagcatataatgagcccaaagttaatcatctgcaggtttgccctgataagtcacagtatgtttgctgcactccttccaagagtcaacagcagctttggggatgtgctgagagtggcttatggcattctgagcgctggcccagatgggaggcagtgtgttggggagtctatctgaacgccaccatctggaatgcctctgttgccctgaaggcac

SEQ ID NO: 15272 - DNA, 571 bp, Homo sapiens
ctcaagccatcctcccacctcagtcttatgagtagctggggctacaggcatgtgccaccatgcctggctaattgtttttggtagagatggggtgtcgccatgttgcccgggctggtctcaaacttgtgagctgaagcaatccgcctgtcttggtctcccaaagtgctgggattataggcatgagccactgcgtctggcctgttagccatttttattttagcccttccagcagaggtaaagcagaatctcactgagatttaatttgcatttcccagatcactgatcatctattcatgtagttactggacattcctatatctttttttgttgaagaatctattcacattttttgcccattaaaaaaaaattggattgctctcttcttcctgagttgtagaagttctttatatggaccacaaacaaatcctttgttagatatgcgcgttgaatattttctcgcattttgtgatttgtctttttttttgagatggagtcttgctcactctgtcgcccaagctagagtgcagtggtgccatcttggctcactgcaacctccacctcctgggttcaa

SEQ ID NO: 15273 - DNA, 386 bp, Homo sapiens
gtattcatatattcacaggtctacctttcacttgctgaaaaggaaaatggtgactctatctgtgatgtattaattatatttatgtttcctagaaccacaaattcaggttcaattacacttggttaagtcttacatctttgttataaataatttatattttcaaaaatttcctggttagaagttttgcataacatttgaaagatgaacctctctctgtttcatccatgattaaaatgcagtggaaattttcagaaagtttgcattccatcttaatgttcgtgggtagagtttctggaatgctgctaaatatcttaagaagtatttcttacaacatatttaaccttgtacatttagaagaatttagcttagtggcagtattaaatatt

SEQ ID NO: 15274 - DNA, 371 bp, Homo sapiens
gagctgcacccccagccacagggcagcaccctggccccacgagcctgctgcaagcctcaggagagtgagctgcacagcagaccctgccagtgattcctggggcttctcagacctcaccaacacctgagggtcctgctcatcagacacgcacaccccacccccatccccagcccagactgactgactcagatcaccagggagagggcccagggtctacatttgtctaaagccccccaggtggttctgaagctccgccagcttctagaacaccaccatagcacacacagatgctgcctgtgacacgctgtgttttcggctgtcatctctgggataaggccccttcagggaccccgacagcatcggaagtgaga

SEQ ID NO: 15275 - DNA, 311 bp, Homo sapiens
gagatgaactctatgattgctctagcttagtgtttgcagagagattccagatcatagtgcagaggagaacccaggtagaacttgggagtcttgaggacattgcagttaacagtaccagagtatagagagttacactgatacagaacgctggagatttgtggagaagagacttagagtaaacagataagtactaatgactgcctgtgtgtgaggagagaatacttatgaacttcttcataagtccagtatttaccctgatacaagaatattacaagaaaagactattacaaaacaaatgtcattcacagatg

SEQ ID NO: 15276 - DNA, 375 bp, Homo sapiens
gcagaggctcctgtgtcccatccgcctggctgtgggaaccccagccttccccctccgcttcctcaagataaacccaacaccccgccagggaagaagctgctgctccagcacccccgccccacctggaacctccgggaagagagacttcttttacaaagcatgccacagtgacctgaaccgggaagaaaacaatggcttcttcagttccaggctgaggaagttcacatttgagtacctgacaacgaaatttcctatcaatacaagtaaagcccaaaagaaggctagctgggggccctacctcccttaacccttggaggtttggagagcagccaggccagactgctgcacgtggctccaaggcaccctatgtgataa

SEQ ID NO: 15277 - DNA, 381 bp, Homo sapiens
ctctagtggtcttttcttggtccaagaagagacaaacattctgcttctggccctggcagtgtggtagttgctgggggaggctggcaggaactgtagtggcaacaggattccgaccccccagcatgataggcagcatcttttcagctatttcagttctaatctaggtgcacaactctggcagagccagaaccaactggctcaacattagctcctacagtgccacctctaccctgggggtattagcagctcctgatctcagattatcacaccatcttcctttttttcccagggcccctaaacctttttccttttgctctcccaacacttctaagaccattctaatcggttacctatattgaatttttctctgtttgaaatact

SEQ ID NO: 15278 - DNA, 289 bp, Homo sapiens
taagaggctaaaattcattcagttaggatatactatgcactagccattatttaaatattagctcatttgattattttgacaacccttatggggataattatcttcatcatggagataaagaaactcaggatcaggctttttgaatactctgctcaataccacaagtcctctatgtgacaaaggtagaattcaaactcagatttattgaattattcagcttaggatttcctcactgttacaccttacagctctatacttcctaagtgtcctgagagggcaattaacctaa

SEQ ID NO: 15279 - DNA, 212 bp, Homo sapiens
atattttaggcatttatcagcaaatttatagctactcattgctagaggtgtttatgggcaaaaaaaagagaaaagaaaaatccttaattatcttaagagaattaaatattgatgcccttttttaagagcactcatagaatgttgacactgacttgagctctttaagtgtttataaaacactgacctggattctaaattttgctttatactta

SEQ ID NO: 15280 - DNA, 283 bp, Homo sapiens
aggcactatcccatttataccaataaccagtgtatatctacttaaggaaaacataaaaacttcatcttctttccttttatttcttatgtgaatctcccgtcttccattctcttttataattgagaatgtctcaatcatatgaaattagttaccagaattaacacaatttagactatcttcctgattccttaaacccctttactgaagtatactcatgaataatactttaaaatatgggggaatagaaaccatgaactttttacctttttaaactatttatcca

SEQ ID NO: 15281 - DNA, 847 bp, Homo sapiens
gctggccccatccagaacccggttctgattagagggcaagagtgacagacgtggagggtggaggggcccagagctggaaattgaaccatcatcctgctgcttgcagtcctgagccttctcctgctgaatgtcaggtttgtttaaaacagcaagagaggccttgactgagttggatgcccctgctcccattcagatggtccccacaacaaaggaacggaatggcagtggaggagaccagtgtggtttagagatgcaaatcatcacgcgttatggagaaagcagacacctttcaatggcaggagatatggaaaaacctagtcatgttgacctctttttcagatgtatctcagattctggaattatagcataataggaattccttccaaatccacaaagcaatggttcctatccctgccttgcaaaggcttaatgactctagcagcagtaagactaggagcaaacagtaaaatatcatctcctatctctcagttttgtcttgcactgtattacaaagagtatcatgggcaaagatttaaaatgggcagaaatgctaagtattcattttaaatatacatgggctcagtgcttgcctcgctcagaacctaaaaggggtttatacagattcttaatatctaggaattgatgcatggttgagtcacggatgaatctccttctctccctagccataaaaatgctacctaacttgactctgacttctgtaataatattcctaactagagaaaaagtcaaacttaggcatcatctgacttaggtacatgtcccaacttgagtgcttactcattctgtgacttgtccttcaacctcagaagagccattgggccccttg

SEQ ID NO: 15282 - DNA, 477 bp, Homo sapiens
atgatgctgtgagacaatctaagaagaattaaaatttaaattcatgtattcctacttttttctctgttctctaactgtaatgtattttaattacagatggaggaacagatagatgttagataaatagatatataatagatagatcatccaaaattcttattcttatggttttatgtagtcagtatttacctctatttttctacatgtttatccttccaatttagttcattacttcctgcacctttgatgtcatatatataaacaggaaacaacacatggtggccgggatgtagagagggccacaggaattgtgaataaaatccacaggcaaggatgtggcgattcattttgcaatattggagggaatgccaaaccctatgtttgctgtggaaaagagtatggtagttcctcaaaacatcaaaatggtattgccttatgattcggcagccccacatctcaagatagcaaaagaattca

SEQ ID NO: 15283 - DNA, 493 bp, Homo sapiens
gggtgctcagtgtggcctcggtcaacacactacctggcctccagctctccaaagccattttaggctgaaggtggtcagtgaatcacatctgagggcgcaggggccttggccctcctggctaacagagttccttaggagcgcagaaccccaaacggaaccgccttggaaagtccacccagtcactgcggggtctgggtgggggtggaggtgcaaggtccccagatattctcggagattttcacaccatctcagcaccacattcagaactcagcctgcgccggttgcagcaggaagaaagaattatgacttgtgactttggaaagcgagaagctgcccagattccccctccctgagacatttggggtgggaagttcagggagaattttcaactgcaagaccaaggtgatttagaaggtaaaacatttgcgtttgtgtcaaatttccacaccttccccctccggatcccaccgcccctgcttcccacacagcatgg

SEQ ID NO: 15284 - DNA, 338 bp, Homo sapiens
caagacaaaatttcaggaaaaaaaatcacagtcctaattactgaaggcgcatgcataaggtaatcatatttggaagttagaaacaaatctctttttgctctctgcctcttttcccttagatttatatgggttggtaaacctggccttgtggtactcaatcatccttgcttcagtgattcactaagtaaccccttgcgagttgatttctccagcctctggatttatttgcattgttatgcaatgggtggaacacctcactgctgttctgctcctcagcagttagttctatcttctcttacagctgatgcttcttgaggggaaaggccaccttgtgtctt

SEQ ID NO: 15285 - DNA, 781 bp, Homo sapiens
gaactgttgtcctttattcacttcctaattatagaagtgtcctgccatgtagtaagtactcagtaaatgttagcatggtagcagataaagtagaaaatctcttttcccccatgaccctccttgtgaagaggtttctaaaagccagtggtcccttctccctgagtaaagagggtgtggtaacttccagaaacgtttcttgccctttgaggatatgtggcactgagtagtcaccacacaagctcatcccccggtgcggagatatggctacttcaggaattgggaggaccccgcgctgcgcccggaatgtgctctggcaatggtttgcctttcttttctgtcatttcctttatttttgtgtgttttccattcatctcttgttcctcaaagctgcacacagccccgcccttctgcttggccaaggtctggttagcaaagggccctgtctccggcggatctggctttcctcgctgtcagccttcaggtgccctgaaagctggcgaaggtttctgagtcaatgctggggttgagtgggagtttagaacatcactgcggtgccgcagtcactcttggacgtccacgtcctcttggaggtttgaggcaggctcagctcagccgttcgctttggtatcctcataatcaggtagaaagtctggccggggccaggggcagtggtgcacacctgtaatcccagcacttttgggaggtcgaggcaggaagattacttgagcttaggggttcaagaccagcttgggcaacatagtgagaccccatctctacaaaa

SEQ ID NO: 15286 - DNA, 768 bp, Homo sapiens
gaactgttgtcctttattcacttcctaattatagaagtgtcctgccatgtagtaagtactcagtaaatgttagcatggtagcagataaagtagaaaatctcttttcccccatgaccctccttgtgaagaggtttctagtttcttgccctttgaggatatgtggcactgagtagtcaccacacaagctcatcccccggtgcggagatatggctacttcaggaattgggaggaccccgcgctgcgcccggaatgtgctctggcaatggtttgcctttcttttctgtcatttcctttatttttgtgtgttttccattcatctcttgttcctcaaagctgcacacagccccgcccttctgcttggccaaggtctggttagcaaagggccctgtctccggcggatctggctttcctcgctgtcagccttcaggtgccctgaaagctggcgaaggtttctgagtcaatgctggggttgagtgggagtttagaacatcactgcggtgccgcagtcactcttggacgtccacgtcctcttggtcccttgccgctcgctcagttcacctcctcgctttccgatcctcctactctggcataaggtttgctccgctcccagcgacacgtctccacgcctcttatccacctcttctgttccgcattctctcgtaggtaccttgcctctaggtcctctacccgacctgcccaccatatgtgcctctctcgcttctaaacatctgctctttctccggctgggttccactccccatttccccg

SEQ ID NO: 15287 - DNA, 354 bp, Homo sapiens
accctggtccccttccgttggaatgaccacaccagtttcctgtatgtcctcaccgcacccaccctggagccccaagagcactttgtctgtttaccctcttaaaaattatcaaagacctcaaagagctttcatctgtgtgaagatgaactattctagatagacactgggcagagggttaactgatggtctaacatcaaaaaagaagacagtaaaactataaaatagggccttgaccaggtgcagtggctcacgcttataatcccagcactttggggaggctaaggtgggaggattgcttgagcccaggagttcaagaccagcctgggcaacataacaagactcttgtctctatta

SEQ ID NO: 15288 - DNA, 675 bp, Homo sapiens
agtcctcatcccagcgtagacatcccagctggagctcccagtcagagcctaggctgggccagtagaccatgctgtggcctttcttgcttgccccaagctctgcaaagcatcaggcagggccaggcctgcaccatgaccgccaggtgcttctatcctggtggccgacccctgatagcatgcagaacagaatgagagcggcttgcttaagggccagagtcttacttgttccctggagtgagtagaaaagtaggaaatctcgtcagaacatgagacctttttgcgttcttcctttccattcttctttacttcattccctctttcttcttttttttctgtccttctttccttcttttctcctttcgttcacaaaccacacttggagagcaagggtagaggagcagaacagtttgttctctattgcttctagaagttcagaaagcagtagttgcagatgagccagaactcaggcagagaagggttctgtctcttcatactcagtctcctgggcccgtggaaatggtgtgtttcagagcctggtctgtggtaccgctggagtttttcccatgggacttttcacattcaggaaaagtacagaactgttcacatttttttccctgtgctgaattgtttttgcataaagttcccttcttaactccaggtccctcctgtaacgtg

SEQ ID NO: 15289 - DNA, 583 bp, Homo sapiens
ggaaagaaccatataggaaataagctggaaattgatttctcaaggcttcaacaaacaccaggtatggtctgactgctccctgttctttcttcttccccctctgaaacctcccggtttcttggttagcagcagccttgtcatttcccctttggaacattggtctctgtaggaagaaatcagttatccgttacggggaaaagactaagcagagcagattcactgtccgtgtctcctcctttggccctttggtttctattgatggatctggaagggtggcatcaacatttttttccatttctatttagatgtgtatgtgaataggctgagactacagttattcatctgagaaagtaacattcttacattcaggttttcagtttcagcaagctgcaaaatgattgttcataaaatattgaaaaacaacatgtaatacaaatattagccaggtgtggtggtgcacccacctgtagtcccagctactcaggaggctgaggtgggaggatcacctcagcccagggaggtcaaaggtgcagtgggctgtacttgtgccaccgcactccagcctgggcaacagagtgagacc

SEQ ID NO: 15290 - DNA, 462 bp, Homo sapiens
ccatctgttgggaaattaccataatatacagattttaaagaataggatacttcatggccacctgccggaagagtcttataatattcaatcctccagtctatgatatctgctatgcatgtggtccctcctaatatgtgggcactcttaagtatatagcatctgcacaccctgcctctaagtttcaggacaggaaaagggtgggttacagaaattatagaataaggccaggcgtggtggaggccgaggcaggtggatctcctgaagtcaggagttcgagaccagcctggccaacatcatggtgaaaacctgtctctactaaaaatacaaaagttagccaggcatagtggtgtgtgcctgtaatcccagctactcagcaggctgaggcaggagaattacttgaacctgggaggcagaggttgcagtgagccgagattgcgccattgaattccagcctgggcaaca

SEQ ID NO: 15291 - DNA, 480 bp, Homo sapiens
ggtgatctacggatccttcgggagccttacctactgtccaccctgtcttggctgcttagtccagcagctcccacacatggctgcactgccagcttgcccttcaaggtcagcagcttaactctttctctgggcaccagaactcaagctatgtcctggctcccctctttccattttgcagatggacagctctggttttctctctctttctctgggcgccagcgcaagagtgcatgtacagtgtcagcagggcagttataccttttacagacaacagtggtgtagggccaagggatgcccttcctatgttatggctacatggctgtgataacaagtagagttatacacctgccctctaaactcactgagtcactctggatgtttacctcagcctacccttgaccaaagcacaaccatgttccttgcagctgtcttctccctgtgtcctcgcatggtctcccttctgtgttgatctgtgtcctc

SEQ ID NO: 15292 - DNA, 732 bp, Homo sapiens
ggatcatatagtttcactgggacctcttttttgtttacgtaaaatatacaggaaacccaaaacaaacacatcagcatagatcaagaagacaggctgtaaactttggcatcttctttgcctcctctcttacacatgttaacacagacctcccttccccacttccctccctcctgttgtcaccttgtcaatgcctcttgtgtgctctccctcacctctcaccttcctaactctgctttcttcctctatactcagctgcagtctctgatgtgtgcaatcacgtccctcctgctctcattgcctagggaattaaaaccaaactcttactgtgttcttcatcctcctgcctccttctctccttgcccacaccctaatcctcattcaaaatacacgactgatgactggtccacatttcctaggagttcctaatgggattaggcctgctcacacctaaaatgaaaagggcactctggaaatagggaaggcaagagctatcagtagccgttgttgtcactcatggggtcagaaaagtcacccatctgaattattctgtaccttttgagttgaattgatttgtaaggttaagagaaatcaagttgaaacaaatatacatatacattcagctgtggcacgtaaactaagcttcaggaaaatgaatggattccatatttgtacctgatggtaaatctctaaatgcagaaccttttatacattctaaacaggaccaataagctt

SEQ ID NO: 15293 - DNA, 645 bp, Homo sapiens
ctgtatcccggggagggaagtggggaagggaggtctgtgctaacatgtgtaagagaggtggcaaagaagatgccaaagtttacagcctgtcaccttgtcaatgcctcttgtgtgctctccctcacctctcaccttcctaactctgctttcttcctctatactcagctgcagtctctgatgtgtgcaatcacgtccctcctgctctcattgcctagggaattaaaaccaaactcttactgtgttcttcatcctcctgcctccttctctccttgcccacaccctaatcctcattcaaaatacacgactgatgactggtccacatttcctaggagttcctaatgggattaggcctgctcacacctaaaatgaaaagggcactctggaaatagggaaggcaagagctatcagtagccgttgttgtcactcatggggtcagaaaagtcacccatctgaattattctgtaccttttgagttgaattgatttgtaaggttaagagaaatcaagttgaaacaaatatacatatacattcagctgtggcacgtaaactaagcttcaggaaaatgaatggattccatatttgtacctgatggtaaatctctaaatgcagaaccttttatacattctaaacaggaccaataagctt

SEQ ID NO: 15294 - DNA, 1054 bp, Homo sapiens
gtggaccaggagttggggagaggaggagggtgcctgaggccatgactatagggacttctcagagaaggacacttcagggggcagttggtgcccccatctgggaacgttctgcaggtccgagccctctgaggacggtgagggcgattgataacctctgaggttccgtccacccctaggggcccctatcttgggaacctctggatccttgtacggttcagttcctagaggtcacagcagggacacacaccggggaggaactgcgattatatgggggaagtggtgacatttttagagctttctacagaacattctcctggttcctgctctctattcgcagggtgagcgcccactggaagcctcgctgtgcttctgctttctcctgtagtccttggaagcaaggacttcttgttcgttctttaggaacggaagcaaacgttctcgttcagatatgtgcctctccctggtgaaggaagacctcacttcctgggatttttctgtgggatggagcagccagggaccccatctctggtgggggcggggcggaggggggtgcaccatgggcttagagccctctgggccagtgctgcctagtctgctgcatagcccatttgttttgtagacttgcagtgccaaatttcagctttctgggctccaactacgggcttgagctcagtgctgccctagagggtcctgaatgccttcacttatggaaccttagagttgcagagaccatcagagatgatccactttcctttaaaaaaaagaaaagagggctgggtagggtggctcacacctgtaatcccagcactttgggaggccgaggtgggtggatcacttgagttcaggagttcaagaccagcctggccaatatggtgaaaccccgtctctactaaaaatataaaaattagccaggcgtggtggcgggcacctgtaatcccagctactcaggaggctgaggcaggagaattgcttgagcccgggaggcagagaggttgcagtgagccgagatcacgccactgcgctccagcctggatgacagagtgagactccgaga

SEQ ID NO: 15295 - DNA, 263 bp, Homo sapiens
ctgtgatttttttttggtggcaaagtcacagatattactcatataatgatgatttgttcataggcccagaatagaaggaaatgctacattttacttagaggtcagtgaaaaggaagatgtgattttccaagttcatggactccctgagttctggttccaaggaaagatcttgaagttggtggttggactttgagtcctgcttggaggtctcaccccctccccctgcccgtttgcgtgtgcttgggcccacccccagtcgactg

SEQ ID NO: 15296 - DNA, 3725 bp, Homo sapiens
gcggcggcggctgcggtggcggcagcgaggcgagcggggcgggggcgcgggcgcggcgctcggagtccgttcggggccggaggcggtcggggccgggcccgggaagcgcgaggagcgcgcgtagccgccggagcccgccgcccgggacatggccaaggcgggccgtgcaggtggtcctcccccgggcggcggtgccccctggcaccttcgaaatgtcctcagtgactctgtggagagctcagatgatgaattctttgatgccagagaggagatggctgaagggaagaatgccatcctcattgggatgagccagtggaactccaatgacctcgtggagcagatcgagaccatggggaaactggacgagcatcaaggagaagggaccgcgccgtgcacatccagcatcctccaggagaagcagcgagaactgtaccgggtttccttgagaagacagaggttcccagcccagggaagcatcgagatccacgaagacagcgaggaaggctgcccgcagcgctcctgcaagacacatgtcctcctgctggtcctgcatgggggaaacatcctggacacgggtgccggggacccgtcctgcaaggcagccgacatccacaccttcagctccgtgctggagaaggtcacacgagcccatttccctgctgccctgggccacatcctcatcaagttcgtcccctgtcctgccatctgctctgaggctttctcgcttgtctctcacctgaacccctacagccacgatgagggctgcctcagcagcagccaggaccacgtccctctggccgcccttcccctgttggccatctcctccccgcagtaccaggatgctgtcgccaccgtcatcgagcgagccaaccaggtctacagagagttcctgaagtcctctgatgggattggcttcagtgggcaggtgtgtctcatcggggactgtgtggggggcctcctggccttcgatgccatctgctacagtgcggggccctcaggggacagccctgccagcagcagccggaaggggagcatcagcagcacccaggacaccccagtcgcggtggaggaagattgcagcctggccagcagcaagcgtctcagcaaaagcaacattgacatctccagtgggttggaggatgaggagcccaagaggccgttgccgcggaaacagagcgactcctccacctatgactgcgaggccatcacccagcaccatgccttcctctcaagcatccactccagcgtgctaaaggatgagtctgagaccccggcggctggggggccgcagctccctgaggtcagcctgggccgctttgacttcgatgtgtccgacttcttcctcttcggctcgccactgggcctggtcctggccatgcggaggacggtgctgcctgggctggacggcttccaggtgcgtcctgcctgcagccaggtctacagcttcttccattgcgcagacccctctgcctcacggctcgagccactgctggagcccaagttccacctggtgccgcctgtcagcgtgcctcgctaccagaggttcccactgggcgatgggcagtccctcctcctcgctgatgccctacacacccacagccccctcttcctggagggcagctcccgggacagcccgccacttctggatgcccctgcctcgccccctcaggcctcgaggttccagcgcccaggacggaggatgagcgaggggagctcccacagcgagagctcggagtcctcggacagcatggcacccgtgggtgcctcccgcatcacagccaagtggtggggaagcaagaggatcgactatgccctgtactgccctgatgtcctcacggccttccccaccgtggccctgccccacctcttccacgccagttactgggagtccacagacgtggtggccttcatcctgagacaggtaatgcgctatgagagcgtgaacatcaaggaaagcgcccgcctggaccctgcagcactgagtcctgccaacccccgggagaagtggcttcgtaagcggactcaggtcaagctgaggaatgtcacggctaatcaccgggccaatgatgtgattgctgctgaagatggcccccaggtcctggtggggcggttcatgtacgggcccctcgacatggtggctctgactggagagaaggtggacatcctagtaatggcagagccatcctcaggccgctgggtacacctggacacagagatcaccaacagcagtggtcgcatcacatacaatgtgccgcggccccggcgcctgggggttggtgtctatcctgtgaagatggtcgtcaggggcgaccagacctgtgccatgagctacctcacggtgttgcccaggggcatggagtgtgtagtgttcagcattgatgggtccttcgcggccagcgtgtctatcatgggaagcgaccccaaggtccggccgggtgcagtggatgttgtccggcactggcaggacttgggctacatgatcctttacatcacgggacggccggacatgcagaagcagcgggtggtgtcgtggctgtcccagcacaacttcccacagggcatgatcttcttctccgacgggctggtgcatgacccgctgcggcagaaggccatcttcctgcgcaacctcatgcaggagtgcttcatcaaaatcagtgcggcctatggctccacgaaggacatctctgtctacagcgtgctgggcctgcctgcctcccagatcttcattgtgggccggcccaccaagaagtaccaaacccagtgccagttcctgagcgagggctacgccgcacacctggccgcgctggaggccagccaccgctcacgcccaaagaagaacaactcgcgcatgatcctgcgcaagggcagcttcgggctgcacgcgcagccagagttcctgcggaagcgcaaccacctgcgcagaaccatgtcagtgcagcagcccgacccgcccgccgccaaccccaagcccgagcgggcccagagccagcccgagtcggacaaagaccacgagcggccgctgccggcgctcagctgggcgcgtgggccccccaagttcgagtcggtgccctgaggggtgggctgtgctcagagcagggagcggggggcccaatcaggctgcctgcggggacgggagggggctgccctctccccgacacaggcgttttcctgctttttccctcccgtgtctgtccagcagtgtccgaccagagcggggagggatcctgcccgagcccggggggctccctgagctgcgacggggtgaggtccggggatctcggtgcagccactgctgcctcccacgggcctgcgaccgcaagcccaagtcagggttcatgtttgtgtcatcctgggggcaggcttgcccggggctgaagcgtttgggcaaagtcgaccaccctcctgcgtccccaggcttcacagcgagctaggcaggccctcaagggggcagccccagcctcggcaccaagcgccgctggcaggcacagcctctgggctgtcttgtggaggtgtgagtggcatttgtgcccgcccttcctgtggtttgggtcaccattttggggttggcgctcttatggcaagatggccactttctgggagtgagagcacatccccgggctcatgttaccccgtctctgtccacagccctcggggggtggggtctggtgctgacggtctgtcctgcagctgtccattgtccccaaccccgttgtcctcagtgtcct

SEQ ID NO: 15297 - DNA, 2827 bp, Homo sapiens
gcggcggcggctgcggtggcggcagcgaggcgagcggggcgggggcgcgggcgcggcgctcggagtccgttcggggccggaggcggtcggggccgggcccgggaagcgcgaggagcgcgcgtagccgccggagcccgccgcccgggacatggccaaggcgggccgtgcaggtggtcctcccccgggcggcggtgccccctggcaccttcgaaatgtcctcagtgactctgtggagagctcagatgatgaattctttgatgccagagaggagatggctgaagggaagaatgccatcctcattgggatgagccagtggaactccaatgacctcgtggagcagatcgagaccatggggaaactggacgagcatcaaggagaagggaccgcgccgtgcacatccagcatcctccaggagaagcagcgagaactgtaccgggtttccttgagaagacagaggttcccagcccagggaagcatcgagatccacgaagacagcgaggaaggctgcccgcagcgctcctgcaagacacatgtcctcctgctggtcctgcatgggggaaacatcctggacacgggtgccggggacccgtcctgcaaggcagccgacatccacaccttcagctccgtgctggagaaggtcacacgagcccatttccctgctgccctgggccacatcctcatcaagttcgtcccctgtcctgccatctgctctgaggctttctcgcttgtctctcacctgaacccctacagccacgatgagggctgcctcagcagcagccaggaccacgtccctctggccgcccttcccctgttggccatctcctccccgcagtaccaggatgctgtcgccaccgtcatcgagcgagccaaccaggtctacagagagttcctgaagtcctctgatgggattggcttcagtgggcaggtgtgtctcatcggggactgtgtggggggcctcctggccttcgatgccatctgctacagtgcggggccctcaggggacagccctgccagcagcagccggaaggggagcatcagcagcacccaggacaccccagtcgcggtggaggaagattgcagcctggccagcagcaagcgtctcagcaaaagcaacattgacatctccagtgggttggaggatgaggagcccaagaggccgttgccgcggaaacagagcgactcctccacctatgactgcgaggccatcacccagcaccatgccttcctctcaagcatccactccagcgtgctaaaggatgagtctgagaccccggcggctggggggccgcagctccctgaggtcagcctgggccgctttgacttcgatgtgtccgacttcttcctcttcggctcgccactgggcctggtcctggccatgcggaggacggtgctgcctgggctggacggcttccaggtgcgtcctgcctgcagccaggtctacagcttcttccattgcgcagacccctctgcctcacggctcgagccactgctggagcccaagttccacctggtgccgcctgtcagcgtgcctcgctaccagaggttcccactgggcgatgggcagtccctcctcctcgctgatgccctacacacccacagccccctcttcctggagggcagctcccgggacagcccgccacttctggatgcccctgcctcgccccctcaggcctcgaggttccagcgcccaggacggaggatgagcgaggggagctcccacagcgagagctcggagtcctcggacagcatggcacccgtgggtgcctcccgcatcacagccaagtggtggggaagcaagaggatcgactatgccctgtactgccctgatgtcctcacggccttccccaccgtggccctgccccacctcttccacgccagttactgggagtccacagacgtggtggccttcatcctgagacaggtaatgcgctatgagagcgtgaacatcaaggaaagcgcccgcctggaccctgcagcactgagtcctgccaacccccgggagaagtggcttcgtaagcggactcaggtcaagctgaggaatgtcacggctaatcaccgggccaatgatgtgattgctgctgaagatggcccccaggtcctggtggggcggttcatgtacgggcccctcgacatggtggctctgactggagagaaggtggacatcctagtaatggcagagccatcctcaggccgctgggtacacctggacacagagatcaccaacagcagtggtcgcatcacatacaatgtgccgcggccccggcgcctgggggttggtgtctatcctgtgaagatggtcgtcaggggcgaccagacctgtgccatgagctacctcacggtgttgcccaggggcatggagtgtgtagtgttcagcattgatgggtccttcgcggccagcgtgtctatcatgggaagcgaccccaaggtccggccgggtgcagtggatgttgtccggcactggcaggacttgggctacatgatcctttacatcacgggacggccggacatgcagaagcagcgggtggtgtcgtggctgtcccagcacaacttcccacagggcatgatcttcttctccgacgggctggtgcatgacccgctgcggcagaaggccatcttcctgcgcaacctcatgcaggagtgcttcatcaaaatcagtgcggcctatggctccacgaaggacatctctgtctacagcgtgctgggcctgcctgcctcccagatcttcattgtgggccggcccaccaagaagtaccaaacccagtgccaggattgcttgagcccagggttcaaggccagccctggcaacatagcaagacgctgtttctac

SEQ ID NO: 15298 - DNA, 2325 bp, Homo sapiens
cctgaaggaacctgggttggcttcctaggcttccaggtgcgtcctgcctgcagccaggtctacagcttcttccattgcgcagacccctctgcctcacggctcgagccactgctggagcccaagttccacctggtgccgcctgtcagcgtgcctcgctaccagaggttcccactgggcgatgggcagtccctcctcctcgccccctcttcctggagggcagctcccgggacagcccgccacttctggatgcccctgcctcgccccctcaggcctcgaggttccagcgcccaggacggaggatgagcgaggggagctcccacagcgagagctcggagtcctcggacagcatggcacccgtgggtgcctcccgcatcacagccaagtggtggggaagcaagaggatcgactatgccctgtactgccctgatgtcctcacggccttccccaccgtggccctgccccacctcttccacgccagttactgggagtccacagacgtggtggccttcatcctgagacaggtaatgcgctatgagagcgtgaacatcaaggaaagcgcccgcctggaccctgcagcactgagtcctgccaacccccgggagaagtggcttcgtaagcggactcaggtcaagctgaggaatgtcacggctaatcaccgggccaatgatgtgattgctgctgaagatggcccccaggtcctggtggggcggttcatgtacgggcccctcgacatggtggctctgactggagagaaggtggacatcctagtaatggcagagccatcctcaggccgctgggtacacctggacacagagatcaccaacagcagtggtcgcatcacatacaatgtgccgcggccccggcgcctgggggttggtgtctatcctgtgaagatggtcgtcaggggcgaccagacctgtgccatgagctacctcacggtgttgcccaggggcatggagtgtgtagtgttcagcattgatgggtccttcgcggccagcgtgtctatcatgggaagcgaccccaaggtccggccgggtgcagtggatgttgtccggcactggcaggacttgggctacatgatcctttacatcacgggacggccggacatgcagaagcagcgggtggtgtcgtggctgtcccagcacaacttcccacagggcatgatcttcttctccgacgggctggtgcatgacccgctgcggcagaaggccatcttcctgcgcaacctcatgcaggagtgcttcatcaaaatcagtgcggcctatggctccacgaaggacatctctgtctacagcgtgctgggcctgcctgcctcccagatcttcattgtgggccggcccaccaagaagtaccaaacccagtgccagttcctgagcgagggctacgccgcacacctggccgcgctggaggccagccaccgctcacgcccaaagaagaacaactcgcgcatgatcctgcgcaagggcagcttcgggctgcacgcgcagccagagttcctgcggaagcgcaaccacctgcgcagaaccatgtcagtgcagcagcccgacccgcccgccgccaaccccaagcccgagcgggcccagagccagcccgagtcggacaaagaccacgagcggccgctgccggcgctcagctgggcgcgtgggccccccaagttcgagtcggtgccctgaggggtgggctgtgctcagagcagggagcggggggcccaatcaggctgcctgcggggacgggagggggctgccctctccccgacacaggcgttttcctgctttttccctcccgtgtctgtccagcagtgtccgaccagagcggggagggatcctgcccgagcccggggggctccctgagctgcgacggggtgaggtccggggatctcggtgcagccactgctgcctcccacgggcctgcgaccgcaagcccaagtcagggttcatgtttgtgtcatcctgggggcaggcttgcccggggctgaagcgtttgggcaaagtcgaccaccctcctgcgtccccaggcttcacagcgagctaggcaggccctcaagggggcagccccagcctcggcaccaagcgccgctggcaggcacagcctctgggctgtcttgtggaggtgtgagtggcatttgtgcccgcccttcctgtggtttgggtcaccattttggggttggcgctcttatggcaagatggccactttctgggagtgagagcacatccccgggctcatgttaccccgtctctgtccacagccctcggggggtggggtctggtgctgacggtctgtcctgcagctgtccattgtccccaaccccgttgtcctcagtgtcct

SEQ ID NO: 15299 - DNA, 746 bp, Homo sapiens
accatgttggccaggctggtctcaaagtcctgaccacaggtgatccacctgccttggcctcccaaagtgctgagattacaggcgtgagctactgcacctggccaataaaagacacattttaattaaaataatgacatgtttctaaaatattctgaaatagaaggcacatcacagaatttaaatatttttcaataaaatctgtaatcaaaccatagttcagcttcctctgggatattgtgaactatgtttaaaatgcgaccggaattttccactgctgttcatatttttaaatgcttagaattagaaaaattagccaggcatggtggcacatcgggaggctgaggcaggagaatctgcttgaacctgggaggcgcaggttgcagtgagccaagatcacaccattgcactctagcctgggcaacaaaagcaaaactgcgtctcaaaaaaaaaaagaattagaaaaattttgatgtcttaatttctaatagggttagacatcagaagtagtaaaatttctagctactgcctgcatgcaaaccactcttaataaattcccagtttatcaaaaaatagtttgggaaatgaaaaacagcaaatttcttgagcagtcagggcaacactgtatattccatagtgaagtgctgtatattccataatgagtttgcacttttcaaataactaaaacgcatttagcactgaaactgggctaagcagaatttattttttctttggttcagaatttcaga

SEQ ID NO: 15300 - DNA, 1488 bp, Homo sapiens
  misc_feature (1)..(1): n is a, c, g, or t
nggtgcactatagacaagtttgtgcaaggagcaggctggtacggtccgggattccgggcccgtctgttccccttcgggtccaaagcttttggctcctccttgttccgagcccgaaggcccgccccttcacgtactcggagctcggatcccagtgtggacctggactcgaatcccgttgccgactcgcgctctcggcttctgctccggggcttcttccctgcccgcccggggccctgaccgtggcttcttccccggcctgatctgcgcagcccggcgggcgcccagaaggagcaggcggcgcgggggcgcgctgggcgggggaggcgtggccggagctgcggcggcaagcgggctgggactgctcggccgcctcctgcccggcgagcagctcagaccatgtcgcctgaagaatggacgtatctagtggttcttcttatctccatccccatcggcttcctctttaagaaagccggtcctgggctgaagagatggggagcagccgctgtgggcctggggctcaccctgttcacctgtggcccccacactttgcattctctggtcaccatcctcgggacctgggccctcattcaggcccagccctgctcctgccacgccctggctctggcctggactttctcctatctcctgttcttccgagccctcagcctcctgggcctgcccactcccacgcccttcaccaatgccgtccagctgctgctgacgctgaagctggtgagcctggccagtgaagtccaggacctgcatctggcccagaggaaggaaatggcctcaggcttcagcaaggggcccaccctggggctgctgcccgacgtgccctccctgatggagacactcagctacagctactgctacgtgggaatcatgacaggcccgttcttccgctaccgcacctacctggactggctggagcagcccttccccggggcagtgcccagcctgcggcccctgctgcgccgcgcctggccggccccgctcttcggcctgctgttcctgctctcctctcacctcttcccgctggaggccgtgcgcgaggacgccttctacgcccgcccgctgcccgcccgcctcttctacatgatccccgtcttcttcgccttccgcatgcgcttctacgtggcctggattgccgccgagtgcggctgcattgccgccggctttggggcctaccccgtggccgccaaagcccgggccggaggcggccccaccctccaatgcccaccccccagcagacagaagaacgaaagaaggggctccttggagtctaatataagaccaccgacaaaacatgttacaggaaaatatccgaggggaacgagcatgcggagcaaacaaagacaaagcgcacgaagaaaaacaaaggctgcagacatacaggccaatgacagggaacacaagcacaccacagcatcggataccacaagggcagagaaaacaggagaacggcacggagaatcgagaaaatcaacc

SEQ ID NO: 15301 - DNA, 945 bp, Homo sapiens
gagcagtagctgtagctgagtgtctccatcagggaggggcccaccctggggctgctgcccgacgtgccctccctgatggagacactcagctacagctactgctacgtgggaatcatgacaggcccgttcttccgctaccgcacctacctggactggctggagcagcccttccccggggcagtgcccagcctgcggcccctgctgcgccgcgcctggccggccccgctcttcggcctgctgttcctgctctcctctcacctcttcccgctggaggccgtgcgcgaggacgccttctacgcccgcccgctgcccgcccgcctcttctacatgatccccgtcttcttcgccttccgcatgcgcttctacgtggcctggattgccgccgagtgcggctgcattgccgccggctttggggcctaccccgtggccgccaaagcccgggccggaggcggccccaccctccaatgcccaccccccagcagtccggagaaggcggcttccttggagtatgactatgagaccatccgcaacatcgactgctacagcacagatttctgcgtgcgggtgcgcgatggcatgcggtactggaacatgacggtgcagtggtggctggcgcagtatatctacaagagcgcacctgcccgttcctatgtcctgcggaagcgctggcacatgctgctgagcgctactggacgggctccaccgggtataactgagctgctgacaatccgtgggctggctggcgaggcggcgggatcagcccgggggcgggcgagccacgggcagagctggacggtgcacggtctcgaaacgccggaggaaatgggatggcacggcggtccggcgacccggagggcacaccgcaccacggccgaccggcgagtgtcggagcccggaggcacgcgcggcgggggaagttccccacggggccagcggggcacacga

SEQ ID NO: 15302 - DNA, 5415 bp, Homo sapiens
ccgaagggagaccccgcctcattcctcacggcgagctccagaccccgcctcctttccggagcccgtctgttccccttcgggtccaaagcttttggctcctccttgttccgagcccgaaggcccgccccttcacgtactcggagctcggatcccagtgtggacctggactcgaatcccgttgccgactcgcgctctcggcttctgctccggggcttcttccctgcccgcccggggccctgaccgtggcttcttccccggcctgatctgcgcagcccggcgggcgcccagaaggagcaggcggcgcgggggcgcgctgggcgggggaggcgtggccggagctgcggcggcaagcgggctgggactgctcggccgcctcctgcccggcgagcagctcagaccatgtcgcctgaagaatggacgtatctagtggttcttcttatctccatccccatcggcttcctctttaagaaagccggtcctgggctgaagagatggggagcagccgctgtgggcctggggctcaccctgttcacctgtggcccccacactttgcattctctggtcaccatcctcgggacctgggccctcattcaggcccagccctgctcctgccacgccctggctctggcctggactttctcctatctcctgttcttccgagccctcagcctcctgggcctgcccactcccacgcccttcaccaatgccgtccagctgctgctgacgctgaagctggtgagcctggccagtgaagtccaggacctgcatctggcccagaggaaggaaatggcctcaggcttcagcaaggggcccaccctggggctgctgcccgacgtgccctccctgatggagacactcagctacagctactgctacgtgggaatcatgacaggcccgttcttccgctaccgcacctacctggactggctggagcagcccttccccggggcagtgcccagcctgcggcccctgctgcgccgcgcctggccggccccgctcttcggcctgctgttcctgctctcctctcacctcttcccgctggaggccgtgcgcgaggacgccttctacgcccgcccgctgcccgcccgcctcttctacatgatccccgtcttcttcgccttccgcatgcgcttctacgtggcctggattgccgccgagtgcggctgcattgccgccggctttggggcctaccccgtggccgccaaagcccgggccggaggcggccccaccctccaatgcccaccccccagcagaggtcaggcggcgcgagggaggcttcccaagacccagcagcccccacctccaagggctggctctgcccctagccgggaggagagcggggagcaaggggccagggccaccacctttttgagcagagtgtcgccccctcggcaaccatggcctgccagcccctgtcggtagggaaaagatccctggtactgacagatgccccttgttgctagcgcttgtcaccccgcagtgtggtgaactgccccctgtcgctaggaaaaggtggtaacttagcaaccctgtgccacccctctgttgccacagaagtgtcaccccccagaaccagattgttcctgcttgctggggatgccatcctttgctagtggtgggtcaccctctgttgctagggaaacggttccctagcaacagaacgccactatttgctagggaagcaggatccctagcaacagtagctcacctcctttttaccagaagttttgctctgttgctgcagatacggcactccctgcactgcccctttgttgctaggagctagcactgctccaccccgtgggatgtcctcacatagcagccctcagcagccctctgcaaggaaatagcaatttccaatccctgaccagtgctgttccccagcagagggcacgccattcctaccaactacagttacactgttgctaaggaagccaaacctccccctggaaactatgggttgacccttgttgccagagaggctccaccccccggcacctgcattgctaggcaagtcgcacggccatagctgtggactctcttgtggctgaggaagtattgcccccgtgttgctagggagatggcacccccggcaaccaggagtagactgcccttgtgttcctgacagctgcagtcagccttcccccaggggcttggactgcggctgggggaacagcctgttgatgtaaatgatgaactactactccctgctagggttgtcccctagtcgtcacaaactgccattctgttgtgggggtagtgacacccccacgggaatttgttaccactgccctaataaccgtgccctgacctccagctgctagagagaggatgtccccctagtaaagccaagcaggaattgaaggtttttctaaatctgctcggtcctcactcctaaaggatggctcccctcctgtcatcagaggccaccaaggcttcatatgggccagtgtttcccactgctggggctgtcgacatgagtgatgagggagccactgtattgctagaggtgacacttctccaataatcactgcgaccaggaaaaaagccccttcctaaaagcctttctaaacatcctaggcattgttgctaaggaatgccttttccttagcaacaaagatcatggggaccccactggcgcctggaacatctccctagcaaccgtgaagcaccttgttattagggatgataaccacaacttccctggcaactgcagtgtccgacaatttagaagggaccatccttggcggcttctctgaatatactgagtttggttgctaaaggactcatagcttagcaaccatagcccttcaaggcttttcatggctgtggcgggccccattaggtaccaaaagaagaagaaccccattgtcagtgaactgtaccacccagcccacccaccttcctaccctacaggcaccctctgggccaccctcccttgctgccctagcaagtctgacagccagagggccattgcctggccaggatcccttccttagcatccggggctgggacactagcaggcgtcgggagggggcctggctgagctgcatgtctgtcccccaccctcatcctccaccccccagtccggagaaggcggcttccttggagtatgactatgagaccatccgcaacatcgactgctacagcacagatttctgcgtgcgggtgcgcgatggcatgcggtactggaacatgacggtgcagtggtggctggcgcagtatatctacaagagcgcacctgcccgttcctatgtcctgcggagcgcctggaccatgctgctgagcgcctactggcacggcctccacccgggctactacctgagcttcctgaccatcccgctgtgcctggctgccgagggccggctggagtcagccctgcgggggcggctgagcccagggggccagaaggcctgggactgggtgcactggttcctgaagatgcgcgcctatgactacatgtgcatgggcttcgtgctgctctccttggccgacacccttcggtactgggcctccatctacttctgtatccacttcctggccctggcagccctggggctggggctggctttaggtgggggcagccccagccggcggaaggcagcatcccagcccaccagccttgccccggagaagctccgggaggagtaagctgtcacgacgctccctctgccagctggtcccgggaattctgtgaaccaggctgctgtctcctccccagaaagagtccttaccttggagagggtcctggagagaatttcctcttccccagctaaataccctgcctgcaactgaagcagacccgggggtgtcctccctgccctctgcccagaggccacctccactcctacaaaatcaaagtattgtccagacaagagtcactggcccctgctccagcttctgggtatccagagagcactgcacttccccaaaacggaaggggcccctgggcagtgggttttgggcaaattccctttctttgcatccacaatgtggggtcggagcttgggggcaggtcctgggagtgggaagcctcttccttgtgtctttcgctccacttttagctcatcgcaccaatattgcagacttggaaggaagcataagcttcccatttcacaaaggggaaactgaggtgcgggtgcgcgggcctggggacggccgtcccatggcttccatctgagccacctcgggaccccagcgctcctggcgccctcttctcatcgcttggcctatgacaggtcaccgtgtgtaaatctttcccaataaagtgttgcacaaagaaaaaaaaaaaaaaaaaacggcagccctgggcggctgggagcacggacggggcgcccgcgcagctgcctctcgtgctcaccgcgctgtgggccgcggccgtgggcctggagctggcttacgtgctggtgctcggtcccgggccgccgccgctgggacccctggcccgggccttgcagctggcgctggccgccttccagctgctcaacctgctgggcaacgtggggctcttcctgcgctcggatcccagcatccgtggcgtgatgctggccggccgcggtctgggccggggctgggcttactgctaccaatgccaaagccaggtgccgccacgcagcggacactgctctgcctgccgcgtctgcatcctgcgtcgggaccaccactgccgcctgctgggccgctgcgtgggcttcggcaactaccggcccttcctgtgcctgctgcttcatgccgccggcgtcctgctccacgtctctgtgctgctgggccctgcactgtcggccctgctgcgagcccacacgcccctccacatggctgccctcctcctgcttccctggctcatgttgctcacaggcagagtgtctctggcacagtttgccttggccttcgtgacggacacgtgcgtggcgggtgcgctgctgtgcggggctgggctgctcttccatgggatgctgctgctgcggggccagaccacatgggagtgggctcggggccagcactcctatgacctgggtccctgccacaacctgcaggcagccctggggccccgctgggccctcgtctggctctggcccttcctggcctccccattgcctggggatgggatcaccttccagaccacagcagatgtgggacacacagcctcctgactccaggaagagccagagctgtgcagggaggaaggggtgagaggggggcccccacacctagactcagtaaggaagtcgggttggaccttaacatctgcattggacaactccaccccttccttggccttgcccctgcccgcctacactcctacgtgtccagggcttgggccgtgacttaggcagaggagtgcagaggagggtctggcaggggctgctcaggccgcctagctgcccctttgccaggttaataaagcactgacttgtt

SEQ ID NO: 15303 - DNA, 2447 bp, Homo sapiens
ccgaagggagaccccgcctcattcctcacggcgagctccagaccccgcctcctttccggagcccgtctgttccccttcgggtccaaagcttttggctcctccttgttccgagcccgaaggcccgccccttcacgtactcggagctcggatcccagtgtggacctggactcgaatcccgttgccgactcgcgctctcggcttctgctccggggcttcttccctgcccgcccggggccctgaccgtggcttcttccccggcctgatctgcgcagcccggcgggcgcccagaaggagcaggcggcgcgggggcgcgctgggcgggggaggcgtggccggagctgcggcggcaagcgggctgggactgctcggccgcctcctgcccggcgagcagctcagaccatgtcgcctgaagaatggacgtatctagtggttcttcttatctccatccccatcggcttcctctttaagaaagccggtcctgggctgaagagatggggagcagccgctgtgggcctggggctcaccctgttcacctgtggcccccacactttgcattctctggtcaccatcctcgggacctgggccctcattcaggcccagccctgctcctgccacgccctggctctggcctggactttctcctatctcctgttcttccgagccctcagcctcctgggcctgcccactcccacgcccttcaccaatgccgtccagctgctgctgacgctgaagctggtgagcctggccagtgaagtccaggacctgcatctggcccagaggaaggaaatggcctcaggcttcagcaaggggcccaccctggggctgctgcccgacgtgccctccctgatggagacactcagctacagctactgctacgtgggaatcatgacaggcccgttcttccgctaccgcacctacctggactggctggagcagcccttccccggggcagtgcccagcctgcggcccctgctgcgccgcgcctggccggccccgctcttcggcctgctgttcctgctctcctctcacctcttcccgctggaggccgtgcgcgaggacgccttctacgcccgcccgctgcccgcccgcctcttctacatgatccccgtcttcttcgccttccgcatgcgcttctacgtggcctggattgccgccgagtgcggctgcattgccgccggctttggggcctaccccgtggccgccaaagcccgggccggaggcggccccaccctccaatgcccaccccccagcagtccggagaaggcggcttccttggagtatgactatgagaccatccgcaacatcgactgctacagcacagatttctgcgtgcgggtgcgcgatggcatgcggtactggaacatgacggtgcagtggtggctggcgcagtatatctacaagagcgcacctgcccgttcctatgtcctgcggagcgcctggaccatgctgctgagcgcctactggcacggcctccacccgggctactacctgagcttcctgaccatcccgctgtgcctggctgccgagggccggctggagtcagccctgcgggggcggctgagcccagggggccagaaggcctgggactgggtgcactggttcctgaagatgcgcgcctatgactacatgtgcatgggcttcgtgctgctctccttggccgacacccttcggtactgggcctccatctacttctgtatccacttcctggccctggcagccctggggctggggctggctttaggtgggggcagccccagccggcggaaggcagcatcccagcccaccagccttgccccggagaagctccgggaggagtaagctgtcacgacgctccctctgccagctggtcccgggaattctgtgaaccaggctgctgtctcctccccagaaagagtccttaccttggagagggtcctggagagaatttcctcttccccagctaaataccctgcctgcaactgaagcagacccgggggtgtcctccctgccctctgcccagaggccacctccactcctacaaaatcaaagtattgtccagacaagagtcactggcccctgctccagcttctgggtatccagagagcactgcacttccccaaaacggaaggggcccctgggcagtgggttttgggcaaattccctttctttgcatccacaatgtggggtcggagcttgggggcaggtcctgggagtgggaagcctcttccttgtgtctttcgctccacttttagctcatcgcaccaatattgcagacttggaaggaagcataagcttcccatttcacaaaggggaaactgaggtgcgggtgcgcgggcctggggacggccgtcccatggcttccatctgagccacctcgggaccccagcgctcctggcgccctcttctcatcgcttggcctatgacaggtcaccgtgtgtaaatctttcccaataaagtgttgcacaaag

SEQ ID NO: 15304 - DNA, 5104 bp, Homo sapiens
tgcaggcggtacggcccgggatttaaggatcggcggcaagcgggctgggactgctcggccgcctcctgcccggcgagcagctcagaccatgtcgcctgaagaatggacgtatctagtggttcttcttatctccatccccatcggcttcctctttaagaaagccggtcctgggctgaagagatggggagcagccgctgtgggcctggggctcaccctgttcacctgtggcccccacactttgcattctctggtcaccatcctcgggacctgggccctcattcaggcccagccctgctcctgccacgccctggctctggcctggactttctcctatctcctgttcttccgagccctcagcctcctgggcctgcccactcccacgcccttcaccaatgccgtccagctgctgctgacgctgaagctggtgagcctggccagtgaagtccaggacctgcatctggcccagaggaaggaaatggcctcaggcttcagcaaggggcccaccctggggctgctgcccgacgtgccctccctgatggagacactcagctacagctactgctacgtgggaatcatgacaggcccgttcttccgctaccgcacctacctggactggctggagcagcccttccccggggcagtgcccagcctgcggcccctgctgcgccgcgcctggccggccccgctcttcggcctgctgttcctgctctcctctcacctcttcccgctggaggccgtgcgcgaggacgccttctacgcccgcccgctgcccgcccgcctcttctacatgatccccgtcttcttcgccttccgcatgcgcttctacgtggcctggattgccgccgagtgcggctgcattgccgccggctttggggcctaccccgtggccgccaaagcccgggccggaggcggccccaccctccaatgcccaccccccagcagaggtcaggcggcgcgagggaggcttcccaagacccagcagcccccacctccaagggctggctctgcccctagccgggaggagagcggggagcaaggggccagggccaccacctttttgagcagagtgtcgccccctcggcaaccatggcctgccagcccctgtcggtagggaaaagatccctggtactgacagatgccccttgttgctagcgcttgtcaccccgcagtgtggtgaactgccccctgtcgctaggaaaaggtggtaacttagcaaccctgtgccacccctctgttgccacagaagtgtcaccccccagaaccagattgttcctgcttgctggggatgccatcctttgctagtggtgggtcaccctctgttgctagggaaacggttccctagcaacagaacgccactatttgctagggaagcaggatccctagcaacagtagctcacctcctttttaccagaagttttgctctgttgctgcagatacggcactccctgcactgcccctttgttgctaggagctagcactgctccaccccgtgggatgtcctcacatagcagccctcagcagccctctgcaaggaaatagcaatttccaatccctgaccagtgctgttccccagcagagggcacgccattcctaccaactacagttacactgttgctaaggaagccaaacctccccctggaaactatgggttgacccttgttgccagagaggctccaccccccggcacctgcattgctaggcaagtcgcacggccatagctgtggactctcttgtggctgaggaagtattgcccccgtgttgctagggagatggcacccccggcaaccaggagtagactgcccttgtgttcctgacagctgcagtcagccttcccccaggggcttggactgcggctgggggaacagcctgttgatgtaaatgatgaactactactccctgctagggttgtcccctagtcgtcacaaactgccattctgttgtgggggtagtgacacccccacgggaatttgttaccactgccctaataaccgtgccctgacctccagctgctagagagaggatgtccccctagtaaagccaagcaggaattgaaggtttttctaaatctgctcggtcctcactcctaaaggatggctcccctcctgtcatcagaggccaccaaggcttcatatgggccagtgtttcccactgctggggctgtcgacatgagtgatgagggagccactgtattgctagaggtgacacttctccaataatcactgcgaccaggaaaaaagccccttcctaaaagcctttctaaacatcctaggcattgttgctaaggaatgccttttccttagcaacaaagatcatggggaccccactggcgcctggaacatctccctagcaaccgtgaagcaccttgttattagggatgataaccacaacttccctggcaactgcagtgtccgacaatttagaagggaccatccttggcggcttctctgaatatactgagtttggttgctaaaggactcatagcttagcaaccatagcccttcaaggcttttcatggctgtggcgggccccattaggtaccaaaagaagaagaaccccattgtcagtgaactgtaccacccagcccacccaccttcctaccctacaggcaccctctgggccaccctcccttgctgccctagcaagtctgacagccagagggccattgcctggccaggatcccttccttagcatccggggctgggacactagcaggcgtcgggagggggcctggctgagctgcatgtctgtcccccaccctcatcctccaccccccagtccggagaaggcggcttccttggagtatgactatgagaccatccgcaacatcgactgctacagcacagatttctgcgtgcgggtgcgcgatggcatgcggtactggaacatgacggtgcagtggtggctggcgcagtatatctacaagagcgcacctgcccgttcctatgtcctgcggagcgcctggaccatgctgctgagcgcctactggcacggcctccacccgggctactacctgagcttcctgaccatcccgctgtgcctggctgccgagggccggctggagtcagccctgcgggggcggctgagcccagggggccagaaggcctgggactgggtgcactggttcctgaagatgcgcgcctatgactacatgtgcatgggcttcgtgctgctctccttggccgacacccttcggtactgggcctccatctacttctgtatccacttcctggccctggcagccctggggctggggctggctttaggtgggggcagccccagccggcggaaggcagcatcccagcccaccagccttgccccggagaagctccgggaggagtaagctgtcacgacgctccctctgccagctggtcccgggaattctgtgaaccaggctgctgtctcctccccagaaagagtccttaccttggagagggtcctggagagaatttcctcttccccagctaaataccctgcctgcaactgaagcagacccgggggtgtcctccctgccctctgcccagaggccacctccactcctacaaaatcaaagtattgtccagacaagagtcactggcccctgctccagcttctgggtatccagagagcactgcacttccccaaaacggaaggggcccctgggcagtgggttttgggcaaattccctttctttgcatccacaatgtggggtcggagcttgggggcaggtcctgggagtgggaagcctcttccttgtgtctttcgctccacttttagctcatcgcaccaatattgcagacttggaaggaagcataagcttcccatttcacaaaggggaaactgaggtgcgggtgcgcgggcctggggacggccgtcccatggcttccatctgagccacctcgggaccccagcgctcctggcgccctcttctcatcgcttggcctatgacaggtcaccgtgtgtaaatctttcccaataaagtgttgcacaaagaaaaaaaaaaaaaaaaaacggcagccctgggcggctgggagcacggacggggcgcccgcgcagctgcctctcgtgctcaccgcgctgtgggccgcggccgtgggcctggagctggcttacgtgctggtgctcggtcccgggccgccgccgctgggacccctggcccgggccttgcagctggcgctggccgccttccagctgctcaacctgctgggcaacgtggggctcttcctgcgctcggatcccagcatccgtggcgtgatgctggccggccgcggtctgggccggggctgggcttactgctaccaatgccaaagccaggtgccgccacgcagcggacactgctctgcctgccgcgtctgcatcctgcgtcgggaccaccactgccgcctgctgggccgctgcgtgggcttcggcaactaccggcccttcctgtgcctgctgcttcatgccgccggcgtcctgctccacgtctctgtgctgctgggccctgcactgtcggccctgctgcgagcccacacgcccctccacatggctgccctcctcctgcttccctggctcatgttgctcacaggcagagtgtctctggcacagtttgccttggccttcgtgacggacacgtgcgtggcgggtgcgctgctgtgcggggctgggctgctcttccatgggatgctgctgctgcggggccagaccacatgggagtgggctcggggccagcactcctatgacctgggtccctgccacaacctgcaggcagccctggggccccgctgggccctcgtctggctctggcccttcctggcctccccattgcctggggatgggatcaccttccagaccacagcagatgtgggacacacagcctcctgactccaggaagagccagagctgtgcagggaggaaggggtgagaggggggcccccacacctagactcagtaaggaagtcgggttggaccttaacatctgcattggacaactccaccccttccttggccttgcccctgcccgcctacactcctacgtgtccagggcttgggccgtgacttaggcagaggagtgcagaggagggtctggcaggggctgctcaggccgcctagctgcccctttgccaggttaataaagcactgacttgtt

SEQ ID NO: 15305 - DNA, 4596 bp, Homo sapiens
ccgaagggagaccccgcctcattcctcacggcgagctccagaccccgcctcctttccggagcccgtctgttccccttcgggtccaaagcttttggctcctccttgttccgagcccgaaggcccgccccttcacgtactcggagctcggatcccagtgtggacctggactcgaatcccgttgccgactcgcgctctcggcttctgctccggggcttcttccctgcccgcccggggccctgaccgtggcttcttccccggcctgatctgcgcagcccggcgggcgcccagaaggagcaggcggcgcgggggcgcgctgggcgggggaggcgtggccggagctgcggcggcaagcgggctgggactgctcggccgcctcctgcccggcgagcagctcagaccatgtcgcctgaagaatggacgtatctagtggttcttcttatctccatccccatcggcttcctctttaagaaagccggtcctgggctgaagagatggggagcagccgctgtgggcctggggctcaccctgttcacctgtggcccccacactttgcattctctggtcaccatcctcgggacctgggccctcattcaggcccagccctgctcctgccacgccctggctctggcctggactttctcctatctcctgttcttccgagccctcagcctcctgggcctgcccactcccacgcccttcaccaatgccgtccagctgctgctgacgctgaagctggtgagcctggccagtgaagtccaggacctgcatctggcccagaggaaggaaatggcctcaggcttcagcaaggggcccaccctggggctgctgcccgacgtgccctccctgatggagacactcagctacagctactgctacgtgggaatcatgacaggcccgttcttccgctaccgcacctacctggactggctggagcagcccttccccggggcagtgcccagcctgcggcccctgctgcgccgcgcctggccggccccgctcttcggcctgctgttcctgctctcctctcacctcttcccgctggaggccgtgcgcgaggacgccttctacgcccgcccgctgcccgcccgcctcttctacatgatccccgtcttcttcgccttccgcatgcgcttctacgtggcctggattgccgccgagtgcggctgcattgccgccggctttggggcctaccccgtggccgccaaagcccgggccggaggcggccccaccctccaatgcccaccccccagcagaggtcaggcggcgcgagggaggcttcccaagacccagcagcccccacctccaagggctggctctgcccctagccgggaggagagcggggagcaaggggccagggccaccacctttttgagcagagtgtcgccccctcggcaaccatggcctgccagcccctgtcggtagggaaaagatccctggtactgacagatgccccttgttgctagcgcttgtcaccccgcagtgtggtgaactgccccctgtcgctaggaaaaggtggtaacttagcaaccctgtgccacccctctgttgccacagaagtgtcaccccccagaaccagattgttcctgcttgctggggatgccatcctttgctagtggtgggtcaccctctgttgctagggaaacggttccctagcaacagaacgccactatttgctagggaagcaggatccctagcaacagtagctcacctcctttttaccagaagttttgctctgttgctgcagatacggcactccctgcactgcccctttgttgctaggagctagcactgctccaccccgtgggatgtcctcacatagcagccctcagcagccctctgcaaggaaatagcaatttccaatccctgaccagtgctgttccccagcagagggcacgccattcctaccaactacagttacactgttgctaaggaagccaaacctccccctggaaactatgggttgacccttgttgccagagaggctccaccccccggcacctgcattgctaggcaagtcgcacggccatagctgtggactctcttgtggctgaggaagtattgcccccgtgttgctagggagatggcacccccggcaaccaggagtagactgcccttgtgttcctgacagctgcagtcagccttcccccaggggcttggactgcggctgggggaacagcctgttgatgtaaatgatgaactactactccctgctagggttgtcccctagtcgtcacaaactgccattctgttgtgggggtagtgacacccccacgggaatttgttaccactgccctaataaccgtgccctgacctccagctgctagagagaggatgtccccctagtaaagccaagcaggaattgaaggtttttctaaatctgctcggtcctcactcctaaaggatggctcccctcctgtcatcagaggccaccaaggcttcatatgggccagtgtttcccactgctggggctgtcgacatgagtgatgagggagccactgtattgctagaggtgacacttctccaataatcactgcgaccaggaaaaaagccccttcctaaaagcctttctaaacatcctaggcattgttgctaaggaatgccttttccttagcaacaaagatcatggggaccccactggcgcctggaacatctccctagcaaccgtgaagcaccttgttattagggatgataaccacaacttccctggcaactgcagtgtccgacaatttagaagggaccatccttggcggcttctctgaatatactgagtttggttgctaaaggactcatagcttagcaaccatagcccttcaaggcttttcatggctgtggcgggccccattaggtaccaaaagaagaagaaccccattgtcagtgaactgtaccacccagcccacccaccttcctaccctacaggcaccctctgggccaccctcccttgctgccctagcaagtctgacagccagagggccattgcctggccaggatcccttccttagcatccggggctgggacactagcaggcgtcgggagggggcctggctgagctgcatgtctgtcccccaccctcatcctccaccccccagtccggagaaggcggcttccttggagtatgactatgagaccatccgcaacatcgactgctacagcacagatttctgcgtgcgggtgcgcgatggcatgcggtactggaacatgacggtgcagtggtggctggcgcagtatatctacaagagcgcacctgcccgttcctatgtcctgcggagcgcctggaccatgctgctgagcgcctactggcacggcctccacccgggctactacctgagcttcctgaccatcccgctgtgcctggctgccgagggccggctggagtcagccctgcgggggcggctgagcccagggggccagaaggcctgggactgggtgcactggttcctgaagatgcgcgcctatgactacatgtgcatgggcttcgtgctgctctccttggccgacacccttcggtactgggcctccatctacttctgtatccacttcctggccctggcagccctggggctggggctggctttaggtgggggcagccccagccggcggaaggcagcatcccagcccaccagccttgccccggagaagctccgggaggagtaagctgtcacgacgctccctctgccagctggtcccgggaattctgtgaaccaggctgctgtctcctccccagaaagagtccttaccttggagagggtcctggagagaatttcctcttccccagctaaataccctgcctgcaactgaagcagacccgggggtgtcctccctgccctctgcccagaggccacctccactcctacaaaatcaaagtattgtccagacaagagtcactggcccctgctccagcttctgggtatccagagagcactgcacttccccaaaacggaaggggcccctgggcagtgggttttgggcaaattccctttctttgcatccacaatgtggggtcggagcttgggggcaggtcctgggagtgggaagcctcttccttgtgtctttcgctccacttttagctcatcgcaccaatattgcagacttggaaggaagcataagcttcccatttcacaaaggggaaactgaggtgcgggtgcgcgggcctggggacggccgtcccatggcttccatctgagccacctcgggaccccagcgctcctggcgccctcttctcatcgcttggcctatgacaggtcaccgtgtgtaaatctttcccaataaagtgttgcacaaagacaccacacaaacactcaaacgcggccccgccaaagcaccccagggcgccacggtcgacgctacccgtctgcaccggcggccccaccggccgccaaacccgcccggcccgtaacggcgcgggccacggcaccgcgccagggccccccaaggagacctgcgcactcaccgccacccggcacatcagcctgcccccctgcgcgcacctccgtttaccagcgagcccacgccgcgcgcccaccccacacagagcgcgcggcatccgcgccccgcacaccacccaccccccgccaccgaacgaccaccacccacccacac

SEQ ID NO: 15306 - DNA, 4407 bp, Homo sapiens
ccgaagggagaccccgcctcattcctcacggcgagctccagaccccgcctcctttccggagcccgtctgttccccttcgggtccaaagcttttggctcctccttgttccgagcccgaaggcccgccccttcacgtactcggagctcggatcccagtgtggacctggactcgaatcccgttgccgactcgcgctctcggcttctgctccggggcttcttccctgcccgcccggggccctgaccgtggcttcttccccggcctgatctgcgcagcccggcgggcgcccagaaggagcaggcggcgcgggggcgcgctgggcgggggaggcgtggccggagctgcggcggcaagcgggctgggactgctcggccgcctcctgcccggcgagcagctcagaccatgtcgcctgaagaatggacgtatctagtggttcttcttatctccatccccatcggcttcctctttaagaaagccggtcctgggctgaagagatggggagcagccgctgtgggcctggggctcaccctgttcacctgtggcccccacactttgcattctctggtcaccatcctcgggacctgggccctcattcaggcccagccctgctcctgccacgccctggctctggcctggactttctcctatctcctgttcttccgagccctcagcctcctgggcctgcccactcccacgcccttcaccaatgccgtccagctgctgctgacgctgaagctggtgagcctggccagtgaagtccaggacctgcatctggcccagaggaaggaaatggcctcaggcttcagcaaggggcccaccctggggctgctgcccgacgtgccctccctgatggagacactcagctacagctactgctacgtgggaatcatgacaggcccgttcttccgctaccgcacctacctggactggctggagcagcccttccccggggcagtgcccagcctgcggcccctgctgcgccgcgcctggccggccccgctcttcggcctgctgttcctgctctcctctcacctcttcccgctggaggccgtgcgcgaggacgccttctacgcccgcccgctgcccgcccgcctcttctacatgatccccgtcttcttcgccttccgcatgcgcttctacgtggcctggattgccgccgagtgcggctgcattgccgccggctttggggcctaccccgtggccgccaaagcccgggccggaggcggccccaccctccaatgcccaccccccagcagaggtcaggcggcgcgagggaggcttcccaagacccagcagcccccacctccaagggctggctctgcccctagccgggaggagagcggggagcaaggggccagggccaccacctttttgagcagagtgtcgccccctcggcaaccatggcctgccagcccctgtcggtagggaaaagatccctggtactgacagatgccccttgttgctagcgcttgtcaccccgcagtgtggtgaactgccccctgtcgctaggaaaaggtggtaacttagcaaccctgtgccacccctctgttgccacagaagtgtcaccccccagaaccagattgttcctgcttgctggggatgccatcctttgctagtggtgggtcaccctctgttgctagggaaacggttccctagcaacagaacgccactatttgctagggaagcaggatccctagcaacagtagctcacctcctttttaccagaagttttgctctgttgctgcagatacggcactccctgcactgcccctttgttgctaggagctagcactgctccaccccgtgggatgtcctcacatagcagccctcagcagccctctgcaaggaaatagcaatttccaatccctgaccagtgctgttccccagcagagggcacgccattcctaccaactacagttacactgttgctaaggaagccaaacctccccctggaaactatgggttgacccttgttgccagagaggctccaccccccggcacctgcattgctaggcaagtcgcacggccatagctgtggactctcttgtggctgaggaagtattgcccccgtgttgctagggagatggcacccccggcaaccaggagtagactgcccttgtgttcctgacagctgcagtcagccttcccccaggggcttggactgcggctgggggaacagcctgttgatgtaaatgatgaactactactccctgctagggttgtcccctagtcgtcacaaactgccattctgttgtgggggtagtgacacccccacgggaatttgttaccactgccctaataaccgtgccctgacctccagctgctagagagaggatgtccccctagtaaagccaagcaggaattgaaggtttttctaaatctgctcggtcctcactcctaaaggatggctcccctcctgtcatcagaggccaccaaggcttcatatgggccagtgtttcccactgctggggctgtcgacatgagtgatgagggagccactgtattgctagaggtgacacttctccaataatcactgcgaccaggaaaaaagccccttcctaaaagcctttctaaacatcctaggcattgttgctaaggaatgccttttccttagcaacaaagatcatggggaccccactggcgcctggaacatctccctagcaaccgtgaagcaccttgttattagggatgataaccacaacttccctggcaactgcagtgtccgacaatttagaagggaccatccttggcggcttctctgaatatactgagtttggttgctaaaggactcatagcttagcaaccatagcccttcaaggcttttcatggctgtggcgggccccattaggtaccaaaagaagaagaaccccattgtcagtgaactgtaccacccagcccacccaccttcctaccctacaggcaccctctgggccaccctcccttgctgccctagcaagtctgacagccagagggccattgcctggccaggatcccttccttagcatccggggctgggacactagcaggcgtcgggagggggcctggctgagctgcatgtctgtcccccaccctcatcctccaccccccagtccggagaaggcggcttccttggagtatgactatgagaccatccgcaacatcgactgctacagcacagatttctgcgtgcgggtgcgcgatggcatgcggtactggaacatgacggtgcagtggtggctggcgcagtatatctacaagagcgcacctgcccgttcctatgtcctgcggagcgcctggaccatgctgctgagcgcctactggcacggcctccacccgggctactacctgagcttcctgaccatcccgctgtgcctggctgccgagggccggctggagtcagccctgcgggggcggctgagcccagggggccagaaggcctgggactgggtgcactggttcctgaagatgcgcgcctatgactacatgtgcatgggcttcgtgctgctctccttggccgacacccttcggtactgggcctccatctacttctgtatccacttcctggccctggcagccctggggctggggctggctttaggtgggggcagccccagccggcggaaggcagcatcccagcccaccagccttgccccggagaagctccgggaggagtaagctgtcacgacgctccctctgccagctggtcccgggaattctgtgaaccaggctgctgtctcctccccagaaagagtccttaccttggagagggtcctggagagaatttcctcttccccagctaaataccctgcctgcaactgaagcagacccgggggtgtcctccctgccctctgcccagaggccacctccactcctacaaaatcaaagtattgtccagacaagagtcactggcccctgctccagcttctgggtatccagagagcactgcacttccccaaaacggaaggggcccctgggcagtgggttttgggcaaattccctttctttgcatccacaatgtggggtcggagcttgggggcaggtcctgggagtgggaagcctcttccttgtgtctttcgctccacttttagctcatcgcaccaatattgcagacttggaaggaagcataagcttcccatttcacaaaggggaaactgaggtgcgggtgcgcgggcctggggacggccgtcccatggcttccatctgagccacctcgggaccccagcgctcctggcgccctcttctcatcgcttggcctatgacaggtcaccgtgtgtaaatctttcccaataaagtgttgcacaaagaaaaggggggggcccggtcccaaatcggcccttagtgagtcgttttacaaatcactggccggggtttaacacgttggaactgggaaaccctgcgttccccaattaaatggcttggaggccatcccct

SEQ ID NO: 15307 - DNA, 5209 bp, Homo sapiens
  misc_feature (16)..(16): n is a, c, g, or t
cttaggtcagtagagntcggtggttttatttggccggaggctcgaatcccgttgccgactcgcgctctcggcttctgctccggggcttcttccctgcccgcccggggccctgaccgtggcttcttccccggcctgatctgcgcagcccggcgggcgcccagaaggagcaggcggcgcgggggcgcgctgggcgggggaggcgtggccggagctgcggcggcaagcgggctgggactgctcggccgcctcctgcccggcgagcagctcaggtcctgggctgaagagatggggagcagccgctgtgggcctggggctcaccctgttcacctgtggcccccacactttgcattctctggtcaccatcctcgggacctgggccctcattcaggcccagccctgctcctgccacgccctggctctggcctggactttctcctatctcctgttcttccgagccctcagcctcctgggcctgcccactcccacgcccttcaccaatgccgtccagctgctgctgacgctgaagctggtgagcctggccagtgaagtccaggacctgcatctggcccagaggaaggaaatggcctcaggcttcagcaaggggcccaccctggggctgctgcccgacgtgccctccctgatggagacactcagctacagctactgctacgtgggaatcatgacaggcccgttcttccgctaccgcacctacctggactggctggagcagcccttccccggggcagtgcccagcctgcggcccctgctgcgccgcgcctggccggccccgctcttcggcctgctgttcctgctctcctctcacctcttcccgctggaggccgtgcgcgaggacgccttctacgcccgcccgctgcccgcccgcctcttctacatgatccccgtcttcttcgccttccgcatgcgcttctacgtggcctggattgccgccgagtgcggctgcattgccgccggctttggggcctaccccgtggccgccaaagcccgggccggaggcggccccaccctccaatgcccaccccccagcagaggtcaggcggcgcgagggaggcttcccaagacccagcagcccccacctccaagggctggctctgcccctagccgggaggagagcggggagcaaggggccagggccaccacctttttgagcagagtgtcgccccctcggcaaccatggcctgccagcccctgtcggtagggaaaagatccctggtactgacagatgccccttgttgctagcgcttgtcaccccgcagtgtggtgaactgccccctgtcgctaggaaaaggtggtaacttagcaaccctgtgccacccctctgttgccacagaagtgtcaccccccagaaccagattgttcctgcttgctggggatgccatcctttgctagtggtgggtcaccctctgttgctagggaaacggttccctagcaacagaacgccactatttgctagggaagcaggatccctagcaacagtagctcacctcctttttaccagaagttttgctctgttgctgcagatacggcactccctgcactgcccctttgttgctaggagctagcactgctccaccccgtgggatgtcctcacatagcagccctcagcagccctctgcaaggaaatagcaatttccaatccctgaccagtgctgttccccagcagagggcacgccattcctaccaactacagttacactgttgctaaggaagccaaacctccccctggaaactatgggttgacccttgttgccagagaggctccaccccccggcacctgcattgctaggcaagtcgcacggccatagctgtggactctcttgtggctgaggaagtattgcccccgtgttgctagggagatggcacccccggcaaccaggagtagactgcccttgtgttcctgacagctgcagtcagccttcccccaggggcttggactgcggctgggggaacagcctgttgatgtaaatgatgaactactactccctgctagggttgtcccctagtcgtcacaaactgccattctgttgtgggggtagtgacacccccacgggaatttgttaccactgccctaataaccgtgccctgacctccagctgctagagagaggatgtccccctagtaaagccaagcaggaattgaaggtttttctaaatctgctcggtcctcactcctaaaggatggctcccctcctgtcatcagaggccaccaaggcttcatatgggccagtgtttcccactgctggggctgtcgacatgagtgatgagggagccactgtattgctagaggtgacacttctccaataatcactgcgaccaggaaaaaagccccttcctaaaagcctttctaaacatcctaggcattgttgctaaggaatgccttttccttagcaacaaagatcatggggaccccactggcgcctggaacatctccctagcaaccgtgaagcaccttgttattagggatgataaccacaacttccctggcaactgcagtgtccgacaatttagaagggaccatccttggcggcttctctgaatatactgagtttggttgctaaaggactcatagcttagcaaccatagcccttcaaggcttttcatggctgtggcgggccccattaggtaccaaaagaagaagaaccccattgtcagtgaactgtaccacccagcccacccaccttcctaccctacaggcaccctctgggccaccctcccttgctgccctagcaagtctgacagccagagggccattgcctggccaggatcccttccttagcatccggggctgggacactagcaggcgtcgggagggggcctggctgagctgcatgtctgtcccccaccctcatcctccaccccccagtccggagaaggcggcttccttggagtatgactatgagaccatccgcaacatcgactgctacagcacagatttctgcgtgcgggtgcgcgatggcatgcggtactggaacatgacggtgcagtggtggctggcgcagtatatctacaagagcgcacctgcccgttcctatgtcctgcggagcgcctggaccatgctgctgagcgcctactggcacggcctccacccgggctactacctgagcttcctgaccatcccgctgtgcctggctgccgagggccggctggagtcagccctgcgggggcggctgagcccagggggccagaaggcctgggactgggtgcactggttcctgaagatgcgcgcctatgactacatgtgcatgggcttcgtgctgctctccttggccgacacccttcggtactgggcctccatctacttctgtatccacttcctggccctggcagccctggggctggggctggctttaggtgggggcagccccagccggcggaaggcagcatcccagcccaccagccttgccccggagaagctccgggaggagtaagctgtcacgacgctccctctgccagctggtcccgggaattctgtgaaccaggctgctgtctcctccccagaaagagtccttaccttggagagggtcctggagagaatttcctcttccccagctaaataccctgcctgcaactgaagcagacccgggggtgtcctccctgccctctgcccagaggccacctccactcctacaaaatcaaagtattgtccagacaagagtcactggcccctgctccagcttctgggtatccagagagcactgcacttccccaaaacggaaggggcccctgggcagtgggttttgggcaaattccctttctttgcatccacaatgtggggtcggagcttgggggcaggtcctgggagtgggaagcctcttccttgtgtctttcgctccacttttagctcatcgcaccaatattgcagacttggaaggaagcataagcttcccatttcacaaaggggaaactgaggtgcgggtgcgcgggcctggggacggccgtcccatggcttccatctgagccacctcgggaccccagcgctcctggcgccctcttctcatcgcttggcctatgacaggtcaccgtgtgtaaatctttcccaataaagtgttgcacaaagaaaaaaaaaaaaaaaaaacggcagccctgggcggctgggagcacggacggggcgcccgcgcagctgcctctcgtgctcaccgcgctgtgggccgcggccgtgggcctggagctggcttacgtgctggtgctcggtcccgggccgccgccgctgggacccctggcccgggccttgcagctggcgctggccgccttccagctgctcaacctgctgggcaacgtggggctcttcctgcgctcggatcccagcatccgtggcgtgatgctggccggccgcggtctgggccggggctgggcttactgctaccaatgccaaagccaggtgccgccacgcagcggacactgctctgcctgccgcgtctgcatcctgcgtcgggaccaccactgccgcctgctgggccgctgcgtgggcttcggcaactaccggcccttcctgtgcctgctgcttcatgccgccggcgtcctgctccacgtctctgtgctgctgggccctgcactgtcggccctgctgcgagcccacacgcccctccacatggctgccctcctcctgcttccctggctcatgttgctcacaggcagagtgtctctggcacagtttgccttggccttcgtgacggacacgtgcgtggcgggtgcgctgctgtgcggggctgggctgctcttccatgggatgctgctgctgcggggccagaccacatgggagtgggctcggggccagcactcctatgacctgggtccctgccacaacctgcaggcagccctggggccccgctgggccctcgtctggctctggcccttcctggcctccccattgcctggggatgggatcaccttccagaccacagcagatgtgggacacacagcctcctgactccaggaagagccagagctgtgcagggaggaaggggtgagaggggggcccccacacctagactcagtaaggaagtcgggttggaccttaacatctgcattggacaactccaccccttccttggccttgcccctgcccgcctacactcctacgtgtccagggcttgggccgtgacttaggcagaggagtgcagaggagggtctggcaggggctgctcaggccgcctagctgcccctttgccaggttaataaagcactgacttgtt

SEQ ID NO: 15308 - DNA, 5051 bp, Homo sapiens
gccagggtggcggcgcccagtggcgaggcgagaccatgtcgcctgaagaatggacgtatctagtggttcttcttatctccatccccatcggcttcctctttaagaaagccggtcctgggctgaagagatggggagcagccgctgtgggcctggggctcaccctgttcacctgtggcccccacactttgcattctctggtcaccatcctcgggacctgggccctcattcaggcccagccctgctcctgccacgccctggctctggcctggactttctcctatctcctgttcttccgagccctcagcctcctgggcctgcccactcccacgcccttcaccaatgccgtccagctgctgctgacgctgaagctggtgagcctggccagtgaagtccaggacctgcatctggcccagaggaaggaaatggcctcaggcttcagcaaggggcccaccctggggctgctgcccgacgtgccctccctgatggagacactcagctacagctactgctacgtgggaatcatgacaggcccgttcttccgctaccgcacctacctggactggctggagcagcccttccccggggcagtgcccagcctgcggcccctgctgcgccgcgcctggccggccccgctcttcggcctgctgttcctgctctcctctcacctcttcccgctggaggccgtgcgcgaggacgccttctacgcccgcccgctgcccgcccgcctcttctacatgatccccgtcttcttcgccttccgcatgcgcttctacgtggcctggattgccgccgagtgcggctgcattgccgccggctttggggcctaccccgtggccgccaaagcccgggccggaggcggccccaccctccaatgcccaccccccagcagaggtcaggcggcgcgagggaggcttcccaagacccagcagcccccacctccaagggctggctctgcccctagccgggaggagagcggggagcaaggggccagggccaccacctttttgagcagagtgtcgccccctcggcaaccatggcctgccagcccctgtcggtagggaaaagatccctggtactgacagatgccccttgttgctagcgcttgtcaccccgcagtgtggtgaactgccccctgtcgctaggaaaaggtggtaacttagcaaccctgtgccacccctctgttgccacagaagtgtcaccccccagaaccagattgttcctgcttgctggggatgccatcctttgctagtggtgggtcaccctctgttgctagggaaacggttccctagcaacagaacgccactatttgctagggaagcaggatccctagcaacagtagctcacctcctttttaccagaagttttgctctgttgctgcagatacggcactccctgcactgcccctttgttgctaggagctagcactgctccaccccgtgggatgtcctcacatagcagccctcagcagccctctgcaaggaaatagcaatttccaatccctgaccagtgctgttccccagcagagggcacgccattcctaccaactacagttacactgttgctaaggaagccaaacctccccctggaaactatgggttgacccttgttgccagagaggctccaccccccggcacctgcattgctaggcaagtcgcacggccatagctgtggactctcttgtggctgaggaagtattgcccccgtgttgctagggagatggcacccccggcaaccaggagtagactgcccttgtgttcctgacagctgcagtcagccttcccccaggggcttggactgcggctgggggaacagcctgttgatgtaaatgatgaactactactccctgctagggttgtcccctagtcgtcacaaactgccattctgttgtgggggtagtgacacccccacgggaatttgttaccactgccctaataaccgtgccctgacctccagctgctagagagaggatgtccccctagtaaagccaagcaggaattgaaggtttttctaaatctgctcggtcctcactcctaaaggatggctcccctcctgtcatcagaggccaccaaggcttcatatgggccagtgtttcccactgctggggctgtcgacatgagtgatgagggagccactgtattgctagaggtgacacttctccaataatcactgcgaccaggaaaaaagccccttcctaaaagcctttctaaacatcctaggcattgttgctaaggaatgccttttccttagcaacaaagatcatggggaccccactggcgcctggaacatctccctagcaaccgtgaagcaccttgttattagggatgataaccacaacttccctggcaactgcagtgtccgacaatttagaagggaccatccttggcggcttctctgaatatactgagtttggttgctaaaggactcatagcttagcaaccatagcccttcaaggcttttcatggctgtggcgggccccattaggtaccaaaagaagaagaaccccattgtcagtgaactgtaccacccagcccacccaccttcctaccctacaggcaccctctgggccaccctcccttgctgccctagcaagtctgacagccagagggccattgcctggccaggatcccttccttagcatccggggctgggacactagcaggcgtcgggagggggcctggctgagctgcatgtctgtcccccaccctcatcctccaccccccagtccggagaaggcggcttccttggagtatgactatgagaccatccgcaacatcgactgctacagcacagatttctgcgtgcgggtgcgcgatggcatgcggtactggaacatgacggtgcagtggtggctggcgcagtatatctacaagagcgcacctgcccgttcctatgtcctgcggagcgcctggaccatgctgctgagcgcctactggcacggcctccacccgggctactacctgagcttcctgaccatcccgctgtgcctggctgccgagggccggctggagtcagccctgcgggggcggctgagcccagggggccagaaggcctgggactgggtgcactggttcctgaagatgcgcgcctatgactacatgtgcatgggcttcgtgctgctctccttggccgacacccttcggtactgggcctccatctacttctgtatccacttcctggccctggcagccctggggctggggctggctttaggtgggggcagccccagccggcggaaggcagcatcccagcccaccagccttgccccggagaagctccgggaggagtaagctgtcacgacgctccctctgccagctggtcccgggaattctgtgaaccaggctgctgtctcctccccagaaagagtccttaccttggagagggtcctggagagaatttcctcttccccagctaaataccctgcctgcaactgaagcagacccgggggtgtcctccctgccctctgcccagaggccacctccactcctacaaaatcaaagtattgtccagacaagagtcactggcccctgctccagcttctgggtatccagagagcactgcacttccccaaaacggaaggggcccctgggcagtgggttttgggcaaattccctttctttgcatccacaatgtggggtcggagcttgggggcaggtcctgggagtgggaagcctcttccttgtgtctttcgctccacttttagctcatcgcaccaatattgcagacttggaaggaagcataagcttcccatttcacaaaggggaaactgaggtgcgggtgcgcgggcctggggacggccgtcccatggcttccatctgagccacctcgggaccccagcgctcctggcgccctcttctcatcgcttggcctatgacaggtcaccgtgtgtaaatctttcccaataaagtgttgcacaaagaaaaaaaaaaaaaaaaaacggcagccctgggcggctgggagcacggacggggcgcccgcgcagctgcctctcgtgctcaccgcgctgtgggccgcggccgtgggcctggagctggcttacgtgctggtgctcggtcccgggccgccgccgctgggacccctggcccgggccttgcagctggcgctggccgccttccagctgctcaacctgctgggcaacgtggggctcttcctgcgctcggatcccagcatccgtggcgtgatgctggccggccgcggtctgggccggggctgggcttactgctaccaatgccaaagccaggtgccgccacgcagcggacactgctctgcctgccgcgtctgcatcctgcgtcgggaccaccactgccgcctgctgggccgctgcgtgggcttcggcaactaccggcccttcctgtgcctgctgcttcatgccgccggcgtcctgctccacgtctctgtgctgctgggccctgcactgtcggccctgctgcgagcccacacgcccctccacatggctgccctcctcctgcttccctggctcatgttgctcacaggcagagtgtctctggcacagtttgccttggccttcgtgacggacacgtgcgtggcgggtgcgctgctgtgcggggctgggctgctcttccatgggatgctgctgctgcggggccagaccacatgggagtgggctcggggccagcactcctatgacctgggtccctgccacaacctgcaggcagccctggggccccgctgggccctcgtctggctctggcccttcctggcctccccattgcctggggatgggatcaccttccagaccacagcagatgtgggacacacagcctcctgactccaggaagagccagagctgtgcagggaggaaggggtgagaggggggcccccacacctagactcagtaaggaagtcgggttggaccttaacatctgcattggacaactccaccccttccttggccttgcccctgcccgcctacactcctacgtgtccagggcttgggccgtgacttaggcagaggagtgcagaggagggtctggcaggggctgctcaggccgcctagctgcccctttgccaggttaataaagcactgacttgtt

SEQ ID NO: 15309 - DNA, 5282 bp, Homo sapiens
  misc_feature (1)..(1): n is a, c, g, or t
nggtgcactatagacaagtttgtgcaaggagcaggctggtacggtccgggattccgggcccgtctgttccccttcgggtccaaagcttttggctcctccttgttccgagcccgaaggcccgccccttcacgtactcggagctcggatcccagtgtggacctggactcgaatcccgttgccgactcgcgctctcggcttctgctccggggcttcttccctgcccgcccggggccctgaccgtggcttcttccccggcctgatctgcgcagcccggcgggcgcccagaaggagcaggcggcgcgggggcgcgctgggcgggggaggcgtggccggagctgcggcggcaagcgggctgggactgctcggccgcctcctgcccggcgagcagctcagaccatgtcgcctgaagaatggacgtatctagtggttcttcttatctccatccccatcggcttcctctttaagaaagccgctcctgccacgccctggctctggcctggactttctcctatctcctgttcttccgagccctcagcctcctgggcctgcccactcccacgcccttcaccaatgccgtccagctgctgctgacgctgaagctggtgagcctggccagtgaagtccaggacctgcatctggcccagaggaaggaaatggcctcaggcttcagcaaggggcccaccctggggctgctgcccgacgtgccctccctgatggagacactcagctacagctactgctacgtgggaatcatgacaggcccgttcttccgctaccgcacctacctggactggctggagcagcccttccccggggcagtgcccagcctgcggcccctgctgcgccgcgcctggccggccccgctcttcggcctgctgttcctgctctcctctcacctcttcccgctggaggccgtgcgcgaggacgccttctacgcccgcccgctgcccgcccgcctcttctacatgatccccgtcttcttcgccttccgcatgcgcttctacgtggcctggattgccgccgagtgcggctgcattgccgccggctttggggcctaccccgtggccgccaaagcccgggccggaggcggccccaccctccaatgcccaccccccagcagaggtcaggcggcgcgagggaggcttcccaagacccagcagcccccacctccaagggctggctctgcccctagccgggaggagagcggggagcaaggggccagggccaccacctttttgagcagagtgtcgccccctcggcaaccatggcctgccagcccctgtcggtagggaaaagatccctggtactgacagatgccccttgttgctagcgcttgtcaccccgcagtgtggtgaactgccccctgtcgctaggaaaaggtggtaacttagcaaccctgtgccacccctctgttgccacagaagtgtcaccccccagaaccagattgttcctgcttgctggggatgccatcctttgctagtggtgggtcaccctctgttgctagggaaacggttccctagcaacagaacgccactatttgctagggaagcaggatccctagcaacagtagctcacctcctttttaccagaagttttgctctgttgctgcagatacggcactccctgcactgcccctttgttgctaggagctagcactgctccaccccgtgggatgtcctcacatagcagccctcagcagccctctgcaaggaaatagcaatttccaatccctgaccagtgctgttccccagcagagggcacgccattcctaccaactacagttacactgttgctaaggaagccaaacctccccctggaaactatgggttgacccttgttgccagagaggctccaccccccggcacctgcattgctaggcaagtcgcacggccatagctgtggactctcttgtggctgaggaagtattgcccccgtgttgctagggagatggcacccccggcaaccaggagtagactgcccttgtgttcctgacagctgcagtcagccttcccccaggggcttggactgcggctgggggaacagcctgttgatgtaaatgatgaactactactccctgctagggttgtcccctagtcgtcacaaactgccattctgttgtgggggtagtgacacccccacgggaatttgttaccactgccctaataaccgtgccctgacctccagctgctagagagaggatgtccccctagtaaagccaagcaggaattgaaggtttttctaaatctgctcggtcctcactcctaaaggatggctcccctcctgtcatcagaggccaccaaggcttcatatgggccagtgtttcccactgctggggctgtcgacatgagtgatgagggagccactgtattgctagaggtgacacttctccaataatcactgcgaccaggaaaaaagccccttcctaaaagcctttctaaacatcctaggcattgttgctaaggaatgccttttccttagcaacaaagatcatggggaccccactggcgcctggaacatctccctagcaaccgtgaagcaccttgttattagggatgataaccacaacttccctggcaactgcagtgtccgacaatttagaagggaccatccttggcggcttctctgaatatactgagtttggttgctaaaggactcatagcttagcaaccatagcccttcaaggcttttcatggctgtggcgggccccattaggtaccaaaagaagaagaaccccattgtcagtgaactgtaccacccagcccacccaccttcctaccctacaggcaccctctgggccaccctcccttgctgccctagcaagtctgacagccagagggccattgcctggccaggatcccttccttagcatccggggctgggacactagcaggcgtcgggagggggcctggctgagctgcatgtctgtcccccaccctcatcctccaccccccagtccggagaaggcggcttccttggagtatgactatgagaccatccgcaacatcgactgctacagcacagatttctgcgtgcgggtgcgcgatggcatgcggtactggaacatgacggtgcagtggtggctggcgcagtatatctacaagagcgcacctgcccgttcctatgtcctgcggagcgcctggaccatgctgctgagcgcctactggcacggcctccacccgggctactacctgagcttcctgaccatcccgctgtgcctggctgccgagggccggctggagtcagccctgcgggggcggctgagcccagggggccagaaggcctgggactgggtgcactggttcctgaagatgcgcgcctatgactacatgtgcatgggcttcgtgctgctctccttggccgacacccttcggtactgggcctccatctacttctgtatccacttcctggccctggcagccctggggctggggctggctttaggtgggggcagccccagccggcggaaggcagcatcccagcccaccagccttgccccggagaagctccgggaggagtaagctgtcacgacgctccctctgccagctggtcccgggaattctgtgaaccaggctgctgtctcctccccagaaagagtccttaccttggagagggtcctggagagaatttcctcttccccagctaaataccctgcctgcaactgaagcagacccgggggtgtcctccctgccctctgcccagaggccacctccactcctacaaaatcaaagtattgtccagacaagagtcactggcccctgctccagcttctgggtatccagagagcactgcacttccccaaaacggaaggggcccctgggcagtgggttttgggcaaattccctttctttgcatccacaatgtggggtcggagcttgggggcaggtcctgggagtgggaagcctcttccttgtgtctttcgctccacttttagctcatcgcaccaatattgcagacttggaaggaagcataagcttcccatttcacaaaggggaaactgaggtgcgggtgcgcgggcctggggacggccgtcccatggcttccatctgagccacctcgggaccccagcgctcctggcgccctcttctcatcgcttggcctatgacaggtcaccgtgtgtaaatctttcccaataaagtgttgcacaaagaaaaaaaaaaaaaaaaaacggcagccctgggcggctgggagcacggacggggcgcccgcgcagctgcctctcgtgctcaccgcgctgtgggccgcggccgtgggcctggagctggcttacgtgctggtgctcggtcccgggccgccgccgctgggacccctggcccgggccttgcagctggcgctggccgccttccagctgctcaacctgctgggcaacgtggggctcttcctgcgctcggatcccagcatccgtggcgtgatgctggccggccgcggtctgggccggggctgggcttactgctaccaatgccaaagccaggtgccgccacgcagcggacactgctctgcctgccgcgtctgcatcctgcgtcgggaccaccactgccgcctgctgggccgctgcgtgggcttcggcaactaccggcccttcctgtgcctgctgcttcatgccgccggcgtcctgctccacgtctctgtgctgctgggccctgcactgtcggccctgctgcgagcccacacgcccctccacatggctgccctcctcctgcttccctggctcatgttgctcacaggcagagtgtctctggcacagtttgccttggccttcgtgacggacacgtgcgtggcgggtgcgctgctgtgcggggctgggctgctcttccatgggatgctgctgctgcggggccagaccacatgggagtgggctcggggccagcactcctatgacctgggtccctgccacaacctgcaggcagccctggggccccgctgggccctcgtctggctctggcccttcctggcctccccattgcctggggatgggatcaccttccagaccacagcagatgtgggacacacagcctcctgactccaggaagagccagagctgtgcagggaggaaggggtgagaggggggcccccacacctagactcagtaaggaagtcgggttggaccttaacatctgcattggacaactccaccccttccttggccttgcccctgcccgcctacactcctacgtgtccagggcttgggccgtgacttaggcagaggagtgcagaggagggtctggcaggggctgctcaggccgcctagctgcccctttgccaggttaataaagcactgacttgtt

SEQ ID NO: 15310 - DNA, 5285 bp, Homo sapiens
  misc_feature (1)..(1): n is a, c, g, or t
nggtgcactatagacaagtttgtgcaaggagcaggctggtacggtccgggattccgggcccgtctgttccccttcgggtccaaagcttttggctcctccttgttccgagcccgaaggcccgccccttcacgtactcggagctcggatcccagtgtggacctggactcgaatcccgttgccgactcgcgctctcggcttctgctccggggcttcttccctgcccgcccggggccctgaccgtggcttcttccccggcctgatctgcgcagcccggcgggcgcccagaaggagcaggcggcgcgggggcgcgctgggcgggggaggcgtggccggagctgcggcggcaagcgggctgggactgctcggccgcctcctgcccggcgagcagctcagaccatgtcgcctgaagaatggacgtatctagtggttcttcttatctccatccccatcggcttcctctttaagaaagccggtcctgggctgaagagatggggagcagccgctgtgggcctggggctcaccctgttcacctgtggcccccacactttgcattctctggtcaccatcctcgggacctgggccctcattcaggcccagccctgctggtgagcctggccagtgaagtccaggacctgcatctggcccagaggaaggaaatggcctcaggcttcagcaaggggcccaccctggggctgctgcccgacgtgccctccctgatggagacactcagctacagctactgctacgtgggaatcatgacaggcccgttcttccgctaccgcacctacctggactggctggagcagcccttccccggggcagtgcccagcctgcggcccctgctgcgccgcgcctggccggccccgctcttcggcctgctgttcctgctctcctctcacctcttcccgctggaggccgtgcgcgaggacgccttctacgcccgcccgctgcccgcccgcctcttctacatgatccccgtcttcttcgccttccgcatgcgcttctacgtggcctggattgccgccgagtgcggctgcattgccgccggctttggggcctaccccgtggccgccaaagcccgggccggaggcggccccaccctccaatgcccaccccccagcagaggtcaggcggcgcgagggaggcttcccaagacccagcagcccccacctccaagggctggctctgcccctagccgggaggagagcggggagcaaggggccagggccaccacctttttgagcagagtgtcgccccctcggcaaccatggcctgccagcccctgtcggtagggaaaagatccctggtactgacagatgccccttgttgctagcgcttgtcaccccgcagtgtggtgaactgccccctgtcgctaggaaaaggtggtaacttagcaaccctgtgccacccctctgttgccacagaagtgtcaccccccagaaccagattgttcctgcttgctggggatgccatcctttgctagtggtgggtcaccctctgttgctagggaaacggttccctagcaacagaacgccactatttgctagggaagcaggatccctagcaacagtagctcacctcctttttaccagaagttttgctctgttgctgcagatacggcactccctgcactgcccctttgttgctaggagctagcactgctccaccccgtgggatgtcctcacatagcagccctcagcagccctctgcaaggaaatagcaatttccaatccctgaccagtgctgttccccagcagagggcacgccattcctaccaactacagttacactgttgctaaggaagccaaacctccccctggaaactatgggttgacccttgttgccagagaggctccaccccccggcacctgcattgctaggcaagtcgcacggccatagctgtggactctcttgtggctgaggaagtattgcccccgtgttgctagggagatggcacccccggcaaccaggagtagactgcccttgtgttcctgacagctgcagtcagccttcccccaggggcttggactgcggctgggggaacagcctgttgatgtaaatgatgaactactactccctgctagggttgtcccctagtcgtcacaaactgccattctgttgtgggggtagtgacacccccacgggaatttgttaccactgccctaataaccgtgccctgacctccagctgctagagagaggatgtccccctagtaaagccaagcaggaattgaaggtttttctaaatctgctcggtcctcactcctaaaggatggctcccctcctgtcatcagaggccaccaaggcttcatatgggccagtgtttcccactgctggggctgtcgacatgagtgatgagggagccactgtattgctagaggtgacacttctccaataatcactgcgaccaggaaaaaagccccttcctaaaagcctttctaaacatcctaggcattgttgctaaggaatgccttttccttagcaacaaagatcatggggaccccactggcgcctggaacatctccctagcaaccgtgaagcaccttgttattagggatgataaccacaacttccctggcaactgcagtgtccgacaatttagaagggaccatccttggcggcttctctgaatatactgagtttggttgctaaaggactcatagcttagcaaccatagcccttcaaggcttttcatggctgtggcgggccccattaggtaccaaaagaagaagaaccccattgtcagtgaactgtaccacccagcccacccaccttcctaccctacaggcaccctctgggccaccctcccttgctgccctagcaagtctgacagccagagggccattgcctggccaggatcccttccttagcatccggggctgggacactagcaggcgtcgggagggggcctggctgagctgcatgtctgtcccccaccctcatcctccaccccccagtccggagaaggcggcttccttggagtatgactatgagaccatccgcaacatcgactgctacagcacagatttctgcgtgcgggtgcgcgatggcatgcggtactggaacatgacggtgcagtggtggctggcgcagtatatctacaagagcgcacctgcccgttcctatgtcctgcggagcgcctggaccatgctgctgagcgcctactggcacggcctccacccgggctactacctgagcttcctgaccatcccgctgtgcctggctgccgagggccggctggagtcagccctgcgggggcggctgagcccagggggccagaaggcctgggactgggtgcactggttcctgaagatgcgcgcctatgactacatgtgcatgggcttcgtgctgctctccttggccgacacccttcggtactgggcctccatctacttctgtatccacttcctggccctggcagccctggggctggggctggctttaggtgggggcagccccagccggcggaaggcagcatcccagcccaccagccttgccccggagaagctccgggaggagtaagctgtcacgacgctccctctgccagctggtcccgggaattctgtgaaccaggctgctgtctcctccccagaaagagtccttaccttggagagggtcctggagagaatttcctcttccccagctaaataccctgcctgcaactgaagcagacccgggggtgtcctccctgccctctgcccagaggccacctccactcctacaaaatcaaagtattgtccagacaagagtcactggcccctgctccagcttctgggtatccagagagcactgcacttccccaaaacggaaggggcccctgggcagtgggttttgggcaaattccctttctttgcatccacaatgtggggtcggagcttgggggcaggtcctgggagtgggaagcctcttccttgtgtctttcgctccacttttagctcatcgcaccaatattgcagacttggaaggaagcataagcttcccatttcacaaaggggaaactgaggtgcgggtgcgcgggcctggggacggccgtcccatggcttccatctgagccacctcgggaccccagcgctcctggcgccctcttctcatcgcttggcctatgacaggtcaccgtgtgtaaatctttcccaataaagtgttgcacaaagaaaaaaaaaaaaaaaaaacggcagccctgggcggctgggagcacggacggggcgcccgcgcagctgcctctcgtgctcaccgcgctgtgggccgcggccgtgggcctggagctggcttacgtgctggtgctcggtcccgggccgccgccgctgggacccctggcccgggccttgcagctggcgctggccgccttccagctgctcaacctgctgggcaacgtggggctcttcctgcgctcggatcccagcatccgtggcgtgatgctggccggccgcggtctgggccggggctgggcttactgctaccaatgccaaagccaggtgccgccacgcagcggacactgctctgcctgccgcgtctgcatcctgcgtcgggaccaccactgccgcctgctgggccgctgcgtgggcttcggcaactaccggcccttcctgtgcctgctgcttcatgccgccggcgtcctgctccacgtctctgtgctgctgggccctgcactgtcggccctgctgcgagcccacacgcccctccacatggctgccctcctcctgcttccctggctcatgttgctcacaggcagagtgtctctggcacagtttgccttggccttcgtgacggacacgtgcgtggcgggtgcgctgctgtgcggggctgggctgctcttccatgggatgctgctgctgcggggccagaccacatgggagtgggctcggggccagcactcctatgacctgggtccctgccacaacctgcaggcagccctggggccccgctgggccctcgtctggctctggcccttcctggcctccccattgcctggggatgggatcaccttccagaccacagcagatgtgggacacacagcctcctgactccaggaagagccagagctgtgcagggaggaaggggtgagaggggggcccccacacctagactcagtaaggaagtcgggttggaccttaacatctgcattggacaactccaccccttccttggccttgcccctgcccgcctacactcctacgtgtccagggcttgggccgtgacttaggcagaggagtgcagaggagggtctggcaggggctgctcaggccgcctagctgcccctttgccaggttaataaagcactgacttgtt

SEQ ID NO: 15311 - DNA, 4213 bp, Homo sapiens
aaccgagtagcccgacagtccccgactagcccgacagccccgactagcccgacagccccgactagcccgacagccccgactagcccgacagcccccacctccaagggctggctctgcccctagccgggaggagagcggggagcaaggggccagggccaccacctttttgagcagagtgtcgccccctcggcaaccatggcctgccagcccctgtcggtagggaaaagatccctggtactgacagatgccccttgttgctagcgcttgtcaccccgcagtgtggtgaactgccccctgtcgctaggaaaaggtggtaacttagcaaccctgtgccacccctctgttgccacagaagtgtcaccccccagaaccagattgttcctgcttgctggggatgccatcctttgctagtggtgggtcaccctctgttgctagggaaacggttccctagcaacagaacgccactatttgctagggaagcaggatccctagcaacagtagctcacctcctttttaccagaagttttgctctgttgctgcagatacggcactccctgcactgcccctttgttgctaggagctagcactgctccaccccgtgggatgtcctcacatagcagccctcagcagccctctgcaaggaaatagcaatttccaatccctgaccagtgctgttccccagcagagggcacgccattcctaccaactacagttacactgttgctaaggaagccaaacctccccctggaaactatgggttgacccttgttgccagagaggctccaccccccggcacctgcattgctaggcaagtcgcacggccatagctgtggactctcttgtggctgaggaagtattgcccccgtgttgctagggagatggcacccccggcaaccaggagtagactgcccttgtgttcctgacagctgcagtcagccttcccccaggggcttggactgcggctgggggaacagcctgttgatgtaaatgatgaactactactccctgctagggttgtcccctagtcgtcacaaactgccattctgttgtgggggtagtgacacccccacgggaatttgttaccactgccctaataaccgtgccctgacctccagctgctagagagaggatgtccccctagtaaagccaagcaggaattgaaggtttttctaaatctgctcggtcctcactcctaaaggatggctcccctcctgtcatcagaggccaccaaggcttcatatgggccagtgtttcccactgctggggctgtcgacatgagtgatgagggagccactgtattgctagaggtgacacttctccaataatcactgcgaccaggaaaaaagccccttcctaaaagcctttctaaacatcctaggcattgttgctaaggaatgccttttccttagcaacaaagatcatggggaccccactggcgcctggaacatctccctagcaaccgtgaagcaccttgttattagggatgataaccacaacttccctggcaactgcagtgtccgacaatttagaagggaccatccttggcggcttctctgaatatactgagtttggttgctaaaggactcatagcttagcaaccatagcccttcaaggcttttcatggctgtggcgggccccattaggtaccaaaagaagaagaaccccattgtcagtgaactgtaccacccagcccacccaccttcctaccctacaggcaccctctgggccaccctcccttgctgccctagcaagtctgacagccagagggccattgcctggccaggatcccttccttagcatccggggctgggacactagcaggcgtcgggagggggcctggctgagctgcatgtctgtcccccaccctcatcctccaccccccagtccggagaaggcggcttccttggagtatgactatgagaccatccgcaacatcgactgctacagcacagatttctgcgtgcgggtgcgcgatggcatgcggtactggaacatgacggtgcagtggtggctggcgcagtatatctacaagagcgcacctgcccgttcctatgtcctgcggagcgcctggaccatgctgctgagcgcctactggcacggcctccacccgggctactacctgagcttcctgaccatcccgctgtgcctggctgccgagggccggctggagtcagccctgcgggggcggctgagcccagggggccagaaggcctgggactgggtgcactggttcctgaagatgcgcgcctatgactacatgtgcatgggcttcgtgctgctctccttggccgacacccttcggtactgggcctccatctacttctgtatccacttcctggccctggcagccctggggctggggctggctttaggtgggggcagccccagccggcggaaggcagcatcccagcccaccagccttgccccggagaagctccgggaggagtaagctgtcacgacgctccctctgccagctggtcccgggaattctgtgaaccaggctgctgtctcctccccagaaagagtccttaccttggagagggtcctggagagaatttcctcttccccagctaaataccctgcctgcaactgaagcagacccgggggtgtcctccctgccctctgcccagaggccacctccactcctacaaaatcaaagtattgtccagacaagagtcactggcccctgctccagcttctgggtatccagagagcactgcacttccccaaaacggaaggggcccctgggcagtgggttttgggcaaattccctttctttgcatccacaatgtggggtcggagcttgggggcaggtcctgggagtgggaagcctcttccttgtgtctttcgctccacttttagctcatcgcaccaatattgcagacttggaaggaagcataagcttcccatttcacaaaggggaaactgaggtgcgggtgcgcgggcctggggacggccgtcccatggcttccatctgagccacctcgggaccccagcgctcctggcgccctcttctcatcgcttggcctatgacaggtcaccgtgtgtaaatctttcccaataaagtgttgcacaaagaaaaaaaaaaaaaaaaaacggcagccctgggcggctgggagcacggacggggcgcccgcgcagctgcctctcgtgctcaccgcgctgtgggccgcggccgtgggcctggagctggcttacgtgctggtgctcggtcccgggccgccgccgctgggacccctggcccgggccttgcagctggcgctggccgccttccagctgctcaacctgctgggcaacgtggggctcttcctgcgctcggatcccagcatccgtggcgtgatgctggccggccgcggtctgggccggggctgggcttactgctaccaatgccaaagccaggtgccgccacgcagcggacactgctctgcctgccgcgtctgcatcctgcgtcgggaccaccactgccgcctgctgggccgctgcgtgggcttcggcaactaccggcccttcctgtgcctgctgcttcatgccgccggcgtcctgctccacgtctctgtgctgctgggccctgcactgtcggccctgctgcgagcccacacgcccctccacatggctgccctcctcctgcttccctggctcatgttgctcacaggcagagtgtctctggcacagtttgccttggccttcgtgacggacacgtgcgtggcgggtgcgctgctgtgcggggctgggctgctcttccatgggatgctgctgctgcggggccagaccacatgggagtgggctcggggccagcactcctatgacctgggtccctgccacaacctgcaggcagccctggggccccgctgggccctcgtctggctctggcccttcctggcctccccattgcctggggatgggatcaccttccagaccacagcagatgtgggacacacagcctcctgactccaggaagagccagagctgtgcagggaggaaggggtgagaggggggcccccacacctagactcagtaaggaagtcgggttggaccttaacatctgcattggacaactccaccccttccttggccttgcccctgcccgcctacactcctacgtgtccagggcttgggccgtgacttaggcagaggagtgcagaggagggtctggcaggggctgctcaggccgcctagctgcccctttgccaggttaataaagcactgacttgtt

SEQ ID NO: 15312 - DNA, 4221 bp, Homo sapiens
ccgaagggagaccccgcctcattcctcacggcgagctccagaccccgcctcctttccggagcccgtctgttccccttcgggtccaaagcttttggctcctccttgttccgagcccgaaggcccgccccttcacgtactcggagctcggatcccagtgtggacctggactcgaatcccgttgccgactcgcgctctcggcttctgctccggggcttcttccctgcccgcccggggccctgaccgtggcttcttccccggcctgatctgcgcagcccggcgggcgcccagaaggagcaggcggcgcgggggcgcgctgggcgggggaggcgtggccggagctgcggcggcaagcgggctgggactgctcggccgcctcctgcccggcgagcagctcagaccatgtcgcctgaagaatggacgtatctagtggttcttcttatctccatccccatcggcttcctctttaagaaagccggtcctgggctgaagagatggggagcagccgctgtgggcctggggctcaccctgttcacctgtggcccccacactttgcattctctggtcaccatcctcgggacctgggccctcattcaggcccagccctgctcctgccacgccctggctctggcctggactttctcctatctcctgttcttccgagccctcagcctcctgggcctgcccactcccacgcccttcaccaatgccgtccagctgctgctgacgctgaagctggtgagcctggccagtgaagtccaggacctgcatctggcccagaggaaggaaatggcctcaggcttcagcaaggggcccaccctggggctgctgcccgacgtgccctccctgatggagacactcagctacagctactgctacgtgggaatcatgacaggcccgttcttccgctaccgcacctacctggactggctggagcagcccttccccggggcagtgcccagcctgcggcccctgctgcgccgcgcctggccggccccgctcttcggcctgctgttcctgctctcctctcacctcttcccgctggaggccgtgcgcgaggacgccttctacgcccgcccgctgcccgcccgcctcttctacatgatccccgtcttcttcgccttccgcatgcgcttctacgtggcctggattgccgccgagtgcggctgcattgccgccggctttggggcctaccccgtggccgccaaagcccgggccggaggcggccccaccctccaatgcccaccccccagcagaggtcaggcggcgcgagggaggcttcccaagacccagcagcccccacctccaagggctggctctgcccctagccgggaggagagcggggagcaaggggccagggccaccacctttttgagcagagtgtcgccccctcggcaaccatggcctgccagcccctgtcggtagggaaaagatccctggtactgacagatgccccttgttgctagcgcttgtcaccccgcagtgtggtgaactgccccctgtcgctaggaaaaggtggtaacttagcaaccctgtgccacccctctgttgccacagaagtgtcaccccccagaaccagattgttcctgcttgctggggatgccatcctttgctagtggtgggtcaccctctgttgctagggaaacggttccctagcaacagaacgccactatttgctagggaagcaggatccctagcaacagtagctcacctcctttttaccagaagttttgctctgttgctgcagatacggcactccctgcactgcccctttgttgctaggagctagcactgctccaccccgtgggatgtcctcacatagcagccctcagcagccctctgcaaggaaatagcaatttccaatccctgaccagtgctgttccccagcagagggcacgccattcctaccaactacagttacactgttgctaaggaagccaaacctccccctggaaactatgggttgacccttgttgccagagaggctccaccccccggcacctgcattgctaggcaagtcgcacggccatagctgtggactctcttgtggctgaggaagtattgcccccgtgttgctagggagatggcacccccggcaaccaggagtagactgcccttgtgttcctgacagctgcagtcagccttcccccaggggcttggactgcggctgggggaacagcctgttgatgtaaatgatgaactactactccctgctagggttgtcccctagtcgtcacaaactgccattctgttgtgggggtagtgacacccccacgggaatttgttaccactgccctaataaccgtgccctgacctccagctgctagagagaggatgtccccctagtaaagccaagcaggaattgaaggtttttctaaatctgctcggtcctcactcctaaaggatggctcccctcctgtcatcagaggccaccaaggcttcatatgggccagtgtttcccactgctggggctgtcgacatgagtgatgagggagccactgtattgctagaggtgacacttctccaataatcactgcgaccaggaaaaaagccccttcctaaaagcctttctaaacatcctaggcattgttgctaaggaatgccttttccttagcaacaaagatcatggggaccccactggcgcctggaacatctccctagcaaccgtgaagcaccttgttattagggatgataaccacaacttccctggcaactgcagtgtccgacaatttagaagggaccatccttggcggcttctctgaatatactgagtttggttgctaaaggactcatagcttagcaaccatagcccttcaaggcttttcatggctgtggcgggccccattaggtaccaaaagaagaagaaccccattgtcagtgaactgtaccacccagcccacccaccttcctaccctacaggcaccctctgggccaccctcccttgctgccctagcaagtctgacagccagagggccattgcctggccaggatcccttccttagcatccggggctgggacactagcaggcgtcgggagggggcctggctgagctgcatgtctgtcccccaccctcatcctccaccccccagtccggagaaggcggcttccttggagtatgactatgagaccatccgcaacatcgactgctacagcacagatttctgcgtgcgggtgcgcgatggcatgcggtactggaacatgacggtgcagtggtggctggcgcagtatatctacaagagcgcacctgcccgttcctatgtcctgcggagcgcctggaccatgctgctgagcgcctactggcacggcctccacccgggctactacctgagcttcctgaccatcccgctgtgcctggctgccgagggccggctggagtcagccctgcgggggcggctgagcccagggggccagaaggcctgggactgggtgcactggttcctgaagatgcgcgcctatgactacatgtgcatgggcttcgtgctgctctccttggccgacacccttcggtactgggcctccatctacttctgtatccacttcctggccctggcagccctggggctggggctggctttaggtgggggcagccccagccggcggaaggcagcatcccagcccaccagccttgccccggagaagctccgggaggagtaagctgtcacgacgctccctctgccagctggtcccgggaattctgtgaaccaggctgctgtctcctccccagaaagagtccttaccttggagagggtcctggagagaatttcctcttccccagctaaataccctgcctgcaactgaagcagacccgggggtgtcctccctgccctctgccctgctccagcttctgggtatccagagagcactgcacttccccaaaacggaaggggcccctgggcagtgggttttgggcaaattccctttctttgcatccacaatgtggggtcggagcttgggggcaggtcctgggagtgggaagcctcttccttgtgtctttcgctccacttttagctcatcgcaccaatattgcagacttggaaggaagcataagcttcccatttcacaaaggggaaactgaggtgcgggtgcgcgggcctggggacggccgtcccatggcttccatctgagccacctcgggaccccagcgctcctggcgccctcttctcatcgcttggcctatgacaggtcaccgtgtgtaaatctttcccaataaagtgttgcacaaag

SEQ ID NO: 15313 - DNA, 4370 bp, Homo sapiens
ccgaagggagaccccgcctcattcctcacggcgagctccagaccccgcctcctttccggagcccgtctgttccccttcgggtccaaagcttttggctcctccttgttccgagcccgaaggcccgccccttcacgtactcggagctcggatcccagtgtggacctggactcgaatcccgttgccgactcgcgctctcggcttctgctccggggcttcttccctgcccgcccggggccctgaccgtggcttcttccccggcctgatctgcgcagcccggcgggcgcccagaaggagcaggcggcgcgggggcgcgctgggcgggggaggcgtggccggagctgcggcggcaagcgggctgggactgctcggccgcctcctgcccggcgagcagctcagaccatgtcgcctgaagaatggacgtatctagtggttcttcttatctccatccccatcggcttcctctttaagaaagccggtcctgggctgaagagatggggagcagccgctgtgggcctggggctcaccctgttcacctgtggcccccacactttgcattctctggtcaccatcctcgggacctgggccctcattcaggcccagccctgctcctgccacgccctggctctggcctggactttctcctatctcctgttcttccgagccctcagcctcctgggcctgcccactcccacgcccttcaccaatgccgtccagctgctgctgacgctgaagctggtgagcctggccagtgaagtccaggacctgcatctggcccagaggaaggaaatggcctcaggcttcagcaaggggcccaccctggggctgctgcccgacgtgccctccctgatggagacactcagctacagctactgctacgtgggaatcatgacaggcccgttcttccgctaccgcacctacctggactggctggagcagcccttccccggggcagtgcccagcctgcggcccctgctgcgccgcgcctggccggccccgctcttcggcctgctgttcctgctctcctctcacctcttcccgctggaggccgtgcgcgaggacgccttctacgcccgcccgctgcccgcccgcctcttctacatgatccccgtcttcttcgccttccgcatgcgcttctacgtggcctggattgccgccgagtgcggctgcattgccgccggctttggggcctaccccgtggccgccaaagcccgggccggaggcggccccaccctccaatgcccaccccccagcagaggtcaggcggcgcgagggaggcttcccaagacccagcagcccccacctccaagggctggctctgcccctagccgggaggagagcggggagcaaggggccagggccaccacctttttgagcagagtgtcgccccctcggcaaccatggcctgccagcccctgtcggtagggaaaagatccctggtactgacagatgccccttgttgctagcgcttgtcaccccgcagtgtggtgaactgccccctgtcgctaggaaaaggtggtaacttagcaaccctgtgccacccctctgttgccacagaagtgtcaccccccagaaccagattgttcctgcttgctggggatgccatcctttgctagtggtgggtcaccctctgttgctagggaaacggttccctagcaacagaacgccactatttgctagggaagcaggatccctagcaacagtagctcacctcctttttaccagaagttttgctctgttgctgcagatacggcactccctgcactgcccctttgttgctaggagctagcactgctccaccccgtgggatgtcctcacatagcagccctcagcagccctctgcaaggaaatagcaatttccaatccctgaccagtgctgttccccagcagagggcacgccattcctaccaactacagttacactgttgctaaggaagccaaacctccccctggaaactatgggttgacccttgttgccagagaggctccaccccccggcacctgcattgctaggcaagtcgcacggccatagctgtggactctcttgtggctgaggaagtattgcccccgtgttgctagggagatggcacccccggcaaccaggagtagactgcccttgtgttcctgacagctgcagtcagccttcccccaggggcttggactgcggctgggggaacagcctgttgatgtaaatgatgaactactactccctgctagggttgtcccctagtcgtcacaaactgccattctgttgtgggggtagtgacacccccacgggaatttgttaccactgccctaataaccgtgccctgacctccagctgctagagagaggatgtccccctagtaaagccaagcaggaattgaaggtttttctaaatctgctcggtcctcactcctaaaggatggctcccctcctgtcatcagaggccaccaaggcttcatatgggccagtgtttcccactgctggggctgtcgacatgagtgatgagggagccactgtattgctagaggtgacacttctccaataatcactgcgaccaggaaaaaagccccttcctaaaagcctttctaaacatcctaggcattgttgctaaggaatgccttttccttagcaacaaagatcatggggaccccactggcgcctggaacatctccctagcaaccgtgaagcaccttgttattagggatgataaccacaacttccctggcaactgcagtgtccgacaatttagaagggaccatccttggcggcttctctgaatatactgagtttggttgctaaaggactcatagcttagcaaccatagcccttcaaggcttttcatggctgtggcgggccccattaggtaccaaaagaagaagaaccccattgtcagtgaactgtaccacccagcccacccaccttcctaccctacaggcaccctctgggccaccctcccttgctgccctagcaagtctgacagccagagggccattgcctggccaggatcccttccttagcatccggggctgggacactagcaggcgtcgggagggggcctggctgagctgcatgtctgtcccccaccctcatcctccaccccccagtccggagaaggcggcttccttggagtatgactatgagaccatccgcaacatcgactgctacagcacagatttctgcgtgcgggtgcgcgatggcatgcggtactggaacatgacggtgcagtggtggctggcgcagtatatctacaagagcgcacctgcccgttcctatgtcctgcggagcgcctggaccatgctgctgagcgcctactggcacggcctccacccgggctactacctgagcttcctgaccatcccgctgtgcctggctgccgagggccggctggagtcagccctgcgggggcggctgagcccagggggccagaaggcctgggactgggtgcactggttcctgaagatgcgcgcctatgactacatgtgcatgggcttcgtgctgctctccttggccgacacccttcggtactgggcctccatctacttctgtatccacttcctggccctggcagccctggggctggggctggctttaggtgggggcagccccagccggcggaaggcagcatcccagcccaccagccttgccccggagaagctccgggaggatgtgactgactggtcacgaacagctcccgtcttgccaaggcttggtcgccaggtcatctatcttgatgaagactaggcttgcctagtctcctcctcgcagaatcgacgtcctttacgcttggagaaggggtccctgtagaggaagttttccctctatccccaacgcataccatacccttgtcatgacaacccatgtacgcacgagccccggggggttgtcctaccccatgtcgtctctgtcgcccacgaaggcctatcatccagatccatacaaagattcgacatattgattcgtccatacgaacgagatcaatgagccgtatttcatccagacgttcatggtgatagtctagagcatgcacttgtcggacacaaaacggaaggggcccctgggcagtgggttttgggcaaattccctttctttgcatccacaatgtggggtcggagcttgggggcaggtcctgggagtgggaagcctcttccttgtgtctttcgctccacttttagctcatcgcaccaatattgcagacttggaaggaagcataagcttcccatttcacaaaggggaaactgaggtgcgggtgcgcgggcctggggacggccgtcccatggcttccatctgagccacctcgggaccccagcgctcctggcgccctcttctcatcgcttggcctatgacaggtcaccgtgtgtaaatctttcccaataaagtgttgcacaaag

SEQ ID NO: 15314 - DNA, 1872 bp, Homo sapiens
ccgaagggagaccccgcctcattcctcacggcgagctccagaccccgcctcctttccggagcccgtctgttccccttcgggtccaaagcttttggctcctccttgttccgagcccgaaggcccgccccttcacgtactcggagctcggatcccagtgtggacctggactcgaatcccgttgccgactcgcgctctcggcttctgctccggggcttcttccctgcccgcccggggccctgaccgtggcttcttccccggcctgatctgcgcagcccggcgggcgcccagaaggagcaggcggcgcgggggcgcgctgggcgggggaggcgtggccggagctgcggcggcaagcgggctgggactgctcggccgcctcctgcccggcgagcagctcagaccatgtcgcctgaagaatggacgtatctagtggttcttcttatctccatccccatcggcttcctctttaagaaagccggtcctgggctgaagagatggggagcagccgctgtgggcctggggctcaccctgttcacctgtggcccccacactttgcattctctggtcaccatcctcgggacctgggccctcattcaggcccagccctgctcctgccacgccctggctctggcctggactttctcctatctcctgttcttccgagccctcagcctcctgggcctgcccactcccacgcccttcaccaatgccgtccagctgctgctgacgctgaagctggtgagcctggccagtgaagtccaggacctgcatctggcccagaggaaggaaatggcctcaggcttcagcaaggggcccaccctggggctgctgcccgacgtgccctccctgatggagacactcagctacagctactgctacgtgggaatcatgacaggcccgttcttccgctaccgcacctacctggactggctggagcagcccttccccggggcagtgcccagcctgcggcccctgctgcgccgcgcctggccggccccgctcttcggcctgctgttcctgctctcctctcacctcttcccgctggaggccgtgcgcgaggacgccttctacgcccgcccgctgcccgcccgcctcttctacatgatccccgtcttcttcgccttccgcatgcgcttctacgtggcctggattgccgccgagtgcggctgcattgccgccggctttggggcctaccccgtggccgccaaagcccgggccggaggcggccccaccctccaatgcccaccccccagcagtccggagaaggcggcttccttggagtatgactatgagaccatccgcaacatcgactgctacagcacagatttctgcgtgcgggtgcgcgatggcatgcggtactggaacatgacggtgcagtggtggctggcgcagtatatctacaagagcgcacctgcccgttcctatgtcctgcggtgagtgagcccgcccagtctcaggtgacactgcagaactacatctcccagcaggccccagggtagcctgcagcgtccctggctgggcccctgcccccggaggctcatgggaattgtagtttgtttagcctggttttgccctgcctctaattatagtggcagcatgccggtgtaaaatcgttccccctctcggggcctcagttgctacttctgtaaagtcagcctcactcagcagaagcaatgtactgagtcctgtggactcaatagccagccttcctggaatcttggccgtccaggttatggagaaaccttgaggagttagttgacctcttagttgcctcaagtgttgaatggagtgaatgctatttattactggtttcataggtagatagaaggactaaatgtgataaaatgtgaaatgtatttaatgtgaggcctgaca

SEQ ID NO: 15315 - DNA, 3597 bp, Homo sapiens
ccgaagggagaccccgcctcattcctcacggcgagctccagaccccgcctcctttccggagcccgtctgttccccttcgggtccaaagcttttggctcctccttgttccgagcccgaaggcccgccccttcacgtactcggagctcggatcccagtgtggacctggactcgaatcccgttgccgactcgcgctctcggcttctgctccggggcttcttccctgcccgcccggggccctgaccgtggcttcttccccggcctgatctgcgcagcccggcgggcgcccagaaggagcaggcggcgcgggggcgcgctgggcgggggaggcgtggccggagctgcggcggcaagcgggctgggactgctcggccgcctcctgcccggcgagcagctcagaccatgtcgcctgaagaatggacgtatctagtggttcttcttatctccatccccatcggcttcctctttaagaaagccggtcctgggctgaagagatggggagcagccgctgtgggcctggggctcaccctgttcacctgtggcccccacactttgcattctctggtcaccatcctcgggacctgggccctcattcaggcccagccctgctcctgccacgccctggctctggcctggactttctcctatctcctgttcttccgagccctcagcctcctgggcctgcccactcccacgcccttcaccaatgccgtccagctgctgctgacgctgaagctggtgagcctggccagtgaagtccaggacctgcatctggcccagaggaaggaaatggcctcaggcttcagcaaggggcccaccctggggctgctgcccgacgtgccctccctgatggagacactcagctacagctactgctacgtgggaatcatgacaggcccgttcttccgctaccgcacctacctggactggctggagcagcccttccccggggcagtgcccagcctgcggcccctgctgcgccgcgcctggccggccccgctcttcggcctgctgttcctgctctcctctcacctcttcccgctggaggccgtgcgcgaggacgccttctacgcccgcccgctgcccgcccgcctcttctacatgatccccgtcttcttcgccttccgcatgcgcttctacgtggcctggattgccgccgagtgcggctgcattgccgccggctttggggcctaccccgtggccgccaaagcccgggccggaggcggccccaccctccaatgcccaccccccagcagaggtcaggcggcgcgagggaggcttcccaagacccagcagcccccacctccaagggctggctctgcccctagccgggaggagagcggggagcaaggggccagggccaccacctttttgagcagagtgtcgccccctcggcaaccatggcctgccagcccctgtcggtagggaaaagatccctggtactgacagatgccccttgttgctagcgcttgtcaccccgcagtgtggtgaactgccccctgtcgctaggaaaaggtggtaacttagcaaccctgtgccacccctctgttgccacagaagtgtcaccccccagaaccagattgttcctgcttgctggggatgccatcctttgctagtggtgggtcaccctctgttgctagggaaacggttccctagcaacagaacgccactatttgctagggaagcaggatccctagcaacagtagctcacctcctttttaccagaagttttgctctgttgctgcagatacggcactccctgcactgcccctttgttgctaggagctagcactgctccaccccgtgggatgtcctcacatagcagccctcagcagccctctgcaaggaaatagcaatttccaatccctgaccagtgctgttccccagcagagggcacgccattcctaccaactacagttacactgttgctaaggaagccaaacctccccctggaaactatgggttgacccttgttgccagagaggctccaccccccggcacctgcattgctaggcaagtcgcacggccatagctgtggactctcttgtggctgaggaagtattgcccccgtgttgctagggagatggcacccccggcaaccaggagtagactgcccttgtgttcctgacagctgcagtcagccttcccccaggggcttggactgcggctgggggaacagcctgttgatgtaaatgatgaactactactccctgctagggttgtcccctagtcgtcacaaactgccattctgttgtgggggtagtgacacccccacgggaatttgttaccactgccctaataaccgtgccctgacctccagctgctagagagaggatgtccccctagtaaagccaagcaggaattgaaggtttttctaaatctgctcggtcctcactcctaaaggatggctcccctcctgtcatcagaggccaccaaggcttcatatgggccagtgtttcccactgctggggctgtcgacatgagtgatgagggagccactgtattgctagaggtgacacttctccaataatcactgcgaccaggaaaaaagccccttcctaaaagcctttctaaacatcctaggcattgttgctaaggaatgccttttccttagcaacaaagatcatggggaccccactggcgcctggaacatctccctagcaaccgtgaagcaccttgttattagggatgataaccacaacttccctggcaactgcagtgtccgacaatttagaagggaccatccttggcggcttctctgaatatactgagtttggttgctaaaggactcatagcttagcaaccatagcccttcaaggcttttcatggctgtggcgggccccattaggtaccaaaagaagaagaaccccattgtcagtgaactgtaccacccagcccacccaccttcctaccctacaggcaccctctgggccaccctcccttgctgccctagcaagtctgacagccagagggccattgcctggccaggatcccttccttagcatccggggctgggacactagcaggcgtcgggagggggcctggctgagctgcatgtctgtcccccaccctcatcctccaccccccagtccggagaaggcggcttccttggagtatgactatgagaccatccgcaacatcgactgctacagcacagatttctgcgtgcgggtgcgcgatggcatgcggtactggaacatgacggtgcagtggtggctggcgcagtatatctacaagagcgcacctgcccgttcctatgtcctgcggagcgcctggaccatgctgctgagcgcctactggcacggcctccacccgggctactacctgagcttcctgaccatcccgctgtgcctggctgccgagggccggctggagtcagccctgcgggggcggctgagcccagggggccagaaggcctgggactgggtgcactggttcctgaagatgcgcgcctatgactacatgtgcatgggcttcgtgctgctctccttggccgacacccttcggtactgggcctccatctacttctgtatccacttctgaagatgcgcgcctatgactacatgtgcatgggcttcgtgctgctctcctttggccgaa

SEQ ID NO: 15316 - DNA, 2008 bp, Homo sapiens
ccgaagggagaccccgcctcattcctcacggcgagctccagaccccgcctcctttccggagcccgtctgttccccttcgggtccaaagcttttggctcctccttgttccgagcccgaaggcccgccccttcacgtactcggagctcggatcccagtgtggacctggactcgaatcccgttgccgactcgcgctctcggcttctgctccggggcttcttccctgcccgcccggggccctgaccgtggcttcttccccggcctgatctgcgcagcccggcgggcgcccagaaggagcaggcggcgcgggggcgcgctgggcgggggaggcgtggccggagctgcggcggcaagcgggctgggactgctcggccgcctcctgcccggcgagcagctcagaccatgtcgcctgaagaatggacgtatctagtggttcttcttatctccatccccatcggcttcctctttaagaaagccggtcctgggctgaagagatggggagcagccgctgtgggcctggggctcaccctgttcacctgtggcccccacactttgcattctctggtcaccatcctcgggacctgggccctcattcaggcccagccctgctcctgccacgccctggctctggcctggactttctcctatctcctgttcttccgagccctcagcctcctgggcctgcccactcccacgcccttcaccaatgccgtccagctgctgctgacgctgaagctggtgagcctggccagtgaagtccaggacctgcatctggcccagaggaaggaaatggcctcaggcttcagcaaggggcccaccctggggctgctgcccgacgtgccctccctgatggagacactcagctacagctactgctacgtgggaatcatgacaggcccgttcttccgctaccgcacctacctggactggctggagcagcccttccccggggcagtgcccagcctgcggcccctgctgcgccgcgcctggccggccccgctcttcggcctgctgttcctgctctcctctcacctctccacccgggctactacctgagcttcctgaccatcccgctgtgcctggctgccgagggccggctggagtcagccctgcgggggcggctgagcccagggggccagaaggcctgggactgggtgcactggttcctgaagatgcgcgcctatgactacatgtgcatgggcttcgtgctgctctccttggccgacacccttcggtactgggcctccatctacttctgtatccacttcctggccctggcagccctggggctggggctggctttaggtgggggcagccccagccggcggaaggcagcatcccagcccaccagccttgccccggagaagctccgggaggagtaagctgtcacgacgctccctctgccagctggtcccgggaattctgtgaaccaggctgctgtctcctccccagaaagagtccttaccttggagagggtcctggagagaatttcctcttccccagctaaataccctgcctgcaactgaagcagacccgggggtgtcctccctgccctctgcccagaggccacctccactcctacaaaatcaaagtattgtccagacaagagtcactggcccctgctccagcttctgggtatccagagagcactgcacttccccaaaacggaaggggcccctgggcagtgggttttgggcaaattccctttctttgcatccacaatgtggggtcggagcttgggggcaggtcctgggagtgggaagcctcttccttgtgtctttcgctccacttttagctcatcgcaccaatattgcagacttggaaggaagcataagcttcccatttcacaaaggggaaactgaggtgcgggtgcgcgggcctggggacggccgtcccatggcttccatctgagccacctcgggaccccagcgctcctggcgccctcttctcatcgcttggcctatgacaggtcaccgtgtgtaaatctttcccaataaagtgttgcacaaag

SEQ ID NO: 15317 - DNA, 2083 bp, Homo sapiens
  misc_feature (1)..(1): n is a, c, g, or t
nggtgcactatagacaagtttgtgcaaggagcaggctggtacggtccgggattccgggcccgtctgttccccttcgggtccaaagcttttggctcctccttgttccgagcccgaaggcccgccccttcacgtactcggagctcggatcccagtgtggacctggactcgaatcccgttgccgactcgcgctctcggcttctgctccggggcttcttccctgcccgcccggggccctgaccgtggcttcttccccggcctgatctgcgcagcccggcgggcgcccagaaggagcaggcggcgcgggggcgcgctgggcgggggaggcgtggccggagctgcggcggcaagcgggctgggactgctcggccgcctcctgcccggcgagcagctcagaccatgtcgcctgaagaatggacgtatctagtggttcttcttatctccatccccatcggcttcctctttaagaaagccggtcctgggctgaagagatggggagcagccgctgtgggcctggggctcaccctgttcacctgtggcccccacactttgcattctctggtcaccatcctcgggacctgggccctcattcaggcccagccctgctcctgccacgccctggctctggcctggactttctcctatctcctgttcttccgagccctcagcctcctgggcctgcccactcccacgcccttcaccaatgccgtccagctgctgctgacgctgaagctggtgagcctggccagtgaagtccaggacctgcatctggcccagaggaaggaaatggcctcaggcttcagcaaggggcccaccctggggctgctgcccgacgtgccctccctgatggagacactcagctacagctactgctacgtgggaatcatgacagtccggagaaggcggcttccttggagtatgactatgagaccatccgcaacatcgactgctacagcacagatttctgcgtgcgggtgcgcgatggcatgcggtactggaacatgacggtgcagtggtggctggcgcagtatatctacaagagcgcacctgcccgttcctatgtcctgcggagcgcctggaccatgctgctgagcgcctactggcacggcctccacccgggctactacctgagcttcctgaccatcccgctgtgcctggctgccgagggccggctggagtcagccctgcgggggcggctgagcccagggggccagaaggcctgggactgggtgcactggttcctgaagatgcgcgcctatgactacatgtgcatgggcttcgtgctgctctccttggccgacacccttcggtactgggcctccatctacttctgtatccacttcctggccctggcagccctggggctggggctggctttaggtgggggcagccccagccggcggaaggcagcatcccagcccaccagccttgccccggagaagctccgggaggagtaagctgtcacgacgctccctctgccagctggtcccgggaattctgtgaaccaggctgctgtctcctccccagaaagagtccttaccttggagagggtcctggagagaatttcctcttccccagctaaataccctgcctgcaactgaagcagacccgggggtgtcctccctgccctctgcccagaggccacctccactcctacaaaatcaaagtattgtccagacaagagtcactggcccctgctccagcttctgggtatccagagagcactgcacttccccaaaacggaaggggcccctgggcagtgggttttgggcaaattccctttctttgcatccacaatgtggggtcggagcttgggggcaggtcctgggagtgggaagcctcttccttgtgtctttcgctccacttttagctcatcgcaccaatattgcagacttggaaggaagcataagcttcccatttcacaaaggggaaactgaggtgcgggtgcgcgggcctggggacggccgtcccatggcttccatctgagccacctcgggaccccagcgctcctggcgccctcttctcatcgcttggcctatgacaggtcaccgtgtgtaaatctttcccaataaagtgttgcacaaag

SEQ ID NO: 15318 - DNA, 2787 bp, Homo sapiens
ccgaagggagaccccgcctcattcctcacggcgagctccagaccccgcctcctttccggagcccgtctgttccccttcgggtccaaagcttttggctcctccttgttccgagcccgaaggcccgccccttcacgtactcggagctcggatcccagtgtggacctggactcgaatcccgttgccgactcgcgctctcggcttctgctccggggcttcttccctgcccgcccggggccctgaccgtggcttcttccccggcctgatctgcgcagcccggcgggcgcccagaaggagcaggcggcgcgggggcgcgctgggcgggggaggcgtggccggagctgcggcggcaagcgggctgggactgctcggccgcctcctgcccggcgagcagctcagaccatgtcgcctgaagaatggacgtatctagtggttcttcttatctccatccccatcggcttcctctttaagaaagccggtcctgggctgaagagatggggagcagccgctgtgggcctggggctcaccctgttcacctgtggcccccacactttgcattctctggtcaccatcctcgggacctgggccctcattcaggcccagccctgctcctgccacgccctggctctggcctggactttctcctatctcctgttcttccgagccctcagcctcctgggcctgcccactcccacgcccttcaccaatgccgtccagctgctgctgacgctgaagctggtgagcctggccagtgaagtccaggacctgcatctggcccagaggaaggaaatggcctcaggcttcagcaaggggcccaccctggggctgctgcccgacgtgccctccctgatggagacactcagctacagctactgctacgtgggaatcatgacaggcccgttcttccgctaccgcacctacctggactggctggagcagcccttccccggggcagtgcccagcctgcggcccctgctgcgccgcgcctggccggccccgctcttcggcctgctgttcctgctctcctctcacctcttcccgctggaggccgtgcgcgaggacgccttctacgcccgcccgctgcccgcccgcctcttctacatgatccccgtcttcttcgccttccgcatgcgcttctacgtggcctggattgccgccgagtgcggctgcattgccgccggctttggggcctaccccgtggccgccaaagcccgggccggaggcggccccaccctccaatgcccaccccccagcagaggtcaggcggcgcgagggaggcttcccaagacccagcagcccccacctccaagggctggctctgcccctagccgggaggagagcggggagcaaggggccagggccaccacctttttgagcagagtgtcgccccctcggcaaccatggcctgccagcccctgtcggtagggaaaagatccctggtactgacagatgccccttgttgctagcgcttgtcaccccgcagtgtggtgaactgccccctgtcgctaggaaaaggtggtaacttagcaaccctgtgccacccctctgttgccacagaagtgtcaccccccagaaccagattgttcctgcttgctggggatgccatcctttgctagtggtgggtcaccctctgttgctagggaaacggttccctagcaacagaacgccactatttgctagggaagcaggatccctagcaacagtagctcacctcctttttaccagaagttttgctctgttgctgcagatacggcactccctgcactgcccctttgttgctaggagctagcactgctccaccccgtgggatgtcctcacatagcagccctcagcagccctctgcaaggaaatagcaatttccaatccctgaccagtgctgttccccagcagagggcacgccattcctaccaactacagttacactgttgctaaggaagccaaacctccccctggaaactatgggttgacccttgttgccagagaggctccaccccccggcacctgcattgctaggcaagtcgcacggccatagctgtggactctcttgtggctgaggaagtattgcccccgtgttgctagggagatggcacccccggcaaccaggagtagactgcccttgtgttcctgacagctgcagtcagccttcccccaggggcttggactgcggctgggggaacagcctgttgatgtaaatgatgaactactactccctgctagggttgtcccctagtcgtcacaaactgccattctgttgtgggggtagtgacacccccacgggaatttgttaccactgccctaataaccgtgccctgacctccagctgctagagagaggatgtccccctagtaaagccaagcaggaattgaaggtttttctaaatctgctcggtcctcactcctaaaggatggctcccctcctgtcatcagaggccaccaaggcttcatatgggccagtgtttcccactgctggggctgtcgacatgagtgatgagggagccactgtattgctagaggtgacacttctccaataatcactgcgaccaggaaaaaagccccttcctaaaagcctttctaaacatcctaggcattgttgctaaggaatgccttttccttagcaacaaagatcatggggaccccactggcgcctggaacatctccctagcaaccgtgaagcaccttgttattagggtttgatgaggtcatcaaacccttactccagtatgtcaccaacttaattcattacatctgcaaccaccctatttccaaatgtcacattctagggtttcgatga

SEQ ID NO: 15319 - DNA, 2317 bp, Homo sapiens
  misc_feature (1)..(1): n is a, c, g, or t
nggtgcactatagacaagtttgtgcaaggagcaggctggtacggtccgggattccgggcccgtctgttccccttcgggtccaaagcttttggctcctccttgttccgagcccgaaggcccgccccttcacgtactcggagctcggatcccagtgtggacctggactcgaatcccgttgccgactcgcgctctcggcttctgctccggggcttcttccctgcccgcccggggccctgaccgtggcttcttccccggcctgatctgcgcagcccggcgggcgcccagaaggagcaggcggcgcgggggcgcgctgggcgggggaggcgtggccggagctgcggcggcaagcgggctgggactgctcggccgcctcctgcccggcgagcagctcagaccatgtcgcctgaagaatggacgtatctagtggttcttcttatctccatccccatcggcttcctctttaagaaagccggtcctgggctgaagagatggggagcagccgctgtgggcctggggctcaccctgttcacctgtggcccccacactttgcattctctggtcaccatcctcgggacctgggccctcattcaggcccagccctgctggtgagcctggccagtgaagtccaggacctgcatctggcccagaggaaggaaatggcctcaggcttcagcaaggggcccaccctggggctgctgcccgacgtgccctccctgatggagacactcagctacagctactgctacgtgggaatcatgacaggcccgttcttccgctaccgcacctacctggactggctggagcagcccttccccggggcagtgcccagcctgcggcccctgctgcgccgcgcctggccggccccgctcttcggcctgctgttcctgctctcctctcacctcttcccgctggaggccgtgcgcgaggacgccttctacgcccgcccgctgcccgcccgcctcttctacatgatccccgtcttcttcgccttccgcatgcgcttctacgtggcctggattgccgccgagtgcggctgcattgccgccggctttggggcctaccccgtggccgccaaagcccgggccggaggcggccccaccctccaatgcccaccccccagcagtccggagaaggcggcttccttggagtatgactatgagaccatccgcaacatcgactgctacagcacagatttctgcgtgcgggtgcgcgatggcatgcggtactggaacatgacggtgcagtggtggctggcgcagtatatctacaagagcgcacctgcccgttcctatgtcctgcggagcgcctggaccatgctgctgagcgcctactggcacggcctccacccgggctactacctgagcttcctgaccatcccgctgtgcctggctgccgagggccggctggagtcagccctgcgggggcggctgagcccagggggccagaaggcctgggactgggtgcactggttcctgaagatgcgcgcctatgactacatgtgcatgggcttcgtgctgctctccttggccgacacccttcggtactgggcctccatctacttctgtatccacttcctggccctggcagccctggggctggggctggctttaggtgggggcagccccagccggcggaaggcagcatcccagcccaccagccttgccccggagaagctccgggaggagtaagctgtcacgacgctccctctgccagctggtcccgggaattctgtgaaccaggctgctgtctcctccccagaaagagtccttaccttggagagggtcctggagagaatttcctcttccccagctaaataccctgcctgcaactgaagcagacccgggggtgtcctccctgccctctgcccagaggccacctccactcctacaaaatcaaagtattgtccagacaagagtcactggcccctgctccagcttctgggtatccagagagcactgcacttccccaaaacggaaggggcccctgggcagtgggttttgggcaaattccctttctttgcatccacaatgtggggtcggagcttgggggcaggtcctgggagtgggaagcctcttccttgtgtctttcgctccacttttagctcatcgcaccaatattgcagacttggaaggaagcataagcttcccatttcacaaaggggaaactgaggtgcgggtgcgcgggcctggggacggccgtcccatggcttccatctgagccacctcgggaccccagcgctcctggcgccctcttctcatcgcttggcctatgacaggtcaccgtgtgtaaatctttcccaataaagtgttgcacaaag

SEQ ID NO: 15320 - DNA, 1491 bp, Homo sapiens
ccgaagggagaccccgcctcattcctcacggcgagctccagaccccgcctcctttccggagcccgtctgttccccttcgggtccaaagcttttggctcctccttgttccgagcccgaaggcccgccccttcacgtactcggagctcggatcccagtgtggacctggactcgaatcccgttgccgactcgcgctctcggcttctgctccggggcttcttccctgcccgcccggggccctgaccgtggcttcttccccggcctgatctgcgcagcccggcgggcgcccagaaggagcaggcggcgcgggggcgcgctgggcgggggaggcgtggccggagctgcggcggcaagcgggctgggactgctcggccgcctcctgcccggcgagcagctcagaccatgtcgcctgaagaatggacgtatctagtggttcttcttatctccatccccatcggcttcctctttaagaaagccggtcctgggctgaagagatggggagcagccgctgtgggcctggggctcaccctgttcacctgtggcccccacactttgcattctctggtcaccatcctcgggacctgggccctcattcaggcccagccctgctcctgccacgccctggctctggcctggactttctcctatctcctgttcttccgagccctcagcctcctgggcctgcccactcccacgcccttcaccaatgccgtccagctgctgctgacgctgaagctggtgagcctggccagtgaagtccaggacctgcatctggcccagaggaaggaaatggcctcaggcttcagcaaggggcccaccctggggctgctgcccgacgtgccctccctgatggagacactcagctacagctactgctacgtgggaatcatgacaggcccgttcttccgctaccgcacctacctggactggctggagcagcccttccccggggcagtgcccagcctgcggcccctgctgcgccgcgcctggccggccccgctcttcggcctgctgttcctgctctcctctcacctcttcccgctggaggccgtgcgcgaggacgccttctacgcccgcccgctgcccgcccgcctcttctacatgatccccgtcttcttcgccttccgcatgcgcttctacgtggcctggattgccgccgagtgcggctgcattgccgccggctttggggcctaccccgtggccgccaaagcccgggccggaggcggccccaccctccaatgcccaccccccagcagacagaagaacgaaagaaggggctccttggagtctaatataagaccaccgacaaaacatgttacaggaaaatatccgaggggaacgagcatgcggagcaaacaaagacaaagcgcacgaagaaaaacaaaggctgcagacatacaggccaatgacagggaacacaagcacaccacagcatcggataccacaagggcagagaaaacaggagaacggcacggagaatcgagaaaatcaacc

SEQ ID NO: 15321 - DNA, 1759 bp, Homo sapiens
  misc_feature (1)..(1): n is a, c, g, or t
nggtgcactatagacaagtttgtgcaaggagcaggctggtacggtccgggattccgggcccgtctgttccccttcgggtccaaagcttttggctcctccttgttccgagcccgaaggcccgccccttcacgtactcggagctcggatcccagtgtggacctggactcgaatcccgttgccgactcgcgctctcggcttctgctccggggcttcttccctgcccgcccggggccctgaccgtggcttcttccccggcctgatctgcgcagcccggcgggcgcccagaaggagcaggcggcgcgggggcgcgctgggcgggggaggcgtggccggagctgcggcggcaagcgggctgggactgctcggccgcctcctgcccggcgagcagctcagccgcccgcctcttctacatgatccccgtcttcttcgccttccgcatgcgcttctacgtggcctggattgccgccgagtgcggctgcattgccgccggctttggggcctaccccgtggccgccaaagcccgggccggaggcggccccaccctccaatgcccaccccccagcagtccggagaaggcggcttccttggagtatgactatgagaccatccgcaacatcgactgctacagcacagatttctgcgtgcgggtgcgcgatggcatgcggtactggaacatgacggtgcagtggtggctggcgcagtatatctacaagagcgcacctgcccgttcctatgtcctgcggagcgcctggaccatgctgctgagcgcctactggcacggcctccacccgggctactacctgagcttcctgaccatcccgctgtgcctggctgccgagggccggctggagtcagccctgcgggggcggctgagcccagggggccagaaggcctgggactgggtgcactggttcctgaagatgcgcgcctatgactacatgtgcatgggcttcgtgctgctctccttggccgacacccttcggtactgggcctccatctacttctgtatccacttcctggccctggcagccctggggctggggctggctttaggtgggggcagccccagccggcggaaggcagcatcccagcccaccagccttgccccggagaagctccgggaggagtaagctgtcacgacgctccctctgccagctggtcccgggaattctgtgaaccaggctgctgtctcctccccagaaagagtccttaccttggagagggtcctggagagaatttcctcttccccagctaaataccctgcctgcaactgaagcagacccgggggtgtcctccctgccctctgcccagaggccacctccactcctacaaaatcaaagtattgtccagacaagagtcactggcccctgctccagcttctgggtatccagagagcactgcacttccccaaaacggaaggggcccctgggcagtgggttttgggcaaattccctttctttgcatccacaatgtggggtcggagcttgggggcaggtcctgggagtgggaagcctcttccttgtgtctttcgctccacttttagctcatcgcaccaatattgcagacttggaaggaagcataagcttcccatttcacaaaggggaaactgaggtgcgggtgcgcgggcctggggacggccgtcccatggcttccatctgagccacctcgggaccccagcgctcctggcgccctcttctcatcgcttggcctatgacaggtcaccgtgtgtaaatctttcccaataaagtgttgcacaaag

SEQ ID NO: 15322 - DNA, 1046 bp, Homo sapiens
ctaggctagtacgaggctctgtttatgcggagcgcctggaccatgctgctgagcgcctactggcacggcctccacccgggctactacctgagcttcctgaccatcccgctgtgcctggctgccgagggccggctggagtcagccctgcgggggcggctgagcccagggggccagaaggcctgggactgggtgcactggttcctgaagatgcgcgcctatgactacatgtgcatgggcttcgtgctgctctccttggccgacacccttcggtactgggcctccatctacttctgtatccacttcctggccctggcagccctggggctggggctggctttaggtgggggcagccccagccggcggaaggcagcatcccagcccaccagccttgccccggagaagctccgggaggagtaagctgtcacgacgctccctctgccagctggtcccgggaattctgtgaaccaggctgctgtctcctccccagaaagagtccttaccttggagagggtcctggagagaatttcctcttccccagctaaataccctgcctgcaactgaagcagacccgggggtgtcctccctgccctctgcccagaggccacctccactcctacaaaatcaaagtattgtccagacaagagtcactggcccctgctccagcttctgggtatccagagagcactgcacttccccaaaacggaaggggcccctgggcagtgggttttgggcaaattccctttctttgcatccacaatgtggggtcggagcttgggggcaggtcctgggagtgggaagcctcttccttgtgtctttcgctccacttttagctcatcgcaccaatattgcagacttggaaggaagcataagcttcccatttcacaaaggggaaactgaggtgcgggtgcgcgggcctggggacggccgtcccatggcttccatctgagccacctcgggaccccagcgctcctggcgccctcttctcatcgcttggcctatgacaggtcaccgtgtgtaaatctttcccaataaagtgttgcacaaag

SEQ ID NO: 15323 - DNA, 1093 bp, Homo sapiens
ctggactcctggatctgggggcagtgggcactggggacctggactcgtaggtcctgactcccagcctcctcctcaggagcgcctggaccatgctgctgagcgcctactggcacggcctccacccgggctactacctgagcttcctgaccatcccgctgtgcctggctgccgagggccggctggagtcagccctgcgggggcggctgagcccagggggccagaaggcctgggactgggtgcactggttcctgaagatgcgcgcctatgactacatgtgcatgggcttcgtgctgctctccttggccgacacccttcggtactgggcctccatctacttctgtatccacttcctggccctggcagccctggggctggggctggctttaggtgggggcagccccagccggcggaaggcagcatcccagcccaccagccttgccccggagaagctccgggaggagtaagctgtcacgacgctccctctgccagctggtcccgggaattctgtgaaccaggctgctgtctcctccccagaaagagtccttaccttggagagggtcctggagagaatttcctcttccccagctaaataccctgcctgcaactgaagcagacccgggggtgtcctccctgccctctgcccagaggccacctccactcctacaaaatcaaagtattgtccagacaagagtcactggcccctgctccagcttctgggtatccagagagcactgcacttccccaaaacggaaggggcccctgggcagtgggttttgggcaaattccctttctttgcatccacaatgtggggtcggagcttgggggcaggtcctgggagtgggaagcctcttccttgtgtctttcgctccacttttagctcatcgcaccaatattgcagacttggaaggaagcataagcttcccatttcacaaaggggaaactgaggtgcgggtgcgcgggcctggggacggccgtcccatggcttccatctgagccacctcgggaccccagcgctcctggcgccctcttctcatcgcttggcctatgacaggtcaccgtgtgtaaatctttcccaataaagtgttgcacaaag

SEQ ID NO: 15324 - DNA, 976 bp, Homo sapiens
  misc_feature (1)..(1): n is a, c, g, or t
  misc_feature (898)..(898): n is a, c, g, or t
  misc_feature (933)..(933): n is a, c, g, or t
  misc_feature (938)..(938): n is a, c, g, or t
nggtgcactatagacaagtttgtgcaaggagcaggctggtacggtccgggattccgggcccgtctgttccccttcgggtccaaagcttttggctcctccttgttccgagcccgaaggcccgccccttcacgtactcggagctcggatcccagtgtggacctggactcgaatcccgttgccgactcgcgctctcggcttctgctccggggcttcttccctgcccgcccggggccctgaccgtggcttcttccccggcctgatctgcgcagcccggcgggcgcccagaaggagcaggcggcgcgggggcgcgctgggcgggggaggcgtggccggagctgcggcggcaagcgggctgggactgctcggccgcctcctgcccggcgagcagctcagaccatgtcgcctgaagaatggacgtatctagtggttcttcttatctccatccccatcggcttcctctttaagaaagccggtcctgggctgaagagatggggagcagccgctgtgggcctggggctcaccctgttcacctgtggcccccacactttgcattctctggtcaccatcctcgggacctgggccctcattcaggcccagccctgctcctgccacgccctggctctggcctggactttctcctatctcctgttcttccgagccctcagcctcctgggcctgcccactcccacgcccttcaccaatgccgtccagctgctgctgacgctgaagctggtgagcctggccagtgaagtccaggacctgcatctggcccagaggaaggaaatggcctcaggcttcagcaaggggcccaccctggggctgctgcccgacgtgccctccctgatggagacactcagctacagctactgctacgtgggaatcatgacagggaaatcantgaacagggccccgttcttttcccgcttaacccgnaaccntacccttgggaacttggcttgggaaaccaagccccttt

SEQ ID NO: 15325 - DNA, 1010 bp, Homo sapiens
gatcctatatcatcccccttcgtctggcacggcctccacccgggctactacctgagcttcctgaccatcccgctgtgcctggctgccgagggccggctggagtcagccctgcgggggcggctgagcccagggggccagaaggcctgggactgggtgcactggttcctgaagatgcgcgcctatgactacatgtgcatgggcttcgtgctgctctccttggccgacacccttcggtactgggcctccatctacttctgtatccacttcctggccctggcagccctggggctggggctggctttaggtgggggcagccccagccggcggaaggcagcatcccagcccaccagccttgccccggagaagctccgggaggagtaagctgtcacgacgctccctctgccagctggtcccgggaattctgtgaaccaggctgctgtctcctccccagaaagagtccttaccttggagagggtcctggagagaatttcctcttccccagctaaataccctgcctgcaactgaagcagacccgggggtgtcctccctgccctctgcccagaggccacctccactcctacaaaatcaaagtattgtccagacaagagtcactggcccctgctccagcttctgggtatccagagagcactgcacttccccaaaacggaaggggcccctgggcagtgggttttgggcaaattccctttctttgcatccacaatgtggggtcggagcttgggggcaggtcctgggagtgggaagcctcttccttgtgtctttcgctccacttttagctcatcgcaccaatattgcagacttggaaggaagcataagcttcccatttcacaaaggggaaactgaggtgcgggtgcgcgggcctggggacggccgtcccatggcttccatctgagccacctcgggaccccagcgctcctggcgccctcttctcatcgcttggcctatgacaggtcaccgtgtgtaaatctttcccaataaagtgttgcacaaag

SEQ ID NO: 15326 - DNA, 379 bp, Homo sapiens
cggtacccctcgataagggccaatataccaaaacggaaggggcccctgggcagtgggttttgggcaaattccctttctttgcatccacaatgtggggtcggagcttgggggcaggtcctgggagtgggaagcctcttccttgtgtctttcgctccacttttagctcatcgcaccaatattgcagacttggaaggaagcataagcttcccatttcacaaaggggaaactgaggtgcgggtgcgcgggcctggggacggccgtcccatggcttccatctgagccacctcgggaccccagcgctcctggcgccctcttctcatcgcttggcctatgacaggtcaccgtgtgtaaatctttcccaataaagtgttgcacaaag

SEQ ID NO: 15327 - DNA, 994 bp, Homo sapiens
  misc_feature (1)..(1): n is a, c, g, or t
nggtgcactatagacaagtttgtgcaaggagcaggctggtacggtccgggattccgggcccgtctgttccccttcgggtccaaagcttttggctcctccttgttccgagcccgaaggcccgccccttcacgtactcggagctcggatcccagtgtggacctggactcgaatcccgttgccgactcgcgctctcggcttctgctccggggcttcttccctgcccgcccggggccctgaccgtggcttcttccccggcctgatctgcgcagcccggcgggcgcccagaaggagcaggcggcgcgggggcgcgctgggcgggggaggcgtggccggagctgcggcggcaagcgggctgggactgctcggccgcctcctgcccggcgagcagctcagaccatgtcgcctgaagaatggacgtatctagtggttcttcttatctccatccccatcggcttcctctttaagaaagccggtcctgggctgaagagatggggagcagccgctgtgggcctggggctcaccctgttcacctgtggcccccacactttgcattctctggtcaccatcctcgggacctgggccctcattcaggcccagccctgctcctgccacgccctggctctggcctggactttctcctatctcctgttcttccgagccctcagcctcctgggcctgcccactcccacgcccttcaccaatgccgtccagctgctgctgacgctgaaggtcctgggagtgggaagcctcttccttgtgtctttcgctccacttttagctcatcgcaccaatattgcagacttggaaggaagcataagcttcccatttcacaaaggggaaactgaggtgcgggtgcgcgggcctggggacggccgtcccatggcttccatctgagccacctcgggaccccagcgctcctggcgccctcttctcatcgcttggcctatgacaggtcaccgtgtgtaaatctttcccaataaagtgttgcacaaag

SEQ ID NO: 15328 - DNA, 282 bp, Homo sapiens
ttagagggtcatgcactgttgtcatacccggaggaggagttcctgtcgttcctccaccccgagcacagccggggaatgctcaggttcatggtgaaggagatcgtccgggacctggaccaggacggtgacaagcagctctctgtgcccgagttcatctccctgcccgtgggcaccgtggagaaccagcagggccaggacattgacgacaactgggtgaacaacagtgcaggtatgaacaacagtgcaggtatgaacaacagtgcaggtatgaacaacagtgca

SEQ ID NO: 15329 - DNA, 205 bp, Homo sapiens
gcggtcgctactactactaaattaacaaccgttcgctggaaatgagtagccaggaagttcaggggagggtgccgggtccttcccgggcctggcgtgtcggagccacccaggtcccgcagctgccgctgagaaaatgcaaatatttgttgtgacaagaatcacatacatttactttaaatatagttgccttttttggtcagcttca

SEQ ID NO: 15330 - DNA, 2416 bp, Homo sapiens
tcatcgcgtgttccagacagcgatgactcgagagcggggagagatggtggcgccggcgtcccctccgtgaggtcgcgcccgttcgcaccgcccccgcccgcaagaaagatggcagtggcctgatccgggcccgttggcggcgtcactgacgcttcgctccggtcctcggatcccgagcgcggggaggcagaccggtgagtgaggggcccgggacggccgctgcaggccgcggggccaagtgtacgccggccggacggcgagggcgggtctggaggccgccgccgcctcccgccttgggctggggcatcgtccgtccgctcggccttgagccctggcgagactccgccgccaccggggctcccgggggcagggacaggccgacgacgctggcctccccggccgccggcacgtctggtctcctactggccaaaacctacgaatgccaccgggaaacggaggcccaaggggtctggttggactcgcgtttatcggcgaggcgaccttggacaagctgccccgcttccctgcgcctgcgcttccgcttctgaaccgcgtggaccctcatccccgactgtgagctgcttgtccccatcctgcggccgtcctggggacacagagccctccgtggtgcccggggattggattggagccaggacctcacttcctcctctgcccctgcccctgcccctcccagcacctggcccacaccctgcagcccgccccatggtctggccctgggtggcgatggcgtccaggtggggtcccctcattggcctggctccgtgctgcctctggctcctgggggcagtccttctgatggacgcgtctgcacggcctgccaaccactcgtccactcgagagagagtagccaacagggaggagaatgagatcctgcccccagaccacctgaacggggtgaagctggagatggacgggcacctcaatcgcggcttccaccaggaggtcttcctaggcaaggacctgggtggctttgatgaggacgcggagccgcggcggagccggaggaagctgatggtcatcttttccaaggtggatgtgaacactgaccggaagatcagtgccaaggagatgcagcgctggatcatggagaagacggccgagcacttccaggaggccatggaggagagcaagacacacttccgcgccgtggaccctgacggggacggtcacgtgtcttgggacgagtataaggtgaagtttttggcgagtaaaggccatagcgagaaggaggttgccgacgccatcaggctcaacgaggaactcaaagtggacgaggaaacacaggaagtcctggagaacctgaaggaccgctggtaccaggcggacagcccccctgcagacctgctgctgacggaggaggagttcctgtcgttcctccaccccgagcacagccggggaatgctcaggttcatggtgaaggagatcgtccgggacctggaccaggacggtgacaagcagctctctgtgcccgagttcatctccctgcccgtgggcaccgtggagaaccagcagggccaggacattgacgacaactgggtgaaagacagaaaaaaggagtttgaggagctcattgactccaaccacgacggcatcgtgaccgccgaggagctggagagctacatggaccccatgaacgagtacaacgcgctgaacgaggccaagcagatgatcgccgtcgccgacgagaaccagaaccaccacctggagcccgaggaggtgctcaagtacagcgagttcttcacgggcagcaagctggtggactacgcgcgcagcgtgcacgaggagttttgagcgcccggccgcgccccgcgccgccccccacgcaccaccggggcggcctcgcgggtgactccgggctccgtggctgtcccggaccccacctcttccctgccgcccgccaccggccgaccgaccgcggctgccccagttgatgagcggcgtgtcccctctgcagcgcgcaccccggcggggctttggctgtgacgcggtcggggcgcggggctgggctgtggccccgcggcgccgcctcctccctggtccctcgaaatcgtggcatctcacttctgagaacgaaatctcgcttcagtcactctgccgaaggcgctgacggcatcgcggccggaacctctgggcccggcccctcccagggccgccgctccgtgggaaaaaacagctcctccatttccttgaaaactgaacgattattaaaaatagattaaacttcgctggaaatgagtagccaggaagttcaggggagggtgccgggtccttcccgggcctggcgtgtcggagccacccaggtcccgcagctgccgctgagaaaatgcaaatatttgttgtgacaagaatcacatacatttactttaaatatagttgccttttttggtcagcttca

SEQ ID NO: 15331 - DNA, 2443 bp, Homo sapiens
ggcccgcaagtagaagcatggcaggtgcgtcctggatcgcgtgcgcccggttcgagcgcgcgatcacctcgacgacattcggtctccggggtcgctcggagcatcccagacgcgcaggggcaggcatgacgcggtagtacgttagacggcgtgcgcctggtgactggaccgctgtcgaggtctgctgcgcgtgtccatagtgctgcgccaggtcgggcactggctgagggcgggtcttggatggccgtcgccgacttcccggacttagaggcttgcggagcttactgtccctgtgtctctgactctgcgctctttgacgcctctgtggcagagactgctcgccgatcaggcgagggctacccgcggggcaagtggatcacgtgccgacgtatgctcggcctgccccgtgtccgtcgggcatgtgctggtactacctatactggctcaagagaacctatcgatagtgcgcatcgcgggaaacggaggcccaaggggtctggttggactcgcgtttatcggcgaggcgaccttggacaagctgccccgcttccctgcgcctgcgcttccgcttctgaaccgcgtggaccctcatccccgactgtgagctgcttgtccccatcctgcggccgtcctggggacacagagccctccgtggtgcccggggattggattggagccaggacctcacttcctcctctgcccctgcccctgcccctcccagcacctggcccacaccctgcagcccgccccatggtctggccctgggtggcgatggcgtccaggtggggtcccctcattggcctggctccgtgctgcctctggctcctgggggcagtccttctgatggacgcgtctgcacggcctgccaaccactcgtccactcgagagagagtagccaacagggaggagaatgagatcctgcccccagaccacctgaacggggtgaagctggagatggacgggcacctcaatcgcggcttccaccaggaggtcttcctaggcaaggacctgggtggctttgatgaggacgcggagccgcggcggagccggaggaagctgatggtcatcttttccaaggtggatgtgaacactgaccggaagatcagtgccaaggagatgcagcgctggatcatggagaagacggccgagcacttccaggaggccatggaggagagcaagacacacttccgcgccgtggaccctgacggggacggtcacgtgtcttgggacgagtataaggtgaagtttttggcgagtaaaggccatagcgagaaggaggttgccgacgccatcaggctcaacgaggaactcaaagtggacgaggaaacacaggaagtcctggagaacctgaaggaccgctggtaccaggcggacagcccccctgcagacctgctgctgacggaggaggagttcctgtcgttcctccaccccgagcacagccggggaatgctcaggttcatggtgaaggagatcgtccgggacctggaccaggacggtgacaagcagctctctgtgcccgagttcatctccctgcccgtgggcaccgtggagaaccagcagggccaggacattgacgacaactgggtgaaagacagaaaaaaggagtttgaggagctcattgactccaaccacgacggcatcgtgaccgccgaggagctggagagctacatggaccccatgaacgagtacaacgcgctgaacgaggccaagcagatgatcgccgtcgccgacgagaaccagaaccaccacctggagcccgaggaggtgctcaagtacagcgagttcttcacgggcagcaagctggtggactacgcgcgcagcgtgcacgaggagttttgagcgcccggccgcgccccgcgccgccccccacgcaccaccggggcggcctcgcgggtgactccgggctccgtggctgtcccggaccccacctcttccctgccgcccgccaccggccgaccgaccgcggctgccccagttgatgagcggcgtgtcccctctgcagcgcgcaccccggcggggctttggctgtgacgcggtcggggcgcggggctgggctgtggccccgcggcgccgcctcctccctggtccctcgaaatcgtggcatctcacttctgagaacgaaatctcgcttcagtcactctgccgaaggcgctgacggcatcgcggccggaacctctgggcccggcccctcccagggccgccgctccgtgggaaaaaacagctcctccatttccttgaaaactgaacgattattaaaaatagattaaacttcgctggaaatgagtagccaggaagttcaggggagggtgccgggtccttcccgggcctggcgtgtcggagccacccaggtcccgcagctgccgctgagaaaatgcaaatatttgttgtgacaagaatcacatacatttactttaaatatagttgccttttttggtcagcttca

SEQ ID NO: 15332 - DNA, 2510 bp, Homo sapiens
ggcccgcaagtagaagcatggcaggtgcgtcctggatcgcgtgcgcccggttcgagcgcgcgatcacctcgacgacattcggtctccggggtcgctcggagcatcccagacgcgcaggggcaggcatgacgcggtagtacgttagacggcgtgcgcctggtgactggaccgctgtcgaggtctgctgcgcgtgtccatagtgctgcgccaggtcgggcactggctgagggcgggtcttggatggccgtcgccgacttcccggacttagaggcttgcggagcttactgtccctgtgtctctgactctgcgctctttgacgcctctgtggcagagactgctcgccgatcaggcgagggctacccgcggggcaagtggatcacgtgccgacgtatgctcggcctgccccgtgtccgtcgggcatgtgctggtactacctatactggctcaagagaacctatcgatagtgcgcatcgcgggaaacggaggcccaaggggtctggttggactcgcgtttatcggcgaggcgaccttggacaagctgccccgcttccctgcgcctgcgcttccgcttctgaaccgcgtggaccctcatccccgactgtgagctgcttgtccccatcctgcggccgtcctggggacacagagccctccgtggtgcccggggattggattggagccaggacctcacttcctcctctgcccctgcccctgcccctcccagcacctggcccacaccctgcagcccgccccatggtctggccctgggtggcgatggcgtccaggtggggtcccctcattggcctggctccgtgctgcctctggctcctgggggcagtccttctgatggacgcgtctgcacggcctgccaaccactcgtccactcgagagagagtagccaacagggaggagaatgagatcctgcccccagaccacctgaacggggtgaagctggagatggacgggcacctcaatcgcggcttccaccaggaggtgagggttctatccccgtaagggcaaagggaaccctttggcgcttgggcctttttcgaattgacggcgaaccggccgggggaaagtcccccgggacccggggaggaccccgggtgaaagccctgggaggaagctgatggtcatcttttccaaggtggatgtgaacactgaccggaagatcagtgccaaggagatgcagcgctggatcatggagaagacggccgagcacttccaggaggccatggaggagagcaagacacacttccgcgccgtggaccctgacggggacggtcacgtgtcttgggacgagtataaggtgaagtttttggcgagtaaaggccatagcgagaaggaggttgccgacgccatcaggctcaacgaggaactcaaagtggacgaggaaacacaggaagtcctggagaacctgaaggaccgctggtaccaggcggacagcccccctgcagacctgctgctgacggaggaggagttcctgtcgttcctccaccccgagcacagccggggaatgctcaggttcatggtgaaggagatcgtccgggacctggaccaggacggtgacaagcagctctctgtgcccgagttcatctccctgcccgtgggcaccgtggagaaccagcagggccaggacattgacgacaactgggtgaaagacagaaaaaaggagtttgaggagctcattgactccaaccacgacggcatcgtgaccgccgaggagctggagagctacatggaccccatgaacgagtacaacgcgctgaacgaggccaagcagatgatcgccgtcgccgacgagaaccagaaccaccacctggagcccgaggaggtgctcaagtacagcgagttcttcacgggcagcaagctggtggactacgcgcgcagcgtgcacgaggagttttgagcgcccggccgcgccccgcgccgccccccacgcaccaccggggcggcctcgcgggtgactccgggctccgtggctgtcccggaccccacctcttccctgccgcccgccaccggccgaccgaccgcggctgccccagttgatgagcggcgtgtcccctctgcagcgcgcaccccggcggggctttggctgtgacgcggtcggggcgcggggctgggctgtggccccgcggcgccgcctcctccctggtccctcgaaatcgtggcatctcacttctgagaacgaaatctcgcttcagtcactctgccgaaggcgctgacggcatcgcggccggaacctctgggcccggcccctcccagggccgccgctccgtgggaaaaaacagctcctccatttccttgaaaactgaacgattattaaaaatagattaaacttcgctggaaatgagtagccaggaagttcaggggagggtgccgggtccttcccgggcctggcgtgtcggagccacccaggtcccgcagctgccgctgagaaaatgcaaatatttgttgtgacaagaatcacatacatttactttaaatatagttgccttttttggtcagcttca

SEQ ID NO: 15333 - DNA, 2100 bp, Homo sapiens
ggcccgcaagtagaagcatggcaggtgcgtcctggatcgcgtgcgcccggttcgagcgcgcgatcacctcgacgacattcggtctccggggtcgctcggagcatcccagacgcgcaggggcaggcatgacgcggtagtacgttagacggcgtgcgcctggtgactggaccgctgtcgaggtctgctgcgcgtgtccatagtgctgcgccaggtcgggcactggctgagggcgggtcttggatggccgtcgccgacttcccggacttagaggcttgcggagcttactgtccctgtgtctctgactctgcgctctttgacgcctctgtggcagagactgctcgccgatcaggcgagggctacccgcggggcaagtggatcacgtgccgacgtatgctcggcctgccccgtgtccgtcgggcatgtgctggtactacctatactggctcaagagaacctatcgatagtgcgcatcgcgggaaacggaggcccaaggggtctggttggactcgcgtttatcggcgaggcgaccttggacaagctgccccgcttccctgcgcctgcgcttccgcttctgaaccgcgtggaccctcatccccgactgtgagctgcttgtccccatcctgcggccgtcctggggacacagagccctccgtggtgcccggggattggattggagccaggacgacgcggagccgcggcggagccggaggaagctgatggtcatcttttccaaggtggatgtgaacactgaccggaagatcagtgccaaggagatgcagcgctggatcatggagaagacggccgagcacttccaggaggccatggaggagagcaagacacacttccgcgccgtggaccctgacggggacggtcacgtgtcttgggacgagtataaggtgaagtttttggcgagtaaaggccatagcgagaaggaggttgccgacgccatcaggctcaacgaggaactcaaagtggacgaggaaacacaggaagtcctggagaacctgaaggaccgctggtaccaggcggacagcccccctgcagacctgctgctgacggaggaggagttcctgtcgttcctccaccccgagcacagccggggaatgctcaggttcatggtgaaggagatcgtccgggacctggaccaggacggtgacaagcagctctctgtgcccgagttcatctccctgcccgtgggcaccgtggagaaccagcagggccaggacattgacgacaactgggtgaaagacagaaaaaaggagtttgaggagctcattgactccaaccacgacggcatcgtgaccgccgaggagctggagagctacatggaccccatgaacgagtacaacgcgctgaacgaggccaagcagatgatcgccgtcgccgacgagaaccagaaccaccacctggagcccgaggaggtgctcaagtacagcgagttcttcacgggcagcaagctggtggactacgcgcgcagcgtgcacgaggagttttgagcgcccggccgcgccccgcgccgccccccacgcaccaccggggcggcctcgcgggtgactccgggctccgtggctgtcccggaccccacctcttccctgccgcccgccaccggccgaccgaccgcggctgccccagttgatgagcggcgtgtcccctctgcagcgcgcaccccggcggggctttggctgtgacgcggtcggggcgcggggctgggctgtggccccgcggcgccgcctcctccctggtccctcgaaatcgtggcatctcacttctgagaacgaaatctcgcttcagtcactctgccgaaggcgctgacggcatcgcggccggaacctctgggcccggcccctcccagggccgccgctccgtgggaaaaaacagctcctccatttccttgaaaactgaacgattattaaaaatagattaaacttcgctggaaatgagtagccaggaagttcaggggagggtgccgggtccttcccgggcctggcgtgtcggagccacccaggtcccgcagctgccgctgagaaaatgcaaatatttgttgtgacaagaatcacatacatttactttaaatatagttgccttttttggtcagcttca

SEQ ID NO: 15334 - DNA, 3843 bp, Homo sapiens
tcatcgcgtgttccagacagcgatgactcgagagcggggagagatggtggcgccggcgtcccctccgtgaggtcgcgcccgttcgcaccgcccccgcccgcaagaaagatggcagtggcctgatccgggcccgttggcggcgtcactgacgcttcgctccggtcctcggatcccgagcgcggggaggcagaccggtgagtgaggggcccgggacggccgctgcaggccgcggggccaagtgtacgccggccggacggcgagggcgggtctggaggccgccgccgcctcccgccttgggctggggcatcgtccgtccgctcggccttgagccctggcgagactccgccgccaccggggctcccgggggcagggacaggccgacgacgctggcctccccggccgccggcacgtctggtctcctactggccaaaacctacgaatgccaccgggaaacggaggcccaaggggtctggttggactcgcgtttatcggcgaggcgaccttggacaagctgccccgcttccctgcgcctgcgcttccgcttctgaaccgcgtggaccctcatccccgactgtgagctgcttgtccccatcctgcggccgtcctggggacacagagccctccgtggtgcccggggattggattggagccaggacctcacttcctcctctgcccctgcccctgcccctcccagcacctggcccacaccctgcagcccgccccatggtctggccctgggtggcgatggcgtccaggtggggtcccctcattggcctggctccgtgctgcctctggctcctgggggcagtccttctgatggacgcgtctgcacggcctgccaaccactcgtccactcgagagagagtagccaacagggaggagaatgagatcctgcccccagaccacctgaacggggtgaagctggagatggacgggcacctcaatcgcggcttccaccaggaggtcttcctaggcaaggacctgggtggctttgatgaggacgcggagccgcggcggagccggaggaagctgatggtcatcttttccaaggtggatgtgaacactgaccggaagatcagtgccaaggagatgcagcgctggatcatggagaagacggccgagcacttccaggaggccatggaggagagcaagacacacttccgcgccgtggaccctgacggggacggtcacgtgtcttgggacgagtataaggtgaagtttttggcgagtaaaggccatagcgagaaggaggttgccgacgccatcaggctcaacgaggaactcaaagtggacgaggaaagtgagtgctcagccaggctcccgccaccggtctcaggcatcctgtgtgtgcgcgcgtgtgttgtgtgtacatgagtgtgccgtgtgtgtcgtgtatgagtgtgccgtgcgtgtgctcgtgagtacgtgtgtgcgtgccgtgtgtacgagtgtgctgtgcgcgtgctcgtgagtacgtgtgtgcatgttgtgtgtacgtgtgctgtgtgtgtgctcgtgagtacatgtgtatgcgtgtcgtgtgtacgagtgcactgtgcatgtgcttgtacgtgtgtgcgtgtcgtgtgtacgagtgcgctgtgcgtgtgcttgtgagtacatccaggtagctgttcatgtaggctcgtgagtacatgcaggtgagtgcgccctcacacccgctgtgtgcacacgtgttcgtcttaacagcatggcccaacctggttggtggtggctgtcaggagggaagtgggtgaagccgttgctgacctaggcgccgcccaggagtccggtggggagcgtgtgagctgtgcctgggccagggcagagtcgggcctcacgtgcagggggctgagtgtgggcctcaacactggacttggccactgactgcagtgagccccaagatggggcaggaggtggtgtttctgtcctggagacccagggtggcttgggtccttgggatgtgtggggacctcggggtgagggcccgttggggccgggtgggcacggcaggagagcgggggccacacacccagaggcagtgccgtgtcccggctgggagggttcctgggaagctctgctcagccccagtctcagtcatttctagaaactgtgttttcctccctgtgacgtcacacgtgaaggaaacggaaaagggcagtgagtccttcgccccgcggcgccgtgcgcacgtcagccttcagggtgattccgctcctccagaggggcaggcgcgggtgtggggggtggggcccaggcccatcctgaggggtcccaggcatgaggggctctgagctgtgtcctggggtggtctgggccatggggaggttctggatcatgtcttgagaggtctgggctgtgtggggggtccaggccatgtcctgggggtctgggctgtgtctgtggggagtcagggccatccatgtattgggggtctggggcaggggggggtccaggctgtcttggggagtccgggctgtgtggaggggtccaagctatgcctttggggatcaggcctgtgggaggctctgggttatgtcttggcgggggtccaggctgtgtcttaggggctgggccatgttctggggacgtgtgaatcctggagggtggggccccggtctcgcgggtggctgtgtccctcgagttcaggcagcacctctcggaactttctggatttgcgtgctggcgtctgtcggcctcgatacccacaggctgcgcccctctcagcacaggaagtcctggagaacctgaaggaccgctggtaccaggcggacagcccccctgcagacctgctgctgacggaggaggagttcctgtcgttcctccaccccgagcacagccggggaatgctcaggttcatggtgaaggagatcgtccgggacctggaccaggacggtgacaagcagctctctgtgcccgagttcatctccctgcccgtgggcaccgtggagaaccagcagggccaggacattgacgacaactgggtgaaagacagaaaaaaggagtttgaggagctcattgactccaaccacgacggcatcgtgaccgccgaggagctggagagctacatggaccccatgaacgagtacaacgcgctgaacgaggccaagcagatgatcgccgtcgccgacgagaaccagaaccaccacctggagcccgaggaggtgctcaagtacagcgagttcttcacgggcagcaagctggtggactacgcgcgcagcgtgcacgaggagttttgagcgcccggccgcgccccgcgccgccccccacgcaccaccggggcggcctcgcgggtgactccgggctccgtggctgtcccggaccccacctcttccctgccgcccgccaccggccgaccgaccgcggctgccccagttgatgagcggcgtgtcccctctgcagcgcgcaccccggcggggctttggctgtgacgcggtcggggcgcggggctgggctgtggccccgcggcgccgcctcctccctggtccctcgaaatcgtggcatctcacttctgagaacgaaatctcgcttcagtcactctgccgaaggcgctgacggcatcgcggccggaacctctgggcccggcccctcccagggccgccgctccgtgggaaaaaacagctcctccatttccttgaaaactgaacgattattaaaaatagattaaacttcgctggaaatgagtagccaggaagttcaggggagggtgccgggtccttcccgggcctggcgtgtcggagccacccaggtcccgcagctgccgctgagaaaatgcaaatatttgttgtgacaagaatcacatacatttactttaaatatagttgccttttttggtcagcttca

SEQ ID NO: 15335 - DNA, 1261 bp, Homo sapiens
agaggatcccccaactgcaacgccggggacggtcacgtgtcttgggacgagtataaggtgaagtttttggcgagtaaaggccatagcgagaaggaggttgccgacgccatcaggctcaacgaggaactcaaagtggacgaggaaacacaggaagtcctggagaacctgaaggaccgctggtaccaggcggacagcccccctgcagacctgctgctgacggaggaggagttcctgtcgttcctccaccccgagcacagccggggaatgctcaggttcatggtgaaggagatcgtccgggacctggaccaggacggtgacaagcagctctctgtgcccgagttcatctccctgcccgtgggcaccgtggagaaccagcagggccaggacattgacgacaactgggtgaaagacagaaaaaaggagtttgaggagctcattgactccaaccacgacggcatcgtgaccgccgaggagctggagagctacatggaccccatgaacgagtacaacgcgctgaacgaggccaagcagatgatcgccgtcgccgacgagaaccagaaccaccacctggagcccgaggaggtgctcaagtacagcgagttcttcacgggcagcaagctggtggactacgcgcgcagcgtgcacgaggagttttgagcgcccggccgcgccccgcgccgccccccacgcaccaccggggcggcctcgcgggtgactccgggctccgtggctgtcccggaccccacctcttccctgccgcccgccaccggccgaccgaccgcggctgccccagttgatgagcggcgtgtcccctctgcagcgcgcaccccggcggggctttggctgtgacgcggtcggggcgcggggctgggctgtggccccgcggcgccgcctcctccctggtccctcgaaatcgtggcatctcacttctgagaacgaaatctcgcttcagtcactctgccgaaggcgctgacggcatcgcggccggaacctctgggcccggcccctcccagggccgccgctccgtgggaaaaaacagctcctccatttccttgaaaactgaacgattattaaaaatagattaaacttcgctggaaatgagtagccaggaagttcaggggagggtgccgggtccttcccgggcctggcgtgtcggagccacccaggtcccgcagctgccgctgagaaaatgcaaatatttgttgtgacaagaatcacatacatttactttaaatatagttgccttttttggtcagcttca

SEQ ID NO: 15336 - DNA, 2521 bp, Homo sapiens
ggcccgcaagtagaagcatggcaggtgcgtcctggatcgcgtgcgcccggttcgagcgcgcgatcacctcgacgacattcggtctccggggtcgctcggagcatcccagacgcgcaggggcaggcatgacgcggtagtacgttagacggcgtgcgcctggtgactggaccgctgtcgaggtctgctgcgcgtgtccatagtgctgcgccaggtcgggcactggctgagggcgggtcttggatggccgtcgccgacttcccggacttagaggcttgcggagcttactgtccctgtgtctctgactctgcgctctttgacgcctctgtggcagagactgctcgccgatcaggcgagggctacccgcggggcaagtggatcacgtgccgacgtatgctcggcctgccccgtgtccgtcgggcatgtgctggtactacctatactggctcaagagaacctatcgatagtgcgcatcgcgggaaacggaggcccaaggggtctggttggactcgcgtttatcggcgaggcgaccttggacaagctgccccgcttccctgcgcctgcgcttccgcttctgaaccgcgtggaccctcatccccgactgtgagctgcttgtccccatcctgcggccgtcctggggacacagagccctccgtggtgcccggggattggattggagccaggacctcacttcctcctctgcccctgcccctgcccctcccagcacctggcccacaccctgcagcccgccccatggtctggccctgggtggcgatggcgtccaggtggggtcccctcattggcctggctccgtgctgcctctggctcctgggggcagtccttctgatggacgcgtctgcacggcctgccaaccactcgtccactcgagagagagtagccaacagggaggagaatgagatcctgcccccagaccacctgaacggggtgaagctggagatggacgggcacctcaatcgcggcttccaccaggaggtcttcctaggcaaggacctgggtggctttgatgaggacgcggagccgcggcggagccggaggaagctgatggtcatcttttccaaggtggatgtgaacactgaccggaagatcagtgccaaggagatgcagcgctggatcatggagaagacggccgagcacttccaggaggccatggaggagagcaagacacacttccgcgccgtggaccctgacggggacggtcacgtgtcttgggacgagtataaggtgaagtttttggcgagtaaaggccatagcgagaaggaggttgccgacgccatcaggctcaacgaggaactcaaagtggacgaggaaagcagcacctctcggaactttctggatttgcgtgctggcgtctgtcggcctcgatacccacaggctgcgcccctctcagcacaggaagtcctggagaacctgaaggaccgctggtaccaggcggacagcccccctgcagacctgctgctgacggaggaggagttcctgtcgttcctccaccccgagcacagccggggaatgctcaggttcatggtgaaggagatcgtccgggacctggaccaggacggtgacaagcagctctctgtgcccgagttcatctccctgcccgtgggcaccgtggagaaccagcagggccaggacattgacgacaactgggtgaaagacagaaaaaaggagtttgaggagctcattgactccaaccacgacggcatcgtgaccgccgaggagctggagagctacatggaccccatgaacgagtacaacgcgctgaacgaggccaagcagatgatcgccgtcgccgacgagaaccagaaccaccacctggagcccgaggaggtgctcaagtacagcgagttcttcacgggcagcaagctggtggactacgcgcgcagcgtgcacgaggagttttgagcgcccggccgcgccccgcgccgccccccacgcaccaccggggcggcctcgcgggtgactccgggctccgtggctgtcccggaccccacctcttccctgccgcccgccaccggccgaccgaccgcggctgccccagttgatgagcggcgtgtcccctctgcagcgcgcaccccggcggggctttggctgtgacgcggtcggggcgcggggctgggctgtggccccgcggcgccgcctcctccctggtccctcgaaatcgtggcatctcacttctgagaacgaaatctcgcttcagtcactctgccgaaggcgctgacggcatcgcggccggaacctctgggcccggcccctcccagggccgccgctccgtgggaaaaaacagctcctccatttccttgaaaactgaacgattattaaaaatagattaaacttcgctggaaatgagtagccaggaagttcaggggagggtgccgggtccttcccgggcctggcgtgtcggagccacccaggtcccgcagctgccgctgagaaaatgcaaatatttgttgtgacaagaatcacatacatttactttaaatatagttgccttttttggtcagcttca

SEQ ID NO: 15337 - DNA, 2532 bp, Homo sapiens
tcatcgcgtgttccagacagcgatgactcgagagcggggagagatggtggcgccggcgtcccctccgtgaggtcgcgcccgttcgcaccgcccccgcccgcaagaaagatggcagtggcctgatccgggcccgttggcggcgtcactgacgcttcgctccggtcctcggatcccgagcgcggggaggcagaccggtgagtgaggggcccgggacggccgctgcaggccgcggggccaagtgtacgccggccggacggcgagggcgggtctggaggccgccgccgcctcccgccttgggctggggcatcgtccgtccgctcggccttgagccctggcgagactccgccgccaccggggctcccgggggcagggacaggccgacgacgctggcctccccggccgccggcacgtctggtctcctactggccaaaacctacgaatgccaccgggaaacggaggcccaaggggtctggttggactcgcgtttatcggcgaggcgaccttggacaagctgccccgcttccctgcgcctgcgcttccgcttctgaaccgcgtggaccctcatccccgactgtgagctgcttgtccccatcctgcggccgtcctggggacacagagccctccgtggtgcccggggattggattggagccaggacctcacttcctcctctgcccctgcccctgcccctcccagcacctggcccacaccctgcagcccgccccatggtctggccctgggtggcgatggcgtccaggtggggtcccctcattggcctggctccgtgctgcctctggctcctgggggcagtccttctgatggacgcgtctgcacggcctgccaaccactcgtccactcgagagagagtagccaacagggaggagaatgagatcctgcccccagaccacctgaacggggtgaagctggagatggacgggcacctcaatcgcggcttccaccaggaggtcttcctaggcaaggacctgggtggctttgatgaggacgcggagccgcggcggagccggaggaagctgatggtcatcttttccaaggtggatgtgaacactgaccggaagatcagtgccaaggagatgcagcgctggatcatggagaagacggccgagcacttccaggaggccatggaggagagcaagacacacttccgcgccgtggaccctgacggggacggtcacgtgtcttgggacgagtataaggtgaagtttttggcgagtaaaggccatagcgagaaggaggttgccgacgccatcaggctcaacgaggaactcaaagtggacgaggaaacacaggaagtcctggagaacctgaaggaccgctggtaccaggcggacagcccccctgcagacctgctgctgacggaggaggagttcctgtcgttcctccaccccgagcacagccggggaatgctcaggttcatggtgaaggagatcgtccgggacctggaccaggacggtgacaagcagctctctgtgcccgagttcatctccctgcccgtgggcaccgtggagaaccagcagggccaggacattgacgacaactgggtgaaagacagaaaaaaggagtttgaggagctcattgactccaaccacgacggcatcgtgaccgccgaggagctggagaacgtgcccacactcccgctgcagccaataggcaccttaaatagccacttcgtgcggctggccgcggagctcggagggggaaaggcgacgctgacctgtgccccgctcgcccgcagagctacatggaccccatgaacgagtacaacgcgctgaacgaggccaagcagatgatcgccgtcgccgacgagaaccagaaccaccacctggagcccgaggaggtgctcaagtacagcgagttcttcacgggcagcaagctggtggactacgcgcgcagcgtgcacgaggagttttgagcgcccggccgcgccccgcgccgccccccacgcaccaccggggcggcctcgcgggtgactccgggctccgtggctgtcccggaccccacctcttccctgccgcccgccaccggccgaccgaccgcggctgccccagttgatgagcggcgtgtcccctctgcagcgcgcaccccggcggggctttggctgtgacgcggtcggggcgcggggctgggctgtggccccgcggcgccgcctcctccctggtccctcgaaatcgtggcatctcacttctgagaacgaaatctcgcttcagtcactctgccgaaggcgctgacggcatcgcggccggaacctctgggcccggcccctcccagggccgccgctccgtgggaaaaaacagctcctccatttccttgaaaactgaacgattattaaaaatagattaaacttcgctggaaatgagtagccaggaagttcaggggagggtgccgggtccttcccgggcctggcgtgtcggagccacccaggtcccgcagctgccgctgagaaaatgcaaatatttgttgtgacaagaatcacatacatttactttaaatatagttgccttttttggtcagcttca

SEQ ID NO: 15338 - DNA, 3939 bp, Homo sapiens
tcatcgcgtgttccagacagcgatgactcgagagcggggagagatggtggcgccggcgtcccctccgtgaggtcgcgcccgttcgcaccgcccccgcccgcaagaaagatggcagtggcctgatccgggcccgttggcggcgtcactgacgcttcgctccggtcctcggatcccgagcgcggggaggcagaccggtgagtgaggggcccgggacggccgctgcaggccgcggggccaagtgtacgccggccggacggcgagggcgggtctggaggccgccgccgcctcccgccttgggctggggcatcgtccgtccgctcggccttgagccctggcgagactccgccgccaccggggctcccgggggcagggacaggccgacgacgctggcctccccggccgccggcacgtctggtctcctactggccaaaacctacgaatgccaccgggaaacggaggcccaaggggtctggttggactcgcgtttatcggcgaggcgaccttggacaagctgccccgcttccctgcgcctgcgcttccgcttctgaaccgcgtggaccctcatccccgactgtgagctgcttgtccccatcctgcggccgtcctggggacacagagccctccgtggtgcccggggattggattggagccaggacctcacttcctcctctgcccctgcccctgcccctcccagcacctggcccacaccctgcagcccgccccatggtctggccctgggtggcgatggcgtccaggtggggtcccctcattggcctggctccgtgctgcctctggctcctgggggcagtccttctgatggacgcgtctgcacggcctgccaaccactcgtccactcgagagagagtagccaacagggaggagaatgagatcctgcccccagaccacctgaacggggtgaagctggagatggacgggcacctcaatcgcggcttccaccaggaggtcttcctaggcaaggacctgggtggctttgatgaggacgcggagccgcggcggagccggaggaagctgatggtcatcttttccaaggtggatgtgaacactgaccggaagatcagtgccaaggagatgcagcgctggatcatggagaagacggccgagcacttccaggaggccatggaggagagcaagacacacttccgcgccgtggaccctgacggggacggtcacgtgtcttgggacgagtataaggtgaagtttttggcgagtaaaggccatagcgagaaggaggttgccgacgccatcaggctcaacgaggaactcaaagtggacgaggaaagtgagtgctcagccaggctcccgccaccggtctcaggcatcctgtgtgtgcgcgcgtgtgttgtgtgtacatgagtgtgccgtgtgtgtcgtgtatgagtgtgccgtgcgtgtgctcgtgagtacgtgtgtgcgtgccgtgtgtacgagtgtgctgtgcgcgtgctcgtgagtacgtgtgtgcatgttgtgtgtacgtgtgctgtgtgtgtgctcgtgagtacatgtgtatgcgtgtcgtgtgtacgagtgcactgtgcatgtgcttgtacgtgtgtgcgtgtcgtgtgtacgagtgcgctgtgcgtgtgcttgtgagtacatccaggtagctgttcatgtaggctcgtgagtacatgcaggtgagtgcgccctcacacccgctgtgtgcacacgtgttcgtcttaacagcatggcccaacctggttggtggtggctgtcaggagggaagtgggtgaagccgttgctgacctaggcgccgcccaggagtccggtggggagcgtgtgagctgtgcctgggccagggcagagtcgggcctcacgtgcagggggctgagtgtgggcctcaacactggacttggccactgactgcagtgagccccaagatggggcaggaggtggtgtttctgtcctggagacccagggtggcttgggtccttgggatgtgtggggacctcggggtgagggcccgttggggccgggtgggcacggcaggagagcgggggccacacacccagaggcagtgccgtgtcccggctgggagggttcctgggaagctctgctcagccccagtctcagtcatttctagaaactgtgttttcctccctgtgacgtcacacgtgaaggaaacggaaaagggcagtgagtccttcgccccgcggcgccgtgcgcacgtcagccttcagggtgattccgctcctccagaggggcaggcgcgggtgtggggggtggggcccaggcccatcctgaggggtcccaggcatgaggggctctgagctgtgtcctggggtggtctgggccatggggaggttctggatcatgtcttgagaggtctgggtgtgtctgtggggagtcagggccatccatgtattgggggtctggggcaggggggggtccaggctgtcttggggagtccgggctgtgtggaggggtccaagctatgcctttggggatcaggcctgtgggaggctctgggttatgtcttggcgggggtccaggctgtgtcttaggggctgggccatgttctggggacgtgtgaatcctggagggtggggccccggtctcgcgggtggctgtgtccctcgagttcaggcagcacctctcggaactttctggatttgcgtgctggcgtctgtcggcctcgatacccacaggctgcgcccctctcagcacaggaagtcctggagaacctgaaggaccgctggtaccaggcggacagcccccctgcagacctgctgctgacggaggaggagttcctgtcgttcctccaccccgagcacagccggggaatgctcaggttcatggtgaaggagatcgtccgggacctgggtgaggctgggtccagcctggccggcacgccaggacccaggaccgactggcaggggccgggcatcgtcgggaggtcggggcaggtcctgcgggagccccagcctgggtgtgggctgacccattcccgtctcgcagaccaggacggtgacaagcagctctctgtgcccgagttcatctccctgcccgtgggcaccgtggagaaccagcagggccaggacattgacgacaactgggtgaaagacagaaaaaaggagtttgaggagctcattgactccaaccacgacggcatcgtgaccgccgaggagctggagagctacatggaccccatgaacgagtacaacgcgctgaacgaggccaagcagatgatcgccgtcgccgacgagaaccagaaccaccacctggagcccgaggaggtgctcaagtacagcgagttcttcacgggcagcaagctggtggactacgcgcgcagcgtgcacgaggagttttgagcgcccggccgcgccccgcgccgccccccacgcaccaccggggcggcctcgcgggtgactccgggctccgtggctgtcccggaccccacctcttccctgccgcccgccaccggccgaccgaccgcggctgccccagttgatgagcggcgtgtcccctctgcagcgcgcaccccggcggggctttggctgtgacgcggtcggggcgcggggctgggctgtggccccgcggcgccgcctcctccctggtccctcgaaatcgtggcatctcacttctgagaacgaaatctcgcttcagtcactctgccgaaggcgctgacggcatcgcggccggaacctctgggcccggcccctcccagggccgccgctccgtgggaaaaaacagctcctccatttccttgaaaactgaacgattattaaaaatagattaaacttcgctggaaatgagtagccaggaagttcaggggagggtgccgggtccttcccgggcctggcgtgtcggagccacccaggtcccgcagctgccgctgagaaaatgcaaatatttgttgtgacaagaatcacatacatttactttaaatatagttgccttttttggtcagcttca

SEQ ID NO: 15339 - DNA, 2580 bp, Homo sapiens
tcatcgcgtgttccagacagcgatgactcgagagcggggagagatggtggcgccggcgtcccctccgtgaggtcgcgcccgttcgcaccgcccccgcccgcaagaaagatggcagtggcctgatccgggcccgttggcggcgtcactgacgcttcgctccggtcctcggatcccgagcgcggggaggcagaccggtgagtgaggggcccgggacggccgctgcaggccgcggggccaagtgtacgccggccggacggcgagggcgggtctggaggccgccgccgcctcccgccttgggctggggcatcgtccgtccgctcggccttgagccctggcgagactccgccgccaccggggctcccgggggcagggacaggccgacgacgctggcctccccggccgccggcacgtctggtctcctactggccaaaacctacgaatgccaccgggaaacggaggcccaaggggtctggttggactcgcgtttatcggcgaggcgaccttggacaagctgccccgcttccctgcgcctgcgcttccgcttctgaaccgcgtggaccctcatccccgactgtgagctgcttgtccccatcctgcggccgtcctggggacacagagccctccgtggtgcccggggattggattggagccaggacctcacttcctcctctgcccctgcccctgcccctcccagcacctggcccacaccctgcagcccgccccatggtctggccctgggtggcgatggcgtccaggtggggtcccctcattggcctggctccgtgctgcctctggctcctgggggcagtccttctgatggacgcgtctgcacggcctgccaaccactcgtccactcgagagagagtagccaacagggaggagaatgagatcctgcccccagaccacctgaacggggtgaagctggagatggacgggcacctcaatcgcggcttccaccaggaggtcttcctaggcaaggacctgggtggctttgatgaggacgcggagccgcggcggagccggaggaagctgatggtcatcttttccaaggtggatgtgaacactgaccggaagatcagtgccaaggagatgcagcgctggatcatggagaagacggccgagcacttccaggaggccatggaggagagcaagacacacttccgcgccgtggaccctgacggggacggtcacgtgtcttgggacgagtataaggtgaagtttttggcgagtaaaggccatagcgagaaggaggttgccgacgccatcaggctcaacgaggaactcaaagtggacgaggaaacacaggaagtcctggagaacctgaaggaccgctggtaccaggcggacagcccccctgcagacctgctgctgacggaggaggagttcctgtcgttcctccaccccgagcacagccggggaatgctcaggttcatggtgaaggagatcgtccgggacctggaccaggacggtgacaagcagctctctgtgcccgagttcatctccctgcccgtgggcaccgtggagaaccagcagggccaggacattgacgacaactgggtgaaagacagaaaaaaggagtttgaggagctcattgactccaaccacgacggcatcgtgaccgccgaggagctggagagctacatggaccccatgaacgagtacaacgcgctgaacgaggccaagcagatgatcgccgtcgccgacgagaaccagaaccaccacctggagcccgaggaggtgctcaagtacagcgagttcttcacgggcagcaagctggtggactacgcgcgcagcgtgcacgaggagttttgagcgcccggccgcgccccgcgccgccccccacgcaccaccggggcggcctcgcgggtgactccgggctccgtggctgtcccggaccccacctcttccctgccgcccgccaccggccgaccgaccgcggctgccccagttgatgagcggcgtgtcccctctgcagcgcgcaccccggcggggctttggctgtgacgcggtcggggcgcggggctgggctgtggccccgcggcgccgcctcctccctggtccctcgaaatcgtggcatctcacttctgagaacgaaatctcgcttcagtcactctgccgaaggcgctgacggcatcgcggccggaacctctgggcccggcccctcccagggccgccgctccgtgggaaaaaacagctcctccatttccttgaaaactgaacgattattaaaaatagattaaacttcgctggaaatgagtagccaggaagttcaggggagggtgccgggtccttcccgggcctggcgtgtcggagccacccaggtcccgcagctgccgctgagaaaatgcaaatatttgttgtgacaagaatcacatacatttactttaaatatagttgccttttttggtcagcttcaaaaaaaaaaaaaataaacgatattatactaaaaaaaaaaaaaacgcgggggagtttttttgggggggggaaaaaaggtatataagggacgggtatatgttttctcgacccctttttgtgaaaggggaaaacggggggccccatggggggagaaatgaacacgtc

SEQ ID NO: 15340 - DNA, 2541 bp, Homo sapiens
  misc_feature (2418)..(2419): n is a, c, g, or t
tcatcgcgtgttccagacagcgatgactcgagagcggggagagatggtggcgccggcgtcccctccgtgaggtcgcgcccgttcgcaccgcccccgcccgcaagaaagatggcagtggcctgatccgggcccgttggcggcgtcactgacgcttcgctccggtcctcggatcccgagcgcggggaggcagaccggtgagtgaggggcccgggacggccgctgcaggccgcggggccaagtgtacgccggccggacggcgagggcgggtctggaggccgccgccgcctcccgccttgggctggggcatcgtccgtccgctcggccttgagccctggcgagactccgccgccaccggggctcccgggggcagggacaggccgacgacgctggcctccccggccgccggcacgtctggtctcctactggccaaaacctacgaatgccaccgggaaacggaggcccaaggggtctggttggactcgcgtttatcggcgaggcgaccttggacaagctgccccgcttccctgcgcctgcgcttccgcttctgaaccgcgtggaccctcatccccgactgtgagctgcttgtccccatcctgcggccgtcctggggacacagagccctccgtggtgcccggggattggattggagccaggacctcacttcctcctctgcccctgcccctgcccctcccagcacctggcccacaccctgcagcccgccccatggtctggccctgggtggcgatggcgtccaggtggggtcccctcattggcctggctccgtgctgcctctggctcctgggggcagtccttctgatggacgcgtctgcacggcctgccaaccactcgtccactcgagagagagtagccaacagggaggagaatgagatcctgcccccagaccacctgaacggggtgaagctggagatggacgggcacctcaatcgcggcttccaccaggaggtcttcctaggcaaggacctgggtggctttgatgaggacgcggagccgcggcggagccggaggaagctgatggtcatcttttccaaggtggatgtgaacactgaccggaagatcagtgccaaggagatgcagcgctggatcatggagaagacggccgagcacttccaggaggccatggaggagagcaagacacacttccgcgccgtggaccctgacggggacggtcacgtgtcttgggacgagtataaggtgaagtttttggcgagtaaaggccatagcgagaaggaggttgccgacgccatcaggctcaacgaggaactcaaagtggacgaggaaacacaggaagtcctggagaacctgaaggaccgctggtaccaggcggacagcccccctgcagacctgctgctgacggaggaggagttcctgtcgttcctccaccccgagcacagccggggaatgctcaggttcatggtgaaggagatcgtccgggacctggaccaggacggtgacaagcagctctctgtgcccgagttcatctccctgcccgtgggcaccgtggagaaccagcagggccaggacattgacgacaactgggtgaaagacagaaaaaaggagtttgaggagctcattgactccaaccacgacggcatcgtgaccgccgaggagctggagagctacatggaccccatgaacgagtacaacgcgctgaacgaggccaagcagatgatcgccgtcgccgacgagaaccagaaccaccacctggagcccgaggaggtgctcaagtacagcgagttcttcacgggcagcaagctggtggactacgcgcgcagcgtgcacgaggagttttgagcgcccggccgcgccccgcgccgccccccacgcaccaccggggcggcctcgcgggtgactccgggctccgtggctgtcccggaccccacctcttccctgccgcccgccaccggccgaccgaccgcggctgccccagttgatgagcggcgtgtcccctctgcagcgcgcaccccggcggggctttggctgtgacgcggtcggggcgcggggctgggctgtggccccgcggcgccgcctcctccctggtccctcgaaatcgtggcatctcacttctgagaacgaaatctcgcttcagtcactctgccgaaggcgctgacggcatcgcggccggaacctctgggcccggcccctcccagggccgccgctccgtgggaaaaaacagctcctccatttccttgaaaactgaacgattattaaaaatagattaaacttcgctggaaatgagtagccaggaagttcaggggagggtgccgggtccttcccgggcctggcgtgtcggagccacccaggtcccgcagctgccgctgagaaaatgcaaatatttgttgtgacaagaatcacatacatttactttaaatatagttgccttttttggtcagcttcacnnacacaacataaaacaccagggaaccaagcgggagagggcggacaccgcgcatgcaccggcccatggtcaaaatcgggggccggccccgttcttgcccacgggggacacgcgcgggccccaaa

SEQ ID NO: 15341 - DNA, 2752 bp, Homo sapiens
tcatcgcgtgttccagacagcgatgactcgagagcggggagagatggtggcgccggcgtcccctccgtgaggtcgcgcccgttcgcaccgcccccgcccgcaagaaagatggcagtggcctgatccgggcccgttggcggcgtcactgacgcttcgctccggtcctcggatcccgagcgcggggaggcagaccggtgagtgaggggcccgggacggccgctgcaggccgcggggccaagtgtacgccggccggacggcgagggcgggtctggaggccgccgccgcctcccgccttgggctggggcatcgtccgtccgctcggccttgagccctggcgagactccgccgccaccggggctcccgggggcagggacaggccgacgacgctggcctccccggccgccggcacgtctggtctcctactggccaaaacctacgaatgccaccgggaaacggaggcccaaggggtctggttggactcgcgtttatcggcgaggcgaccttggacaagctgccccgcttccctgcgcctgcgcttccgcttctgaaccgcgtggaccctcatccccgactgtgagctgcttgtccccatcctgcggccgtcctggggacacagagccctccgtggtgcccggggattggattggagccaggacctcacttcctcctctgcccctgcccctgcccctcccagcacctggcccacaccctgcagcccgccccatggtctggccctgggtggcgatggcgtccaggtggggtcccctcattggcctggctccgtgctgcctctggctcctgggggcagtccttctgatggacgcgtctgcacggcctgccaaccactcgtccactcgagagagagtagccaacagggaggagaatgagatcctgcccccagaccacctgaacggggtgaagctggagatggacgggcacctcaatcgcggcttccaccaggaggtcttcctaggcaaggacctgggtggctttgatgaggacgcggagccgcggcggagccggaggaagctgatggtcatcttttccaaggtggatgtgaacactgaccggaagatcagtgccaaggagatgcagcgctggatcatggagaagacggccgagcacttccaggaggccatggaggagagcaagacacacttccgcgccgtggaccctgacggggacggtcacgtgtcttgggacgagtataaggtgaagtttttggcgagtaaaggccatagcgagaaggaggttgccgacgccatcaggctcaacgaggaactcaaagtggacgaggaaacacaggaagtcctggagaacctgaaggaccgctggtaccaggcggacagcccccctgcagacctgctgctgacggaggaggagttcctgtcgttcctccaccccgagcacagccggggaatgctcaggttcatggtgaaggagatcgtccgggacctggaccaggacggtgacaagcagctctctgtgcccgagttcatctccctgcccgtgggcaccgtggagaaccagcagggccaggacattgacgacaactgggtgaaagacagaaaaaaggagtttgaggagctcattgactccaaccacgacggcatcgtgaccgccgaggagctggagagctacatggaccccatgaacgagtacaacgcgctgaacgaggccaagcagatgatcgccgtcgccgacgagaaccagaaccaccacctggagcccgaggaggtgctcaagtacagcgagttcttcacgggcagcaagctggtggactacgcgcgcagcgtgcacgaggagttttgagcgcccggccgcgccccgcgccgccccccacgcaccaccggggcggcctcgcgggtgactccgggctccgtggctgtcccggaccccacctcttccctgccgcccgccaccggccgaccgaccgcggctgccccagttgatgagcggcgtgtcccctctgcagcgcgcaccccggcggggctttggctgtgacgcggtcggggcgcggggctgggctgtggccccgcggcgccgcctcctccctggtccctcgaaatcgtggcatctcacttctgagaacgaaatctcgcttcagtcactctgccgaaggcgctgacggcatcgcggccggaacctctgggcccggcccctcccagggccgccgctccgtgggaaaaaacagctcctccatttccttgaaaactgaacgattattaaaaatagattaaacttcgctggaaatgagtagccaggaagttcaggggagggtgccgggtccttcccgggcctggcgtgtcggagccacccaggtcccgcagctgccgctgagaaaatgcaaatatttgttgtgacaagaatcacatacatttactttaaatatagttgccttttttggtcagcttcaccaaaaaaaacaaaacaaaacaaccaaaaaaacacgctgttgtggggcggcgccgtggagcacacccgaagaagaacctctcttagaacaacaatattacaatgtgggagcgccgcggcggcccccaaaagggggaaaacgaggaacaccacggtggacaacgaaccaggtgtctccccataggaacaaccccgcgggccaccagtacaaaaaggccgccgaggaaatccaccccacccaataaacaaaaaccgcccccgggggagcacaaccgagaacgcggctgtgagaacaccaaaccccaagagaggcaccacaacacagcgcacacacagg

SEQ ID NO: 15342 - DNA, 2455 bp, Homo sapiens
tcatcgcgtgttccagacagcgatgactcgagagcggggagagatggtggcgccggcgtcccctccgtgaggtcgcgcccgttcgcaccgcccccgcccgcaagaaagatggcagtggcctgatccgggcccgttggcggcgtcactgacgcttcgctccggtcctcggatcccgagcgcggggaggcagaccggtgagtgaggggcccgggacggccgctgcaggccgcggggccaagtgtacgccggccggacggcgagggcgggtctggaggccgccgccgcctcccgccttgggctggggcatcgtccgtccgctcggccttgagccctggcgagactccgccgccaccggggctcccgggggcagggacaggccgacgacgctggcctccccggccgccggcacgtctggtctcctactggccaaaacctacgaatgccaccgggaaacggaggcccaaggggtctggttggactcgcgtttatcggcgaggcgaccttggacaagctgccccgcttccctgcgcctgcgcttccgcttctgaaccgcgtggaccctcatccccgactgtgagctgcttgtccccatcctgcggccgtcctggggacacagagccctccgtggtgcccggggattggattggagccaggacctcacttcctcctctgcccctgcccctgcccctcccagcacctggcccacaccctgcagcccgccccatggtctggccctgggtggcgatggcgtccaggtggggtcccctcattggcctggctccgtgctgcctctggctcctgggggcagtccttctgatggacgcgtctgcacggcctgccaaccactcgtccactcgagagagagtagccaacagggaggagaatgagatcctgcccccagaccacctgaacggggtgaagctggagatggacgggcacctcaatcgcggcttccaccaggaggtcttcctaggcaaggacctgggtggctttgatgaggacgcggagccgcggcggagccggaggaagctgatggtcatcttttccaaggtggatgtgaacactgaccggaagatcagtgccaaggagatgcagcgctggatcatggagaagacggccgagcacttccaggaggccatggaggagagcaagacacacttccgcgccgtggaccctgacggggacggtcacgtgtcttgggacgagtataaggtgaagtttttggcgagtaaaggccatagcgagaaggaggttgccgacgccatcaggctcaacgaggaactcaaagtggacgaggaaacacaggaagtcctggagaacctgaaggaccgctggtaccaggcggacagcccccctgcagacctgctgctgacggaggaggagttcctgtcgttcctccaccccgagcacagccggggaatgctcaggttcatggtgaaggagatcgtccgggacctggaccaggacggtgacaagcagctctctgtgcccgagttcatctccctgcccgtgggcaccgtggagaaccagcagggccaggacattgacgacaactgggtgaaagacagaaaaaaggagtttgaggagctcattgactccaaccacgacggcatcgtgaccgccgaggagctggagagctacatggaccccatgaacgagtacaacgcgctgaacgaggccaagcagatgatcgccgtcgccgacgagaaccagaaccaccacctggagcccgaggaggtgctcaagtacagcgagttcttcacgggcagcaagctggtggactacgcgcgcagcgtgcacgaggagttttgagcgcccggccgcgccccgcgccgccccccacgcaccaccggggcggcctcgcgggtgactccgggctccgtggctgtcccggaccccacctcttccctgccgcccgccaccggccgaccgaccgcggctgccccagttgatgagcggcgtgtcccctctgcagcgcgcaccccggcggggctttggctgtgacgcggtcggggcgcggggctgggctgtggccccgcggcgccgcctcctccctggtccctcgaaatcgtggcatctcacttctgagaacgaaatctcgcttcagtcactctgccgaaggcgctgacggcatcgcggccggaacctctgggcccggcccctcccagggccgccgctccgtgggaaaaaacagctcctccatttccttgaaaactgaacgattattaaaaatagattaaacttcgctggaaatgagtagccaggaagttcaggggagggtgccgggtccttcccgggcctggcgtgtcggagccacccaggtcccgcagctgccgctgagaaaatgcaaatatttgttgtgacaagaatcacatacatttactttaaatatagttgccttttttggtcagcttcacatcacgctcgccctctatggtgatagccaccacataca

SEQ ID NO: 15343 - DNA, 2550 bp, Homo sapiens
  misc_feature (2550)..(2550): n is a, c, g, or t
tcatcgcgtgttccagacagcgatgactcgagagcggggagagatggtggcgccggcgtcccctccgtgaggtcgcgcccgttcgcaccgcccccgcccgcaagaaagatggcagtggcctgatccgggcccgttggcggcgtcactgacgcttcgctccggtcctcggatcccgagcgcggggaggcagaccggtgagtgaggggcccgggacggccgctgcaggccgcggggccaagtgtacgccggccggacggcgagggcgggtctggaggccgccgccgcctcccgccttgggctggggcatcgtccgtccgctcggccttgagccctggcgagactccgccgccaccggggctcccgggggcagggacaggccgacgacgctggcctccccggccgccggcacgtctggtctcctactggccaaaacctacgaatgccaccgggaaacggaggcccaaggggtctggttggactcgcgtttatcggcgaggcgaccttggacaagctgccccgcttccctgcgcctgcgcttccgcttctgaaccgcgtggaccctcatccccgactgtgagctgcttgtccccatcctgcggccgtcctggggacacagagccctccgtggtgcccggggattggattggagccaggacctcacttcctcctctgcccctgcccctgcccctcccagcacctggcccacaccctgcagcccgccccatggtctggccctgggtggcgatggcgtccaggtggggtcccctcattggcctggctccgtgctgcctctggctcctgggggcagtccttctgatggacgcgtctgcacggcctgccaaccactcgtccactcgagagagagtagccaacagggaggagaatgagatcctgcccccagaccacctgaacggggtgaagctggagatggacgggcacctcaatcgcggcttccaccaggaggtcttcctaggcaaggacctgggtggctttgatgaggacgcggagccgcggcggagccggaggaagctgatggtcatcttttccaaggtggatgtgaacactgaccggaagatcagtgccaaggagatgcagcgctggatcatggagaagacggccgagcacttccaggaggccatggaggagagcaagacacacttccgcgccgtggaccctgacggggacggtcacgtgtcttgggacgagtataaggtgaagtttttggcgagtaaaggccatagcgagaaggaggttgccgacgccatcaggctcaacgaggaactcaaagtggacgaggaaacacaggaagtcctggagaacctgaaggaccgctggtaccaggcggacagcccccctgcagacctgctgctgacggaggaggagttcctgtcgttcctccaccccgagcacagccggggaatgctcaggttcatggtgaaggagatcgtccgggacctggaccaggacggtgacaagcagctctctgtgcccgagttcatctccctgcccgtgggcaccgtggagaaccagcagggccaggacattgacgacaactgggtgaaagacagaaaaaaggagtttgaggagctcattgactccaaccacgacggcatcgtgaccgccgaggagctggagagctacatggaccccatgaacgagtacaacgcgctgaacgaggccaagcagatgatcgccgtcgccgacgagaaccagaaccaccacctggagcccgaggaggtgctcaagtacagcgagttcttcacgggcagcaagctggtggactacgcgcgcagcgtgcacgaggagttttgagcgcccggccgcgccccgcgccgccccccacgcaccaccggggcggcctcgcgggtgactccgggctccgtggctgtcccggaccccacctcttccctgccgcccgccaccggccgaccgaccgcggctgccccagttgatgagcggcgtgtcccctctgcagcgcgcaccccggcggggctttggctgtgacgcggtcggggcgcggggctgggctgtggccccgcggcgccgcctcctccctggtccctcgaaatcgtggcatctcacttctgagaacgaaatctcgcttcagtcactctgccgaaggcgctgacggcatcgcggccggaacctctgggcccggcccctcccagggccgccgctccgtgggaaaaaacagctcctccatttccttgaaaactgacaagaagctctctgtgcccgagttcatctccctgcccgtgggcaccgtggagaaccagcagggccaggacatttgacgacaactgggttgaacagacagaacaacaggacgtttcgaggagctcattgactccaaaccacgacggcatcgtgaccgcccgaaggagcctggagagctacattggaccccatgaaacgagtacaaccgcgctggccgtgtccgcgagccaacccagggtcccgcaagcttggcgctgacgaaccatgccaatattcggtccgcgacaagaattcacatcacatttacctttacactcttcaccacacactcan

SEQ ID NO: 15344 - DNA, 1998 bp, Homo sapiens
tcatcgcgtgttccagacagcgatgactcgagagcggggagagatggtggcgccggcgtcccctccgtgaggtcgcgcccgttcgcaccgcccccgcccgcaagaaagatggcagtggcctgatccgggcccgttggcggcgtcactgacgcttcgctccggtcctcggatcccgagcgcggggaggcagaccggtgagtgaggggcccgggacggccgctgcaggccgcggggccaagtgtacgccggccggacggcgagggcgggtctggaggccgccgccgcctcccgccttgggctggggcatcgtccgtccgctcggccttgagccctggcgagactccgccgccaccggggctcccgggggcagggacaggccgacgacgctggcctccccggccgccggcacgtctggtctcctactggccaaaacctacgaatgccaccgggaaacggaggcccaaggggtctggttggactcgcgtttatcggcgaggcgaccttggacaagctgccccgcttccctgcgcctgcgcttccgcttctgaaccgcgtggaccctcatccccgactgtgagctgcttgtccccatcctgcggccgtcctggggacacagagccctccgtggtgcccggggattggattggagccaggacctcacttcctcctctgcccctgcccctgcccctcccagcacctggcccacaccctgcagcccgccccatggtctggccctgggtggcgatggcgtccaggtggggtcccctcattggcctggctccgtgctgcctctggctcctgggggcagtccttctgatggacgcgtctgcacggcctgccaaccactcgtccactcgagagagagtagccaacagggaggagaatgagatcctgcccccagaccacctgaacggggtgaagctggagatggacgggcacctcaatcgcggcttccaccaggaggtcttcctaggcaaggacctgggtggctttgatgaggacgcggagccgcggcggagccggaggaagctgatggtcatcttttccaaggtggatgtgaacactgaccggaagatcagtgccaaggagatgcagcgctggatcatggagaagacggccgagcacttccaggaggccatggaggagagcaagacacacttccgcgccgtggaccctgacggggacggtcacgtgtcttgggacgagtataaggtgaagtttttggcgagtaaaggccatagcgagaaggaggttgccgacgccatcaggctcaacgaggaactcaaagtggacgaggaaacacaggaagtcctggagaacctgaaggaccgctggtaccaggcggacagcccccctgcagacctgctgctgacggaggaggagttcctgtcgttcctccaccccgagcacagccggggaatgctcaggttcatggtgaaggagatcgtccgggacctggaccaggacggtgacaagcagctctctgtgcccgagttcatctccctgcccgtgggcaccgtggagaaccagcagggccaggacattgacgacaactgggtgaaagacagaaaaaaggagtttgaggagctcattgactccaaccacgacggcatcgtgaccgccgaggagctggagagctacatggaccccatgaacgagtacaacgcgctgaacgaaatctcgcttcagtcactctgccgaaggcgctgacggcatcgcggccggaacctctgggcccggcccctcccagggccgccgctccgtgggaaaaaacagctcctccatttccttgaaaactgaacgattattaaaaatagattaaacttcgctggaaatgagtagccaggaagttcaggggagggtgccgggtccttcccgggcctggcgtgtcggagccacccaggtcccgcagctgccgctgagaaaatgcaaatatttgttgtgacaagaatcacatacatttactttaaatatagttgccttttttggtcagcttca

SEQ ID NO: 15345 - DNA, 2031 bp, Homo sapiens
tcatcgcgtgttccagacagcgatgactcgagagcggggagagatggtggcgccggcgtcccctccgtgaggtcgcgcccgttcgcaccgcccccgcccgcaagaaagatggcagtggcctgatccgggcccgttggcggcgtcactgacgcttcgctccggtcctcggatcccgagcgcggggaggcagaccggtgagtgaggggcccgggacggccgctgcaggccgcggggccaagtgtacgccggccggacggcgagggcgggtctggaggccgccgccgcctcccgccttgggctggggcatcgtccgtccgctcggccttgagccctggcgagactccgccgccaccggggctcccgggggcagggacaggccgacgacgctggcctccccggccgccggcacgtctggtctcctactggccaaaacctacgaatgccaccgggaaacggaggcccaaggggtctggttggactcgcgtttatcggcgaggcgaccttggacaagctgccccgcttccctgcgcctgcgcttccgcttctgaaccgcgtggaccctcatccccgactgtgagctgcttgtccccatcctgcggccgtcctggggacacagagccctccgtggtgcccggggattggattggagccaggacctcacttcctcctctgcccctgcccctgcccctcccagcacctggcccacaccctgcagcccgccccatggtctggccctgggtggcgatggcgtccaggtggggtcccctcattggcctggctccgtgctgcctctggctcctgggggcagtccttctgatggacgcgtctgcacggcctgccaaccactcgtccactcgagagagagtagccaacagggaggagaatgagatcctgcccccagaccacctgaacggggtgaagctggagatggacgggcacctcaatcgcggcttccaccaggaggtcttcctaggcaaggacctgggtggctttgatgaggacgcggagccgcggcggagccggaggaagctgatggtcatcttttccaaggtggatgtgaacactgaccggaagatcagtgccaaggagatgcagcgctggatcatggagaagacggccgagcacttccaggaggccatggaggagagcaagacacacttccgcgccgtggaccctgacggggacggtcacgtgtcttgggacgagtataaggtgaagtttttggcgagtaaaggccatagcgagaaggaggttgccgacgccatcaggctcaacgaggaactcaaagtggacgaggaaacacaggaagtcctggagaacctgaaggaccgctggtaccaggcggacagcccccctgcagacctgctgctgacggaggaggagttcctgtcgttcctccaccccgagcacagccggggaatgctcaggttcatggtgaaggagatcgtccgggacctggaccaggacggtgacaagcagctctctgtgcccgagttcatctccctgcccgtgggcaccgtggagaaccagcagggccaggacattgacgacaactgggtcgaaatcgtggcatctcacttctgagaacgaaatctcgcttcagtcactctgccgaaggcgctgacggcatcgcggccggaacctctgggcccggcccctcccagggccgccgctccgtgggaaaaaacagctcctccatttccttgaaaactgaacgattattaaaaatagattaaacttcgctggaaatgagtagccaggaagttcaggggagggtgccgggtccttcccgggcctggcgtgtcggagccacccaggtcccgcagctgccgctgagaaaatgcaaatatttgttgtgacaagaatcacatacatttactttaaatatagttgccttttttggtcagcttcacaaacaaccaaaccccaccaaaaaacccccggggctttttgggggggcgacaagagtttaagggccgggctttttttccgcccttttttcaggggaaaccgcggcccaagggggaaaaa

SEQ ID NO: 15346 - DNA, 3094 bp, Homo sapiens
tcatcgcgtgttccagacagcgatgactcgagagcggggagagatggtggcgccggcgtcccctccgtgaggtcgcgcccgttcgcaccgcccccgcccgcaagaaagatggcagtggcctgatccgggcccgttggcggcgtcactgacgcttcgctccggtcctcggatcccgagcgcggggaggcagaccggtgagtgaggggcccgggacggccgctgcaggccgcggggccaagtgtacgccggccggacggcgagggcgggtctggaggccgccgccgcctcccgccttgggctggggcatcgtccgtccgctcggccttgagccctggcgagactccgccgccaccggggctcccgggggcagggacaggccgacgacgctggcctccccggccgccggcacgtctggtctcctactggccaaaacctacgaatgccaccgggaaacggaggcccaaggggtctggttggactcgcgtttatcggcgaggcgaccttggacaagctgccccgcttccctgcgcctgcgcttccgcttctgaaccgcgtggaccctcatccccgactgtgagctgcttgtccccatcctgcggccgtcctggggacacagagccctccgtggtgcccggggattggattggagccaggacctcacttcctcctctgcccctgcccctgcccctcccagcacctggcccacaccctgcagcccgccccatggtctggccctgggtggcgatggcgtccaggtggggtcccctcattggcctggctccgtgctgcctctggctcctgggggcagtccttctgatggacgcgtctgcacggcctgccaaccactcgtccactcgagagagagtagccaacagggaggagaatgagatcctgcccccagaccacctgaacggggtgaagctggagatggacgggcacctcaatcgcggcttccaccaggaggtcttcctaggcaaggacctgggtggctttgatgaggacgcggagccgcggcggagccggaggaagctgatggtcatcttttccaaggtggatgtgaacactgaccggaagatcagtgccaaggagatgcagcgctggatcatggagaagacggccgagcacttccaggaggccatggaggagagcaagacacacttccgcgccgtggaccctgacggggacggtcacgtgtcttgggacgagtataaggtgaagtttttggcgagtaaaggccatagcgagaaggaggttgccgacgccatcaggctcaacgaggaactcaaagtggacgaggaaagtgagtgctcagccaggctcccgccaccggtctcaggcatcctgtgtgtgcgcgcgtgtgttgtgtgtacatgagtgtgccgtgtgtgtcgtgtatgagtgtgccgtgcgtgtgctcgtgagtacgtgtgtgcgtgccgtgtgtacgagtgtgctgtgcgcgtgctcgtgagtacgtgtgtgcatgttgtgtgtacgtgtgctgtgtgtgtgctcgtgagtacatgtgtatgcgtgtcgtgtgtacgagtgcactgtgcatgtgcttgtacgtgtgtgcgtgtcgtgtgtacgagtgcgctgtgcgtgtgcttgtgagtacatccaggtagctgttcatgtaggctcgtgagtacatgcaggtgagtgcgccctcacacccgctgtgtgcacacgtgttcgtcttaacagcatggcccaacctggttggtggtggctgtcaggagggaagtgggtgaagccgttgctgacctaggcgccgcccaggagtccggtggggagcgtgtgagctgtgcctgggccagggcagagtcgggcctcacgtgcagggggctgagtgtgggcctcaacactggacttggccactgactgcagtgagccccaagatggggcaggaggtggtgtttctgtcctggagacccagggtggcttgggtccttgggatgtgtggggacctcggggtgagggcccgttggggccgggtgggcacggcaggagagcgggggccacacacccagaggcagtgccgtgtcccggctgggagggttcctgggaagctctgctcagccccagtctcagtcatttctagaaactgtgttttcctccctgtgacgtcacacgtgaaggaaacggaaaagggcagtgagtccttcgccccgcggcgccgtgcgcacgtcagccttcagggtgattccgctcctccagaggggcaggcgcgggtgtggggggtggggcccaggcccatcctgaggggtcccaggcatgaggggctctgagctgtgtcctggggtggtctgggccatggggaggttctggatcatgtcttgagaggtctgggctgtgtggggggtccaggccatgtcctgggggtctgggctgtgtctgtggggagtcagggccatccatgtattgggggtctggggcaggggggggtccaggctgtcttggggagtccgggctgtgtggaggggtccaagctatgcctttggggatcaggcctgtgggaggctctgggttatgtcttggcgggggtccaggctgtgtcttaggggctgggccatgttctggggacgtgtgaatcctggagggtggggccccggtctcgcgggtggctgtgtccctcgagttcaggcagcacctctcggaactttctggatttgcgtgctggcgtctgtcggcctcgatacccacaggctgcgcccctctcagcacaggaagtcctggagaacctgaaggaccgctggtaccaggcggacagcccccctgcagacctgctgctgacggaggaggagttcctgtcgttcctccaccccgagcacagccggggaatgctcaggttcatggtgaaggagatcgtccgggacctggaccaggacggtgacaagcagctctctgtgcccgagttcatctccctgcccgtgggcaccgtggagaaccagcagggccaggacattgacgacaactgggtgaaagacagaaaaaaggagtttgaggagctcattgactccaaccacgacggcatcgtgaccgccgaggagctggagagctacacgacccaaaacgacactaccggact

SEQ ID NO: 15347 - DNA, 1153 bp, Homo sapiens
ggcccgcaagtagaagcatggcaggtgcgtcctggatcgcgtgcgcccggttcgagcgcgcgatcacctcgacgacattcggtctccggggtcgctcggagcatcccagacgcgcaggggcaggcatgacgcggtagtacgttagacggcgtgcgcctggtgactggaccgctgtcgaggtctgctgcgcgtgtccatagtgctgcgccaggtcgggcactggctgagggcgggtcttggatggccgtcgccgacttcccggacttagaggcttgcggagcttactgtccctgtgtctctgactctgcgctctttgacgcctctgtggcagagactgctcgccgatcaggcgagggctacccgcggggcaagtggatcacgtgccgacgtatgctcggcctgccccgtgtccgtcgggcatgtgctggtactacctatactggctcaagagaacctatcgatagtgcgcatcgcgggaaacggaggcccaaggggtctggttggactcgcgtttatcggcgaggcgaccttggacaagctgccccgcttccctgcgcctgcgcttccgcttctgaaccgcgtggaccctcatccccgactgtgagctgcttgtccccatcctgcggccgtcctggggacacagagccctccgtggtgcccggggattggattggagccaggacctcacttcctcctctgcccctgcccctgcccctcccagcacctggcccacaccctgcagcccgccccatggtctggccctgggtggcgatggcgtccaggtggggtcccctcattggcctggctccgtgctgcctctggctcctgggggcagtccttctgatggacgcgtctgcacggcctgccaaccactcgtccactcgagagagagtagccaacagggaggagaatgagatcctgcccccagaccacctgaacggggtgaagctggagatggacgggcacctcaatcgcggcttccaccaggaggtcttcctaggcaaggacctgggtggctttgatgagcttcccgggcctggcgtgtcggagccacccaggtcccgcagctgccgctgagaaaatgcaaatatttgttgtgacaagaatcacatacatttactttaaatatagttgccttttttggtcagcttca

SEQ ID NO: 15348 - DNA, 265 bp, Homo sapiens
cccactgctgagtgagtcatcttgtttttatgtagaatcctgtgattcctggcgacagccagtgggcccggcccaggttagggatccttcagaactggggtccaggcctgtgtagcccctgtgccccgttacccctgctggccccgggcaggccttccggggcccccggcttctccctgccctgtgttttcatttgtgccgcctcccttcgggaaccttccagaacgtgcccacactcccgctgcagccaataggcaccttaaat

SEQ ID NO: 15349 - DNA, 538 bp, Homo sapiens
gtgcctctcctggatgggtctcagtttggccccgtccatccatcccaggagctgcggtggagcagacagggaggggtgccccaggaaccacagccccgtcactcctgtcttcctttaagtgaaccggtcgtgtagatggaggttgttcagaaagggataagatgggacggcagctgggcctcatcccgcagtgagcgcgacgcagaggctgccgggcttgtggcaggggcttcggccagggcagagtcgggcctcacgtgcagggggctgagtgtgggcctcaacactggacttggccactgactgcagtgagccccaagatggggcaggaggtggtgtttctgtcctggagacccagggtggcttgggtccttgggatgtgtggggacctcggggtgagggcccgttggggccgggtgggcacggcaggagagcgggggccacacacccagaggcagtgccgtgtcccggctgggagggttcctgggaagctctgctcagccccagtctcagtcatttctagaaactgtgttttcct

SEQ ID NO: 15350 - DNA, 2761 bp, Homo sapiens
tcatcgcgtgttccagacagcgatgactcgagagcggggagagatggtggcgccggcgtcccctccgtgaggtcgcgcccgttcgcaccgcccccgcccgcaagaaagatggcagtggcctgatccgggcccgttggcggcgtcactgacgcttcgctccggtcctcggatcccgagcgcggggaggcagaccggtgagtgaggggcccgggacggccgctgcaggccgcggggccaagtgtacgccggccggacggcgagggcgggtctggaggccgccgccgcctcccgccttgggctggggcatcgtccgtccgctcggccttgagccctggcgagactccgccgccaccggggctcccgggggcagggacaggccgacgacgctggcctccccggccgccggcacgtctggtctcctactggccaaaacctacgaatgccaccgggaaacggaggcccaaggggtctggttggactcgcgtttatcggcgaggcgaccttggacaagctgccccgcttccctgcgcctgcgcttccgcttctgaaccgcgtggaccctcatccccgactgtgagctgcttgtccccatcctgcggccgtcctggggacacagagccctccgtggtgcccggggattggattggagccaggacctcacttcctcctctgcccctgcccctgcccctcccagcacctggcccacaccctgcagcccgccccatggtctggccctgggtggcgatggcgtccaggtggggtcccctcattggcctggctccgtgctgcctctggctcctgggggcagtccttctgatggacgcgtctgcacggcctgccaaccactcgtccactcgagagagagtagccaacagggaggagaatgagatcctgcccccagaccacctgaacggggtgaagctggagatggacgggcacctcaatcgcggcttccaccaggaggtcttcctaggcaaggacctgggtggctttgatgaggacgcggagccgcggcggagccggaggaagctgatggtcatcttttccaaggtggatgtgaacactgaccggaagatcagtgccaaggagatgcagcgctggatcatggagaagacggccgagcacttccaggaggccatggaggagagcaagacacacttccgcgccgtggaccctgacggggacggtcacgtgtcttgggacgagtataaggtgaagtttttggcgagtaaaggccatagcgagaaggaggttgccgacgccatcaggctcaacgaggaactcaaagtggacgaggaaacacaggaagtcctggagaacctgaaggaccgctggtaccaggcggacagcccccctgcagacctgctgctgacggaggaggagttcctgtcgttcctccaccccgagcacagccggggaatgctcaggttcatggtgaaggagatcgtccgggacctggaccaggacggtgacaagcagctctctgtgcccgagttcatctccctgcccgtgggcaccgtggagaaccagcagggccaggacattgacgacaactgggtgaaagacagaaaaaaggagtttgaggagctcattgactccaaccacgacggcatcgtgaccgccgaggagctggagagctacatggaccccatgaacgagtacaacgcgctgaacgaggccaagcagatgatcgccgtcgccgacgagaaccagaaccaccacctggagcccgaggaggtgctcaagtacagcgagttcttcacgggcagcaagctggtggactacgcgcgcagcgtgcacgaggagttttgagcgcccggccgcgccccgcgccgccccccacgcaccaccggggcggcctcgcgggtgactccgggctccgtggctgtcccggaccccacctcttccctgccgcccgccaccggccgaccgaccgcggctgccccagttgatgagcggcgtgtcccctctgcagcgcgcaccccggcggggctttggctgtgacgcggtcggggcgcggggctgggctgtggccccgcggcgccgcctcctccctggtccctcgaaatcgtggcatctcacttctgagaacgaaatctcgcttcagtcactctgccgaaggcgctgacggcatcgcggccggaacctctgggcccggcccctcccagggccgccgctccgtgggaaaaaacagctcctccatttccttgaaaactgaacgattattaaaaatagattaaacttcgctggaaatgagtagccaggaagttcaggggagggtgccgggtccttcccgggcctggcgtgtcggagccacccaggtcccgcagctgccgctgagaaaatgcaaatatttgttgtgacaagaatcacatacatttactttaaatatagttgccttttttggtcagcttcaaaaaaaaagaacaaaacaaagaacagaacaaatagacaagaaaaaaaaaggacgggggcgcgcgcgccgcacaaaaaactatccccacagaagggggcgcacaagataagcggcatcaccacggtatgcatggcaccaaagggcgccccccatataatgagaagagcgagaaataaatagacacgcccataggaaccgagaggcagaccgagaagataaacaacaggagccgaggacaagggagaaaacaaagtgcaacaactgaggcagagacacgttgcaagagagagccaactaaatgctagggaagggcgaaacaaaccagggcgcacacagcacacatag

SEQ ID NO: 15351 - DNA, 2986 bp, Homo sapiens
tcatcgcgtgttccagacagcgatgactcgagagcggggagagatggtggcgccggcgtcccctccgtgaggtcgcgcccgttcgcaccgcccccgcccgcaagaaagatggcagtggcctgatccgggcccgttggcggcgtcactgacgcttcgctccggtcctcggatcccgagcgcggggaggcagaccggtgagtgaggggcccgggacggccgctgcaggccgcggggccaagtgtacgccggccggacggcgagggcgggtctggaggccgccgccgcctcccgccttgggctggggcatcgtccgtccgctcggccttgagccctggcgagactccgccgccaccggggctcccgggggcagggacaggccgacgacgctggcctccccggccgccggcacgtctggtctcctactggccaaaacctacgaatgccaccgggaaacggaggcccaaggggtctggttggactcgcgtttatcggcgaggcgaccttggacaagctgccccgcttccctgcgcctgcgcttccgcttctgaaccgcgtggaccctcatccccgactgtgagctgcttgtccccatcctgcggccgtcctggggacacagagccctccgtggtgcccggggattggattggagccaggacctcacttcctcctctgcccctgcccctgcccctcccagcacctggcccacaccctgcagcccgccccatggtctggccctgggtggcgatggcgtccaggtggggtcccctcattggcctggctccgtgctgcctctggctcctgggggcagtccttctgatggacgcgtctgcacggcctgccaaccactcgtccactcgagagagagtagccaacagggaggagaatgagatcctgcccccagaccacctgaacggggtgaagctggagatggacgggcacctcaatcgcggcttccaccaggaggtcttcctaggcaaggacctgggtggctttgatgaggacgcggagccgcggcggagccggaggaagctgatggtcatcttttccaaggtggatgtgaacactgaccggaagatcagtgccaaggagatgcagcgctggatcatggagaagacggccgagcacttccaggaggccatggaggagagcaagacacacttccgcgccgtggaccctgacggggacggtcacgtgtcttgggacgagtataaggtgaagtttttggcgagtaaaggccatagcgagaaggaggttgccgacgccatcaggctcaacgaggaactcaaagtggacgaggaaacacaggaagtcctggagaacctgaaggaccgctggtaccaggcggacagcccccctgcagacctgctgctgacggaggaggagttcctgtcgttcctccaccccgagcacagccggggaatgctcaggttcatggtgaaggagatcgtccgggacctggaccaggacggtgacaagcagctctctgtgcccgagttcatctccctgcccgtgggcaccgtggagaaccagcagggccaggacattgacgacaactgggtgaaagacagaaaaaaggagtttgaggagctcattgactccaaccacgacggcatcgtgaccgccgaggagctggagagctacatggaccccatgaacgagtacaacgcgctgaacgaggccaagcagatgatcgccgtcgccgacgagaaccagaaccaccacctggagcccgaggaggtgctcaagtacagcgagttcttcacgggcagcaagctggtggactacgcgcgcagcgtgcacgaggagttttgagcgcccggccgcgccccgcgccgccccccacgcaccaccggggcggcctcgcgggtgactccgggctccgtggctgtcccggaccccacctcttccctgccgcccgccaccggccgaccgaccgcggctgccccagttgatgagcggcgtgtcccctctgcagcgcgcaccccggcggggctttggctgtgacgcggtcggggcgcggggctgggctgtggccccgcggcgccgcctcctccctggtccctcgaaatcgtggcatctcacttctgagaacgaaatctcgcttcagtcactctgccgaaggcgctgacggcatcgcggccggaacctctgggcccggcccctcccagggccgccgctccgtgggaaaaaacagctcctccatttccttgaaaactgaacgattattaaaaatagattaaacttcgctggaaatgagtagccaggaagttcaggggagggtgccgggtccttcccgggcctggcgtgtcggagccacccaggtcccgcagctgccgctgagaaaatgcaaatatttgttgtgacaagaatcacatacatttactttaaatatagttgccttttttggtcagcttcacttttttggtcagcttcattctttgggcgtgaaacaaaacaaaaaaaaaaaacactaacaacaaacaacacacaaaaacacaacacacacacaaaaacaaaacaaacacaaaacaaagagggggcgcgacacacaaaaaaagaaactcccagaaggagacaacacataatcaaacacccacagattatcaggataacaaaagggggccccaaaagaagagacgagccaaaataaaagaacagagacagacaggcgacgacgcataacaacgaacagccaagcgagcacgaaaacacacgaacaatagcgcgacaaacaccggacgaagaagaacaacaccacccacacccgacgcgacgagagcacgaaaaacaaagagaggacacaaaacaaccacaccagaacgaaaaatataaaaaccaagcccacgcggaagaaaacaaaaaaacaaagatgagcgatgcaaacaacagcggacaaacaccagacacccacaaacaaacagagcagcgctgagaaaaaagatcataaaaacagagccaatacacaacacacaaaaaattaacgcgc

SEQ ID NO: 15352 - DNA, 2086 bp, Homo sapiens
tcatcgcgtgttccagacagcgatgactcgagagcggggagagatggtggcgccggcgtcccctccgtgaggtcgcgcccgttcgcaccgcccccgcccgcaagaaagatggcagtggcctgatccgggcccgttggcggcgtcactgacgcttcgctccggtcctcggatcccgagcgcggggaggcagaccggtgagtgaggggcccgggacggccgctgcaggccgcggggccaagtgtacgccggccggacggcgagggcgggtctggaggccgccgccgcctcccgccttgggctggggcatcgtccgtccgctcggccttgagccctggcgagactccgccgccaccggggctcccgggggcagggacaggccgacgacgctggcctccccggccgccggcacgtctggtctcctactggccaaaacctacgaatgccaccgggaaacggaggcccaaggggtctggttggactcgcgtttatcggcgaggcgaccttggacaagctgccccgcttccctgcgcctgcgcttccgcttctgaaccgcgtggaccctcatccccgactgtgagctgcttgtccccatcctgcggccgtcctggggacacagagccctccgtggtgcccggggattggattggagccaggacctcacttcctcctctgcccctgcccctgcccctcccagcacctggcccacaccctgcagcccgccccatggtctggccctgggtggcgatggcgtccaggtggggtcccctcattggcctggctccgtgctgcctctggctcctgggggcagtccttctgatggacgcgtctgcacggcctgccaaccactcgtccactcgagagagagtagccaacagggaggagaatgagatcctgcccccagaccacctgaacggggtgaagctggagatggacgggcacctcaatcgcggcttccaccaggaggtcttcctaggcaaggacctgggtggctttgatgaggacgcggagccgcggcggagccggaggaagctgatggtcatcttttccaaggtggatgtgaacactgaccggaagatcagtgccaaggagatgcagcgctggatcatggagaagacggccgagcacttccaggaggccatggaggagagcaagacacacttccgcgccgtggaccctgacggggacggtcacgtgtcttgggacgagtataaggtgaagtttttggcgagtaaaggccatagcgagaaggaggttgccgacgccatcaggctcaacgaggaactcaaagtggacgaggaaacacaggaagtcctggagaacctgaaggaccgctggtaccaggcggacagcccccctgcagacctgctgctgacggaggaggagttcctgtcgttcctccaccccgagcacagccggggaatgctcaggttcatggtgaaggagatcgtccgggacctggaccaggacggtgacaagcagctctctgtgcccgagttcatctccctgcccgtgggcaccgtggagaaccagcagggccaggacattgacgacaactgggtgaaagacagaaaaaaggagtttgaggagctcattgactccaaccacgacggcatcgtgaccgccgaggagctggagagctacatggaccccatgaacgagtacaacgcgctgaacgaggccaagcagatgatcgccggctgtggccccgcggcgccgcctcctccctggtccctcgaaatcgtggcatctcacttctgagaacgaaatctcgcttcagtcactctgccgaaggcgctgacggcatcgcggccggaacctctgggcccggcccctcccagggccgccgctccgtgggaaaaaacagctcctccatttccttgaaaactgaacgattattaaaaatagattaaacttcgctggaaatgagtagccaggaagttcaggggagggtgccgggtccttcccgggcctggcgtgtcggagccacccaggtcccgcagctgccgctgagaaaatgcaaatatttgttgtgacaagaatcacatacatttactttaaatatagttgccttttttggtcagcttca

SEQ ID NO: 15353 - DNA, 2927 bp, Homo sapiens
tcatcgcgtgttccagacagcgatgactcgagagcggggagagatggtggcgccggcgtcccctccgtgaggtcgcgcccgttcgcaccgcccccgcccgcaagaaagatggcagtggcctgatccgggcccgttggcggcgtcactgacgcttcgctccggtcctcggatcccgagcgcggggaggcagaccggtgagtgaggggcccgggacggccgctgcaggccgcggggccaagtgtacgccggccggacggcgagggcgggtctggaggccgccgccgcctcccgccttgggctggggcatcgtccgtccgctcggccttgagccctggcgagactccgccgccaccggggctcccgggggcagggacaggccgacgacgctggcctccccggccgccggcacgtctggtctcctactggccaaaacctacgaatgccaccgggaaacggaggcccaaggggtctggttggactcgcgtttatcggcgaggcgaccttggacaagctgccccgcttccctgcgcctgcgcttccgcttctgaaccgcgtggaccctcatccccgactgtgagctgcttgtccccatcctgcggccgtcctggggacacagagccctccgtggtgcccggggattggattggagccaggacctcacttcctcctctgcccctgcccctgcccctcccagcacctggcccacaccctgcagcccgccccatggtctggccctgggtggcgatggcgtccaggtggggtcccctcattggcctggctccgtgctgcctctggctcctgggggcagtccttctgatggacgcgtctgcacggcctgccaaccactcgtccactcgagagagagtagccaacagggaggagaatgagatcctgcccccagaccacctgaacggggtgaagctggagatggacgggcacctcaatcgcggcttccaccaggaggtcttcctaggcaaggacctgggtggctttgatgaggacgcggagccgcggcggagccggaggaagctgatggtcatcttttccaaggtggatgtgaacactgaccggaagatcagtgccaaggagatgcagcgctggatcatggagaagacggccgagcacttccaggaggccatggaggagagcaagacacacttccgcgccgtggaccctgacggggacggtcacgtgtcttgggacgagtataaggtgaagtttttggcgagtaaaggccatagcgagaaggaggttgccgacgccatcaggctcaacgaggaactcaaagtggacgaggaaacacaggaagtcctggagaacctgaaggaccgctggtaccaggcggacagcccccctgcagacctgctgctgacggaggaggagttcctgtcgttcctccaccccgagcacagccggggaatgctcaggttcatggtgaaggagatcgtccgggacctggaccaggacggtgacaagcagctctctgtgcccgagttcatctccctgcccgtgggcaccgtggagaaccagcagggccaggacattgacgacaactgggtgaaagacagaaaaaaggagtttgaggagctcattgactccaaccacgacggcatcgtgaccgccgaggagctggagagctacatggaccccatgaacgagtacaacgcgctgaacgaggccaagcagatgatcgccgtcgccgacgagaaccagaaccaccacctggagcccgaggaggtgctcaagtacagcgagttcttcacgggcagcaagctggtggactacgcgcgcagcgtgcacgaggagttttgagcgcccggccgcgccccgcgccgccccccacgcaccaccggggcggcctcgcgggtgactccgggctccgtggctgtcccggaccccacctcttccctgccgcccgccaccggccgaccgaccgcggctgccccagttgatgagcggcgtgtcccctctgcagcgcgcaccccggcggggctttggctgtgacgcggtcggggcgcggggctgggctgtggccccgcggcgccgcctcctccctggtccctcgaaatcgtggcatctcacttctgagaacgaaatctcgcttcagtcactcgccgctccgtgggaaaaaacagctcctccatttccttgaaaactgaacgattattaaaaatagattaaacttcgctggaaatgagtagccaggaagttcaggggagggtgccgggtccttcccgggcctggcgtgtcggagccacccaggtcccgcagctgccgctgagaaaatgcaaatatttgttgtgacaagaatcacatacatttactttaaatatagttgccttttttggtcagcttcacttttttggtcagcttcattctttgggcgtgaaacaaaacaaaaaaaaaaaacactaacaacaaacaacacacaaaaacacaacacacacacaaaaacaaaacaaacacaaaacaaagagggggcgcgacacacaaaaaaagaaactcccagaaggagacaacacataatcaaacacccacagattatcaggataacaaaagggggccccaaaagaagagacgagccaaaataaaagaacagagacagacaggcgacgacgcataacaacgaacagccaagcgagcacgaaaacacacgaacaatagcgcgacaaacaccggacgaagaagaacaacaccacccacacccgacgcgacgagagcacgaaaaacaaagagaggacacaaaacaaccacaccagaacgaaaaatataaaaaccaagcccacgcggaagaaaacaaaaaaacaaagatgagcgatgcaaacaacagcggacaaacaccagacacccacaaacaaacagagcagcgctgagaaaaaagatcataaaaacagagccaatacacaacacacaaaaaattaacgcgc

SEQ ID NO: 15354 - DNA, 2232 bp, Homo sapiens
tcatcgcgtgttccagacagcgatgactcgagagcggggagagatggtggcgccggcgtcccctccgtgaggtcgcgcccgttcgcaccgcccccgcccgcaagaaagatggcagtggcctgatccgggcccgttggcggcgtcactgacgcttcgctccggtcctcggatcccgagcgcggggaggcagaccggtgagtgaggggcccgggacggccgctgcaggccgcggggccaagtgtacgccggccggacggcgagggcgggtctggaggccgccgccgcctcccgccttgggctggggcatcgtccgtccgctcggccttgagccctggcgagactccgccgccaccggggctcccgggggcagggacaggccgacgacgctggcctccccggccgccggcacgtctggtctcctactggccaaaacctacgaatgccaccgggaaacggaggcccaaggggtctggttggactcgcgtttatcggcgaggcgaccttggacaagctgccccgcttccctgcgcctgcgcttccgcttctgaaccgcgtggaccctcatccccgactgtgagctgcttgtccccatcctgcggccgtcctggggacacagagccctccgtggtgcccggggattggattggagccaggacctcacttcctcctctgcccctgcccctgcccctcccagcacctggcccacaccctgcagcccgccccatggtctggccctgggtggcgatggcgtccaggtggggtcccctcattggcctggctccgtgctgcctctggctcctgggggcagtccttctgatggacgcgtctgcacggcctgccaaccactcgtccactcgagagagagtagccaacagggaggagaatgagatcctgcccccagaccacctgaacggggtgaagctggagatggacgggcacctcaatcgcggcttccaccaggaggtcttcctaggcaaggacctgggtggctttgatgaggacgcggagccgcggcggagccggaggaagctgatggtcatcttttccaaggtggatgtgaacactgaccggaagatcagtgccaaggagatgcagcgctggatcatggagaagacggccgagcacttccaggaggccatggaggagagcaagacacacttccgcgccgtggaccctgacggggacggtcacgtgtcttgggacgagtataaggtgaagtttttggcgagtaaaggccatagcgagaaggaggttgccgacgccatcaggctcaacgaggaactcaaagtggacgaggaaacacaggaagtcctggagaacctgaaggaccgctggtaccaggcggacagcccccctgcagacctgctgctgacggaggaggagttcctgtcgttcctccaccccgagcacagccggggaatgctcaggttcatggtgaaggagatcgtccgggacctggaccaggacggtgacaagcagctctctgtgcccgagttcatctccctgcccgtgggcaccgtggagaaccagcagggccaggacattgacgacaactgggtgaaagacagaaaaaaggagtttgaggagctcattgactccaaccacgacggcatcgtgaccgccgaggagctggagagctacatggaccccatgaacgagtacaacgcgctgaacgaggccaagcagatgatcgccgtcgccgacgagaaccagaaccaccacctggagcccgaggaggtgctcaagtacagcgagttcttcacgggcagcaagctggtggactacgcgcgcagcgtgcacgaggagttttgagcgcccggccgcgccccgcgccgccccccacgcaccaccggggcggcctcgcgggtgactccgggctccgtggctgtcccggaccccacctcttccctgccgcccgccaccggccgaccgaccgcggctgccccagttgatgagcggcgtgtcccctctggctcctgggggcagtccttttgatggacgcgtttgcacggcctgccaaccacttgtccactcgagagagagtagccaacagggaggagaatgagatcctgcccccagaccacctgaacggggtgaagctggagatggacgggcacctcaatcgcggcttacccaggtcccgcagctgccgctgagaaaatgcaaatatttgttgtgacaagaatcacatacatttactttaaatatagttgccttttttggtcagcttca

SEQ ID NO: 15355 - DNA, 1093 bp, Homo sapiens
ggcccgcaagtagaagcatggcaggtgcgtcctggatcgcgtgcgcccggttcgagcgcgcgatcacctcgacgacattcggtctccggggtcgctcggagcatcccagacgcgcaggggcaggcatgacgcggtagtacgttagacggcgtgcgcctggtgactggaccgctgtcgaggtctgctgcgcgtgtccatagtgctgcgccaggtcgggcactggctgagggcgggtcttggatggccgtcgccgacttcccggacttagaggcttgcggagcttactgtccctgtgtctctgactctgcgctctttgacgcctctgtggcagagactgctcgccgatcaggcgagggctacccgcggggcaagtggatcacgtgccgacgtatgctcggcctgccccgtgtccgtcgggcatgtgctggtactacctatactggctcaagagaacctatcgatagtgcgcatcgcgggaaacggaggcccaaggggtctggttggactcgcgtttatcggcgaggcgaccttggacaagctgccccgcttccctgcgcctgcgcttccgcttctgaaccgcgtggaccctcatccccgactgtgagctgcttgtccccatcctgcggccgtcctggggacacagagccctccgtggtgcccggggattggattggagccaggacctcacttcctcctctgcccctgcccctgcccctcccagcacctggcccacaccctgcagcccgccccatggtctggccctgggtggcgatggcgtccaggtggggtcccctcattggcctggctccgtgctgcctctggctcctgggggcagtccttctgatggacgcgtctgcacggcctgccaaccactcgtccactcgagagagagtagccaacagggaggagaatgagatcctgcccccagaccacctgaacggggtgaagctggagatggacgggcacctcaatcgcggcttccaccaggaggtacccaggtcccgcagctgccgctgagaaaatgcaaatatttgttgtgacaagaatcacatacatttactttaaatatagttgccttttttggtcagcttca

SEQ ID NO: 15356 - DNA, 1064 bp, Homo sapiens
ggcccgcaagtagaagcatggcaggtgcgtcctggatcgcgtgcgcccggttcgagcgcgcgatcacctcgacgacattcggtctccggggtcgctcggagcatcccagacgcgcaggggcaggcatgacgcggtagtacgttagacggcgtgcgcctggtgactggaccgctgtcgaggtctgctgcgcgtgtccatagtgctgcgccaggtcgggcactggctgagggcgggtcttggatggccgtcgccgacttcccggacttagaggcttgcggagcttactgtccctgtgtctctgactctgcgctctttgacgcctctgtggcagagactgctcgccgatcaggcgagggctacccgcggggcaagtggatcacgtgccgacgtatgctcggcctgccccgtgtccgtcgggcatgtgctggtactacctatactggctcaagagaacctatcgatagtgcgcatcgcgggaaacggaggcccaaggggtctggttggactcgcgtttatcggcgaggcgaccttggacaagctgccccgcttccctgcgcctgcgcttccgcttctgaaccgcgtggaccctcatccccgactgtgagctgcttgtccccatcctgcggccgtcctggggacacagagccctccgtggtgcccggggattggattggagccaggacctcacttcctcctctgcccctgcccctgcccctcccagcacctggcccacaccctgcagcccgccccatggtctggccctgggtggcgatggcgtccaggtggggtcccctcattggcctggctccgtgctgcctctggctcctgggggcagtccttctgatggacgcgtctgcacggcctgccaaccactcgtccactcgagagagagtagccaacagggaggagaatgagatcctgcccccagaccacctgaacggggtgaagctggagatggacgggcacctcaatcgcggcttccaccaggaggtcttcctaggcaaggacctgggtggctttgatgaggtgatgcctgccaggtggagtcctctgagtgtgaaagt

SEQ ID NO: 15357 - DNA, 360 bp, Homo sapiens
caaagaggtgccagcttgtgcacaaaatgagagaggagaaaagggtgggaggaggggccctggctctttttaacaaccagctcttgggggaacaaatagagtgagacctcaagcatgcctgaggaagagcattaatttattcttgagggttctgacccctccccaccatgcccaacaacatctcccattaggccccacccccaacattgagatcaaatttcaacaggagggacaatcatctaagtgatagcatagactcaggctatttactattctgttttcaagtatagattgagggcaacagcagcctttgttttctatgttgatggccaaaggtttatttttatattcttatactgt

SEQ ID NO: 15358 - DNA, 360 bp, Homo sapiens
gttgtttacaaggtcacaggcagccacaaacatgataaaaattcattcctgtacaatggaatttgtttctatgaatggaattttttttctatgttcttatttgcaatgtatcttcataccatactgtacctgatatggtaacttttgcccatcccaaaatgaggacagtactccagccctcaatccctagtagccactgaactcagaggacgaaggtattgtgatggcttggggaatattttgggattcctgagtagtcttttcctggcccagcttgatacaaccaggcagtcttgtgggaaaagatgcatataatgacaagtgagtaaatgaagtgaacaaatagaagtctataacaaa

SEQ ID NO: 15359 - DNA, 349 bp, Homo sapiens
gttgtccaggctggagtgctgtggcactattacagctcactatagcctcaaactcctgctctcaagtagtcctcctgcctcagcctcctgagtagctgggactataggcttgtgctcatgcccggctaatatttttattttttgtaggtgagggtcttgctctgttgctcaggctggcctcaagcaatccacatgcctggacctcccaaagtgctgagattacgggtctgagctaccgagcttgccattatattggttcttgaaatcccattgcagtagccacctttatccagaagcatgtattttaattctctagcaggttcggatctctcccttccgtggtcctact

SEQ ID NO: 15360 - DNA, 355 bp, Homo sapiens
tccttcacagaatacaagcaactgaagtaagtagatggcaacacaggcattgatattaagtccagaccagatttaatttgtaaacataggcttttcttagtctttcttgctcttttcacagaaaaactctgttttctggtgacacgttttaaagaagcactaatttctgccctgagtcactttttacaagttgttaactttttataagtttttaaagtgattttttacagccaaaaccaagggatgatcattgtcccacacatcccagctgatgacgtcaacgagcaaagagatgaacaaaatagtcaaaaagcaatgaatccattctgcacatgtaccccagaacttaaagtat

SEQ ID NO: 15361 - DNA, 495 bp, Homo sapiens
gcattttacagtcctcttgatacctacagaacactgattggtgctttttacaatcctcttgtaagacagaaaagttctccaagtccccactagacccaagaagtccagctggcttcacctctcactagcacctccatgcagtgaaccagagagagaattcattaagaaacatggccatttaaaaattattgacacctgatcaagtctttgtgatgaagtcacaccatcaagagtgttctcagtcacgctgaacatgcaaatgccactaaaggcagtaaccacctccagtctctctaaaggaagttttatatgaagccgttggacctggaactcaactgtaatcacagaagatttcttgggagagaataactcacccctgtatagcatctaagtggtccccaagacatgtataattttacaagacctagaagttgtataatagaagccaatttttaaaatcttgctttcattaaatgcagaatgttcatcctattg

SEQ ID NO: 15362 - DNA, 407 bp, Homo sapiens
tttgggtggggacacagccaaactacatcaacaactttacatggttatagatatttttgtttataacaacaacacacacacgtgcgcacccctataagttgagagggcagagaaagtgacagtaagagcatcctggctgtcaaggcatattatgcagacaacatctgtctatcaaaaatcacaagccagccacggtggtgttttcttggggttccagctactccagagctgggagcacaggtacatgcaaccatgcccggctaatttttgtattttttttttttatagcgacgagttttcgccatttttcccaggctggtctcaaactcttgggctcaagcgatccacccacctcggcctcccaaagtgctggaattacagatgtgagccaccacgcctggccaaga

SEQ ID NO: 15363 - DNA, 442 bp, Homo sapiens
aggtctccccacccctcccagcggtgcccacccagggcttctcgaggaaggagctcagcacccgccccagtgacacttcacttctctgggctttgctgccttttcctataaaatggggtgccagtcgccctctcagagtcctttcaaggagctgatggtgtagaccgcgagacctgccttgcagggcacatgcgcagctgctcctgtcatgctgggacctccggaccccgggcctcgcagctgccttggatcccctccctcctccagtcacgggctctgggctggctgctgggcgtgttgggcacagcgggccctaagctgacccgtgccctttgtggctgggacctgagatggggaggcccccaccccctagttccatggctttgggaggtgggggtggggtgttttctactctaccaccctacaacgaaaaagaagaaaa

SEQ ID NO: 15364 - DNA, 392 bp, Homo sapiens
cggcacgaggccgccaactttttttattttctttgttgctggaccccttcttgaaggtagacgtcccccacccggagagacgtcgcgctgtggcctgaagtggcgcaagcttgctttgtaaatatctgtggtcccgatgtagtgcccagaacgtttgtgcgaggcagctctgcgcccgggttccagcccgagcctcgccgggtcgcgtcttcggagtgcttgtgacagtccttgcccagtatctagtccccgtcgccccgtgcaggagacgtaggtaggacgtcgtgtcagctgtgcactgacggccagtctccgagctgtgcgtttgtatcgccactgtatttgtgtactttaacaatcgtgtaaataataaattcataatgacttctacc

SEQ ID NO: 15365 - DNA, 975 bp, Homo sapiens
ctctaccacaggctgtctggggcgggcaagtgcaggggccttgggcagggctgatgggaggatgcagaccagaagggccactgtggagagggagctgcagcacctgaagactggtgggcgggtgatggaagccacataaactttctgtgcagttcaaattcgtcctgttgtgaaaatgggaatatggataacttcccccagagatgtgtcagccgattagcccgccttactatgctaggaaggagaacacatccctcacttggtccttcatggaaaacacatagtgcttgttgtttctccagcatgttgggttatttggtggataccaggtaattcctgttgtggttttctttctttgccaaggtacggacattgctgcaggagaagaggttgccatcaagcttgaatgtgtcaaaaccaaacaccctcagctccacattgagagcaaaatctacaagatgatgcagggaggaggtaggtctttaccagtcacagagcaacaccagggttctgtttgacaagggagaacagcaactcagcattgctggttaaaataaacccaaaactggttctgggcaaaagggagggaagtgttctccacaccctgacaaagcagtcacagcttccttcagagagtcttgggtccagagaccctccctcaacacaaagaaacatcttatgggccgggcatggctgctcacgcctggaatcccagcactttgggaggccaagatgggtggatcatttgaggtcagtagtttgagactagcctggccaacgtagtgaaaccccgtctctactaaaaatacaaaaattagccaagtgtgatggcgtgcacctgtaatcccagctgtttgggaggctgaggcaggagaatcgcctgagtctgggaggcagaggttgcggtgagccgagatcacgccactgcactccagcctgggcgacagagtgagaccctgtcccccccaaaaaaaa

SEQ ID NO: 15366 - DNA, 346 bp, Homo sapiens
agtcacccggcccgtaccggcatgtgctgtaggccagcgttttccgtaaatggcagcatgaggagtctgggcggtgctggccgcacggtgctgcagccgcaggtgtgtcggtctgtgtgttgcctggtgaacgtggctgtgtccaatgagctgtacttgcaggaagaagtggcacctgggtttggccccggggctgtagtttgcaggcccctgccgcacagcattggcagttagaatctgctttttcataggttgctgtctcggcttaaaatctgacctccccacccccgtgcatctggatagtgcagcacagatccggctgccggccgctggcctacagcacatg

SEQ ID NO: 15367 - DNA, 3739 bp, Homo sapiens
gcgcgatggcggcggctcctttaggcagctgaaaggggatttaggcccggaagatccgagtccatccgcggcggggagagggcaagcgggaccggtaggggccggagcagcggcggcggcgctcggactgtcccatccgccccgtattgaggcgctgggagcggcggggcgacaggaaagcgatggtgaaagcggggccgtgaggggggcggagccgggagccggacccgcagtagcggcagcagcggcgccgcctcccagagttcagacccaggaagcggccgggagggcaggagcgaatcgggccgccgccgccatggagctgagagtcgggaacaggtaccggctgggccggaagatcggcagcggctccttcggagacatctatctcggtacggacattgctgcaggagaagaggttgccatcaagcttgaatgtgtcaaaaccaaacaccctcagctccacattgagagcaaaatctacaagatgatgcagggaggagtgggcatccccaccatcagatggtgcggggcagagggggactacaacgtcatggtgatggagctgctggggccaagcctggaggacctcttcaacttctgctccaggaaattcagcctcaaaaccgtcctgctgcttgctgaccaaatgatcagtcgcatcgaatacattcattcaaagaacttcatccaccgggatgtgaagccagacaacttcctcatgggcctggggaagaagggcaacctggtgtacatcatcgacttcgggctggccaagaagtaccgggatgcacgcacccaccagcacatcccctatcgtgagaacaagaacctcacggggacggcgcggtacgcctccatcaacacgcaccttggaattgaacaatcccgaagagatgacttggagtctctgggctacgtgctaatgtacttcaacctgggctctctcccctggcaggggctgaaggctgccaccaagagacagaaatacgaaaggattagcgagaagaaaatgtccacccccatcgaagtgttgtgtaaaggctacccttccgaatttgccacatacctgaatttctgccgttccttgcgttttgacgacaagcctgactactcgtacctgcggcagcttttccggaatctgttccatcgccagggcttctcctatgactacgtgttcgactggaacatgctcaaatttggtgccagccgggccgccgatgacgccgagcgggagcgcagggaccgagaggagcggctgagacactcgcggaacccggctacccgcggcctcccttccacagcctccggccgcctgcgggggacgcaggaagtggctccccccacacccctcacccctacctcacacacggctaacacctccccccggcccgtctccggcatggagagagagcggaaagtgagtatgcggctgcaccgcggggcccccgtcaacatctcctcgtccgacctcacaggccgacaagatacctctcgcatgtccacctcacagaatagcattcctttcgaacaccacggcaagtagctgctcgtctcccatcggaaggcagcactggattcctggtcgggtggcttccagtggtcttcagtctgtcgtgcaccgatgagaactctccttattgctgtgaagggcagacaatgcatggctgatctactctgttaccaatggctttactagtgacacgtcccccggtctaggatcgaaatgttaacaccgggagctctccaggccactcacccagcgacgctcgtgggggaaacatactaaacggacagactccaagagctgccaccgctggggctgcactgcggccccccacgtgaactcggttgtaacggggctgggaagaaaagcagagagagaattgcagagaatcagactccttttccagggcctcagctccctccagtggtggccgccctgtactccctgacgattccactgtaactaccaatcttctacttggttaagacagttttgtatcattttgctaaaaattattggcttaaatctgtgtaaagaaaatctgtctttttattgtttcttgtctgtttttgcagtcttacaaaaaaaatgttgactaaggaattctgagacaggctggcttggagttagtgtatgaggtggagtcgggcagggagaaggtgcaggtggatctcaagggtgtgtgctgtgtttgttttgcagtgttttattgtccgctttggagaggagatttctcatcaaaagtccgtggtgtgtgtgtgtgcccgtgtgtggtgggacctcttcaacctgattttggcgtctcaccctccctcctcccgtaattgacatgcctgctgtcaggaactcttgaggccctcggagagcagttagggaccgcaggctgccgcggggcaggggtgcagtgggtgttaccaggcaaagcactgcgcgcttcttccccaggaggtgggcaggcagctgagagcttggaagcagaggctttgagaccctagcaggacaattgggagtcccaggattcaaggtggaagatgcgtttctggtcccttgggagaggactgtgaaccgagaggtggttactgtagtgtttgttgccttgctgcctttgcactcagtccattttctcagcactcaatgctcctgtgcggattggcactccgtctgtatgaatgcctgtgcttaaaaccaggagcggggctgtccttgccacgtgccaagactagctcagaaaagccggcaggccagaaggacccaccctgaggtgccaaggagcaggtgactctcccaaccggacccagaaccttcacggccagaaagtagagtctgcgctgtgaccttctgttgggcgcgtgtctgttggtcagaagtgaagcagcgtgcgtggggccgagtcccaccagaaggcaggtggcctccgtgagctggtgctgccccaggctccatgctgctgtgccctgaggttcccaggatgccttctcgcctctcactccgcagcacttgggcggtagccagtggccatgtgctcccaaccccaatgcgcagggcagtctgtgttcgtgggcacttcggctggaccccatcacgatggacgatgttccctttggactctagggcttcgaaggtgtgcaccttggttctcccttctcctccccagagttccccggatgccataactggctggcgtcccagaacacagttgttcacccccccaccagctggctggccgtctgcctgagcccatggatgctttctcaatcctaggctggttactgtgtaagcgttttggagtacggggccttgagcgggtgggagctgtgtgttgaagtacagagggaggttggggtgggtcagagccgagttaagagattttctttgttgctggaccccttcttgaaggtagacgtcccccacccggagagacgtcgcgctgtggcctgaagtggcgcaagcttgctttgtaaatatctgtggtcccgatgtagtgcccagaacgtttgtgcgaggcagctctgcgcccgggttccagcccgagcctcgccgggtcgcgtcttcggagtgcttgtgacagtccttgcccagtatctagtccccgtcgccccgtgcaggagacgtaggtaggacgtcgtgtcagctgtgcactgacggccagtctccgagctgtgcgtttgtatcgccactgtatttgtgtactttaacaatcgtgtaaataataaattcataatgacttctacc

SEQ ID NO: 15368 - DNA, 3675 bp, Homo sapiens
gcgcgatggcggcggctcctttaggcagctgaaaggggatttaggcccggaagatccgagtccatccgcggcggggagagggcaagcgggaccggtaggggccggagcagcggcggcggcgctcggactgtcccatccgccccgtattgaggcgctgggagcggcggggcgacaggaaagcgatggtgaaagcggggccgtgaggggggcggagccgggagccggacccgcagtagcggcagcagcggcgccgcctcccagagttcagacccaggaagcggccgggagggcaggagcgaatcgggccgccgccgccatggagctgagagtcgggaacaggtaccggctgggccggaagatcggcagcggctccttcggagacatctatctcggtacggacattgctgcaggagaagaggttgccatcaagcttgaatgtgtcaaaaccaaacaccctcagctccacattgagagcaaaatctacaagatgatgcagggaggagtgggcatccccaccatcagatggtgcggggcagagggggactacaacgtcatggtgatggagctgctggggccaagcctggaggacctcttcaacttctgctccaggaaattcagcctcaaaaccgtcctgctgcttgctgaccaaatgatcagtcgcatcgaatacattcattcaaagaacttcatccaccgggatgtgaagccagacaacttcctcatgggcctggggaagaagggcaacctggtgtacatcatcgacttcgggctggccaagaagtaccgggatgcacgcacccaccagcacatcccctatcgtgagaacaagaacctcacggggacggcgcggtacgcctccatcaacacgcaccttggaattgaacaatcccgaagagatgacttggagtctctgggctacgtgctaatgtacttcaacctgggctctctcccctggcaggggctgaaggctgccaccaagagacagaaatacgaaaggattagcgagaagaaaatgtccacccccatcgaagtgttgtgtaaaggctacccttccgaatttgccacatacctgaatttctgccgttccttgcgttttgacgacaagcctgactactcgtacctgcggcagcttttccggaatctgttccatcgccagggcttctcctatgactacgtgttcgactggaacatgctcaaatttggtgccagccgggccgccgatgacgccgagcgggagcgcagggaccgagaggagcggctgagacactcgcggaacccggctacccgcggcctcccttccacagcctccggccgcctgcgggggacgcaggaagtggctccccccacacccctcacccctacctcacacacggctaacacctccccccggcccgtctccggcatggagagagagcggaaagtgagtatgcggctgcaccgcggggcccccgtcaacatctcctcgtccgacctcacaggccgacaagatacctctcgcatgtccacctcacagattcctggtcgggtggcttccagtggtcttcagtctgtcgtgcaccgatgagaactctccttattgctgtgaagggcagacaatgcatggctgatctactctgttaccaatggctttactagtgacacgtcccccggtctaggatcgaaatgttaacaccgggagctctccaggccactcacccagcgacgctcgtgggggaaacatactaaacggacagactccaagagctgccaccgctggggctgcactgcggccccccacgtgaactcggttgtaacggggctgggaagaaaagcagagagagaattgcagagaatcagactccttttccagggcctcagctccctccagtggtggccgccctgtactccctgacgattccactgtaactaccaatcttctacttggttaagacagttttgtatcattttgctaaaaattattggcttaaatctgtgtaaagaaaatctgtctttttattgtttcttgtctgtttttgcagtcttacaaaaaaaatgttgactaaggaattctgagacaggctggcttggagttagtgtatgaggtggagtcgggcagggagaaggtgcaggtggatctcaagggtgtgtgctgtgtttgttttgcagtgttttattgtccgctttggagaggagatttctcatcaaaagtccgtggtgtgtgtgtgtgcccgtgtgtggtgggacctcttcaacctgattttggcgtctcaccctccctcctcccgtaattgacatgcctgctgtcaggaactcttgaggccctcggagagcagttagggaccgcaggctgccgcggggcaggggtgcagtgggtgttaccaggcaaagcactgcgcgcttcttccccaggaggtgggcaggcagctgagagcttggaagcagaggctttgagaccctagcaggacaattgggagtcccaggattcaaggtggaagatgcgtttctggtcccttgggagaggactgtgaaccgagaggtggttactgtagtgtttgttgccttgctgcctttgcactcagtccattttctcagcactcaatgctcctgtgcggattggcactccgtctgtatgaatgcctgtgcttaaaaccaggagcggggctgtccttgccacgtgccaagactagctcagaaaagccggcaggccagaaggacccaccctgaggtgccaaggagcaggtgactctcccaaccggacccagaaccttcacggccagaaagtagagtctgcgctgtgaccttctgttgggcgcgtgtctgttggtcagaagtgaagcagcgtgcgtggggccgagtcccaccagaaggcaggtggcctccgtgagctggtgctgccccaggctccatgctgctgtgccctgaggttcccaggatgccttctcgcctctcactccgcagcacttgggcggtagccagtggccatgtgctcccaaccccaatgcgcagggcagtctgtgttcgtgggcacttcggctggaccccatcacgatggacgatgttccctttggactctagggcttcgaaggtgtgcaccttggttctcccttctcctccccagagttccccggatgccataactggctggcgtcccagaacacagttgttcacccccccaccagctggctggccgtctgcctgagcccatggatgctttctcaatcctaggctggttactgtgtaagcgttttggagtacggggccttgagcgggtgggagctgtgtgttgaagtacagagggaggttggggtgggtcagagccgagttaagagattttctttgttgctggaccccttcttgaaggtagacgtcccccacccggagagacgtcgcgctgtggcctgaagtggcgcaagcttgctttgtaaatatctgtggtcccgatgtagtgcccagaacgtttgtgcgaggcagctctgcgcccgggttccagcccgagcctcgccgggtcgcgtcttcggagtgcttgtgacagtccttgcccagtatctagtccccgtcgccccgtgcaggagacgtaggtaggacgtcgtgtcagctgtgcactgacggccagtctccgagctgtgcgtttgtatcgccactgtatttgtgtactttaacaatcgtgtaaataataaattcataatgacttctacc

SEQ ID NO: 15369 - DNA, 3502 bp, Homo sapiens
agcacagtaatccgatccgaaccacgcgtcgacccaggaagcggccgggagggcaggagcgaatcgggccgccgccgccatggagctgagagtcgggaacaggtaccggctgggccggaagatcggcagcggctccttcggagacatctatctcggtacggacattgctgcaggagaagaggttgccatcaagcttgaatgtgtcaaaaccaaacaccctcagctccacattgagagcaaaatctacaagatgatgcagggaggagtgggcatccccaccatcagatggtgcggggcagagggggactacaacgtcatggtgatggagctgctggggccaagcctggaggacctcttcaacttctgctccaggaaattcagcctcaaaaccgtcctgctgcttgctgaccaaatgatcagtcgcatcgaatacattcattcaaagaacttcatccaccgggatgtgaagccagacaacttcctcatgggcctggggaagaagggcaacctggtgtacatcatcgacttcgggctggccaagaagtaccgggatgcacgcacccaccagcacatcccctatcgtgagaacaagaacctcacggggacggcgcggtacgcctccatcaacacgcaccttggaattgaacaatcccgaagagatgacttggagtctctgggctacgtgctaatgtacttcaacctgggctctctcccctggcaggggctgaaggctgccaccaagagacagaaatacgaaaggattagcgagaagaaaatgtccacccccatcgaagtgttgtgtaaaggctacccttccgaatttgccacatacctgaatttctgccgttccttgcgttttgacgacaagcctgactactcgtacctgcggcagcttttccggaatctgttccatcgccagggcttctcctatgactacgtgttcgactggaacatgctcaaatttggtgccagccgggccgccgatgacgccgagcgggagcgcagggaccgagaggagcggctgagacactcgcggaacccggctacccgcggcctcccttccacagcctccggccgcctgcgggggacgcaggaagtggctccccccacacccctcacccctacctcacacacggctaacacctccccccggcccgtctccggcatggagagagagcggaaagtgagtatgcggctgcaccgcggggcccccgtcaacatctcctcgtccgacctcacaggccgacaagatacctctcgcatgtccacctcacagaatagcattcctttcgaacaccacggcaagtagctgctcgtctcccatcggaaggcagcactggattcctggtcgggtggcttccagtggtcttcagtctgtcgtgcaccgatgagaactctccttattgctgtgaagggcagacaatgcatggctgatctactctgttaccaatggctttactagtgacacgtcccccggtctaggatcgaaatgttaacaccgggagctctccaggccactcacccagcgacgctcgtgggggaaacatactaaacggacagactccaagagctgccaccgctggggctgcactgcggccccccacgtgaactcggttgtaacggggctgggaagaaaagcagagagagaattgcagagaatcagactccttttccagggcctcagctccctccagtggtggccgccctgtactccctgacgattccactgtaactaccaatcttctacttggttaagacagttttgtatcattttgctaaaaattattggcttaaatctgtgtaaagaaaatctgtctttttattgtttcttgtctgtttttgcagtcttacaaaaaaaatgttgactaaggaattctgagacaggctggcttggagttagtgtatgaggtggagtcgggcagggagaaggtgcaggtggatctcaagggtgtgtgctgtgtttgttttgcagtgttttattgtccgctttggagaggagatttctcatcaaaagtccgtggtgtgtgtgtgtgcccgtgtgtggtgggacctcttcaacctgattttggcgtctcaccctccctcctcccgtaattgacatgcctgctgtcaggaactcttgaggccctcggagagcagttagggaccgcaggctgccgcggggcaggggtgcagtgggtgttaccaggcaaagcactgcgcgcttcttccccaggaggtgggcaggcagctgagagcttggaagcagaggctttgagaccctagcaggacaattgggagtcccaggattcaaggtggaagatgcgtttctggtcccttgggagaggactgtgaaccgagaggtggttactgtagtgtttgttgccttgctgcctttgcactcagtccattttctcagcactcaatgctcctgtgcggattggcactccgtctgtatgaatgcctgtgcttaaaaccaggagcggggctgtccttgccacgtgccaagactagctcagaaaagccggcaggccagaaggacccaccctgaggtgccaaggagcaggtgactctcccaaccggacccagaaccttcacggccagaaagtagagtctgcgctgtgaccttctgttgggcgcgtgtctgttggtcagaagtgaagcagcgtgcgtggggccgagtcccaccagaaggcaggtggcctccgtgagctggtgctgccccaggctccatgctgctgtgccctgaggttcccaggatgccttctcgcctctcactccgcagcacttgggcggtagccagtggccatgtgctcccaaccccaatgcgcagggcagtctgtgttcgtgggcacttcggctggaccccatcacgatggacgatgttccctttggactctagggcttcgaaggtgtgcaccttggttctcccttctcctccccagagttccccggatgccataactggctggcgtcccagaacacagttgttcacccccccaccagctggctggccgtctgcctgagcccatggatgctttctcaatcctaggctggttactgtgtaagcgttttggagtacggggccttgagcgggtgggagctgtgtgttgaagtacagagggaggttggggtgggtcagagccgagttaagagattttctttgttgctggaccccttcttgaaggtagacgtcccccacccggagagacgtcgcgctgtggcctgaagtggcgcaagcttgctttgtaaatatctgtggtcccgatgtagtgcccagaacgtttgtgcgaggcagctctgcgcccgggttccagcccgagcctcgccgggtcgcgtcttcggagtgcttgtgacagtccttgcccagtatctagtccccgtcgccccgtgcaggagacgtaggtaggacgtcgtgtcagctgtgcactgacggccagtctccgagctgtgcgtttgtatcgccactgtatttgtgtactttaacaatcgtgtaaataataaattcataatgacttctacc

SEQ ID NO: 15370 - DNA, 3256 bp, Homo sapiens
  misc_feature (3218)..(3218): n is a, c, g, or t
gcgcgatggcggcggctcctttaggcagctgaaaggggatttaggcccggaagatccgagtccatccgcggcggggagagggcaagcgggaccggtaggggccggagcagcggcggcggcgctcggactgtcccatccgccccgtattgaggcgctgggagcggcggggcgacaggaaagcgatggtgaaagcggggccgtgaggggggcggagccgggagccggacccgcagtagcggcagcagcggcgccgcctcccagagttcagacccaggaagcggccgggagggcaggagcgaatcgggccgccgccgccatggagctgagagtcgggaacaggtaccggctgggccggaagatcggcagcggctccttcggagacatctatctcggtacggacattgctgcaggagaagaggttgccatcaagcttgaatgtgtcaaaaccaaacaccctcagctccacattgagagcaaaatctacaagatgatgcagggaggagtgggcatccccaccatcagatggtgcggggcagagggggactacaacgtcatggtgatggagctgctggggccaagcctggaggacctcttcaacttctgctccaggaaattcagcctcaaaaccgtcctgctgcttgctgaccaaatgatcagtcgcatcgaatacattcattcaaagaacttcatccaccgggatgtgaagccagacaacttcctcatgggcctggggaagaagggcaacctggtgtacatcatcgacttcgggctggccaagaagtaccgggatgcacgcacccaccagcacatcccctatcgtgagaacaagaacctcacggggacggcgcggtacgcctccatcaacacgcaccttggaattgaacaatcccgaagagatgacttggagtctctgggctacgtgctaatgtacttcaacctgggctctctcccctggcaggggctgaaggctgccaccaagagacagaaatacgaaaggattagcgagaagaaaatgtccacccccatcgaagtgttgtgtaaaggctacccttccgaatttgccacatacctgaatttctgccgttccttgcgttttgacgacaagcctgactactcgtacctgcggcagcttttccggaatctgttccatcgccagggcttctcctatgactacgtgttcgactggaacatgctcaaatttggtgccagccgggccgccgatgacgccgagcgggagcgcagggaccgagaggagcggctgagacactcgcggaacccggctacccgcggcctcccttccacagcctccggccgcctgcgggggacgcaggaagtggctccccccacacccctcacccctacctcacacacggctaacacctccccccggcccgtctccggcatggagagagagcggaaagtgagtatgcggctgcaccgcggggcccccgtcaacatctcctcgtccgacctcacaggccgacaagatacctctcgcatgtccacctcacagaatagcattcctttcgaacaccacggcaagtagctgctcgtctcccatcggaaggcagcactggattcctggtcgggtggcttccagtggtcttcagtctgtcgtgcaccgatgagaactctccttattgctgtgaagggcagacaatgcatggctgatctactctgttaccaatggctttactagtgacacgtcccccggtctaggatcgaaatgttaacaccgggagctctccaggccactcacccagcgacgctcgtgggggaaacatactaaacggacagactccaagagctgccaccgctggggctgcactgcggccccccacgtgaactcggttgtaacggggctgggaagaaaagcagagagagaattgcagagaatcagactccttttccagggcctcagctccctccagtggtggccgccctgtactccctgacgattccactgtaactaccaatcttctacttggttaagacagttttgtatcattttgctaaaaattattggcttaaatctgtgtaaagaaaatctgtctttttattgtttcttgtctgtttttgcagtcttacaaaaaaaatgttgactaaggaattctgagacaggctggcttggagttagtgtatgaggtggagtcgggcagggagaaggtgcaggtggatctcaagggtgtgtgctgtgtttgttttgcagtgttttattgtccgctttggagaggagatttctcatcaaaagtccgtggtgtgtgtgtgtgcccgtgtgtggtgggacctcttcaacctgattttggcgtctcaccctccctcctcccgtaattgacatgcctgctgtcaggaactcttgaggccctcggagagcagttagggaccgcaggctgccgcggggcaggggtgcagtgggtgttaccaggcaaagcactgcgcgcttcttccccaggaggtgggcaggcagctgagagcttggaagcagaggctttgagaccctagcaggacaattgggagtcccaggattcaaggtggaagatgcgtttctggtcccttgggagaggactgtgaaccgagaggtggttactgtagtgtttgttgccttgctgcctttgcactcagtccattttctcagcactcaatgctcctgtgcggattggcactccgtctgtatgaatgcctgtgcttaaaaccaggagcggggctgtccttgccacgtgccaagactagctcagaaaagccggcaggccagaaggacccaccctgaggtgccaaggagcaggtgactctcccaaccggacccagaaccttcacggccagaaagtagagtctgcgctgtgaccttctgttgggcgcgtgtctgttggtcagaagtgaagcagcgtgcgtggggccgagtcccaccagaaggcaggtggcctccgtgagctggtgctgccccaggctccatgctgctgtgccctgaggttcccaggatgccttctcgcctctcactccgcagcacttgggcggtagccagtggccatgtgctcccaaccccaatgcgcagggcagtctgtgttcgtgggcacttcggctggaccccatcacgatggacgatgttccctttggactctagggcttcgaaggtgtgcaccttggttctcccttctcctccccagagttccccggatgccataactggctggcgtcccagaacacagttgttcacccccacntggtggcgttgcttggccggtgtttcaccggggtgggg

SEQ ID NO: 15371 - DNA, 3542 bp, Homo sapiens
tgtgcccccgggaaggttttctgggcagtatcagatcgaccaggcgtcgatctgcccgtattgaggcgctgggagcggcggggcgacaggaaagcgatggtgaaagcggggccgtgaggggggcggagccgggagccggacccgcagtagcggcagcagcggcgccgcctcccagagttcagacccaggaagcggccgggagggcaggagcgaatcgggccgccgccgccatggagctgagagtcgggaacaggtaccggctgggccggaagatcggcagcggctccttcggagacatctatctcgtgggcatccccaccatcagatggtgcggggcagagggggactacaacgtcatggtgatggagctgctggggccaagcctggaggacctcttcaacttctgctccaggaaattcagcctcaaaaccgtcctgctgcttgctgaccaaatgatcagtcgcatcgaatacattcattcaaagaacttcatccaccgggatgtgaagccagacaacttcctcatgggcctggggaagaagggcaacctggtgtacatcatcgacttcgggctggccaagaagtaccgggatgcacgcacccaccagcacatcccctatcgtgagaacaagaacctcacggggacggcgcggtacgcctccatcaacacgcaccttggaattgaacaatcccgaagagatgacttggagtctctgggctacgtgctaatgtacttcaacctgggctctctcccctggcaggggctgaaggctgccaccaagagacagaaatacgaaaggattagcgagaagaaaatgtccacccccatcgaagtgttgtgtaaaggctacccttccgaatttgccacatacctgaatttctgccgttccttgcgttttgacgacaagcctgactactcgtacctgcggcagcttttccggaatctgttccatcgccagggcttctcctatgactacgtgttcgactggaacatgctcaaatttggtgccagccgggccgccgatgacgccgagcgggagcgcagggaccgagaggagcggctgagacactcgcggaacccggctacccgcggcctcccttccacagcctccggccgcctgcgggggacgcaggaagtggctccccccacacccctcacccctacctcacacacggctaacacctccccccggcccgtctccggcatggagagagagcggaaagtgagtatgcggctgcaccgcggggcccccgtcaacatctcctcgtccgacctcacaggccgacaagatacctctcgcatgtccacctcacagaatagcattcctttcgaacaccacggcaagtagctgctcgtctcccatcggaaggcagcactggattcctggtcgggtggcttccagtggtcttcagtctgtcgtgcaccgatgagaactctccttattgctgtgaagggcagacaatgcatggctgatctactctgttaccaatggctttactagtgacacgtcccccggtctaggatcgaaatgttaacaccgggagctctccaggccactcacccagcgacgctcgtgggggaaacatactaaacggacagactccaagagctgccaccgctggggctgcactgcggccccccacgtgaactcggttgtaacggggctgggaagaaaagcagagagagaattgcagagaatcagactccttttccagggcctcagctccctccagtggtggccgccctgtactccctgacgattccactgtaactaccaatcttctacttggttaagacagttttgtatcattttgctaaaaattattggcttaaatctgtgtaaagaaaatctgtctttttattgtttcttgtctgtttttgcagtcttacaaaaaaaatgttgactaaggaattctgagacaggctggcttggagttagtgtatgaggtggagtcgggcagggagaaggtgcaggtggatctcaagggtgtgtgctgtgtttgttttgcagtgttttattgtccgctttggagaggagatttctcatcaaaagtccgtggtgtgtgtgtgtgcccgtgtgtggtgggacctcttcaacctgattttggcgtctcaccctccctcctcccgtaattgacatgcctgctgtcaggaactcttgaggccctcggagagcagttagggaccgcaggctgccgcggggcaggggtgcagtgggtgttaccaggcaaagcactgcgcgcttcttccccaggaggtgggcaggcagctgagagcttggaagcagaggctttgagaccctagcaggacaattgggagtcccaggattcaaggtggaagatgcgtttctggtcccttgggagaggactgtgaaccgagaggtggttactgtagtgtttgttgccttgctgcctttgcactcagtccattttctcagcactcaatgctcctgtgcggattggcactccgtctgtatgaatgcctgtgcttaaaaccaggagcggggctgtccttgccacgtgccaagactagctcagaaaagccggcaggccagaaggacccaccctgaggtgccaaggagcaggtgactctcccaaccggacccagaaccttcacggccagaaagtagagtctgcgctgtgaccttctgttgggcgcgtgtctgttggtcagaagtgaagcagcgtgcgtggggccgagtcccaccagaaggcaggtggcctccgtgagctggtgctgccccaggctccatgctgctgtgccctgaggttcccaggatgccttctcgcctctcactccgcagcacttgggcggtagccagtggccatgtgctcccaaccccaatgcgcagggcagtctgtgttcgtgggcacttcggctggaccccatcacgatggacgatgttccctttggactctagggcttcgaaggtgtgcaccttggttctcccttctcctccccagagttccccggatgccataactggctggcgtcccagaacacagttgttcacccccccaccagctggctggccgtctgcctgagcccatggatgctttctcaatcctaggctggttactgtgtaagcgttttggagtacggggccttgagcgggtgggagctgtgtgttgaagtacagagggaggttggggtgggtcagagccgagttaagagattttctttgttgctggaccccttcttgaaggtagacgtcccccacccggagagacgtcgcgctgtggcctgaagtggcgcaagcttgctttgtaaatatctgtggtcccgatgtagtgcccagaacgtttgtgcgaggcagctctgcgcccgggttccagcccgagcctcgccgggtcgcgtcttcggagtgcttgtgacagtccttgcccagtatctagtccccgtcgccccgtgcaggagacgtaggtaggacgtcgtgtcagctgtgcactgacggccagtctccgagctgtgcgtttgtatcgccactgtatttgtgtactttaacaatcgtgtaaataataaattcataatgacttctacc

SEQ ID NO: 15372 - DNA, 3159 bp, Homo sapiens
aaatagctagtacgagactgggtgtgaatcggcgaggcagctcaaaccgtcctgctgcttgctgaccaaatgatcagtcgcatcgaatacattcattcaaagaacttcatccaccgggatgtgaagccagacaacttcctcatgggcctggggaagaagggcaacctggtgtacatcatcgacttcgggctggccaagaagtaccgggatgcacgcacccaccagcacatcccctatcgtgagaacaagaacctcacggggacggcgcggtacgcctccatcaacacgcaccttggaattgaacaatcccgaagagatgacttggagtctctgggctacgtgctaatgtacttcaacctgggctctctcccctggcaggggctgaaggctgccaccaagagacagaaatacgaaaggattagcgagaagaaaatgtccacccccatcgaagtgttgtgtaaaggctacccttccgaatttgccacatacctgaatttctgccgttccttgcgttttgacgacaagcctgactactcgtacctgcggcagcttttccggaatctgttccatcgccagggcttctcctatgactacgtgttcgactggaacatgctcaaatttggtgccagccgggccgccgatgacgccgagcgggagcgcagggaccgagaggagcggctgagacactcgcggaacccggctacccgcggcctcccttccacagcctccggccgcctgcgggggacgcaggaagtggctccccccacacccctcacccctacctcacacacggctaacacctccccccggcccgtctccggcatggagagagagcggaaagtgagtatgcggctgcaccgcggggcccccgtcaacatctcctcgtccgacctcacaggccgacaagatacctctcgcatgtccacctcacagaatagcattcctttcgaacaccacggcaagtagctgctcgtctcccatcggaaggcagcactggattcctggtcgggtggcttccagtggtcttcagtctgtcgtgcaccgatgagaactctccttattgctgtgaagggcagacaatgcatggctgatctactctgttaccaatggctttactagtgacacgtcccccggtctaggatcgaaatgttaacaccgggagctctccaggccactcacccagcgacgctcgtgggggaaacatactaaacggacagactccaagagctgccaccgctggggctgcactgcggccccccacgtgaactcggttgtaacggggctgggaagaaaagcagagagagaattgcagagaatcagactccttttccagggcctcagctccctccagtggtggccgccctgtactccctgacgattccactgtaactaccaatcttctacttggttaagacagttttgtatcattttgctaaaaattattggcttaaatctgtgtaaagaaaatctgtctttttattgtttcttgtctgtttttgcagtcttacaaaaaaaatgttgactaaggaattctgagacaggctggcttggagttagtgtatgaggtggagtcgggcagggagaaggtgcaggtggatctcaagggtgtgtgctgtgtttgttttgcagtgttttattgtccgctttggagaggagatttctcatcaaaagtccgtggtgtgtgtgtgtgcccgtgtgtggtgggacctcttcaacctgattttggcgtctcaccctccctcctcccgtaattgacatgcctgctgtcaggaactcttgaggccctcggagagcagttagggaccgcaggctgccgcggggcaggggtgcagtgggtgttaccaggcaaagcactgcgcgcttcttccccaggaggtgggcaggcagctgagagcttggaagcagaggctttgagaccctagcaggacaattgggagtcccaggattcaaggtggaagatgcgtttctggtcccttgggagaggactgtgaaccgagaggtggttactgtagtgtttgttgccttgctgcctttgcactcagtccattttctcagcactcaatgctcctgtgcggattggcactccgtctgtatgaatgcctgtgcttaaaaccaggagcggggctgtccttgccacgtgccaagactagctcagaaaagccggcaggccagaaggacccaccctgaggtgccaaggagcaggtgactctcccaaccggacccagaaccttcacggccagaaagtagagtctgcgctgtgaccttctgttgggcgcgtgtctgttggtcagaagtgaagcagcgtgcgtggggccgagtcccaccagaaggcaggtggcctccgtgagctggtgctgccccaggctccatgctgctgtgccctgaggttcccaggatgccttctcgcctctcactccgcagcacttgggcggtagccagtggccatgtgctcccaaccccaatgcgcagggcagtctgtgttcgtgggcacttcggctggaccccatcacgatggacgatgttccctttggactctagggcttcgaaggtgtgcaccttggttctcccttctcctccccagagttccccggatgccataactggctggcgtcccagaacacagttgttcacccccccaccagctggctggccgtctgcctgagcccatggatgctttctcaatcctaggctggttactgtgtaagcgttttggagtacggggccttgagcgggtgggagctgtgtgttgaagtacagagggaggttggggtgggtcagagccgagttaagagattttctttgttgctggaccccttcttgaaggtagacgtcccccacccggagagacgtcgcgctgtggcctgaagtggcgcaagcttgctttgtaaatatctgtggtcccgatgtagtgcccagaacgtttgtgcgaggcagctctgcgcccgggttccagcccgagcctcgccgggtcgcgtcttcggagtgcttgtgacagtccttgcccagtatctagtccccgtcgccccgtgcaggagacgtaggtaggacgtcgtgtcagctgtgcactgacggccagtctccgagctgtgcgtttgtatcgccactgtatttgtgtactttaacaatcgtgtaaataataaattcataatgacttctacc

SEQ ID NO: 15373 - DNA, 3200 bp, Homo sapiens
gctgtggctgaggggcaggaacaatgcagccactgatgtagtgtcccacagttgagcggtccctccctgagactgccctggggtgccatctcgcgcccttgctctgctcacagatcagtcgcatcgaatacattcattcaaagaacttcatccaccgggatgtgaagccagacaacttcctcatgggcctggggaagaagggcaacctggtgtacatcatcgacttcgggctggccaagaagtaccgggatgcacgcacccaccagcacatcccctatcgtgagaacaagaacctcacggggacggcgcggtacgcctccatcaacacgcaccttggaattgaacaatcccgaagagatgacttggagtctctgggctacgtgctaatgtacttcaacctgggctctctcccctggcaggggctgaaggctgccaccaagagacagaaatacgaaaggattagcgagaagaaaatgtccacccccatcgaagtgttgtgtaaaggctacccttccgaatttgccacatacctgaatttctgccgttccttgcgttttgacgacaagcctgactactcgtacctgcggcagcttttccggaatctgttccatcgccagggcttctcctatgactacgtgttcgactggaacatgctcaaatttggtgccagccgggccgccgatgacgccgagcgggagcgcagggaccgagaggagcggctgagacactcgcggaacccggctacccgcggcctcccttccacagcctccggccgcctgcgggggacgcaggaagtggctccccccacacccctcacccctacctcacacacggctaacacctccccccggcccgtctccggcatggagagagagcggaaagtgagtatgcggctgcaccgcggggcccccgtcaacatctcctcgtccgacctcacaggccgacaagatacctctcgcatgtccacctcacagaatagcattcctttcgaacaccacggcaagtagctgctcgtctcccatcggaaggcagcactggattcctggtcgggtggcttccagtggtcttcagtctgtcgtgcaccgatgagaactctccttattgctgtgaagggcagacaatgcatggctgatctactctgttaccaatggctttactagtgacacgtcccccggtctaggatcgaaatgttaacaccgggagctctccaggccactcacccagcgacgctcgtgggggaaacatactaaacggacagactccaagagctgccaccgctggggctgcactgcggccccccacgtgaactcggttgtaacggggctgggaagaaaagcagagagagaattgcagagaatcagactccttttccagggcctcagctccctccagtggtggccgccctgtactccctgacgattccactgtaactaccaatcttctacttggttaagacagttttgtatcattttgctaaaaattattggcttaaatctgtgtaaagaaaatctgtctttttattgtttcttgtctgtttttgcagtcttacaaaaaaaatgttgactaaggaattctgagacaggctggcttggagttagtgtatgaggtggagtcgggcagggagaaggtgcaggtggatctcaagggtgtgtgctgtgtttgttttgcagtgttttattgtccgctttggagaggagatttctcatcaaaagtccgtggtgtgtgtgtgtgcccgtgtgtggtgggacctcttcaacctgattttggcgtctcaccctccctcctcccgtaattgacatgcctgctgtcaggaactcttgaggccctcggagagcagttagggaccgcaggctgccgcggggcaggggtgcagtgggtgttaccaggcaaagcactgcgcgcttcttccccaggaggtgggcaggcagctgagagcttggaagcagaggctttgagaccctagcaggacaattgggagtcccaggattcaaggtggaagatgcgtttctggtcccttgggagaggactgtgaaccgagaggtggttactgtagtgtttgttgccttgctgcctttgcactcagtccattttctcagcactcaatgctcctgtgcggattggcactccgtctgtatgaatgcctgtgcttaaaaccaggagcggggctgtccttgccacgtgccaagactagctcagaaaagccggcaggccagaaggacccaccctgaggtgccaaggagcaggtgactctcccaaccggacccagaaccttcacggccagaaagtagagtctgcgctgtgaccttctgttgggcgcgtgtctgttggtcagaagtgaagcagcgtgcgtggggccgagtcccaccagaaggcaggtggcctccgtgagctggtgctgccccaggctccatgctgctgtgccctgaggttcccaggatgccttctcgcctctcactccgcagcacttgggcggtagccagtggccatgtgctcccaaccccaatgcgcagggcagtctgtgttcgtgggcacttcggctggaccccatcacgatggacgatgttccctttggactctagggcttcgaaggtgtgcaccttggttctcccttctcctccccagagttccccggatgccataactggctggcgtcccagaacacagttgttcacccccccaccagctggctggccgtctgcctgagcccatggatgctttctcaatcctaggctggttactgtgtaagcgttttggagtacggggccttgagcgggtgggagctgtgtgttgaagtacagagggaggttggggtgggtcagagccgagttaagagattttctttgttgctggaccccttcttgaaggtagacgtcccccacccggagagacgtcgcgctgtggcctgaagtggcgcaagcttgctttgtaaatatctgtggtcccgatgtagtgcccagaacgtttgtgcgaggcagctctgcgcccgggttccagcccgagcctcgccgggtcgcgtcttcggagtgcttgtgacagtccttgcccagtatctagtccccgtcgccccgtgcaggagacgtaggtaggacgtcgtgtcagctgtgcactgacggccagtctccgagctgtgcgtttgtatcgccactgtatttgtgtactttaacaatcgtgtaaataataaattcataatgacttctacc

SEQ ID NO: 15374 - DNA, 3537 bp, Homo sapiens
gcgcgatggcggcggctcctttaggcagctgaaaggggatttaggcccggaagatccgagtccatccgcggcggggagagggcaagcgggaccggtaggggccggagcagcggcggcggcgctcggactgtcccatccgccccgtattgaggcgctgggagcggcggggcgacaggaaagcgatggtgaaagcggggccgtgaggggggcggagccgggagccggacccgcagtagcggcagcagcggcgccgcctcccagagttcagacccaggaagcggccgggagggcaggagcgaatcgggccgccgccgccatggagctgagagtcgggaacaggtaccggctgggccggaagatcggcagcggctccttcggagacatctatctcggtacggacattgctgcaggagaagaggttgccatcaagcttgaatgtgtcaaaaccaaacaccctcagctccacattgagagcaaaatctacaagatgatgcagggaggagtgggcatccccaccatcagatggtgcggggcagagggggactacaacgtcatggtgatggagctgtggccaagaagtaccgggatgcacgcacccaccagcacatcccctatcgtgagaacaagaacctcacggggacggcgcggtacgcctccatcaacacgcaccttggaattgaacaatcccgaagagatgacttggagtctctgggctacgtgctaatgtacttcaacctgggctctctcccctggcaggggctgaaggctgccaccaagagacagaaatacgaaaggattagcgagaagaaaatgtccacccccatcgaagtgttgtgtaaaggctacccttccgaatttgccacatacctgaatttctgccgttccttgcgttttgacgacaagcctgactactcgtacctgcggcagcttttccggaatctgttccatcgccagggcttctcctatgactacgtgttcgactggaacatgctcaaatttggtgccagccgggccgccgatgacgccgagcgggagcgcagggaccgagaggagcggctgagacactcgcggaacccggctacccgcggcctcccttccacagcctccggccgcctgcgggggacgcaggaagtggctccccccacacccctcacccctacctcacacacggctaacacctccccccggcccgtctccggcatggagagagagcggaaagtgagtatgcggctgcaccgcggggcccccgtcaacatctcctcgtccgacctcacaggccgacaagatacctctcgcatgtccacctcacagaatagcattcctttcgaacaccacggcaagtagctgctcgtctcccatcggaaggcagcactggattcctggtcgggtggcttccagtggtcttcagtctgtcgtgcaccgatgagaactctccttattgctgtgaagggcagacaatgcatggctgatctactctgttaccaatggctttactagtgacacgtcccccggtctaggatcgaaatgttaacaccgggagctctccaggccactcacccagcgacgctcgtgggggaaacatactaaacggacagactccaagagctgccaccgctggggctgcactgcggccccccacgtgaactcggttgtaacggggctgggaagaaaagcagagagagaattgcagagaatcagactccttttccagggcctcagctccctccagtggtggccgccctgtactccctgacgattccactgtaactaccaatcttctacttggttaagacagttttgtatcattttgctaaaaattattggcttaaatctgtgtaaagaaaatctgtctttttattgtttcttgtctgtttttgcagtcttacaaaaaaaatgttgactaaggaattctgagacaggctggcttggagttagtgtatgaggtggagtcgggcagggagaaggtgcaggtggatctcaagggtgtgtgctgtgtttgttttgcagtgttttattgtccgctttggagaggagatttctcatcaaaagtccgtggtgtgtgtgtgtgcccgtgtgtggtgggacctcttcaacctgattttggcgtctcaccctccctcctcccgtaattgacatgcctgctgtcaggaactcttgaggccctcggagagcagttagggaccgcaggctgccgcggggcaggggtgcagtgggtgttaccaggcaaagcactgcgcgcttcttccccaggaggtgggcaggcagctgagagcttggaagcagaggctttgagaccctagcaggacaattgggagtcccaggattcaaggtggaagatgcgtttctggtcccttgggagaggactgtgaaccgagaggtggttactgtagtgtttgttgccttgctgcctttgcactcagtccattttctcagcactcaatgctcctgtgcggattggcactccgtctgtatgaatgcctgtgcttaaaaccaggagcggggctgtccttgccacgtgccaagactagctcagaaaagccggcaggccagaaggacccaccctgaggtgccaaggagcaggtgactctcccaaccggacccagaaccttcacggccagaaagtagagtctgcgctgtgaccttctgttgggcgcgtgtctgttggtcagaagtgaagcagcgtgcgtggggccgagtcccaccagaaggcaggtggcctccgtgagctggtgctgccccaggctccatgctgctgtgccctgaggttcccaggatgccttctcgcctctcactccgcagcacttgggcggtagccagtggccatgtgctcccaaccccaatgcgcagggcagtctgtgttcgtgggcacttcggctggaccccatcacgatggacgatgttccctttggactctagggcttcgaaggtgtgcaccttggttctcccttctcctccccagagttccccggatgccataactggctggcgtcccagaacacagttgttcacccccccaccagctggctggccgtctgcctgagcccatggatgctttctcaatcctaggctggttactgtgtaagcgttttggagtacggggccttgagcgggtgggagctgtgtgttgaagtacagagggaggttggggtgggtcagagccgagttaagagattttctttgttgctggaccccttcttgaaggtagacgtcccccacccggagagacgtcgcgctgtggcctgaagtggcgcaagcttgctttgtaaatatctgtggtcccgatgtagtgcccagaacgtttgtgcgaggcagctctgcgcccgggttccagcccgagcctcgccgggtcgcgtcttcggagtgcttgtgacagtccttgcccagtatctagtccccgtcgccccgtgcaggagacgtaggtaggacgtcgtgtcagctgtgcactgacggccagtctccgagctgtgcgtttgtatcgccactgtatttgtgtactttaacaatcgtgtaaataataaattcataatgacttctacc

SEQ ID NO: 15375 - DNA, 3065 bp, Homo sapiens
ctgtgtcaacggaggacgtgggccggggagggcccaaggctgcagcacatctacacgaggggtcagcagaacgtgcagcggtttccacactcgttgcagacaacaaaggtggtcatgggctcatcagagctgcgggtctgcacctgtgtgtaggtgcagttctttttcctgcacttgccgcaggtgaacgggtctgtctgcgtgccgccagtgcgggccatctggtgctctcggatggcctccttggtcatggccttacggatctccttcagacttgaagtctgaaggagacggctgccaccaagagacagaaatacgaaaggattagcgagaagaaaatgtccacccccatcgaagtgttgtgtaaaggctacccttccgaatttgccacatacctgaatttctgccgttccttgcgttttgacgacaagcctgactactcgtacctgcggcagcttttccggaatctgttccatcgccagggcttctcctatgactacgtgttcgactggaacatgctcaaatttggtgccagccgggccgccgatgacgccgagcgggagcgcagggaccgagaggagcggctgagacactcgcggaacccggctacccgcggcctcccttccacagcctccggccgcctgcgggggacgcaggaagtggctccccccacacccctcacccctacctcacacacggctaacacctccccccggcccgtctccggcatggagagagagcggaaagtgagtatgcggctgcaccgcggggcccccgtcaacatctcctcgtccgacctcacaggccgacaagatacctctcgcatgtccacctcacagaatagcattcctttcgaacaccacggcaagtagctgctcgtctcccatcggaaggcagcactggattcctggtcgggtggcttccagtggtcttcagtctgtcgtgcaccgatgagaactctccttattgctgtgaagggcagacaatgcatggctgatctactctgttaccaatggctttactagtgacacgtcccccggtctaggatcgaaatgttaacaccgggagctctccaggccactcacccagcgacgctcgtgggggaaacatactaaacggacagactccaagagctgccaccgctggggctgcactgcggccccccacgtgaactcggttgtaacggggctgggaagaaaagcagagagagaattgcagagaatcagactccttttccagggcctcagctccctccagtggtggccgccctgtactccctgacgattccactgtaactaccaatcttctacttggttaagacagttttgtatcattttgctaaaaattattggcttaaatctgtgtaaagaaaatctgtctttttattgtttcttgtctgtttttgcagtcttacaaaaaaaatgttgactaaggaattctgagacaggctggcttggagttagtgtatgaggtggagtcgggcagggagaaggtgcaggtggatctcaagggtgtgtgctgtgtttgttttgcagtgttttattgtccgctttggagaggagatttctcatcaaaagtccgtggtgtgtgtgtgtgcccgtgtgtggtgggacctcttcaacctgattttggcgtctcaccctccctcctcccgtaattgacatgcctgctgtcaggaactcttgaggccctcggagagcagttagggaccgcaggctgccgcggggcaggggtgcagtgggtgttaccaggcaaagcactgcgcgcttcttccccaggaggtgggcaggcagctgagagcttggaagcagaggctttgagaccctagcaggacaattgggagtcccaggattcaaggtggaagatgcgtttctggtcccttgggagaggactgtgaaccgagaggtggttactgtagtgtttgttgccttgctgcctttgcactcagtccattttctcagcactcaatgctcctgtgcggattggcactccgtctgtatgaatgcctgtgcttaaaaccaggagcggggctgtccttgccacgtgccaagactagctcagaaaagccggcaggccagaaggacccaccctgaggtgccaaggagcaggtgactctcccaaccggacccagaaccttcacggccagaaagtagagtctgcgctgtgaccttctgttgggcgcgtgtctgttggtcagaagtgaagcagcgtgcgtggggccgagtcccaccagaaggcaggtggcctccgtgagctggtgctgccccaggctccatgctgctgtgccctgaggttcccaggatgccttctcgcctctcactccgcagcacttgggcggtagccagtggccatgtgctcccaaccccaatgcgcagggcagtctgtgttcgtgggcacttcggctggaccccatcacgatggacgatgttccctttggactctagggcttcgaaggtgtgcaccttggttctcccttctcctccccagagttccccggatgccataactggctggcgtcccagaacacagttgttcacccccccaccagctggctggccgtctgcctgagcccatggatgctttctcaatcctaggctggttactgtgtaagcgttttggagtacggggccttgagcgggtgggagctgtgtgttgaagtacagagggaggttggggtgggtcagagccgagttaagagattttctttgttgctggaccccttcttgaaggtagacgtcccccacccggagagacgtcgcgctgtggcctgaagtggcgcaagcttgctttgtaaatatctgtggtcccgatgtagtgcccagaacgtttgtgcgaggcagctctgcgcccgggttccagcccgagcctcgccgggtcgcgtcttcggagtgcttgtgacagtccttgcccagtatctagtccccgtcgccccgtgcaggagacgtaggtaggacgtcgtgtcagctgtgcactgacggccagtctccgagctgtgcgtttgtatcgccactgtatttgtgtactttaacaatcgtgtaaataataaattcataatgacttctacc

SEQ ID NO: 15376 - DNA, 2526 bp, Homo sapiens
  misc_feature (56)..(56): n is a, c, g, or t
  misc_feature (58)..(58): n is a, c, g, or t
ctggaacatgctcaaatttggtgccagccgggccgccgatgacgccgagcgggagnanacaacccggctacccgcggcctcccttccacagcctccggccgcctgcgggggacgcaggaagtggctccccccacacccctcacccctacctcacacacggctaacacctccccccggcccgtctccggcatggagagagagcggaaagtgagtatgcggctgcaccgcggggcccccgtcaacatctcctcgtccgacctcacaggccgacaagatacctctcgcatgtccacctcacagaatagcattcctttcgaacaccacggcaagtagctgctcgtctcccatcggaaggcagcactggattcctggtcgggtggcttccagtggtcttcagtctgtcgtgcaccgatgagaactctccttattgctgtgaagggcagacaatgcatggctgatctactctgttaccaatggctttactagtgacacgtcccccggtctaggatcgaaatgttaacaccgggagctctccaggccactcacccagcgacgctcgtgggggaaacatactaaacggacagactccaagagctgccaccgctggggctgcactgcggccccccacgtgaactcggttgtaacggggctgggaagaaaagcagagagagaattgcagagaatcagactccttttccagggcctcagctccctccagtggtggccgccctgtactccctgacgattccactgtaactaccaatcttctacttggttaagacagttttgtatcattttgctaaaaattattggcttaaatctgtgtaaagaaaatctgtctttttattgtttcttgtctgtttttgcagtcttacaaaaaaaatgttgactaaggaattctgagacaggctggcttggagttagtgtatgaggtggagtcgggcagggagaaggtgcaggtggatctcaagggtgtgtgctgtgtttgttttgcagtgttttattgtccgctttggagaggagatttctcatcaaaagtccgtggtgtgtgtgtgtgcccgtgtgtggtgggacctcttcaacctgattttggcgtctcaccctccctcctcccgtaattgacatgcctgctgtcaggaactcttgaggccctcggagagcagttagggaccgcaggctgccgcggggcaggggtgcagtgggtgttaccaggcaaagcactgcgcgcttcttccccaggaggtgggcaggcagctgagagcttggaagcagaggctttgagaccctagcaggacaattgggagtcccaggattcaaggtggaagatgcgtttctggtcccttgggagaggactgtgaaccgagaggtggttactgtagtgtttgttgccttgctgcctttgcactcagtccattttctcagcactcaatgctcctgtgcggattggcactccgtctgtatgaatgcctgtgcttaaaaccaggagcggggctgtccttgccacgtgccaagactagctcagaaaagccggcaggccagaaggacccaccctgaggtgccaaggagcaggtgactctcccaaccggacccagaaccttcacggccagaaagtagagtctgcgctgtgaccttctgttgggcgcgtgtctgttggtcagaagtgaagcagcgtgcgtggggccgagtcccaccagaaggcaggtggcctccgtgagctggtgctgccccaggctccatgctgctgtgccctgaggttcccaggatgccttctcgcctctcactccgcagcacttgggcggtagccagtggccatgtgctcccaaccccaatgcgcagggcagtctgtgttcgtgggcacttcggctggaccccatcacgatggacgatgttccctttggactctagggcttcgaaggtgtgcaccttggttctcccttctcctccccagagttccccggatgccataactggctggcgtcccagaacacagttgttcacccccccaccagctggctggccgtctgcctgagcccatggatgctttctcaatcctaggctggttactgtgtaagcgttttggagtacggggccttgagcgggtgggagctgtgtgttgaagtacagagggaggttggggtgggtcagagccgagttaagagattttctttgttgctggaccccttcttgaaggtagacgtcccccacccggagagacgtcgcgctgtggcctgaagtggcgcaagcttgctttgtaaatatctgtggtcccgatgtagtgcccagaacgtttgtgcgaggcagctctgcgcccgggttccagcccgagcctcgccgggtcgcgtcttcggagtgcttgtgacagtccttgcccagtatctagtccccgtcgccccgtgcaggagacgtaggtaggacgtcgtgtcagctgtgcactgacggccagtctccgagctgtgcgtttgtatcgccactgtatttgtgtactttaacaatcgtgtaaataataaattcataatgacttctacc

SEQ ID NO: 15377 - DNA, 2451 bp, Homo sapiens
cggatctgagtgttggtggccatcaggccagccaggtcctgactgtccaggcagcccagggtcctctctggccacagcctctcatagaaagccccgagtgagaggcagcagacgggggcggcccactccgtttctctccctgtcctcagctaacacctccccccggcccgtctccggcatggagagagagcggaaagtgagtatgcggctgcaccgcggggcccccgtcaacatctcctcgtccgacctcacaggccgacaagatacctctcgcatgtccacctcacagattcctggtcgggtggcttccagtggtcttcagtctgtcgtgcaccgatgagaactctccttattgctgtgaagggcagacaatgcatggctgatctactctgttaccaatggctttactagtgacacgtcccccggtctaggatcgaaatgttaacaccgggagctctccaggccactcacccagcgacgctcgtgggggaaacatactaaacggacagactccaagagctgccaccgctggggctgcactgcggccccccacgtgaactcggttgtaacggggctgggaagaaaagcagagagagaattgcagagaatcagactccttttccagggcctcagctccctccagtggtggccgccctgtactccctgacgattccactgtaactaccaatcttctacttggttaagacagttttgtatcattttgctaaaaattattggcttaaatctgtgtaaagaaaatctgtctttttattgtttcttgtctgtttttgcagtcttacaaaaaaaatgttgactaaggaattctgagacaggctggcttggagttagtgtatgaggtggagtcgggcagggagaaggtgcaggtggatctcaagggtgtgtgctgtgtttgttttgcagtgttttattgtccgctttggagaggagatttctcatcaaaagtccgtggtgtgtgtgtgtgcccgtgtgtggtgggacctcttcaacctgattttggcgtctcaccctccctcctcccgtaattgacatgcctgctgtcaggaactcttgaggccctcggagagcagttagggaccgcaggctgccgcggggcaggggtgcagtgggtgttaccaggcaaagcactgcgcgcttcttccccaggaggtgggcaggcagctgagagcttggaagcagaggctttgagaccctagcaggacaattgggagtcccaggattcaaggtggaagatgcgtttctggtcccttgggagaggactgtgaaccgagaggtggttactgtagtgtttgttgccttgctgcctttgcactcagtccattttctcagcactcaatgctcctgtgcggattggcactccgtctgtatgaatgcctgtgcttaaaaccaggagcggggctgtccttgccacgtgccaagactagctcagaaaagccggcaggccagaaggacccaccctgaggtgccaaggagcaggtgactctcccaaccggacccagaaccttcacggccagaaagtagagtctgcgctgtgaccttctgttgggcgcgtgtctgttggtcagaagtgaagcagcgtgcgtggggccgagtcccaccagaaggcaggtggcctccgtgagctggtgctgccccaggctccatgctgctgtgccctgaggttcccaggatgccttctcgcctctcactccgcagcacttgggcggtagccagtggccatgtgctcccaaccccaatgcgcagggcagtctgtgttcgtgggcacttcggctggaccccatcacgatggacgatgttccctttggactctagggcttcgaaggtgtgcaccttggttctcccttctcctccccagagttccccggatgccataactggctggcgtcccagaacacagttgttcacccccccaccagctggctggccgtctgcctgagcccatggatgctttctcaatcctaggctggttactgtgtaagcgttttggagtacggggccttgagcgggtgggagctgtgtgttgaagtacagagggaggttggggtgggtcagagccgagttaagagattttctttgttgctggaccccttcttgaaggtagacgtcccccacccggagagacgtcgcgctgtggcctgaagtggcgcaagcttgctttgtaaatatctgtggtcccgatgtagtgcccagaacgtttgtgcgaggcagctctgcgcccgggttccagcccgagcctcgccgggtcgcgtcttcggagtgcttgtgacagtccttgcccagtatctagtccccgtcgccccgtgcaggagacgtaggtaggacgtcgtgtcagctgtgcactgacggccagtctccgagctgtgcgtttgtatcgccactgtatttgtgtactttaacaatcgtgtaaataataaattcataatgacttctacc

SEQ ID NO: 15378 - DNA, 2777 bp, Homo sapiens
ttttcgggctgttggtgttcggccagggctctttggctacagtagcctgggccctaaaggcatctagttgctgagtctgtttggggtttttacttggtgagaagaaggccttgtcattccaacagtcgatgactcgctttgatcaactcctgcccaggactaggcctgagccctgtcgtcgtaccggcgaggatgtgcgtctcccctgccttcaggctgtgccctgagacccagttgtggggctgcccagcacctgccatcctgctgggatcaggttttcttagtgcttgagaagactcaggagggcctgtcccatgccattgttggccttaagagcaagtgattccagaagaggagtgggcaccactctcatccagaggcccgtcctgagaggcaagtgaggctgtgctctgtgcctgggctcccccaggtggcacctgtcggtctgtggacctggttgaggcaaggatgcccatctggacatggagccgacacaggtagtcagggggccagcgggacgcttaccaacagctgtcttttccccacctcagaatagcattcctttcgaacaccacggcaagtagctgctcgtctcccatcggaaggcagcactggattcctggtcgggtggcttccagtggtcttcagtctgtcgtgcaccgatgagaactctccttattgctgtgaagggcagacaatgcatggctgatctactctgttaccaatggctttactagtgacacgtcccccggtctaggatcgaaatgttaacaccgggagctctccaggccactcacccagcgacgctcgtgggggaaacatactaaacggacagactccaagagctgccaccgctggggctgcactgcggccccccacgtgaactcggttgtaacggggctgggaagaaaagcagagagagaattgcagagaatcagactccttttccagggcctcagctccctccagtggtggccgccctgtactccctgacgattccactgtaactaccaatcttctacttggttaagacagttttgtatcattttgctaaaaattattggcttaaatctgtgtaaagaaaatctgtctttttattgtttcttgtctgtttttgcagtcttacaaaaaaaatgttgactaaggaattctgagacaggctggcttggagttagtgtatgaggtggagtcgggcagggagaaggtgcaggtggatctcaagggtgtgtgctgtgtttgttttgcagtgttttattgtccgctttggagaggagatttctcatcaaaagtccgtggtgtgtgtgtgtgcccgtgtgtggtgggacctcttcaacctgattttggcgtctcaccctccctcctcccgtaattgacatgcctgctgtcaggaactcttgaggccctcggagagcagttagggaccgcaggctgccgcggggcaggggtgcagtgggtgttaccaggcaaagcactgcgcgcttcttccccaggaggtgggcaggcagctgagagcttggaagcagaggctttgagaccctagcaggacaattgggagtcccaggattcaaggtggaagatgcgtttctggtcccttgggagaggactgtgaaccgagaggtggttactgtagtgtttgttgccttgctgcctttgcactcagtccattttctcagcactcaatgctcctgtgcggattggcactccgtctgtatgaatgcctgtgcttaaaaccaggagcggggctgtccttgccacgtgccaagactagctcagaaaagccggcaggccagaaggacccaccctgaggtgccaaggagcaggtgactctcccaaccggacccagaaccttcacggccagaaagtagagtctgcgctgtgaccttctgttgggcgcgtgtctgttggtcagaagtgaagcagcgtgcgtggggccgagtcccaccagaaggcaggtggcctccgtgagctggtgctgccccaggctccatgctgctgtgccctgaggttcccaggatgccttctcgcctctcactccgcagcacttgggcggtagccagtggccatgtgctcccaaccccaatgcgcagggcagtctgtgttcgtgggcacttcggctggaccccatcacgatggacgatgttccctttggactctagggcttcgaaggtgtgcaccttggttctcccttctcctccccagagttccccggatgccataactggctggcgtcccagaacacagttgttcacccccccaccagctggctggccgtctgcctgagcccatggatgctttctcaatcctaggctggttactgtgtaagcgttttggagtacggggccttgagcgggtgggagctgtgtgttgaagtacagagggaggttggggtgggtcagagccgagttaagagattttctttgttgctggaccccttcttgaaggtagacgtcccccacccggagagacgtcgcgctgtggcctgaagtggcgcaagcttgctttgtaaatatctgtggtcccgatgtagtgcccagaacgtttgtgcgaggcagctctgcgcccgggttccagcccgagcctcgccgggtcgcgtcttcggagtgcttgtgacagtccttgcccagtatctagtccccgtcgccccgtgcaggagacgtaggtaggacgtcgtgtcagctgtgcactgacggccagtctccgagctgtgcgtttgtatcgccactgtatttgtgtactttaacaatcgtgtaaataataaattcataatgacttctacc

SEQ ID NO: 15379 - DNA, 2619 bp, Homo sapiens
ttttcgggctgttggtgttcggccagggctctttggctacagtagcctgggccctaaaggcatctagttgctgagtctgtttggggtttttacttggtgagaagaaggccttgtcattccaacagtcgatgactcgctttgatcaactcctgcccaggactaggcctgagccctgtcgtcgtaccggcgaggatgtgcgtctcccctgccttcaggctgtgccctgagacccagttgtggggctgcccagcacctgccatcctgctgggatcaggttttcttagtgcttgagaagactcaggagggcctgtcccatgccattgttggccttaagagcaagtgattccagaagaggagtgggcaccactctcatccagaggcccgtcctgagagaatagcattcctttcgaacaccacggcaagtagctgctcgtctcccatcggaaggcagcactggattcctggtcgggtggcttccagtggtcttcagtctgtcgtgcaccgatgagaactctccttattgctgtgaagggcagacaatgcatggctgatctactctgttaccaatggctttactagtgacacgtcccccggtctaggatcgaaatgttaacaccgggagctctccaggccactcacccagcgacgctcgtgggggaaacatactaaacggacagactccaagagctgccaccgctggggctgcactgcggccccccacgtgaactcggttgtaacggggctgggaagaaaagcagagagagaattgcagagaatcagactccttttccagggcctcagctccctccagtggtggccgccctgtactccctgacgattccactgtaactaccaatcttctacttggttaagacagttttgtatcattttgctaaaaattattggcttaaatctgtgtaaagaaaatctgtctttttattgtttcttgtctgtttttgcagtcttacaaaaaaaatgttgactaaggaattctgagacaggctggcttggagttagtgtatgaggtggagtcgggcagggagaaggtgcaggtggatctcaagggtgtgtgctgtgtttgttttgcagtgttttattgtccgctttggagaggagatttctcatcaaaagtccgtggtgtgtgtgtgtgcccgtgtgtggtgggacctcttcaacctgattttggcgtctcaccctccctcctcccgtaattgacatgcctgctgtcaggaactcttgaggccctcggagagcagttagggaccgcaggctgccgcggggcaggggtgcagtgggtgttaccaggcaaagcactgcgcgcttcttccccaggaggtgggcaggcagctgagagcttggaagcagaggctttgagaccctagcaggacaattgggagtcccaggattcaaggtggaagatgcgtttctggtcccttgggagaggactgtgaaccgagaggtggttactgtagtgtttgttgccttgctgcctttgcactcagtccattttctcagcactcaatgctcctgtgcggattggcactccgtctgtatgaatgcctgtgcttaaaaccaggagcggggctgtccttgccacgtgccaagactagctcagaaaagccggcaggccagaaggacccaccctgaggtgccaaggagcaggtgactctcccaaccggacccagaaccttcacggccagaaagtagagtctgcgctgtgaccttctgttgggcgcgtgtctgttggtcagaagtgaagcagcgtgcgtggggccgagtcccaccagaaggcaggtggcctccgtgagctggtgctgccccaggctccatgctgctgtgccctgaggttcccaggatgccttctcgcctctcactccgcagcacttgggcggtagccagtggccatgtgctcccaaccccaatgcgcagggcagtctgtgttcgtgggcacttcggctggaccccatcacgatggacgatgttccctttggactctagggcttcgaaggtgtgcaccttggttctcccttctcctccccagagttccccggatgccataactggctggcgtcccagaacacagttgttcacccccccaccagctggctggccgtctgcctgagcccatggatgctttctcaatcctaggctggttactgtgtaagcgttttggagtacggggccttgagcgggtgggagctgtgtgttgaagtacagagggaggttggggtgggtcagagccgagttaagagattttctttgttgctggaccccttcttgaaggtagacgtcccccacccggagagacgtcgcgctgtggcctgaagtggcgcaagcttgctttgtaaatatctgtggtcccgatgtagtgcccagaacgtttgtgcgaggcagctctgcgcccgggttccagcccgagcctcgccgggtcgcgtcttcggagtgcttgtgacagtccttgcccagtatctagtccccgtcgccccgtgcaggagacgtaggtaggacgtcgtgtcagctgtgcactgacggccagtctccgagctgtgcgtttgtatcgccactgtatttgtgtactttaacaatcgtgtaaataataaattcataatgacttctacc

SEQ ID NO: 15380 - DNA, 2345 bp, Homo sapiens
acccgtctccgctccactcggatccttcgaccctgccgagcccggtccgcgggcaccttgcttgcatgcctcttcctccttcccgtcttcctgtcactcgttctgctgagcacgtgtcccagccacagaggcccctgtgcgtggcgggggacgaggcgtctagactggggctaggcggtggcgattcctggtcgggtggcttccagtggtcttcagtctgtcgtgcaccgatgagaactctccttattgctgtgaagggcagacaatgcatggctgatctactctgttaccaatggctttactagtgacacgtcccccggtctaggatcgaaatgttaacaccgggagctctccaggccactcacccagcgacgctcgtgggggaaacatactaaacggacagactccaagagctgccaccgctggggctgcactgcggccccccacgtgaactcggttgtaacggggctgggaagaaaagcagagagagaattgcagagaatcagactccttttccagggcctcagctccctccagtggtggccgccctgtactccctgacgattccactgtaactaccaatcttctacttggttaagacagttttgtatcattttgctaaaaattattggcttaaatctgtgtaaagaaaatctgtctttttattgtttcttgtctgtttttgcagtcttacaaaaaaaatgttgactaaggaattctgagacaggctggcttggagttagtgtatgaggtggagtcgggcagggagaaggtgcaggtggatctcaagggtgtgtgctgtgtttgttttgcagtgttttattgtccgctttggagaggagatttctcatcaaaagtccgtggtgtgtgtgtgtgcccgtgtgtggtgggacctcttcaacctgattttggcgtctcaccctccctcctcccgtaattgacatgcctgctgtcaggaactcttgaggccctcggagagcagttagggaccgcaggctgccgcggggcaggggtgcagtgggtgttaccaggcaaagcactgcgcgcttcttccccaggaggtgggcaggcagctgagagcttggaagcagaggctttgagaccctagcaggacaattgggagtcccaggattcaaggtggaagatgcgtttctggtcccttgggagaggactgtgaaccgagaggtggttactgtagtgtttgttgccttgctgcctttgcactcagtccattttctcagcactcaatgctcctgtgcggattggcactccgtctgtatgaatgcctgtgcttaaaaccaggagcggggctgtccttgccacgtgccaagactagctcagaaaagccggcaggccagaaggacccaccctgaggtgccaaggagcaggtgactctcccaaccggacccagaaccttcacggccagaaagtagagtctgcgctgtgaccttctgttgggcgcgtgtctgttggtcagaagtgaagcagcgtgcgtggggccgagtcccaccagaaggcaggtggcctccgtgagctggtgctgccccaggctccatgctgctgtgccctgaggttcccaggatgccttctcgcctctcactccgcagcacttgggcggtagccagtggccatgtgctcccaaccccaatgcgcagggcagtctgtgttcgtgggcacttcggctggaccccatcacgatggacgatgttccctttggactctagggcttcgaaggtgtgcaccttggttctcccttctcctccccagagttccccggatgccataactggctggcgtcccagaacacagttgttcacccccccaccagctggctggccgtctgcctgagcccatggatgctttctcaatcctaggctggttactgtgtaagcgttttggagtacggggccttgagcgggtgggagctgtgtgttgaagtacagagggaggttggggtgggtcagagccgagttaagagattttctttgttgctggaccccttcttgaaggtagacgtcccccacccggagagacgtcgcgctgtggcctgaagtggcgcaagcttgctttgtaaatatctgtggtcccgatgtagtgcccagaacgtttgtgcgaggcagctctgcgcccgggttccagcccgagcctcgccgggtcgcgtcttcggagtgcttgtgacagtccttgcccagtatctagtccccgtcgccccgtgcaggagacgtaggtaggacgtcgtgtcagctgtgcactgacggccagtctccgagctgtgcgtttgtatcgccactgtatttgtgtactttaacaatcgtgtaaataataaattcataatgacttctacc

SEQ ID NO: 15381 - DNA, 2009 bp, Homo sapiens
gcgcgatggcggcggctcctttaggcagctgaaaggggatttaggcccggaagatccgagtccatccgcggcggggagagggcaagcgggaccggtaggggccggagcagcggcggcggcgctcggactgtcccatccgccccgtattgaggcgctgggagcggcggggcgacaggaaagcgatggtgaaagcggggccgtgaggggggcggagccgggagccggacccgcagtagcggcagcagcggcgccgcctcccagagttcagacccaggaagcggccgggagggcaggagcgaatcgggccgccgccgccatggagctgagagtcgggaacaggtaccggctgggccggaagatcggcagcggctccttcggagacatctatctcggtacggacattgctgcaggagaagaggttgccatcaagcttgaatgtgtcaaaaccaaacaccctcagctccacattgagagcaaaatctacaagatgatgcagggaggagtgggcatccccaccatcagatggtgcggggcagagggggactacaacgtcatggtgatggagctgctggggccaagcctggaggacctcttcaacttctgctccaggaaattcagcctcaaaaccgtcctgctgcttgctgaccaaatgatcagtcgcatcgaatacattcattcaaagaacttcatccaccgggatgtgaagccagacaacttcctcatgggcctggggaagaagggcaacctggtgtacatcatcgacttcgggctggccaagaagtaccgggatgcacgcacccaccagcacatcccctatcgtgagaacaagaacctcacggggacggcgcggtacgcctccatcaacacgcaccttggaattgaacaatcccgaagagatgacttggagtctctgggctacgtgctaatgtacttcaacctgggctctctcccctggcaggggctgaaggctgccaccaagagacagaaatacgaaaggattagcgagaagaaaatgtccacccccatcgaagtgttgtgtaaaggctacccttccgaatttgccacatacctgaatttctgccgttccttgcgttttgacgacaagcctgactactcgtacctgcggcagcttttccggaatctgttccatcgccagggcttctcctatgactacgtgttcgactggaacatgctcaaatttggtgccagccgggccgccgatgacgccgagcgggagcgcagggaccgagaggagcggctgagacactcgcggaacccggctacccgcggcctcccttccacagcctccggccgcctgcgggggacgcaggaagtggctccccccacacccctcacccctacctcacacacggctaacacctccccccggcccgtctccggcatggagagagagcggaaagtgagtatgcggctgcaccgcggggcccccgtcaacatctcctcgtccgacctcacaggccgacaagatacctctcgcatgtccacctcacagattcctggtcgggtggcttccagtggtcttcagtctgtcgtgcaccgatgagaactctccttattgctgtgaagggcagacaatgcatggctgatctactctgttaccaatggctttactagtgacacgtcccccggtctaggatcgaaatgttaacaccgggagctctccaggccactcacccagcgacgctcgtgggggaaacatactaaacggacagactccaagagctgccaccgctggggctgcactgcggccccccacgtgaactcggttgtaacgggttccagcccgagcctcgccgggtcgcgtcttcggagtgcttgtgacagtccttgcccagtatctagtccccgtcgccccgtgcaggagacgtaggtaggacgtcgtgtcagctgtgcactgacggccagtctccgagctgtgcgtttgtatcgccactgtatttgtgtactttaacaatcgtgtaaataataaattcataatgacttctacc

SEQ ID NO: 15382 - DNA, 1770 bp, Homo sapiens
gcacacagcttcccaggcctcagcagccgatcagggccgtcagggccttgcctcaaagcatcactccccgaaagaaaatctgtctttttattgtttcttgtctgtttttgcagtcttacaaaaaaaatgttgactaaggaattctgagacaggctggcttggagttagtgtatgaggtggagtcgggcagggagaaggtgcaggtggatctcaagggtgtgtgctgtgtttgttttgcagtgttttattgtccgctttggagaggagatttctcatcaaaagtccgtggtgtgtgtgtgtgcccgtgtgtggtgggacctcttcaacctgattttggcgtctcaccctccctcctcccgtaattgacatgcctgctgtcaggaactcttgaggccctcggagagcagttagggaccgcaggctgccgcggggcaggggtgcagtgggtgttaccaggcaaagcactgcgcgcttcttccccaggaggtgggcaggcagctgagagcttggaagcagaggctttgagaccctagcaggacaattgggagtcccaggattcaaggtggaagatgcgtttctggtcccttgggagaggactgtgaaccgagaggtggttactgtagtgtttgttgccttgctgcctttgcactcagtccattttctcagcactcaatgctcctgtgcggattggcactccgtctgtatgaatgcctgtgcttaaaaccaggagcggggctgtccttgccacgtgccaagactagctcagaaaagccggcaggccagaaggacccaccctgaggtgccaaggagcaggtgactctcccaaccggacccagaaccttcacggccagaaagtagagtctgcgctgtgaccttctgttgggcgcgtgtctgttggtcagaagtgaagcagcgtgcgtggggccgagtcccaccagaaggcaggtggcctccgtgagctggtgctgccccaggctccatgctgctgtgccctgaggttcccaggatgccttctcgcctctcactccgcagcacttgggcggtagccagtggccatgtgctcccaaccccaatgcgcagggcagtctgtgttcgtgggcacttcggctggaccccatcacgatggacgatgttccctttggactctagggcttcgaaggtgtgcaccttggttctcccttctcctccccagagttccccggatgccataactggctggcgtcccagaacacagttgttcacccccccaccagctggctggccgtctgcctgagcccatggatgctttctcaatcctaggctggttactgtgtaagcgttttggagtacggggccttgagcgggtgggagctgtgtgttgaagtacagagggaggttggggtgggtcagagccgagttaagagattttctttgttgctggaccccttcttgaaggtagacgtcccccacccggagagacgtcgcgctgtggcctgaagtggcgcaagcttgctttgtaaatatctgtggtcccgatgtagtgcccagaacgtttgtgcgaggcagctctgcgcccgggttccagcccgagcctcgccgggtcgcgtcttcggagtgcttgtgacagtccttgcccagtatctagtccccgtcgccccgtgcaggagacgtaggtaggacgtcgtgtcagctgtgcactgacggccagtctccgagctgtgcgtttgtatcgccactgtatttgtgtactttaacaatcgtgtaaataataaattcataatgacttctacc

SEQ ID NO: 15383 - DNA, 1327 bp, Homo sapiens
gcgcgatggcggcggctcctttaggcagctgaaaggggatttaggcccggaagatccgagtccatccgcggcggggagagggcaagcgggaccggtaggggccggagcagcggcggcggcgctcggactgtcccatccgccccgtattgaggcgctgggagcggcggggcgacaggaaagcgatggtgaaagcggggccgtgaggggggcggagccgggagccggacccgcagtagcggcagcagcggcgccgcctcccagagttcagacccaggaagcggccgggagggcaggagcgaatcgggccgccgccgccatggagctgagagtcgggaacaggtaccggctgggccggaagatcggcagcggctccttcggagacatctatctcggtacggacattgctgcaggagaagaggttgccatcaagcttgaatgtgtcaaaaccaaacaccctcagctccacattgagagcaaaatctacaagatgatgcagggaggagtgggcatccccaccatcagatggtgcggggcagagggggactacaacgtcatggtgatggagctgctggggccaagcctggaggacctcttcaacttctgctccaggaaattcagcctcaaaaccgtcctgctgcttgctgaccaaatgatcagtcgcatcgaatacattcattcaaagaacttcatccaccgggatgtgaagccagacaacttcctcatgggcctggggaagaagggcaacctggtgtacatcatcgacttcgggctggccaagaagtaccgggatgcacgcacccaccagcacatcccctatcgtgagaacaagaacctcacggggacggcgcggtacgcctccatcaacacgcaccttggaattgaacaatcccgaagagatgacttggagtctctgggctacgtgctaatgtacttcaacctgggctctctcccctggcaggggctgaaggctgccaccaagagacagaaatacgaaaggattagcgagaagaaaatgtccacccccatcgaagtgttgtgtaaaggctacccttccgaatttgccacatacctgaatttctgccgttccttgcgttttgacgacaagcctgactactcgtacctgcggcagcttttccggaatctgttccatcgccagggcttctcctatgactacgtgttcgactggaacatgctcaaatttggtgccagccgggccgccgatgacgccgagcgggagcgcagggaccgagaggagcggctgagacactcgcggcacttcgtgggcagcgctgcccacgaagtggtggcgcccggagaagcggccagc

SEQ ID NO: 15384 - DNA, 856 bp, Homo sapiens
gctgaggttcccagtgatggagcctggggcacagcagcatggagcctggtgctgccccaggctccatgctgctgtgccctgaggttcccaggatgccttctcgcctctcactccgcagcacttgggcggtagccagtggccatgtgctcccaaccccaatgcgcagggcagtctgtgttcgtgggcacttcggctggaccccatcacgatggacgatgttccctttggactctagggcttcgaaggtgtgcaccttggttctcccttctcctccccagagttccccggatgccataactggctggcgtcccagaacacagttgttcacccccccaccagctggctggccgtctgcctgagcccatggatgctttctcaatcctaggctggttactgtgtaagcgttttggagtacggggccttgagcgggtgggagctgtgtgttgaagtacagagggaggttggggtgggtcagagccgagttaagagattttctttgttgctggaccccttcttgaaggtagacgtcccccacccggagagacgtcgcgctgtggcctgaagtggcgcaagcttgctttgtaaatatctgtggtcccgatgtagtgcccagaacgtttgtgcgaggcagctctgcgcccgggttccagcccgagcctcgccgggtcgcgtcttcggagtgcttgtgacagtccttgcccagtatctagtccccgtcgccccgtgcaggagacgtaggtaggacgtcgtgtcagctgtgcactgacggccagtctccgagctgtgcgtttgtatcgccactgtatttgtgtactttaacaatcgtgtaaataataaattcataatgacttctacc

SEQ ID NO: 15385 - DNA, 967 bp, Homo sapiens
gcgcgatggcggcggctcctttaggcagctgaaaggggatttaggcccggaagatccgagtccatccgcggcggggagagggcaagcgggaccggtaggggccggagcagcggcggcggcgctcggactgtcccatccgccccgtattgaggcgctgggagcggcggggcgacaggaaagcgatggtgaaagcggggccgtgaggggggcggagccgggagccggacccgcagtagcggcagcagcggcgccgcctcccagagttcagacccaggaagcggccgggagggcaggagcgaatcgggccgccgccgccatggagctgagagtcgggaacaggtaccggctgggccggaagatcggcagcggctccttcggagacatctatctcggtacggacattgctgcaggagaagaggttgccatcaagcttgaatgtgtcaaaaccaaacaccctcagctccacattgagagcaaaatctacaagatgatgcagggaggagtgggcatccccaccatcagatggtgcggggcagagggggactacaacgtcatggtgatggagctgctggggccaagcctggaggacctcttcaacttctgctccaggaaattcagcctcaaaaccgtcctgctgcttgctgaccaaatggtaaggactgtttcctgacagttggcacacacttgctgtctgatagaatcagccactcgcttgtgctgttcttgccattattatggccattaattcacagaggaaatggaaatttgctgagcctcagccttgaggctgcagtggctcagctcactggcttctcgaggctccggtggctccgctcactggcttctcgaggctccggcggcccagctcactggcttctcgaggctccggcggcccagctcactggcttctcgaggctccggcggcccagctcactggcttctggaggctccgacggctcagctcact

SEQ ID NO: 15386 - DNA, 1004 bp, Homo sapiens
gcgcgatggcggcggctcctttaggcagctgaaaggggatttaggcccggaagatccgagtccatccgcggcggggagagggcaagcgggaccggtaggggccggagcagcggcggcggcgctcggactgtcccatccgccccgtattgaggcgctgggagcggcggggcgacaggaaagcgatggtgaaagcggggccgtgaggggggcggagccgggagccggacccgcagtagcggcagcagcggcgccgcctcccagagttcagacccaggaagcggccgggagggcaggagcgaatcgggccgccgccgccatggagctgagagtcgggaacaggtaccggctgggccggaagatcggcagcggctccttcggagacatctatctcggtacggacattgctgcaggagaagaggttgccatcaagcttgaatgtgtcaaaaccaaacaccctcagctccacattgagagcaaaatctacaagatgatgcagggaggaggtaggtctttaccagtcacagagcaacaccagggttctgtttgacaagggagaacagcaactcagcattgctggttaaaataaacccaaaactggttctgggcaaaagggagggaagtgttctccacaccctgacaaagcagtcacagcttccttcagagagtcttgggtccagagaccctccctcaacacaaagaaacatcttatgggccgggcatggctgctcacgcctggaatcccagcactttgggaggccaagatgggtggatcatttgaggtcagtagtttgagactagcctggccaacgtagtgaaaccccgtctctactaaaaatacaaaaattagccaagtgtgatggcgtgcacctgtaatcccagctgtttgggaggctgaggcaggagaatcgcctgagtctgggaggcagaggttgcggtgagccgagatcacgccactgcactccagcctgggcgacagagtgagaccctgtcccccccaaaaaaaa

SEQ ID NO: 15387 - DNA, 324 bp, Homo sapiens
gtgcgtcccctccctgcccagcaccgtcactgtggtatctgcctggccggctcccccagccccatgctgaccttctcctgtgctttggctccgacagattcctggtcgggtggcttccagtggtcttcagtctgtcgtgcaccgatgagaactctccttattgctgtgaagggcagacaatgcatggctgatctactctgttaccaatggctttactagtgacacgtcccccggtctaggatcgaaatgttaacaccgggagctctccaggccactcacccagcgacgctcgtgggggaaacatactaaacggacagactccaa

SEQ ID NO: 15388 - DNA, 386 bp, Homo sapiens
  misc_feature (56)..(56): n is a, c, g, or t
  misc_feature (58)..(58): n is a, c, g, or t
ctggaacatgctcaaatttggtgccagccgggccgccgatgacgccgagcgggagnanacaacccggctacccgcggcctcccttccacagcctccggccgcctgcgggggacgcaggaagtggctccccccacacccctcacccctacctcacacacggctaacacctccccccggcccgtctccggcatggagagagagcggaaagtgagtatgcggctgcaccgcggggcccccgtcaacatctcctcgtccgacctcacaggccgacaagatacctctcgcatgtccacctcacagaatagcattcctttcgaacaccacggcaagtagctgctcgtctcccatcggaaggcagcactgggaagggaggcaggagcacccgt

SEQ ID NO: 15389 - DNA, 3530 bp, Homo sapiens
gaattcccctgtgttagacggtacaggtggaagaagactgctgtgtgcaggaggaatttgcagtgagacttcaaggaagagaataagctcgccacataaagaggaaacaaagagcaacccaggacccaggaagcggccgggagggcaggagcgaatcgggccgccgccgccatggagctgagagtcgggaacaggtaccggctgggccggaagatcggcagcggctccttcggagacatctatctcggtacggacattgctgcaggagaagaggttgccatcaagcttgaatgtgtcaaaaccaaacaccctcagctccacattgagagcaaaatctacaagatgatgcagggaggagtgggcatccccaccatcagatggtgcggggcagagggggactacaacgtcatggtgatggagctgctggggccaagcctggaggacctcttcaacttctgctccaggaaattcagcctcaaaaccgtcctgctgcttgctgaccaaatgatcagtcgcatcgaatacattcattcaaagaacttcatccaccgggatgtgaagccagacaacttcctcatgggcctggggaagaagggcaacctggtgtacatcatcgacttcgggctggccaagaagtaccgggatgcacgcacccaccagcacatcccctatcgtgagaacaagaacctcacggggacggcgcggtacgcctccatcaacacgcaccttggaattgaacaatcccgaagagatgacttggagtctctgggctacgtgctaatgtacttcaacctgggctctctcccctggcaggggctgaaggctgccaccaagagacagaaatacgaaaggattagcgagaagaaaatgtccacccccatcgaagtgttgtgtaaaggctacccttccgaatttgccacatacctgaatttctgccgttccttgcgttttgacgacaagcctgactactcgtacctgcggcagcttttccggaatctgttccatcgccagggcttctcctatgactacgtgttcgactggaacatgctcaaatttggtgccagccgggccgccgatgacgccgagcgggagcgcagggaccgagaggagcggctgagacactcgcggaacccggctacccgcggcctcccttccacagcctccggccgcctgcgggggacgcaggaagtggctccccccacacccctcacccctacctcacacacggctaacacctccccccggcccgtctccggcatggagagagagcggaaagtgagtatgcggctgcaccgcggggcccccgtcaacatctcctcgtccgacctcacaggccgacaagatacctctcgcatgtccacctcacagattcctggtcgggtggcttccagtggtcttcagtctgtcgtgcaccgatgagaactctccttattgctgtgaagggcagacaatgcatggctgatctactctgttaccaatggctttactagtgacacgtcccccggtctaggatcgaaatgttaacaccgggagctctccaggccactcacccagcgacgctcgtgggggaaacatactaaacggacagactccaagagctgccaccgctggggctgcactgcggccccccacgtgaactcggttgtaacggggctgggaagaaaagcagagagagaattgcagagaatcagactccttttccagggcctcagctccctccagtggtggccgccctgtactccctgacgattccactgtaactaccaatcttctacttggttaagacagttttgtatcattttgctaaaaattattggcttaaatctgtgtaaagaaaatctgtctttttattgtttcttgtctgtttttgcagtcttacaaaaaaaatgttgactaaggaattctgagacaggctggcttggagttagtgtatgaggtggagtcgggcagggagaaggtgcaggtggatctcaagggtgtgtgctgtgtttgttttgcagtgttttattgtccgctttggagaggagatttctcatcaaaagtccgtggtgtgtgtgtgtgcccgtgtgtggtgggacctcttcaacctgattttggcgtctcaccctccctcctcccgtaattgacatgcctgctgtcaggaactcttgaggccctcggagagcagttagggaccgcaggctgccgcggggcaggggtgcagtgggtgttaccaggcaaagcactgcgcgcttcttccccaggaggtgggcaggcagctgagagcttggaagcagaggctttgagaccctagcaggacaattgggagtcccaggattcaaggtggaagatgcgtttctggtcccttgggagaggactgtgaaccgagaggtggttactgtagtgtttgttgccttgctgcctttgcactcagtccattttctcagcactcaatgctcctgtgcggattggcactccgtctgtatgaatgcctgtgcttaaaaccaggagcggggctgtccttgccacgtgccaagactagctcagaaaagccggcaggccagaaggacccaccctgaggtgccaaggagcaggtgactctcccaaccggacccagaaccttcacggccagaaagtagagtctgcgctgtgaccttctgttgggcgcgtgtctgttggtcagaagtgaagcagcgtgcgtggggccgagtcccaccagaaggcaggtggcctccgtgagctggtgctgccccaggctccatgctgctgtgccctgaggttcccaggatgccttctcgcctctcactccgcagcacttgggcggtagccagtggccatgtgctcccaaccccaatgcgcagggcagtctgtgttcgtgggcacttcggctggaccccatcacgatggacgatgttccctttggactctagggcttcgaaggtgtgcaccttggttctcccttctcctccccagagttccccggatgccataactggctggcgtcccagaacacagttgttcacccccccaccagctggctggccgtctgcctgagcccatggatgctttctcaatcctaggctggttactgtgtaagcgttttggagtacggggccttgagcgggtgggagctgtgtgttgaagtacagagggaggttggggtgggtcagagccgagttaagagattttctttgttgctggaccccttcttgaaggtagacgtcccccacccggagagacgtcgcgctgtggcctgaagtggcgcaagcttgctttgtaaatatctgtggtcccgatgtagtgcccagaacgtttgtgcgaggcagctctgcgcccgggttccagcccgagcctcgccgggtcgcgtcttcggagtgcttgtgacagtccttgcccagtatctagtccccgtcgccccgtgcaggagacgtaggtaggacgtcgtgtcagctgtgcactgacggccagtctccgagctgtgcgtttgtatcgccactgtatttgtgtactttaacaatcgtgtaaataataaattcataatgacttctacc

SEQ ID NO: 15390 - DNA, 3653 bp, Homo sapiens
tgtgcccccgggaaggttttctgggcagtatcagatcgaccaggcgtcgatctgcccgtattgaggcgctgggagcggcggggcgacaggaaagcgatggtgaaagcggggccgtgaggggggcggagccgggagccggacccgcagtagcggcagcagcggcgccgcctcccagagttcagacccaggaagcggccgggagggcaggagcgaatcgggccgccgccgccatggagctgagagtcgggaacaggtaccggctgggccggaagatcggcagcggctccttcggagacatctatctcggtacggacattgctgcaggagaagaggttgccatcaagcttgaatgtgtcaaaaccaaacaccctcagctccacattgagagcaaaatctacaagatgatgcagggaggagtgggcatccccaccatcagatggtgcggggcagagggggactacaacgtcatggtgatggagctgctggggccaagcctggaggacctcttcaacttctgctccaggaaattcagcctcaaaaccgtcctgctgcttgctgaccaaatgatcagtcgcatcgaatacattcattcaaagaacttcatccaccgggatgtgaagccagacaacttcctcatgggcctggggaagaagggcaacctggtgtacatcatcgacttcgggctggccaagaagtaccgggatgcacgcacccaccagcacatcccctatcgtgagaacaagaacctcacggggacggcgcggtacgcctccatcaacacgcaccttggaattgaacaatcccgaagagatgacttggagtctctgggctacgtgctaatgtacttcaacctgggctctctcccctggcaggggctgaaggctgccaccaagagacagaaatacgaaaggattagcgagaagaaaatgtccacccccatcgaagtgttgtgtaaaggctacccttccgaatttgccacatacctgaatttctgccgttccttgcgttttgacgacaagcctgactactcgtacctgcggcagcttttccggaatctgttccatcgccagggcttctcctatgactacgtgttcgactggaacatgctcaaatttggtgccagccgggccgccgatgacgccgagcgggagcgcagggaccgagaggagcggctgagacactcgcggaacccggctacccgcggcctcccttccacagcctccggccgcctgcgggggacgcaggaagtggctccccccacacccctcacccctacctcacacacggctaacacctccccccggcccgtctccggcatggagagagagcggaaagtgagtatgcggctgcaccgcggggcccccgtcaacatctcctcgtccgacctcacaggccgacaagatacctctcgcatgtccacctcacagaatagcattcctttcgaacaccacggcaagtagctgctcgtctcccatcggaaggcagcactggattcctggtcgggtggcttccagtggtcttcagtctgtcgtgcaccgatgagaactctccttattgctgtgaagggcagacaatgcatggctgatctactctgttaccaatggctttactagtgacacgtcccccggtctaggatcgaaatgttaacaccgggagctctccaggccactcacccagcgacgctcgtgggggaaacatactaaacggacagactccaagagctgccaccgctggggctgcactgcggccccccacgtgaactcggttgtaacggggctgggaagaaaagcagagagagaattgcagagaatcagactccttttccagggcctcagctccctccagtggtggccgccctgtactccctgacgattccactgtaactaccaatcttctacttggttaagacagttttgtatcattttgctaaaaattattggcttaaatctgtgtaaagaaaatctgtctttttattgtttcttgtctgtttttgcagtcttacaaaaaaaatgttgactaaggaattctgagacaggctggcttggagttagtgtatgaggtggagtcgggcagggagaaggtgcaggtggatctcaagggtgtgtgctgtgtttgttttgcagtgttttattgtccgctttggagaggagatttctcatcaaaagtccgtggtgtgtgtgtgtgcccgtgtgtggtgggacctcttcaacctgattttggcgtctcaccctccctcctcccgtaattgacatgcctgctgtcaggaactcttgaggccctcggagagcagttagggaccgcaggctgccgcggggcaggggtgcagtgggtgttaccaggcaaagcactgcgcgcttcttccccaggaggtgggcaggcagctgagagcttggaagcagaggctttgagaccctagcaggacaattgggagtcccaggattcaaggtggaagatgcgtttctggtcccttgggagaggactgtgaaccgagaggtggttactgtagtgtttgttgccttgctgcctttgcactcagtccattttctcagcactcaatgctcctgtgcggattggcactccgtctgtatgaatgcctgtgcttaaaaccaggagcggggctgtccttgccacgtgccaagactagctcagaaaagccggcaggccagaaggacccaccctgaggtgccaaggagcaggtgactctcccaaccggacccagaaccttcacggccagaaagtagagtctgcgctgtgaccttctgttgggcgcgtgtctgttggtcagaagtgaagcagcgtgcgtggggccgagtcccaccagaaggcaggtggcctccgtgagctggtgctgccccaggctccatgctgctgtgccctgaggttcccaggatgccttctcgcctctcactccgcagcacttgggcggtagccagtggccatgtgctcccaaccccaatgcgcagggcagtctgtgttcgtgggcacttcggctggaccccatcacgatggacgatgttccctttggactctagggcttcgaaggtgtgcaccttggttctcccttctcctccccagagttccccggatgccataactggctggcgtcccagaacacagttgttcacccccccaccagctggctggccgtctgcctgagcccatggatgctttctcaatcctaggctggttactgtgtaagcgttttggagtacggggccttgagcgggtgggagctgtgtgttgaagtacagagggaggttggggtgggtcagagccgagttaagagattttctttgttgctggaccccttcttgaaggtagacgtcccccacccggagagacgtcgcgctgtggcctgaagtggcgcaagcttgctttgtaaatatctgtggtcccgatgtagtgcccagaacgtttgtgcgaggcagctctgcgcccgggttccagcccgagcctcgccgggtcgcgtcttcggagtgcttgtgacagtccttgcccagtatctagtccccgtcgccccgtgcaggagacgtaggtaggacgtcgtgtcagctgtgcactgacggccagtctccgagctgtgcgtttgtatcgccactgtatttgtgtactttaacaatcgtgtaaataataaattcataatgacttctacc

SEQ ID NO: 15391 - DNA, 3710 bp, Homo sapiens
ctctaccacaggctgtctggggcgggcaagtgcaggggccttgggcagggctgatgggaggatgcagaccagaagggccactgtggagagggagctgcagcacctgaagactggtgggcgggtgatggaagccacataaactttctgtgcagttcaaattcgtcctgttgtgaaaatgggaatatggataacttcccccagagatgtgtcagccgattagcccgccttactatgctaggaaggagaacacatccctcacttggtccttcatggaaaacacatagtgcttgttgtttctccagcatgttgggttatttggtggataccaggtaattcctgttgtggttttctttctttgccaaggtacggacattgctgcaggagaagaggttgccatcaagcttgaatgtgtcaaaaccaaacaccctcagctccacattgagagcaaaatctacaagatgatgcagggaggagtgggcatccccaccatcagatggtgcggggcagagggggactacaacgtcatggtgatggagctgctggggccaagcctggaggacctcttcaacttctgctccaggaaattcagcctcaaaaccgtcctgctgcttgctgaccaaatgatcagtcgcatcgaatacattcattcaaagaacttcatccaccgggatgtgaagccagacaacttcctcatgggcctggggaagaagggcaacctggtgtacatcatcgacttcgggctggccaagaagtaccgggatgcacgcacccaccagcacatcccctatcgtgagaacaagaacctcacggggacggcgcggtacgcctccatcaacacgcaccttggaattgaacaatcccgaagagatgacttggagtctctgggctacgtgctaatgtacttcaacctgggctctctcccctggcaggggctgaaggctgccaccaagagacagaaatacgaaaggattagcgagaagaaaatgtccacccccatcgaagtgttgtgtaaaggctacccttccgaatttgccacatacctgaatttctgccgttccttgcgttttgacgacaagcctgactactcgtacctgcggcagcttttccggaatctgttccatcgccagggcttctcctatgactacgtgttcgactggaacatgctcaaatttggtgccagccgggccgccgatgacgccgagcgggagcgcagggaccgagaggagcggctgagacactcgcggaacccggctacccgcggcctcccttccacagcctccggccgcctgcgggggacgcaggaagtggctccccccacacccctcacccctacctcacacacggctaacacctccccccggcccgtctccggcatggagagagagcggaaagtgagtatgcggctgcaccgcggggcccccgtcaacatctcctcgtccgacctcacaggccgacaagatacctctcgcatgtccacctcacagaatagcattcctttcgaacaccacggcaagtagctgctcgtctcccatcggaaggcagcactggattcctggtcgggtggcttccagtggtcttcagtctgtcgtgcaccgatgagaactctccttattgctgtgaagggcagacaatgcatggctgatctactctgttaccaatggctttactagtgacacgtcccccggtctaggatcgaaatgttaacaccgggagctctccaggccactcacccagcgacgctcgtgggggaaacatactaaacggacagactccaagagctgccaccgctggggctgcactgcggccccccacgtgaactcggttgtaacggggctgggaagaaaagcagagagagaattgcagagaatcagactccttttccagggcctcagctccctccagtggtggccgccctgtactccctgacgattccactgtaactaccaatcttctacttggttaagacagttttgtatcattttgctaaaaattattggcttaaatctgtgtaaagaaaatctgtctttttattgtttcttgtctgtttttgcagtcttacaaaaaaaatgttgactaaggaattctgagacaggctggcttggagttagtgtatgaggtggagtcgggcagggagaaggtgcaggtggatctcaagggtgtgtgctgtgtttgttttgcagtgttttattgtccgctttggagaggagatttctcatcaaaagtccgtggtgtgtgtgtgtgcccgtgtgtggtgggacctcttcaacctgattttggcgtctcaccctccctcctcccgtaattgacatgcctgctgtcaggaactcttgaggccctcggagagcagttagggaccgcaggctgccgcggggcaggggtgcagtgggtgttaccaggcaaagcactgcgcgcttcttccccaggaggtgggcaggcagctgagagcttggaagcagaggctttgagaccctagcaggacaattgggagtcccaggattcaaggtggaagatgcgtttctggtcccttgggagaggactgtgaaccgagaggtggttactgtagtgtttgttgccttgctgcctttgcactcagtccattttctcagcactcaatgctcctgtgcggattggcactccgtctgtatgaatgcctgtgcttaaaaccaggagcggggctgtccttgccacgtgccaagactagctcagaaaagccggcaggccagaaggacccaccctgaggtgccaaggagcaggtgactctcccaaccggacccagaaccttcacggccagaaagtagagtctgcgctgtgaccttctgttgggcgcgtgtctgttggtcagaagtgaagcagcgtgcgtggggccgagtcccaccagaaggcaggtggcctccgtgagctggtgctgccccaggctccatgctgctgtgccctgaggttcccaggatgccttctcgcctctcactccgcagcacttgggcggtagccagtggccatgtgctcccaaccccaatgcgcagggcagtctgtgttcgtgggcacttcggctggaccccatcacgatggacgatgttccctttggactctagggcttcgaaggtgtgcaccttggttctcccttctcctccccagagttccccggatgccataactggctggcgtcccagaacacagttgttcacccccccaccagctggctggccgtctgcctgagcccatggatgctttctcaatcctaggctggttactgtgtaagcgttttggagtacggggccttgagcgggtgggagctgtgtgttgaagtacagagggaggttggggtgggtcagagccgagttaagagattttctttgttgctggaccccttcttgaaggtagacgtcccccacccggagagacgtcgcgctgtggcctgaagtggcgcaagcttgctttgtaaatatctgtggtcccgatgtagtgcccagaacgtttgtgcgaggcagctctgcgcccgggttccagcccgagcctcgccgggtcgcgtcttcggagtgcttgtgacagtccttgcccagtatctagtccccgtcgccccgtgcaggagacgtaggtaggacgtcgtgtcagctgtgcactgacggccagtctccgagctgtgcgtttgtatcgccactgtatttgtgtactttaacaatcgtgtaaataataaattcataatgacttctacc

SEQ ID NO: 15392 - DNA, 3296 bp, Homo sapiens
gcatggtgatggagctgctggggccaagcctggacgttgtagtccccctctgccccgcactgggcatccccaccatcagatggtgcggggcagagggggactacaacgtcatggtgatggagctgctggggccaagcctggaggacctcttcaacttctgctccaggaaattcagcctcaaaaccgtcctgctgcttgctgaccaaatgatcagtcgcatcgaatacattcattcaaagaacttcatccaccgggatgtgaagccagacaacttcctcatgggcctggggaagaagggcaacctggtgtacatcatcgacttcgggctggccaagaagtaccgggatgcacgcacccaccagcacatcccctatcgtgagaacaagaacctcacggggacggcgcggtacgcctccatcaacacgcaccttggaattgaacaatcccgaagagatgacttggagtctctgggctacgtgctaatgtacttcaacctgggctctctcccctggcaggggctgaaggctgccaccaagagacagaaatacgaaaggattagcgagaagaaaatgtccacccccatcgaagtgttgtgtaaaggctacccttccgaatttgccacatacctgaatttctgccgttccttgcgttttgacgacaagcctgactactcgtacctgcggcagcttttccggaatctgttccatcgccagggcttctcctatgactacgtgttcgactggaacatgctcaaatttggtgccagccgggccgccgatgacgccgagcgggagcgcagggaccgagaggagcggctgagacactcgcggaacccggctacccgcggcctcccttccacagcctccggccgcctgcgggggacgcaggaagtggctccccccacacccctcacccctacctcacacacggctaacacctccccccggcccgtctccggcatggagagagagcggaaagtgagtatgcggctgcaccgcggggcccccgtcaacatctcctcgtccgacctcacaggccgacaagatacctctcgcatgtccacctcacagaatagcattcctttcgaacaccacggcaagtagctgctcgtctcccatcggaaggcagcactggattcctggtcgggtggcttccagtggtcttcagtctgtcgtgcaccgatgagaactctccttattgctgtgaagggcagacaatgcatggctgatctactctgttaccaatggctttactagtgacacgtcccccggtctaggatcgaaatgttaacaccgggagctctccaggccactcacccagcgacgctcgtgggggaaacatactaaacggacagactccaagagctgccaccgctggggctgcactgcggccccccacgtgaactcggttgtaacggggctgggaagaaaagcagagagagaattgcagagaatcagactccttttccagggcctcagctccctccagtggtggccgccctgtactccctgacgattccactgtaactaccaatcttctacttggttaagacagttttgtatcattttgctaaaaattattggcttaaatctgtgtaaagaaaatctgtctttttattgtttcttgtctgtttttgcagtcttacaaaaaaaatgttgactaaggaattctgagacaggctggcttggagttagtgtatgaggtggagtcgggcagggagaaggtgcaggtggatctcaagggtgtgtgctgtgtttgttttgcagtgttttattgtccgctttggagaggagatttctcatcaaaagtccgtggtgtgtgtgtgtgcccgtgtgtggtgggacctcttcaacctgattttggcgtctcaccctccctcctcccgtaattgacatgcctgctgtcaggaactcttgaggccctcggagagcagttagggaccgcaggctgccgcggggcaggggtgcagtgggtgttaccaggcaaagcactgcgcgcttcttccccaggaggtgggcaggcagctgagagcttggaagcagaggctttgagaccctagcaggacaattgggagtcccaggattcaaggtggaagatgcgtttctggtcccttgggagaggactgtgaaccgagaggtggttactgtagtgtttgttgccttgctgcctttgcactcagtccattttctcagcactcaatgctcctgtgcggattggcactccgtctgtatgaatgcctgtgcttaaaaccaggagcggggctgtccttgccacgtgccaagactagctcagaaaagccggcaggccagaaggacccaccctgaggtgccaaggagcaggtgactctcccaaccggacccagaaccttcacggccagaaagtagagtctgcgctgtgaccttctgttgggcgcgtgtctgttggtcagaagtgaagcagcgtgcgtggggccgagtcccaccagaaggcaggtggcctccgtgagctggtgctgccccaggctccatgctgctgtgccctgaggttcccaggatgccttctcgcctctcactccgcagcacttgggcggtagccagtggccatgtgctcccaaccccaatgcgcagggcagtctgtgttcgtgggcacttcggctggaccccatcacgatggacgatgttccctttggactctagggcttcgaaggtgtgcaccttggttctcccttctcctccccagagttccccggatgccataactggctggcgtcccagaacacagttgttcacccccccaccagctggctggccgtctgcctgagcccatggatgctttctcaatcctaggctggttactgtgtaagcgttttggagtacggggccttgagcgggtgggagctgtgtgttgaagtacagagggaggttggggtgggtcagagccgagttaagagattttctttgttgctggaccccttcttgaaggtagacgtcccccacccggagagacgtcgcgctgtggcctgaagtggcgcaagcttgctttgtaaatatctgtggtcccgatgtagtgcccagaacgtttgtgcgaggcagctctgcgcccgggttccagcccgagcctcgccgggtcgcgtcttcggagtgcttgtgacagtccttgcccagtatctagtccccgtcgccccgtgcaggagacgtaggtaggacgtcgtgtcagctgtgcactgacggccagtctccgagctgtgcgtttgtatcgccactgtatttgtgtactttaacaatcgtgtaaataataaattcataatgacttctacc

SEQ ID NO: 15393 - DNA, 3654 bp, Homo sapiens
gcgcgatggcggcggctcctttaggcagctgaaaggggatttaggcccggaagatccgagtccatccgcggcggggagagggcaagcgggaccggtaggggccggagcagcggcggcggcgctcggactgtcccatccgccccgtattgaggcgctgggagcggcggggcgacaggaaagcgatggtgaaagcggggccgtgaggggggcggagccgggagccggacccgcagtagcggcagcagcggcgccgcctcccagagttcagacccaggaagcggccgggagggcaggagcgaatcgggccgccgccgccatggagctgagagtcgggaacaggtaccggctgggccggaagatcggcagcggctccttcggagacatctatctcggtacggacattgctgcaggagaagaggttgccatcaagcttgaatgtgtcaaaaccaaacaccctcagctccacattgagagcaaaatctacaagatgatgcagggaggagtgggcatccccaccatcagatggtgcggggcagagggggactacaacgtcatggtgatggagctgctggggccaagcctggaggacctcttcaacttctgctccaggaaattcagcctcaaaaccgtcctgctgcttgctgaccaaatgatcagtcgcatcgaatacattcattcaaagaacttcatccaccgggatgtgaagccagacaacttcctcatgggcctggggaagaagggcaacctggtgtacatcatcgacttcgggctggccaagaagtaccgggatgcacgcacccaccagcacatcccctatcgtgagaacaagaacctcacggggacggcgcggtacgcctccatcaacacgcaccttggaattgggctgccaccaagagacagaaatacgaaaggattagcgagaagaaaatgtccacccccatcgaagtgttgtgtaaaggctacccttccgaatttgccacatacctgaatttctgccgttccttgcgttttgacgacaagcctgactactcgtacctgcggcagcttttccggaatctgttccatcgccagggcttctcctatgactacgtgttcgactggaacatgctcaaatttggtgccagccgggccgccgatgacgccgagcgggagcgcagggaccgagaggagcggctgagacactcgcggaacccggctacccgcggcctcccttccacagcctccggccgcctgcgggggacgcaggaagtggctccccccacacccctcacccctacctcacacacggctaacacctccccccggcccgtctccggcatggagagagagcggaaagtgagtatgcggctgcaccgcggggcccccgtcaacatctcctcgtccgacctcacaggccgacaagatacctctcgcatgtccacctcacagaatagcattcctttcgaacaccacggcaagtagctgctcgtctcccatcggaaggcagcactggattcctggtcgggtggcttccagtggtcttcagtctgtcgtgcaccgatgagaactctccttattgctgtgaagggcagacaatgcatggctgatctactctgttaccaatggctttactagtgacacgtcccccggtctaggatcgaaatgttaacaccgggagctctccaggccactcacccagcgacgctcgtgggggaaacatactaaacggacagactccaagagctgccaccgctggggctgcactgcggccccccacgtgaactcggttgtaacggggctgggaagaaaagcagagagagaattgcagagaatcagactccttttccagggcctcagctccctccagtggtggccgccctgtactccctgacgattccactgtaactaccaatcttctacttggttaagacagttttgtatcattttgctaaaaattattggcttaaatctgtgtaaagaaaatctgtctttttattgtttcttgtctgtttttgcagtcttacaaaaaaaatgttgactaaggaattctgagacaggctggcttggagttagtgtatgaggtggagtcgggcagggagaaggtgcaggtggatctcaagggtgtgtgctgtgtttgttttgcagtgttttattgtccgctttggagaggagatttctcatcaaaagtccgtggtgtgtgtgtgtgcccgtgtgtggtgggacctcttcaacctgattttggcgtctcaccctccctcctcccgtaattgacatgcctgctgtcaggaactcttgaggccctcggagagcagttagggaccgcaggctgccgcggggcaggggtgcagtgggtgttaccaggcaaagcactgcgcgcttcttccccaggaggtgggcaggcagctgagagcttggaagcagaggctttgagaccctagcaggacaattgggagtcccaggattcaaggtggaagatgcgtttctggtcccttgggagaggactgtgaaccgagaggtggttactgtagtgtttgttgccttgctgcctttgcactcagtccattttctcagcactcaatgctcctgtgcggattggcactccgtctgtatgaatgcctgtgcttaaaaccaggagcggggctgtccttgccacgtgccaagactagctcagaaaagccggcaggccagaaggacccaccctgaggtgccaaggagcaggtgactctcccaaccggacccagaaccttcacggccagaaagtagagtctgcgctgtgaccttctgttgggcgcgtgtctgttggtcagaagtgaagcagcgtgcgtggggccgagtcccaccagaaggcaggtggcctccgtgagctggtgctgccccaggctccatgctgctgtgccctgaggttcccaggatgccttctcgcctctcactccgcagcacttgggcggtagccagtggccatgtgctcccaaccccaatgcgcagggcagtctgtgttcgtgggcacttcggctggaccccatcacgatggacgatgttccctttggactctagggcttcgaaggtgtgcaccttggttctcccttctcctccccagagttccccggatgccataactggctggcgtcccagaacacagttgttcacccccccaccagctggctggccgtctgcctgagcccatggatgctttctcaatcctaggctggttactgtgtaagcgttttggagtacggggccttgagcgggtgggagctgtgtgttgaagtacagagggaggttggggtgggtcagagccgagttaagagattttctttgttgctggaccccttcttgaaggtagacgtcccccacccggagagacgtcgcgctgtggcctgaagtggcgcaagcttgctttgtaaatatctgtggtcccgatgtagtgcccagaacgtttgtgcgaggcagctctgcgcccgggttccagcccgagcctcgccgggtcgcgtcttcggagtgcttgtgacagtccttgcccagtatctagtccccgtcgccccgtgcaggagacgtaggtaggacgtcgtgtcagctgtgcactgacggccagtctccgagctgtgcgtttgtatcgccactgtatttgtgtactttaacaatcgtgtaaataataaattcataatgacttctacc

SEQ ID NO: 15394 - DNA, 3607 bp, Homo sapiens
gcgcgatggcggcggctcctttaggcagctgaaaggggatttaggcccggaagatccgagtccatccgcggcggggagagggcaagcgggaccggtaggggccggagcagcggcggcggcgctcggactgtcccatccgccccgtattgaggcgctgggagcggcggggcgacaggaaagcgatggtgaaagcggggccgtgaggggggcggagccgggagccggacccgcagtagcggcagcagcggcgccgcctcccagagttcagacccaggaagcggccgggagggcaggagcgaatcgggccgccgccgccatggagctgagagtcgggaacaggtaccggctgggccggaagatcggcagcggctccttcggagacatctatctcggtacggacattgctgcaggagaagaggttgccatcaagcttgaatgtgtcaaaaccaaacaccctcagctccacattgagagcaaaatctacaagatgatgcagggaggagtgggcatccccaccatcagatggtgcggggcagagggggactacaacgtcatggtgatggagctgctggggccaagcctggaggacctcttcaacttctgctccaggaaattcagcctcaaaaccgtcctgctgcttgctgaccaaatgatcagtcgcatcgaatacattcattcaaagaacttcatccaccgggatgtgaagccagacaacttcctcatgggcctggggaagaagggcaacctggtgtacatcatcgacttcgggctggccaagaagtaccgggatgcacgcacccaccagcacatcccctatcgtgagaacaagaacctcacggggacggcgcggtacgcctccatcaacacgcaccttggaattgaacaatcccgaagagatgacttggagtctctgggctacgtgctaatgtacttcaacctgggctctctcccctggcaggggctgaaggctgccaccaagagacagaaatacgaaaggattagcgagaagaaaatgtccacccccatcgaagtgttgtgtaaaggctacccttccgaatttgccacatacctgaatttctgccgttccttgcgttttgacgacaagcctgactactcgtacctgcggcagcttttccggaatctgttccatcgccagggcttctcctatgactacgtgttcgactggaacatgctcaaatttggtgccagccgggccgccgatgacgccgagcgggagcgcagggaccgagaggagcggctgagacactcgcggaacccggctacccgcggcctcccttccacagcctccggccgcctgcgggggacgcaggaagtggctccccccacacccctcacccctacctcacacacggctaacacctccccccggcccgtctccggcatggagagagagcggaaagtgagtatgcggctgcaccgcggggcccccgtcaacatctcctcgtccgacctcacaggccgacaagatacctctcgcatgtccacctcacagattcctggtcgggtggcttccagtggtcttcagtctgtcgtgcaccgatgagaactctccttattgctgtgaagggcagacaatgcatggctgatctactctgttaccactcacccagcgacgctcgtgggggaaacatactaaacggacagactccaagagctgccaccgctggggctgcactgcggccccccacgtgaactcggttgtaacggggctgggaagaaaagcagagagagaattgcagagaatcagactccttttccagggcctcagctccctccagtggtggccgccctgtactccctgacgattccactgtaactaccaatcttctacttggttaagacagttttgtatcattttgctaaaaattattggcttaaatctgtgtaaagaaaatctgtctttttattgtttcttgtctgtttttgcagtcttacaaaaaaaatgttgactaaggaattctgagacaggctggcttggagttagtgtatgaggtggagtcgggcagggagaaggtgcaggtggatctcaagggtgtgtgctgtgtttgttttgcagtgttttattgtccgctttggagaggagatttctcatcaaaagtccgtggtgtgtgtgtgtgcccgtgtgtggtgggacctcttcaacctgattttggcgtctcaccctccctcctcccgtaattgacatgcctgctgtcaggaactcttgaggccctcggagagcagttagggaccgcaggctgccgcggggcaggggtgcagtgggtgttaccaggcaaagcactgcgcgcttcttccccaggaggtgggcaggcagctgagagcttggaagcagaggctttgagaccctagcaggacaattgggagtcccaggattcaaggtggaagatgcgtttctggtcccttgggagaggactgtgaaccgagaggtggttactgtagtgtttgttgccttgctgcctttgcactcagtccattttctcagcactcaatgctcctgtgcggattggcactccgtctgtatgaatgcctgtgcttaaaaccaggagcggggctgtccttgccacgtgccaagactagctcagaaaagccggcaggccagaaggacccaccctgaggtgccaaggagcaggtgactctcccaaccggacccagaaccttcacggccagaaagtagagtctgcgctgtgaccttctgttgggcgcgtgtctgttggtcagaagtgaagcagcgtgcgtggggccgagtcccaccagaaggcaggtggcctccgtgagctggtgctgccccaggctccatgctgctgtgccctgaggttcccaggatgccttctcgcctctcactccgcagcacttgggcggtagccagtggccatgtgctcccaaccccaatgcgcagggcagtctgtgttcgtgggcacttcggctggaccccatcacgatggacgatgttccctttggactctagggcttcgaaggtgtgcaccttggttctcccttctcctccccagagttccccggatgccataactggctggcgtcccagaacacagttgttcacccccccaccagctggctggccgtctgcctgagcccatggatgctttctcaatcctaggctggttactgtgtaagcgttttggagtacggggccttgagcgggtgggagctgtgtgttgaagtacagagggaggttggggtgggtcagagccgagttaagagattttctttgttgctggaccccttcttgaaggtagacgtcccccacccggagagacgtcgcgctgtggcctgaagtggcgcaagcttgctttgtaaatatctgtggtcccgatgtagtgcccagaacgtttgtgcgaggcagctctgcgcccgggttccagcccgagcctcgccgggtcgcgtcttcggagtgcttgtgacagtccttgcccagtatctagtccccgtcgccccgtgcaggagacgtaggtaggacgtcgtgtcagctgtgcactgacggccagtctccgagctgtgcgtttgtatcgccactgtatttgtgtactttaacaatcgtgtaaataataaattcataatgacttctacc

SEQ ID NO: 15395 - DNA, 2962 bp, Homo sapiens
tactctgatctagtacacgatgggggaaggcttaaacgcggctgccaggtgtaattttccaagtgtcaaagatcccaagtgatccctgacacccaccccttcctactcttacattcatgcgtctgtaagatagctgcctacaacaggtcagtagtgatgctccgatcagaaaaacaagatacaaaacaaacaacaaacacacttggtcccttcagaccagtaagatacacaaaccacctccacccccatcgaagtgttgtgtaaaggctacccttccgaatttgccacatacctgaatttctgccgttccttgcgttttgacgacaagcctgactactcgtacctgcggcagcttttccggaatctgttccatcgccagggcttctcctatgactacgtgttcgactggaacatgctcaaatttggtgccagccgggccgccgatgacgccgagcgggagcgcagggaccgagaggagcggctgagacactcgcggaacccggctacccgcggcctcccttccacagcctccggccgcctgcgggggacgcaggaagtggctccccccacacccctcacccctacctcacacacggctaacacctccccccggcccgtctccggcatggagagagagcggaaagtgagtatgcggctgcaccgcggggcccccgtcaacatctcctcgtccgacctcacaggccgacaagatacctctcgcatgtccacctcacagaatagcattcctttcgaacaccacggcaagtagctgctcgtctcccatcggaaggcagcactggattcctggtcgggtggcttccagtggtcttcagtctgtcgtgcaccgatgagaactctccttattgctgtgaagggcagacaatgcatggctgatctactctgttaccaatggctttactagtgacacgtcccccggtctaggatcgaaatgttaacaccgggagctctccaggccactcacccagcgacgctcgtgggggaaacatactaaacggacagactccaagagctgccaccgctggggctgcactgcggccccccacgtgaactcggttgtaacggggctgggaagaaaagcagagagagaattgcagagaatcagactccttttccagggcctcagctccctccagtggtggccgccctgtactccctgacgattccactgtaactaccaatcttctacttggttaagacagttttgtatcattttgctaaaaattattggcttaaatctgtgtaaagaaaatctgtctttttattgtttcttgtctgtttttgcagtcttacaaaaaaaatgttgactaaggaattctgagacaggctggcttggagttagtgtatgaggtggagtcgggcagggagaaggtgcaggtggatctcaagggtgtgtgctgtgtttgttttgcagtgttttattgtccgctttggagaggagatttctcatcaaaagtccgtggtgtgtgtgtgtgcccgtgtgtggtgggacctcttcaacctgattttggcgtctcaccctccctcctcccgtaattgacatgcctgctgtcaggaactcttgaggccctcggagagcagttagggaccgcaggctgccgcggggcaggggtgcagtgggtgttaccaggcaaagcactgcgcgcttcttccccaggaggtgggcaggcagctgagagcttggaagcagaggctttgagaccctagcaggacaattgggagtcccaggattcaaggtggaagatgcgtttctggtcccttgggagaggactgtgaaccgagaggtggttactgtagtgtttgttgccttgctgcctttgcactcagtccattttctcagcactcaatgctcctgtgcggattggcactccgtctgtatgaatgcctgtgcttaaaaccaggagcggggctgtccttgccacgtgccaagactagctcagaaaagccggcaggccagaaggacccaccctgaggtgccaaggagcaggtgactctcccaaccggacccagaaccttcacggccagaaagtagagtctgcgctgtgaccttctgttgggcgcgtgtctgttggtcagaagtgaagcagcgtgcgtggggccgagtcccaccagaaggcaggtggcctccgtgagctggtgctgccccaggctccatgctgctgtgccctgaggttcccaggatgccttctcgcctctcactccgcagcacttgggcggtagccagtggccatgtgctcccaaccccaatgcgcagggcagtctgtgttcgtgggcacttcggctggaccccatcacgatggacgatgttccctttggactctagggcttcgaaggtgtgcaccttggttctcccttctcctccccagagttccccggatgccataactggctggcgtcccagaacacagttgttcacccccccaccagctggctggccgtctgcctgagcccatggatgctttctcaatcctaggctggttactgtgtaagcgttttggagtacggggccttgagcgggtgggagctgtgtgttgaagtacagagggaggttggggtgggtcagagccgagttaagagattttctttgttgctggaccccttcttgaaggtagacgtcccccacccggagagacgtcgcgctgtggcctgaagtggcgcaagcttgctttgtaaatatctgtggtcccgatgtagtgcccagaacgtttgtgcgaggcagctctgcgcccgggttccagcccgagcctcgccgggtcgcgtcttcggagtgcttgtgacagtccttgcccagtatctagtccccgtcgccccgtgcaggagacgtaggtaggacgtcgtgtcagctgtgcactgacggccagtctccgagctgtgcgtttgtatcgccactgtatttgtgtactttaacaatcgtgtaaataataaattcataatgacttctacc

SEQ ID NO: 15396 - DNA, 2559 bp, Homo sapiens
tgggtgattagcaggatcttaggagccttaaccctcgggcggattgatgtggtgggtgggcatcggcaaagccagccaggtcctgactgtccaggcagcccagggtcctctctggccacagcctctcatagaaagccccgagtgagaggcagcagacgggggcggcccactccgtttctctccctgtcctcagctaacacctccccccggcccgtctccggcatggagagagagcggaaagtgagtatgcggctgcaccgcggggcccccgtcaacatctcctcgtccgacctcacaggccgacaagatacctctcgcatgtccacctcacagaatagcattcctttcgaacaccacggcaagtagctgctcgtctcccatcggaaggcagcactggattcctggtcgggtggcttccagtggtcttcagtctgtcgtgcaccgatgagaactctccttattgctgtgaagggcagacaatgcatggctgatctactctgttaccaatggctttactagtgacacgtcccccggtctaggatcgaaatgttaacaccgggagctctccaggccactcacccagcgacgctcgtgggggaaacatactaaacggacagactccaagagctgccaccgctggggctgcactgcggccccccacgtgaactcggttgtaacggggctgggaagaaaagcagagagagaattgcagagaatcagactccttttccagggcctcagctccctccagtggtggccgccctgtactccctgacgattccactgtaactaccaatcttctacttggttaagacagttttgtatcattttgctaaaaattattggcttaaatctgtgtaaagaaaatctgtctttttattgtttcttgtctgtttttgcagtcttacaaaaaaaatgttgactaaggaattctgagacaggctggcttggagttagtgtatgaggtggagtcgggcagggagaaggtgcaggtggatctcaagggtgtgtgctgtgtttgttttgcagtgttttattgtccgctttggagaggagatttctcatcaaaagtccgtggtgtgtgtgtgtgcccgtgtgtggtgggacctcttcaacctgattttggcgtctcaccctccctcctcccgtaattgacatgcctgctgtcaggaactcttgaggccctcggagagcagttagggaccgcaggctgccgcggggcaggggtgcagtgggtgttaccaggcaaagcactgcgcgcttcttccccaggaggtgggcaggcagctgagagcttggaagcagaggctttgagaccctagcaggacaattgggagtcccaggattcaaggtggaagatgcgtttctggtcccttgggagaggactgtgaaccgagaggtggttactgtagtgtttgttgccttgctgcctttgcactcagtccattttctcagcactcaatgctcctgtgcggattggcactccgtctgtatgaatgcctgtgcttaaaaccaggagcggggctgtccttgccacgtgccaagactagctcagaaaagccggcaggccagaaggacccaccctgaggtgccaaggagcaggtgactctcccaaccggacccagaaccttcacggccagaaagtagagtctgcgctgtgaccttctgttgggcgcgtgtctgttggtcagaagtgaagcagcgtgcgtggggccgagtcccaccagaaggcaggtggcctccgtgagctggtgctgccccaggctccatgctgctgtgccctgaggttcccaggatgccttctcgcctctcactccgcagcacttgggcggtagccagtggccatgtgctcccaaccccaatgcgcagggcagtctgtgttcgtgggcacttcggctggaccccatcacgatggacgatgttccctttggactctagggcttcgaaggtgtgcaccttggttctcccttctcctccccagagttccccggatgccataactggctggcgtcccagaacacagttgttcacccccccaccagctggctggccgtctgcctgagcccatggatgctttctcaatcctaggctggttactgtgtaagcgttttggagtacggggccttgagcgggtgggagctgtgtgttgaagtacagagggaggttggggtgggtcagagccgagttaagagattttctttgttgctggaccccttcttgaaggtagacgtcccccacccggagagacgtcgcgctgtggcctgaagtggcgcaagcttgctttgtaaatatctgtggtcccgatgtagtgcccagaacgtttgtgcgaggcagctctgcgcccgggttccagcccgagcctcgccgggtcgcgtcttcggagtgcttgtgacagtccttgcccagtatctagtccccgtcgccccgtgcaggagacgtaggtaggacgtcgtgtcagctgtgcactgacggccagtctccgagctgtgcgtttgtatcgccactgtatttgtgtactttaacaatcgtgtaaataataaattcataatgacttctacc

SEQ ID NO: 15397 - DNA, 3025 bp, Homo sapiens
gcgcgatggcggcggctcctttaggcagctgaaaggggatttaggcccggaagatccgagtccatccgcggcggggagagggcaagcgggaccggtaggggccggagcagcggcggcggcgctcggactgtcccatccgccccgtattgaggcgctgggagcggcggggcgacaggaaagcgatggtgaaagcggggccgtgaggggggcggagccgggagccggacccgcagtagcggcagcagcggcgccgcctcccagagttcagacccaggaagcggccgggagggcaggagcgaatcgggccgccgccgccatggagctgagagtcgggaacaggtaccggctgggccggaagatcggcagcggctccttcggagacatctatctcggtacggacattgctgcaggagaagaggttgccatcaagcttgaatgtgtcaaaaccaaacaccctcagctccacattgagagcaaaatctacaagatgatgcagggaggagtgggcatccccaccatcagatggtgcggggcagagggggactacaacgtcatggtgatggagctgctggggccaagcctggaggacctcttcaacttctgctccaggaaattcagcctcaaaaccgtcctgctgcttgctgaccaaatgatcagtcgcatcgaatacattcattcaaagaacttcatccaccgggatgtgaagccagacaacttcctcatgggcctggggaagaagggcaacctggtgtacatcatcgacttcgggctggccaagaagtaccgggatgcacgcacccaccagcacatcccctatcgtgagaacaagaacctcacggggacggcgcggtacgcctccatcaacacgcaccttggaattgaacaatcccgaagagatgacttggagtctctgggctacgtgctaatgtacttcaacctgggctctctcccctggcaggggctgaaggctgccaccaagagacagaaatacgaaaggattagcgagaagaaaatgttaacaccgggagctctccaggccactcacccagcgacgctcgtgggggaaacatactaaacggacagactccaagagctgccaccgctggggctgcactgcggccccccacgtgaactcggttgtaacggggctgggaagaaaagcagagagagaattgcagagaatcagactccttttccagggcctcagctccctccagtggtggccgccctgtactccctgacgattccactgtaactaccaatcttctacttggttaagacagttttgtatcattttgctaaaaattattggcttaaatctgtgtaaagaaaatctgtctttttattgtttcttgtctgtttttgcagtcttacaaaaaaaatgttgactaaggaattctgagacaggctggcttggagttagtgtatgaggtggagtcgggcagggagaaggtgcaggtggatctcaagggtgtgtgctgtgtttgttttgcagtgttttattgtccgctttggagaggagatttctcatcaaaagtccgtggtgtgtgtgtgtgcccgtgtgtggtgggacctcttcaacctgattttggcgtctcaccctccctcctcccgtaattgacatgcctgctgtcaggaactcttgaggccctcggagagcagttagggaccgcaggctgccgcggggcaggggtgcagtgggtgttaccaggcaaagcactgcgcgcttcttccccaggaggtgggcaggcagctgagagcttggaagcagaggctttgagaccctagcaggacaattgggagtcccaggattcaaggtggaagatgcgtttctggtcccttgggagaggactgtgaaccgagaggtggttactgtagtgtttgttgccttgctgcctttgcactcagtccattttctcagcactcaatgctcctgtgcggattggcactccgtctgtatgaatgcctgtgcttaaaaccaggagcggggctgtccttgccacgtgccaagactagctcagaaaagccggcaggccagaaggacccaccctgaggtgccaaggagcaggtgactctcccaaccggacccagaaccttcacggccagaaagtagagtctgcgctgtgaccttctgttgggcgcgtgtctgttggtcagaagtgaagcagcgtgcgtggggccgagtcccaccagaaggcaggtggcctccgtgagctggtgctgccccaggctccatgctgctgtgccctgaggttcccaggatgccttctcgcctctcactccgcagcacttgggcggtagccagtggccatgtgctcccaaccccaatgcgcagggcagtctgtgttcgtgggcacttcggctggaccccatcacgatggacgatgttccctttggactctagggcttcgaaggtgtgcaccttggttctcccttctcctccccagagttccccggatgccataactggctggcgtcccagaacacagttgttcacccccccaccagctggctggccgtctgcctgagcccatggatgctttctcaatcctaggctggttactgtgtaagcgttttggagtacggggccttgagcgggtgggagctgtgtgttgaagtacagagggaggttggggtgggtcagagccgagttaagagattttctttgttgctggaccccttcttgaaggtagacgtcccccacccggagagacgtcgcgctgtggcctgaagtggcgcaagcttgctttgtaaatatctgtggtcccgatgtagtgcccagaacgtttgtgcgaggcagctctgcgcccgggttccagcccgagcctcgccgggtcgcgtcttcggagtgcttgtgacagtccttgcccagtatctagtccccgtcgccccgtgcaggagacgtaggtaggacgtcgtgtcagctgtgcactgacggccagtctccgagctgtgcgtttgtatcgccactgtatttgtgtactttaacaatcgtgtaaataataaattcataatgacttctacc

SEQ ID NO: 15398 - DNA, 1805 bp, Homo sapiens
gcgcgatggcggcggctcctttaggcagctgaaaggggatttaggcccggaagatccgagtccatccgcggcggggagagggcaagcgggaccggtaggggccggagcagcggcggcggcgctcggactgtcccatccgccccgtattgaggcgctgggagcggcggggcgacaggaaagcgatggtgaaagcggggccgtgaggggggcggagccgggagccggacccgcagtagcggcagcagcggcgccgcctcccagagttcagacccaggaagcggccgggagggcaggagcgaatcgggccgccgccgccatggagctgagagtcgggaacaggtaccggctgggccggaagatcggcagcggctccttcggagacatctatctcggtacggacattgctgcaggagaagaggttgccatcaagcttgaatgtgtcaaaaccaaacaccctcagctccacattgagagcaaaatctacaagatgatgcagggaggagtgggcatccccaccatcagatggtgcggggcagagggggactacaacgtcatggtgatggagctgctggggccaagcctggaggacctcttcaacttctgctccaggaaattcagcctcaaaaccgtcctgctgcttgctgaccaaatgatcagtcgcatcgaatacattcattcaaagaacttcatccaccgggatgtgaagccagacaacttcctcatgggcctggggaagaagggcaacctggtgtacatcatcgacttcgggctggccaagaagtaccgggatgcacgcacccaccagcacatcccctatcgtgagaacaagaacctcacggggacggcgcggtacgcctccatcaacacgcaccttggaattgaacaatcccgaagagatgacttggagtctctgggctacgtgctaatgtacttcaacctgggctctctcccctggcaggggctgaaggctgccaccaagagacagaaatacgaaaggattagcgagaagaaaatgtccacccccatcgaagtgttgtgtaaaggctacccttccgaatttgccacatacctgaatttctgccgttccttgcgttttgacgacaagcctgactactcgtacctgcggcagcttttccggaatctgttccatcgccagggcttctcctatgactacgtgttcgactggaacatgctcaaatttggtgccagccgggccgccgatgacgccgagcgggagcgcagggaccgagaggagcggctgagacactcgcggaacccggctacccgcggcctcccttccacagcctccggccgcctgcgggggacgcaggaagtggctccccccacacccctcacccctacctcacacacggctaacacctccccccggcccgtctccggcatggagagagagcggaaagtgagtatgcggctgcaccgcggggcccccgtcaacatctcctcgtccgacctcacaggccgacaagatacctctcgcatgtccacctcacagaggagcagggacatggcatctctccggctgcacgcggcccgcccagcccgcatgccgtccccagcgcccacgacgcacatactgagggccccggggcctctgaccgggctcccagcacgcaggccactgctggcaccgagagcagatccactctggaatgacacggttcccaccccgccaccttccccctcaaaacactgatcgggcgacgatccgctgggccggcagctggagcccagccgtggccctgcctgagccagtccagtttgtaaaataaatagcaagcgttgca

SEQ ID NO: 15399 - DNA, 1457 bp, Homo sapiens
gcgcgatggcggcggctcctttaggcagctgaaaggggatttaggcccggaagatccgagtccatccgcggcggggagagggcaagcgggaccggtaggggccggagcagcggcggcggcgctcggactgtcccatccgccccgtattgaggcgctgggagcggcggggcgacaggaaagcgatggtgaaagcggggccgtgaggggggcggagccgggagccggacccgcagtagcggcagcagcggcgccgcctcccagagttcagacccaggaagcggccgggagggcaggagcgaatcgggccgccgccgccatggagctgagagtcgggaacaggtaccggctgggccggaagatcggcagcggctccttcggagacatctatctcggtacggacattgctgcaggagaagaggttgccatcaagcttgaatgtgtcaaaaccaaacaccctcagctccacattgagagcaaaatctacaagatgatgcagggaggagtgggcatccccaccatcagatggtgcggggcagagggggactacaacgtcatggtgatggagctgctggggccaagcctggaggacctcttcaacttctgctccaggaaattcagcctcaaaaccgtcctgctgcttgctgaccaaatgatcagtcgcatcgaatacattcattcaaagaacttcatccaccgggatgtgaagccagacaacttcctcatgggcctggggaagaagggcaacctggtgtacatcatcgacttcgggctggccaagaagtaccgggatgcacgcacccaccagcacatcccctatcgtgagaacaagaacctcacggggacggcgcggtacgcctccatcaacacgcaccttggaattgaacaatcccgaagagatgacttggagtctctgggctacgtgctaatgtacttcaacctgggctctctcccctggcaggggctgaaggctgccaccaagagacagaaatacgaaaggattagcgagaagaaaatgtccacccccatcgaagtgttgtgtaaaggctacccttccgaatttgccacatacctgaatttctgccgttccttgcgttttgacgacaagcctgactactcgtacctgcggcagcttttccggaatctgttccatcgccagggcttctcctatgactacgtgttcgactggaacatgctcaaatttggtgccagccgggcccgcaggatgacacagccctggaacgcagggggaaggcgccaacgtgggcaaccccggagggaggtgaaggccgcgcatagaaggacacgtcgcggagaaaccccggggtacccacggcggcactccgcttccacaagccgtcccagggccgccttgcagagagggaccgccaacacccgctaggctcacgcccgccagaacccctccgcaccgatgacgccacagcaacagaggaagcaag

SEQ ID NO: 15400 - DNA, 770 bp, Homo sapiens
gcgcgatggcggcggctcctttaggcagctgaaaggggatttaggcccggaagatccgagtccatccgcggcggggagagggcaagcgggaccggtaggggccggagcagcggcggcggcgctcggactgtcccatccgccccgtattgaggcgctgggagcggcggggcgacaggaaagcgatggtgaaagcggggccgtgaggggggcggagccgggagccggacccgcagtagcggcagcagcggcgccgcctcccagagttcagacccaggaagcggccgggagggcaggagcgaatcgggccgccgccgccatggagctgagagtcgggaacaggtaccggctgggccggaagatcggcagcggctccttcggagacatctatctcggtacggacattgctgcaggagaagaggttgccatcaagcttgaatgtgtcaaaaccaaacaccctcagctccacattgagagcaaaatctacaagatgatgcagggaggagtgggcatccccaccatcagatggtgcggggcagagggggactacaacgtcatggtgatggagctgctggggccaagcctggaggacctcttcaacttctgctccaggaaattcagcctcaaaaccgtcctgctgcttgctgaccaaatgcaacgtgtgctccctcacctggtccgaactttcaagttctccttttagcttctctacaatctcttcgagatgcttcactgtgacccgggacttctggagctcctcctctgcggcgccc

SEQ ID NO: 15401 - DNA, 1263 bp, Homo sapiens
ttttttagcaatggcggttcccggcgtggggctcttgacccgtttgaacctgtgtgcccggagaagaactcgagtccagcggcctatcgtcaggcttttgagttgcccaggaactgtggccaaagaccttaggagagacgagcagccttcagggagcgtggagacaggctttgaagacaagattcccaaaaggagattctctgagatgcaaaatgaaagacgagaacaggcacagcggactgttttaatacattgcccagagaaaatcagtgaaaacaagtttcttaaatatttatcccaatttggacctattaataatcatttcttctatgaaagctttggtctctatgctgtcgtagaattttgccaaaaggaaagcataggttcactgcagaatgggactcatactccaagcacggccatggagactgcaattccattcagatcacgtttcttcaatctgaagttgaaaaaccagacttctgaacggtcacgcgtacggtcaagtaatcagttgccacgttcaaacaagcagctttttgaattactttgttatgcagaaagtgtaagtttttaggtgtacttcaacttttagaactatgtatttttttatgaacaataaagattcctgtaaaatattcaagctacattattgtttaatgggtatagatcttcagttttacaaggtgaaaagagttacggagatgaatcgtggtggtggatgcataatgagatgaaggaaagtttttttctatttctagctttctaagaatgtcgtcatgctcaacacattgagtagatgttgagttttgacatttgagatggtattgatgactggcatatggtcttgagattgtatatggttcctaatgtctttttctttcccctcctaatgtcttaacgtagtgaattgtagattcactgtagatttcctcatgtcaagtcattcttgcattcacagaataaaccctacttagtcaaggtgtatttacaaaaatgcattattacatttgtcgtgctaatatttttattacaattttaatatctctataaataaatgggattgcttttaaaaattcaaactacaggatatgttgaatgaaaagtgatagtaatccttgtctgctccttccccgccatgccccatttgtacttacaggtaaccacattcttctgaagttttcggccttttgaacagtttaggttttctttctctttccagcataatgacataaaattgtacatggttttctgtcaatttta

SEQ ID NO: 15402 - DNA, 2537 bp, Homo sapiens
ttttttagcaatggcggttcccggcgtggggctcttgacccgtttgaacctgtgtgcccggagaagaactcgagtccagcggcctatcgtcaggcttttgagttgcccaggaactgtggccaaagaccttaggagagacgagcagccttcagggagcgtggagacaggctttgaagacaagattcccaaaaggagattctctgagatgcaaaatgaaagacgagaacaggcacagcggactgttttaatacattgcccagagaaaatcagtgaaaacaagtttcttaaatatttatcccaatttggacctattaataatcatttcttctatgaaagctttggtctctatgctgtcgtagaattttgccaaaaggaaagcataggttcactgcagaatgggactcatactccaagcacggccatggagactgcaattccattcagatcacgtttcttcaatctgaagttgaaaaaccagacttctgaacggtcacgcgtacggtcaagtaatcagttgccacgttcaaacaagcagctttttgaattactttgttatgcagaaagtatagacgatcagctgaacactctcttgaaggagttccagctaacagaggagaacactaagctccgatatctcacctgttctcttattgaagacatggccgccgcgtattttccagactgcatagtcagaccctttggctcctcagtcaacacttttgggaagttaggatgtgatttggacatgtttttggatctagatgaaaccagaaacctcagcgctcacaagatctcaggaaattttctgatggaatttcaagtgaaaaatgttccttcagaaagaattgcaactcagaagatcctgtctgtgttaggagagtgccttgaccactttggccctggctgtgtgggtgtgcaaaaaatattaaatgcccggtgtccgctcgtgaggttctcacaccaggcctccggatttcagtgtgatttgactacgaacaataggattgccttgacaagttccgaactcctttatatatatggtgccctagactcaagagtgagagccttggtgttcagtgtacggtgctgggctcgagcacattcactaacaagtagtattcctggtgcatggattacaaatttctcccttacaatgatggtcatcttttttctccagagaagatcaccccctattcttccaacactagattccttaaaaaccctagcagatgcagaagataaatgtgtaatagaaggcaacaactgcacatttgttcgtgacttgagtagaattaaaccttcacagaacacagaaacattagaattactactgaaggaattttttgagtattttggcaattttgctttcgataaaaattccataaatattcgacagggaagggagcaaaacaaacctgattcttctcctctgtacattcagaatccatttgaaacttctctcaacataagcaaaaatgtaagtcaaagccagctgcaaaaatttgtagatttggcccgagaaagtgcctggattttacaacaggaagatacagatcgaccttccatatcaagtaatcggccctgggggctggtatccctattgctaccatctgctccaaacagaaagtcctttaccaagaagaaaagcaataagtttgcaattgaaacagtcaaaaacttgctagaatctttaaaaggtaacagaacagaaaatttcacaaaaaccagtgggaagagaacaattagtactcagacatgatggctgctacattgtgtaaagaactgggcttagcctatcaaatggtctgtggacttacttggaaaaactgatttgaaactttcacagatctcagctttcatctgatgtcacttttcatgatcttctcattggcccccttaacctggtctgaagttctgggatgttttcagtttgatcagtctgatactcagtggcactttattaaaacatcagctgtggagtgtggcggtgcacacctgtagtcccagctgctcaggaggctgaggcaggaggatctcttgagcccaggattttgaatccatcgtggacaacatagcaagattccatctctaaaaaaaatgaaaataaacataagccacaaggaatgggtgaaagattattgtaatgtgctttaactaaataggtaaatatactaaacaaatgctaaaactcagttttaggatgaaaccattgttgatatccacatcagtccctgtttagaaaacatttaaaatgacttttagttatgtacagtacgttggcaatgaatacattaagcttcaaaatttggtagtgctctcgaatatgtatatttgtatttttcaagcgaagttctcttattcacatataaattaaagtgggttggtactgatatcaaaaaatgtttatgtttttagaacagacatttcagtcactgcattcttaggtattccaaaccaaatatgatgacatcaatagattgcattttaaaaatattgtttgatttttctattttcaaaaataaaattctgtttctaac

SEQ ID NO: 15403 - DNA, 4045 bp, Homo sapiens
caactgcctggcatgtgactggaggtactttgcagtcattgctgggatttcactgatgtgaccccaacgctgcctccctctccaccccacgatgttggaagaaactcaacagagtaaattggctgtggccaagaaaaagtcctcgagccgctgtgaagcagtcctcaagcggcagttatggcagtccataaaggctcgggcacagctggaagcacacgtgacacagatgttggaacaagtccagctagagacagatgaatatactcaacatctaaaaggagagagggcccggtggcagcagagggtatggaaaatgtcagaggagggccctgtcccccgtgctttgggcaggtttgcacatggaaggaggagaagaagcatgacaggcatcgggtacaggagctggagaggagcttggccgaactcaaaaactagatggctgaacccctgcccctggagcccccagcagggccctctgaggtggaacagcagctacaagctgaggccgagcacccgaggaaggagcaggagagtctggcaggacagctccaagctcaggtgcaaaacaatcaaggcttgagtcacctgaactgggagcaggaggagaggctgctggaacgggagacgctgcgggagcaggagaggctgcaggagctggaggagaagctgcaggagtaggagaggctgggagagcgggaggagagtctgcgggagcgggaggagagtctgcgggagcgggaggagaggctacgggagtgggaggagaggctgcggagcaggaggacaggctgctcgagctggggcggaaagccaagctctgggaggagcaggcagagacgtgcatgcaggccctgcggaaccacaccaccatcaaccacgtgctctctcagaaccatgagctcgactagcagctggctgggccacagagcggcttagaggagctgaacaacgagaataagagtgcactacagttggagcagcaagtaaaggagctgcaggagaagctgggcaagctgaaggagactgtaacctctgcccatccaagaagggctgggaggagcacctggaaggtaccagccagcagaaccagcagctacaggcccagttgagcctcatggcactccctaggcaaggtggcgtttttcaactccgctggagccagtgcccaggaggagcaggtatggcttatgtgggcagctgagggagcaaagggtgtggtgccagcgcctgactcacccgggtggccttggcccagaaggagccagaggtagtggaaccagccccagggactggggatgagtctgtgtgtgggtagactcatcaggccctgcagggatccatggagaagttgcaggtgagtgagtcatggcatgggccaagaaggttgggggcagagcagggcagggcaggtcgctctcaagatgtgaccccattattttggatccagagtggctttatggacctcctgaaggagaaggtggacctgaaggagtgggtggagaaactagagcttcgatccatccacctctcaggacaggcagacaccatcagaaagtaaatcacaacatacgagggccagagggcagcgccaaagacgcggcaccaggaggaggaggacatcatcaggctggcccaggacaaagaggagatgaagatggggcattgcagcacctctgtgggggtgggggtggggtgggtgtgagcgtgggcaggggcactggcaccagcgtggcagctgagcacccctcccttcaggtgaaactgctggagctgcaggagctggtgttgcggcttgcaggcgatcacaacgaggggcatggcaaattcctggccgctgcccagaaccctgctgatgatcctgctccaggggccccagcccctcaggagcttggggctgctgacaagcagggtggctttgaagacaagattcccaaaaggagattctctgagatgcaaaatgaaagacgagaacaggcacagcggactgttttaatacattgcccagagaaaatcagtgaaaacaagtttcttaaatatttatcccaatttggacctattaataatcatttcttctatgaaagctttggtctctatgctgtcgtagaattttgccaaaaggaaagcataggttcactgcagaatgggactcatactccaagcacggccatggagactgcaattccattcagatcacgtttcttcaatctgaagttgaaaaaccagacttctgaacggtcacgcgtacggtcaagtaatcagttgccacgttcaaacaagcagctttttgaattactttgttatgcagaaagtatagacgatcagctgaacactctcttgaaggagttccagctaacagaggagaacactaagctccgatatctcacctgttctcttattgaagacatggccgccgcgtattttccagactgcatagtcagaccctttggctcctcagtcaacacttttgggaagttaggatgtgatttggacatgtttttggatctagatgaaaccagaaacctcagcgctcacaagatctcaggaaattttctgatggaatttcaagtgaaaaatgttccttcagaaagaattgcaactcagaagatcctgtctgtgttaggagagtgccttgaccactttggccctggctgtgtgggtgtgcaaaaaatattaaatgcccggtgtccgctcgtgaggttctcacaccaggcctccggatttcagtgtgatttgactacgaacaataggattgccttgacaagttccgaactcctttatatatatggtgccctagactcaagagtgagagccttggtgttcagtgtacggtgctgggctcgagcacattcactaacaagtagtattcctggtgcatggattacaaatttctcccttacaatgatggtcatcttttttctccagagaagatcaccccctattcttccaacactagattccttaaaaaccctagcagatgcagaagataaatgtgtaatagaaggcaacaactgcacatttgttcgtgacttgagtagaattaaaccttcacagaacacagaaacattagaattactactgaaggaattttttgagtattttggcaattttgctttcgataaaaattccataaatattcgacagggaagggagcaaaacaaacctgattcttctcctctgtacattcagaatccatttgaaacttctctcaacataagcaaaaatgtaagtcaaagccagctgcaaaaatttgtagatttggcccgagaaagtgcctggattttacaacaggaagatacagatcgaccttccatatcaagtaatcggccctgggggctggtatccctattgctaccatctgctccaaacagaaagtcctttaccaagaagaaaagcaataagtttgcaattgaaacagtcaaaaacttgctagaatctttaaaaggtaacagaacagaaaatttcacaaaaaccagtgggaagagaacaattagtactcagacatgatggctgctacattgtgtaaagaactgggcttagcctatcaaatggtctgtggacttacttggaaaaactgatttgaaactttcacagatctcagctttcatctgatgtcacttttcatgatcttctcattggcccccttaacctggtctgaagttctgggatgttttcagtttgatcagtctgatactcagtggcactttattaaaacatcagctgtggagtgtggcggtgcacacctgtagtcccagctgctcaggaggctgaggcaggaggatctcttgagcccaggattttgaatccatcgtggacaacatagcaagattccatctctaaaaaaaatgaaaataaacataagccacaaggaatgggtgaaagattattgtaatgtgctttaactaaataggtaaatatactaaacaaatgctaaaactcagttttaggatgaaaccattgttgatatccacatcagtccctgtttagaaaacatttaaaatgacttttagttatgtacagtacgttggcaatgaatacattaagcttc

SEQ ID NO: 15404 - DNA, 2494 bp, Homo sapiens
agcggatctctgtaggggaacccaggtcgccgccgttgctgaggcagaagtgagatgtgtgatgtttgtttggggcgactcctgtgtacagtaatggagttgtttagacttccatgaaattcaggctttgaagacaagattcccaaaaggagattctctgagatgcaaaatgaaagacgagaacaggcacagcggactgttttaatacattgcccagagaaaatcagtgaaaacaagtttcttaaatatttatcccaatttggacctattaataatcatttcttctatgaaagctttggtctctatgctgtcgtagaattttgccaaaaggaaagcataggttcactgcagaatgggactcatactccaagcacggccatggagactgcaattccattcagatcacgtttcttcaatctgaagttgaaaaaccagacttctgaacggtcacgcgtacggtcaagtaatcagttgccacgttcaaacaagcagctttttgaattactttgttatgcagaaagtatagacgatcagctgaacactctcttgaaggagttccagctaacagaggagaacactaagctccgatatctcacctgttctcttattgaagacatggccgccgcgtattttccagactgcatagtcagaccctttggctcctcagtcaacacttttgggaagttaggatgtgatttggacatgtttttggatctagatgaaaccagaaacctcagcgctcacaagatctcaggaaattttctgatggaatttcaagtgaaaaatgttccttcagaaagaattgcaactcagaagatcctgtctgtgttaggagagtgccttgaccactttggccctggctgtgtgggtgtgcaaaaaatattaaatgcccggtgtccgctcgtgaggttctcacaccaggcctccggatttcagtgtgatttgactacgaacaataggattgccttgacaagttccgaactcctttatatatatggtgccctagactcaagagtgagagccttggtgttcagtgtacggtgctgggctcgagcacattcactaacaagtagtattcctggtgcatggattacaaatttctcccttacaatgatggtcatcttttttctccagagaagatcaccccctattcttccaacactagattccttaaaaaccctagcagatgcagaagataaatgtgtaatagaaggcaacaactgcacatttgttcgtgacttgagtagaattaaaccttcacagaacacagaaacattagaattactactgaaggaattttttgagtattttggcaattttgctttcgataaaaattccataaatattcgacagggaagggagcaaaacaaacctgattcttctcctctgtacattcagaatccatttgaaacttctctcaacataagcaaaaatgtaagtcaaagccagctgcaaaaatttgtagatttggcccgagaaagtgcctggattttacaacaggaagatacagatcgaccttccatatcaagtaatcggccctgggggctggtatccctattgctaccatctgctccaaacagaaagtcctttaccaagaagaaaagcaataagtttgcaattgaaacagtcaaaaacttgctagaatctttaaaaggtaacagaacagaaaatttcacaaaaaccagtgggaagagaacaattagtactcagacatgatggctgctacattgtgtaaagaactgggcttagcctatcaaatggtctgtggacttacttggaaaaactgatttgaaactttcacagatctcagctttcatctgatgtcacttttcatgatcttctcattggcccccttaacctggtctgaagttctgggatgttttcagtttgatcagtctgatactcagtggcactttattaaaacatcagctgtggagtgtggcggtgcacacctgtagtcccagctgctcaggaggctgaggcaggaggatctcttgagcccaggattttgaatccatcgtggacaacatagcaagattccatctctaaaaaaaatgaaaataaacataagccacaaggaatgggtgaaagattattgtaatgtgctttaactaaataggtaaatatactaaacaaatgctaaaactcagttttaggatgaaaccattgttgatatccacatcagtccctgtttagaaaacatttaaaatgacttttagttatgtacagtacgttggcaatgaatacattaagcttcaaaatttggtagtgctctcgaatatgtatatttgtatttttcaagcgaagttctcttattcacatataaattaaagtgggttggtactgatatcaaaaaatgtttatgtttttagaacagacatttcagtcactgcattcttaggtattccaaaccaaatatgatgacatcaatagattgcattttaaaaatattgtttgatttttctattttcaaaaataaaattctgtttctaac

SEQ ID NO: 15405 - DNA, 3207 bp, Homo sapiens
cgttgacgcggaccacaggacgacaggtggcagctgccacggaggacctggagagcaggtggcgtttttcaactccgctggagccagtgcccaggaggagcaggtatggcttatgtgggcagctgagggagcaaagggtgtggtgccagcgcctgactcacccgggtggccttggcccagaaggagccagaggtagtggaaccagccccagggactggggatgagtctgtgtgtgggtagactcatcaggccctgcagggatccatggagaagttgcaggtgagtgagtcatggcatgggccaagaaggttgggggcagagcagggcagggcaggtcgctctcaagatgtgaccccattattttggatccagagtggctttatggacctcctgaaggagaaggtggacctgaaggagtgggtggagaaactagagcttcgatccatccacctctcaggacaggcagacaccatcagaaagtaaatcacaacatacgagggccagagggcagcgccaaagacgcggcaccaggaggaggaggacatcatcaggctggcccaggacaaagaggagatgaagatggggcattgcagcacctctgtgggggtgggggtggggtgggtgtgagcgtgggcaggggcactggcaccagcgtggcagctgagcacccctcccttcaggtgaaactgctggagctgcaggagctggtgttgcggcttgcaggcgatcacaacgaggggcatggcaaattcctggccgctgcccagaaccctgctgatgatcctgctccaggggccccagcccctcaggagcttggggctgctgacaagcagggtggctttgaagacaagattcccaaaaggagattctctgagatgcaaaatgaaagacgagaacaggcacagcggactgttttaatacattgcccagagaaaatcagtgaaaacaagtttcttaaatatttatcccaatttggacctattaataatcatttcttctatgaaagctttggtctctatgctgtcgtagaattttgccaaaaggaaagcataggttcactgcagaatgggactcatactccaagcacggccatggagactgcaattccattcagatcacgtttcttcaatctgaagttgaaaaaccagacttctgaacggtcacgcgtacggtcaagtaatcagttgccacgttcaaacaagcagctttttgaattactttgttatgcagaaagtatagacgatcagctgaacactctcttgaaggagttccagctaacagaggagaacactaagctccgatatctcacctgttctcttattgaagacatggccgccgcgtattttccagactgcatagtcagaccctttggctcctcagtcaacacttttgggaagttaggatgtgatttggacatgtttttggatctagatgaaaccagaaacctcagcgctcacaagatctcaggaaattttctgatggaatttcaagtgaaaaatgttccttcagaaagaattgcaactcagaagatcctgtctgtgttaggagagtgccttgaccactttggccctggctgtgtgggtgtgcaaaaaatattaaatgcccggtgtccgctcgtgaggttctcacaccaggcctccggatttcagtgtgatttgactacgaacaataggattgccttgacaagttccgaactcctttatatatatggtgccctagactcaagagtgagagccttggtgttcagtgtacggtgctgggctcgagcacattcactaacaagtagtattcctggtgcatggattacaaatttctcccttacaatgatggtcatcttttttctccagagaagatcaccccctattcttccaacactagattccttaaaaaccctagcagatgcagaagataaatgtgtaatagaaggcaacaactgcacatttgttcgtgacttgagtagaattaaaccttcacagaacacagaaacattagaattactactgaaggaattttttgagtattttggcaattttgctttcgataaaaattccataaatattcgacagggaagggagcaaaacaaacctgattcttctcctctgtacattcagaatccatttgaaacttctctcaacataagcaaaaatgtaagtcaaagccagctgcaaaaatttgtagatttggcccgagaaagtgcctggattttacaacaggaagatacagatcgaccttccatatcaagtaatcggccctgggggctggtatccctattgctaccatctgctccaaacagaaagtcctttaccaagaagaaaagcaataagtttgcaattgaaacagtcaaaaacttgctagaatctttaaaaggtaacagaacagaaaatttcacaaaaaccagtgggaagagaacaattagtactcagacatgatggctgctacattgtgtaaagaactgggcttagcctatcaaatggtctgtggacttacttggaaaaactgatttgaaactttcacagatctcagctttcatctgatgtcacttttcatgatcttctcattggcccccttaacctggtctgaagttctgggatgttttcagtttgatcagtctgatactcagtggcactttattaaaacatcagctgtggagtgtggcggtgcacacctgtagtcccagctgctcaggaggctgaggcaggaggatctcttgagcccaggattttgaatccatcgtggacaacatagcaagattccatctctaaaaaaaatgaaaataaacataagccacaaggaatgggtgaaagattattgtaatgtgctttaactaaataggtaaatatactaaacaaatgctaaaactcagttttaggatgaaaccattgttgatatccacatcagtccctgtttagaaaacatttaaaatgacttttagttatgtacagtacgttggcaatgaatacattaagcttcaaaatttggtagtgctctcgaatatgtatatttgtatttttcaagcgaagttctcttattcacatataaattaaagtgggttggtactgatatcaaaaaatgtttatgtttttagaacagacatttcagtcactgcattcttaggtattccaaaccaaatatgatgacatcaatagattgcattttaaaaatattgtttgatttttctattttcaaaaataaaattctgtttctaac

SEQ ID NO: 15406 - DNA, 2484 bp, Homo sapiens
ttttttagcaatggcggttcccggcgtggggctcttgacccgtttgaacctgtgtgcccggagaagaactcgagtccagcggcctatcgtcaggcttttgagttgcccaggaactgtggccaaagaccttaggagagacgagcagccttcagggagcgtggagacaggctttgaagacaagattcccaaaaggagattctctgagatgcaaaatgaaagacgagaacaggcacagcggactgttttaatacattgcccagagaaaatcagtgaaaacaagtttcttaaatatttatcccaatttggacctattaataatcatttcttctatgaaagctttggtctctatgctgtcgtagaattttgccatggagactgcaattccattcagatcacgtttcttcaatctgaagttgaaaaaccagacttctgaacggtcacgcgtacggtcaagtaatcagttgccacgttcaaacaagcagctttttgaattactttgttatgcagaaagtatagacgatcagctgaacactctcttgaaggagttccagctaacagaggagaacactaagctccgatatctcacctgttctcttattgaagacatggccgccgcgtattttccagactgcatagtcagaccctttggctcctcagtcaacacttttgggaagttaggatgtgatttggacatgtttttggatctagatgaaaccagaaacctcagcgctcacaagatctcaggaaattttctgatggaatttcaagtgaaaaatgttccttcagaaagaattgcaactcagaagatcctgtctgtgttaggagagtgccttgaccactttggccctggctgtgtgggtgtgcaaaaaatattaaatgcccggtgtccgctcgtgaggttctcacaccaggcctccggatttcagtgtgatttgactacgaacaataggattgccttgacaagttccgaactcctttatatatatggtgccctagactcaagagtgagagccttggtgttcagtgtacggtgctgggctcgagcacattcactaacaagtagtattcctggtgcatggattacaaatttctcccttacaatgatggtcatcttttttctccagagaagatcaccccctattcttccaacactagattccttaaaaaccctagcagatgcagaagataaatgtgtaatagaaggcaacaactgcacatttgttcgtgacttgagtagaattaaaccttcacagaacacagaaacattagaattactactgaaggaattttttgagtattttggcaattttgctttcgataaaaattccataaatattcgacagggaagggagcaaaacaaacctgattcttctcctctgtacattcagaatccatttgaaacttctctcaacataagcaaaaatgtaagtcaaagccagctgcaaaaatttgtagatttggcccgagaaagtgcctggattttacaacaggaagatacagatcgaccttccatatcaagtaatcggccctgggggctggtatccctattgctaccatctgctccaaacagaaagtcctttaccaagaagaaaagcaataagtttgcaattgaaacagtcaaaaacttgctagaatctttaaaaggtaacagaacagaaaatttcacaaaaaccagtgggaagagaacaattagtactcagacatgatggctgctacattgtgtaaagaactgggcttagcctatcaaatggtctgtggacttacttggaaaaactgatttgaaactttcacagatctcagctttcatctgatgtcacttttcatgatcttctcattggcccccttaacctggtctgaagttctgggatgttttcagtttgatcagtctgatactcagtggcactttattaaaacatcagctgtggagtgtggcggtgcacacctgtagtcccagctgctcaggaggctgaggcaggaggatctcttgagcccaggattttgaatccatcgtggacaacatagcaagattccatctctaaaaaaaatgaaaataaacataagccacaaggaatgggtgaaagattattgtaatgtgctttaactaaataggtaaatatactaaacaaatgctaaaactcagttttaggatgaaaccattgttgatatccacatcagtccctgtttagaaaacatttaaaatgacttttagttatgtacagtacgttggcaatgaatacattaagcttcaaaatttggtagtgctctcgaatatgtatatttgtatttttcaagcgaagttctcttattcacatataaattaaagtgggttggtactgatatcaaaaaatgtttatgtttttagaacagacatttcagtcactgcattcttaggtattccaaaccaaatatgatgacatcaatagattgcattttaaaaatattgtttgatttttctattttcaaaaataaaattctgtttctaac

SEQ ID NO: 15407 - DNA, 2219 bp, Homo sapiens
ttttgtatttttagtagagattgggtttctccatgttggtcaggctggtcgcgaaattccggcctcaggtgatccacctgccttggcctcccaaaatgttgggattacaggcgtgagccactgcgccaggctttgcatatttctaaggtaggtcttcaacgccaccaaatctttgaaagtaaaatggtaactttttatgcgacctgtactttttctctattttgttggttttgtttcggctagctagatagacgatcagctgaacactctcttgaaggagttccagctaacagaggagaacactaagctccgatatctcacctgttctcttattgaagacatggccgccgcgtattttccagactgcatagtcagaccctttggctcctcagtcaacacttttgggaagttaggatgtgatttggacatgtttttggatctagatgaaaccagaaacctcagcgctcacaagatctcaggaaattttctgatggaatttcaagtgaaaaatgttccttcagaaagaattgcaactcagaagatcctgtctgtgttaggagagtgccttgaccactttggccctggctgtgtgggtgtgcaaaaaatattaaatgcccggtgtccgctcgtgaggttctcacaccaggcctccggatttcagtgtgatttgactacgaacaataggattgccttgacaagttccgaactcctttatatatatggtgccctagactcaagagtgagagccttggtgttcagtgtacggtgctgggctcgagcacattcactaacaagtagtattcctggtgcatggattacaaatttctcccttacaatgatggtcatcttttttctccagagaagatcaccccctattcttccaacactagattccttaaaaaccctagcagatgcagaagataaatgtgtaatagaaggcaacaactgcacatttgttcgtgacttgagtagaattaaaccttcacagaacacagaaacattagaattactactgaaggaattttttgagtattttggcaattttgctttcgataaaaattccataaatattcgacagggaagggagcaaaacaaacctgattcttctcctctgtacattcagaatccatttgaaacttctctcaacataagcaaaaatgtaagtcaaagccagctgcaaaaatttgtagatttggcccgagaaagtgcctggattttacaacaggaagatacagatcgaccttccatatcaagtaatcggccctgggggctggtatccctattgctaccatctgctccaaacagaaagtcctttaccaagaagaaaagcaataagtttgcaattgaaacagtcaaaaacttgctagaatctttaaaaggtaacagaacagaaaatttcacaaaaaccagtgggaagagaacaattagtactcagacatgatggctgctacattgtgtaaagaactgggcttagcctatcaaatggtctgtggacttacttggaaaaactgatttgaaactttcacagatctcagctttcatctgatgtcacttttcatgatcttctcattggcccccttaacctggtctgaagttctgggatgttttcagtttgatcagtctgatactcagtggcactttattaaaacatcagctgtggagtgtggcggtgcacacctgtagtcccagctgctcaggaggctgaggcaggaggatctcttgagcccaggattttgaatccatcgtggacaacatagcaagattccatctctaaaaaaaatgaaaataaacataagccacaaggaatgggtgaaagattattgtaatgtgctttaactaaataggtaaatatactaaacaaatgctaaaactcagttttaggatgaaaccattgttgatatccacatcagtccctgtttagaaaacatttaaaatgacttttagttatgtacagtacgttggcaatgaatacattaagcttcaaaatttggtagtgctctcgaatatgtatatttgtatttttcaagcgaagttctcttattcacatataaattaaagtgggttggtactgatatcaaaaaatgtttatgtttttagaacagacatttcagtcactgcattcttaggtattccaaaccaaatatgatgacatcaatagattgcattttaaaaatattgtttgatttttctattttcaaaaataaaattctgtttctaac

SEQ ID NO: 15408 - DNA, 2483 bp, Homo sapiens
ttttttagcaatggcggttcccggcgtggggctcttgacccgtttgaacctgtgtgcccggagaagaactcgagtccagcggcctatcgtcaggcttttgagttgcccaggaactgtggccaaagaccttaggagagacgagcagccttcagggagcgtggagacaggctttgaagacaagattcccaaaaggagattctctgagatgcaaaatgaaagacgagaacaggcacagcggactgttttaatacattgcccagagaaaatcagtgaaaacaagtttcttaaatatttatcccaatttggacctattaataatcatttcttctatgaaagctttggtctctatgctgtcgtagaattttgccaaaaggaaagcataggttcactgcagaatgggactcatactccaagcacggccatggagactgcaattccattcagatcacgtttcttcaatctgaagttgaaaaaccagacttctgaacggtcacgcgtacggtcaagtaatcagttgccacgttcaaacaagcagctttttgaattactttgttatgcagaaagtatagacgatcagctgaacactctcttgaaggagttccagctaacagaggagaacactaagctccgatatctcacctgttctcttattgaagacatggccgccgcgtattttccagactgcatagtcagaccctttggctcctcagtcaacacttttgggaagttaggatgtgatttggacatgtttttggatctagatgaaaccagaaacctcagcgctcacaagatctcaggaaattttctgatggaatttcaagtgaaaaatgttccttcagaaagaattgcaactcagaagatcctgtctgtgttaggagagtgccttgaccactttggccctggctgtgtgggtgtgcaaaaaatattaaatgcccggtgtccgctcgtgaggttctcacaccaggcctccggatttcagtgtgatttgactacgaacaataggattgccttgacaagttccgaactcctttatatatatggtgccctagactcaagagtgagagccttggtgttcagtgtacggtgctgggctcgagcacattcactaacaagtagtattcctggtgcatggattacaaatttctcccttacaatgatggtcatcttttttctccagagaagatcaccccctattcttccaacactagattccttaaaaaccctagcagatgcagaagataaatgtgtaatagaaggcaacaactgcacatttgttcgtgacttgagtagaattaaaccttcacagaacacagaaacattagaattactactgaaggaattttttgagtattttggcaattttgctttcgataaaaattccataaatattcgacagggaagggagcaaaacaaacctgattcttctcctctgtacattcagaatccatttgaaacttctctcaacataagcaaaaatgtaagtcaaagccagctgcaagatcgaccttccatatcaagtaatcggccctgggggctggtatccctattgctaccatctgctccaaacagaaagtcctttaccaagaagaaaagcaataagtttgcaattgaaacagtcaaaaacttgctagaatctttaaaaggtaacagaacagaaaatttcacaaaaaccagtgggaagagaacaattagtactcagacatgatggctgctacattgtgtaaagaactgggcttagcctatcaaatggtctgtggacttacttggaaaaactgatttgaaactttcacagatctcagctttcatctgatgtcacttttcatgatcttctcattggcccccttaacctggtctgaagttctgggatgttttcagtttgatcagtctgatactcagtggcactttattaaaacatcagctgtggagtgtggcggtgcacacctgtagtcccagctgctcaggaggctgaggcaggaggatctcttgagcccaggattttgaatccatcgtggacaacatagcaagattccatctctaaaaaaaatgaaaataaacataagccacaaggaatgggtgaaagattattgtaatgtgctttaactaaataggtaaatatactaaacaaatgctaaaactcagttttaggatgaaaccattgttgatatccacatcagtccctgtttagaaaacatttaaaatgacttttagttatgtacagtacgttggcaatgaatacattaagcttcaaaatttggtagtgctctcgaatatgtatatttgtatttttcaagcgaagttctcttattcacatataaattaaagtgggttggtactgatatcaaaaaatgtttatgtttttagaacagacatttcagtcactgcattcttaggtattccaaaccaaatatgatgacatcaatagattgcattttaaaaatattgtttgatttttctattttcaaaaataaaattctgtttctaac

SEQ ID NO: 15409 - DNA, 1068 bp, Homo sapiens
cgttgacgcggaccacaggacgacaggtggcagctgccacggaggacctggagagcaggtggcgtttttcaactccgctggagccagtgcccaggaggagcaggtatggcttatgtgggcagctgagggagcaaagggtgtggtgccagcgcctgactcacccgggtggccttggcccagaaggagccagaggtagtggaaccagccccagggactggggatgagtctgtgtgtgggtagactcatcaggccctgcagggatccatggagaagttgcaggtgagtgagtcatggcatgggccaagaaggttgggggcagagcagggcagggcaggtcgctctcaagatgtgaccccattattttggatccagagtggctttatggacctcctgaaggagaaggtggacctgaaggagtgggtggagaaactagagcttcgatccatccacctctcaggacaggcagacaccatcagaaagtaaatcacaacatacgagggccagagggcagcgccaaagacgcggcaccaggaggaggaggacatcatcaggctggcccaggacaaagaggagatgaagatggggcattgcagcacctctgtgggggtgggggtggggtgggtgtgagcgtgggcaggggcactggcaccagcgtggcagctgagcacccctcccttcaggtgaaactgctggagctgcaggagctggtgttgcggcttgcaggcgatcacaacgaggggcatggcaaattcctggccgctgcccagaaccctgctgatgatcctgctccaggggccccagcccctcaggagcttggggctgctgacaagcagggtgatttttgtgaggtgagccgacagcctggagcctgcaccaggagaggccagggagggttgtccccatgacaaccccactgcacagcagctcatgcagcttcttcctgtgatgcgggacccccaggagtacccaggcttgggcagcagtccctgcatgccattcttttaccaggctgccaagaacagggagctaaacatcaccatcatctaagagctggtcaagaaattaaaa

SEQ ID NO: 15410 - DNA, 152 bp, Homo sapiens
caggaaatctcttgagacccttaaggtcagaaacaagacagacaaatctagtcatccaaaacacacaattgcagtaattatagaagtgtgttgagatgaaattgtgaatatgattgtttggactgaggaatggtcagattgatagattcttt

SEQ ID NO: 15411 - DNA, 492 bp, Homo sapiens
ccccagaggagctcaacacagattagacttagcagaagaacaaataactaaatatgaagatagatcagttgagattgtccatgtgaggaacagaaagaaaaacaagcaaataaacataaacagagctagacatctgtagtacgcccccaatcacacaaacatatgcatcatgagagtttcagaagagaaaaaagaaagaggtagagagaatatttgaaaataactgatgtccctaatttttccaaacattaatcttcacagccaagaagctcaacaaactctaagttggataagttcaaagagagactcttcaaagcagcaagggaaagcaattgataagataccattaataatattaatagacattctcagaaaccatagaggcaagaatagagtagaatgacatgttcaaagagctaaacaaaattaatctcaatcagtatttccatatttcagcaaaagtatccatcaaaaatgaaaaaaaaaattatt

SEQ ID NO: 15412 - DNA, 478 bp, Homo sapiens
aaatttttatatatgatacacaaaatatatatagatgctcttctgcttgtaatggtgttatgtcctaataagcccatcataagttgaaagtatcataagttgaaaatgcatttaatacacctaacctactgaacatcatagtttagcctagcattccttagacatgctcagaatgcttatgttagcctaaagttgggcaaaattatctaacacaaagcctatttcataataaagtgttaaatatctcatggaaattattgaagtttctactgaaagtgaaaagcagaatggttgtatgggcacttgaagtttcagttgaatacattgctttcacactactatagagctgaaaaatagtaagtcaacctatcattggggactgtccatatatgaaacatacaacagacaaaagaaagggatttggttttcaaaattggaattcttatatattttttacatttattatgataaaaaattg

SEQ ID NO: 15413 - DNA, 522 bp, Homo sapiens
tccctattatttctgtccacattttataggctatggaattgaaacatagagaaattatttaatttgctcaaagtcccctagctaatagctgatggattcaggattcaaatttagacagtctgactgcagaacatactgttttaacagctacattgagttgcattttaacaaacaaatatttaacaaataaatattaaaatatttaattctggagttcttattctgttatttctggaccttggctactgctattggtagaacttccgtgtatcctgacagacatattgtcagtgccctcgcacactctcccagaggagacctctgggccccacttcagaaagccctggagtgtgcatgcaggtgtggctccttcctcctggagatcttacatagtacactgtgaaggaccatgagggacgtaagatgtataatgtacatcctacaccctcgaggtgtgcaacctggtgtccttgttggaatgtgaggagtttaccatgattaagagctcagatgctttcatta

SEQ ID NO: 15414 - DNA, 520 bp, Homo sapiens
agctgaggcattggtgtacccccagatcaccctgagtctgcttccagagccaggccctggtgaccgccataaagacccagcaaagagttctaggacagtgcttggctcagggtgcccacactcttgactccagtgccaggagtcctgcctttgtgctcagtttgtagggacctgcctagggagggcctctctgcctgagtgtgggtggaggtctctgtctgggcaggggagagtcattggctccgctcatctgggaggtgactgagaagttttcagattccctggcatctcagtgtcatcttgccatgcttggagatggggattcaaaatgaaattttacatcattttacatcctatgataaaagttggagccctgctcacaggccaggcactttataaagggggctacatacacccaagcagagaggaggaggctggcactgcccatgctctcataagctacttcctagagccctgtagatcctggggccaaacacctcagtttgaagtaatttccaaa

SEQ ID NO: 15415 - DNA, 451 bp, Homo sapiens
atgaacaaggtccccattctcaaaaaactcagtctagcaggagaatttactcaatagtaaggctcaacgagtaccagaaattgaaccacgtgcttagagaaataagatactgttgatattctaaggtagcagcattatttattacacaaaaaaaacctgcaacataggtctccatcaaggaccacagaaggccaggatgcttggcctggcttgaggagtccagggaccataatggcagacctgaaagacaggcaaatacaccagctaaacaaacagatctgatttgttttgagtctctggagaaccctgactaataaggcagccttgaaaaaggattgcaaacatatctgaatggaggtgatgtggctttctcacaagcttctctaaactctcttcatcatcgcctcagcacataagagtttctacttttattataatgttgctagagttt

SEQ ID NO: 15416 - DNA, 819 bp, Homo sapiens
ggagtttgtgtctagtctacaatgatgctatcctgtgtggattatgtgcttccttctttgctgtgagcaactgctcacttcactgttggttggagccagaatctcttctagaacagtttccaccatcctcaaggggagctgagatggggagggggaagttgagtcttccaattacattctctccttggtaaaatccttgttttccctgaaaaaacaaccccatctattctctcctcaagaagtgtttgaggaaaaggtataaaaaaggtactttaaaaattattttcttatagtattaccttcacacttctgctaggtctcctctagaaacaccagttctcacacattaaaactttaatccactcagggaacattttcctaggcatgactgtccctcataagttgctatagacaccagatcaatttctagccctccaattctaggagctagtgctacacagagtgggtgccatacctattattatgttactttttcttttggaagtgtagcctccaagtctttaagccagagtctgaaattaaaatgtccataggaccaggcacctgccataaagattgaagcacgtgaaagcacatggccatttgcttaacagaacctaggtcacatatgaaacccttttgccttgacaaaaaaattagctgggcatgatggctcacgcctgtagtctcagctacttgggaggctaaagtgggaggatcacctgagccctggagattgaggctgcattgagccacgatggtgccactgcactccagcctgggtgacaaagcaagaccctgtctcaaaataaataaata

SEQ ID NO: 15417 - DNA, 207 bp, Homo sapiens
acacccacacagacacacaggatgagtgctctatatagccaatgaagtcaagatcagttccctcattgcccagaagatgcagatacaaaatagttaattgagaagaaagaagattaccagcttgttcataaagtgctttgcttcatcattgatctttaaaatactagaaagaagttagtattgtttttatttttcccattgggtgat

SEQ ID NO: 15418 - DNA, 252 bp, Homo sapiens
accccctctaattgccaatctaaccattgcaacccagtacttatctctattaatacccttaccttcaccattcccacacccactgtagagcgattttatggctaaggggcagatgttgctggaagggaccctataggcttctttaaattatgctttgttccttccccttcgtctcccaccccctcctcgatcccacaaattcaaaccatttcccacctcatacccaacgacaaaaccaaagtatcgtaatag

SEQ ID NO: 15419 - DNA, 476 bp, Homo sapiens
agtttgggccagtgtgagccagctcccttcctagggtgccggctcagggagtcaggtaatggggccagggaaacgtgtgcccactgacttgggaaagagagaggggcccatacctccttcttggcaggaaagaaaatcacagccccgaaaaagtaacttgccaggagcccccttctttgtagcattcctatcactgacttcctgttagcctgggtctcctgttctcaccctgctctttgaaatccttggtggccagtgccggctatgtaggtgacctgtgctccctggtcccatggaggttctgcccagctgaccagccttgcagtctgtttctgcagcccagataatggttcagaggcatgttaatgtgtgctttgctttatgtagcaaatatcatcttgaaaagtttttttgtacatttactttttttttgtaaagcgacctacataataaaagcactaggggagctggttatt

SEQ ID NO: 15420 - DNA, 703 bp, Homo sapiens
atcctaaatgctttaaaaccccaaactttttgagtgcccacataatgatcaaaggaaatgctcattggagcatttagattttagagtttctgatttggtatgctcagttggtataatgtacatattccaaaatctgaataaatgtgaaacccgaaacacttttagtcccaagcatttcacataagggatacttaacagcctagtggtataaacttgaataacctttttaagggaccttttaaccatttcttgttgaattgaaaaatgatactcttaacaattctaaggaaatagtcactgtgcattaaagagctgcacaaagatattcatggcagcattttttgttgtcaactgtatataatatgaactgcataatgtaaacattataaacagaaatgtccatcagcaggtaaatggttcattcaattaatagtatatccatacagttaaatggaatgaaatagatccatatgtacagacccagaaatttttgcataatttagtaattatgaaaagttatacaggacagttgtgctagcttttgcctgtaatcccagcatactcggaggccaaggcagaaggactgcttgaggccaggagtttgacaccatcctgggcaacatggtgagaccctgtctccacacacacaaatttaaaaattaaccaggctcccagatcacagcatgttgaccaaaaaaaaaaa

SEQ ID NO: 15421 - DNA, 553 bp, Homo sapiens
ttttttttttaatttcacattccttttacttaattctgaacataaaagtcagaccagaagtaccccaaccttataaggatttaaaatatttataatacagaatcatgatgtaacatgtttcatgtccttgttagtgagcaggtgattataatactgtgacaaaagcatgcttaagacacttctaattattatcattattattattattgagacagggccttgctctgtcatccaggctggagtgcagtggccaatcttggctcactgcagccttgaccacccagggctcaagccattctgccatctcagactcccgagtagctgggattacaggcgtgcaccgccaggcccagctaattctttttgttttttagtagagacaagtttcaccatgttgcccaagctggtcttgaactcctgccctcaagtcatcctcccgccttggcctccgaaagtgctgggattacaggcatgacccaccgaacccggccggcacttctagttatttcacagttggtagagatggagaacttcggatttgtataaaaggcct

SEQ ID NO: 15422 - DNA, 446 bp, Homo sapiens
gaggaatatttgtccaacagcataaaatgaaggtagggactccactgtttgtaatttgaacttcacacaattttccttattctagcactgaatttcactcttctttcctcgcctttccaataaggcggctgtgcctaaatctagctttccatggataccaaggtcacaacctggatagttttctctaccactccaaaatgtggctggtggctgaaatccagactgcctgctggtaagccatctttgattctcctgtgaaaaatgttcatctctatcaaccgtgggatggggtccttgaatggtgaccccacactgggtgtctaatagagcactttgactttccatgcctctttgtgtaatcaagggaggcattgggaaatgcatgcttttcttttttgtgaacacataccttgtaagttttgccattaaaatctgttcattaactc

SEQ ID NO: 15423 - DNA, 568 bp, Homo sapiens
gtaatagtatatgatagcatagtatatgatagcagtagtatacgatagcatgtgtgtgagtccattttgtattgccataaaggagtacctgaagctgggtaattaataaagaaaaggggtttatttggctcactgttctgtaggctgtacaagcatggcactaacatctgcttggcatgagccaccacacccggccagaattttatttttagtgactaggctttcctttaaaacctctgtactaggccgggtgcagtggctcgcgcctgtaatcccagcactttgggaggctgaggtgggaggatcacttgagcccaggagtttgagaccagcctgggcaacagagtgaaaccccatctctttaaaaaaataaagcacttgaagcagaactttttatctgtcataatcactgctatgtccacagcacctaaaacagtcccagacatctgttgaataaatgaatgaatgaggtgggaagtctttctttacacttagatgaaaactccatcggaccccaaattgttctggtcttgttcaggtaataattttaattctataataaaatctc

SEQ ID NO: 15424 - DNA, 465 bp, Homo sapiens
aacctaaatcccctttaaattcactacagaacaaagagggagggccagtctagagcctggactcctctcagggcaacccagcagatagtcacattcaacccaggccaagtctagtgtctgggacattctggtttgctcaggcctccaggcaggcttaattgggaaggccaagtcagattaaccctcagtaatttttatacatgccctatacttggtaagaaaatgtaccctctgcaccaaggcttgcctatgcattgtcggcttaataagacctgccttgcttgtaagacattatattttcattgatgttttgaccttagaacatgagaaagcacatgaacatatagcaaaactgaatcttagggtcaggaaagttcttccagcatggcacatgtatacatatgtaactaacctgcacaatgtgcacatgtaccctaaaacttaaagtataataaaaaaaaaaca

SEQ ID NO: 15425 - DNA, 1247 bp, Homo sapiens
ggaggtttccctctgaaggaatctagaccattttttaatatggagaataactgtaccccatgttagaagtgctctttagccatatttcaagatccagatctgaacccatactgtgcagaaaagcacaagagcgcttacagccaagagccctgggaggagttgagtaacaggctgagatccggtcaccaagcatcattagttagcactgaaattctcccaggacacaaaacaaatgtatggaaacatcgcaatacactatcatttactcacatgggacaaccacctaagtccatagcaaaactttacagatctagatgttatctcaagtcaggattccagatcaacatcctccatgtggagatgagacaactgaggttcagaaagttggagtgacttatttgcccagctagctaactggaattagagtctgggtctcccaaccactgattctgctacaccacactgtgctgcttccattagttagatggacattgacaattaattgtgaaagcattaattaggaagtcaagacaaaagaatgtttgtgatatcttctctcgcttaacatactttgatttcaccattgcatttcagcattttaaagaatagtgtatcagtatagaaggaggagcaaagctctttaagagtaatgatgaaaccaaaaggtcaaaaagtagaagaatagcgaatgtaagttattaaataaatgagcaagaagtatgtgtcagggaaaataaatgcttcttatattgttaataccgtgattccctgcccgctcaccccgtcactcaacacttgatgcatttgttttggaaagtgccattttatgctgagatactggtattgaaaacttccctctttcccaactctgtcagaagttctcttgctctttggaagaagccgagggccttaacaaatcagactgacctcccttgtgacaggcagcctcgcctgcccttggaaacaagctgccagaatgtgagggccacagagacccaagagaagccagcactgctagactgaggaacttgtaaatatcttctgctttcttggtgaacaaggacagaggcaattgcgtgtatattgtgactgtagtttgtgaagaaaatgcaaccatttgcttcgacagctcctcaaatgtacttgttaagtgtgaatgtgcctgcctcattgccttgtgttccaaacacagtactgaatgcgttgtttttaaataaaccatttcgttttgctttgaaaaaaaaaaa

SEQ ID NO: 15426 - DNA, 1132 bp, Homo sapiens
acatacacatcaggaggtggccttgagaagctgagcggagaccggctagactttactcaatttgaagagaaatttataggatctgcagaagatttgggaaagttaagaaatgatgggagtttgatgttccagcaagtaccaatggttgagattgatgggatgaagttggtacagaccagagccattctcaactacattgccagcaaatacaacctctacgggaaagacataaaggagagagccctaattgatatgtatacagaaggtatggcagatttgaatgaaatgatccttcttctgcccttatgtcgacctgaggaaaaagatgccaagattgccttgatcaaagagaaaacaaaaagtcgctatttccctgccttcgaaaaagtgttacagagccatggacaagactaccttgttggcaacaagctgagccgggctgacattagcctggtggaacttctctactatgtggaagagcttgactccagccttatctccaacttccctctgctgaaggccctgaaaaccagaatcagcaacctgcccacggtgaagaagtttctacagcctggcagcccaaggaagcctcccgcagatgcaaaagctttagaagaagccagaaagattttcaggttttaataaagcagccatggaggctaagaacatgcaagaccaatattctaaagttttgcaacaatgaagtgctttacttaagtgttgattgtgcctgttgtaaagctaatgaaccctttccaattatatgctaattaaataataaaaactcctatttgctaacttaaaaaaaaaaaaaaaaaaaaaaaaaaaaaaaaaaaaaaaaaaaaaaaaaacaaagaaaaagagataaaaagagaaaggggagagactataaaataattttcagggaagaaagaaagagaaagagaaaccattatctgaaaagtgcatccacatacgagaattaaaaagacaagggaggaaattataaaaagtataagatagcaaagaatggattagaagagaaacataaggtagagaaaaagagaagaagaagaaagatgacggtgagataaaagagtgtaggtgaaaataatggcagagggagaagcgtgtatgaaatgaacaggaagaa

SEQ ID NO: 15427 - DNA, 1240 bp, Homo sapiens
acatacacatcaggaggtggccttgagaagctgagcggagaccggctagactttactcaaagaaaccaagagactgttaccatggcagggaagcccaagcttcactacttcaatggacggggcagaatggagcccatccggtggctcttggctgcagctggagtggagtttgaagagaaatttataggatctgcagaagatttgggaaagttaagaaatgatgggagtttgatgttccagcaagtaccaatggttgagattgatgggatgaagttggtacagaccagagccattctcaactacattgccagcaaatacaacctctacgggaaagacataaaggagagagccctaattgatatgtatacagaaggtatggcagatttgaatgaaatgatccttcttctgcccttatgtcgacctgaggaaaaagatgccaagattgccttgatcaaagagaaaacaaaaagtcgctatttccctgccttcgaaaaagtgttacagagccatggacaagactaccttgttggcaacaagctgagccgggctgacattagcctggtggaacttctctactatgtggaagagcttgactccagccttatctccaacttccctctgctgaaggccctgaaaaccagaatcagcaacctgcccacggtgaagaagtttctacagcctggcagcccaaggaagcctcccgcagatgcaaaagctttagaagaagccagaaagattttcaggttttaataaagcagccatggaggctaagaacatgcaagaccaatattctaaagttttgcaacaatgaagtgctttacttaagtgttgattgtgcctgttgtaaagctaatgaaccctttccaattatatgctaattaaataataaaaactcctatttgctaacttaaaaaaaaaaaaaaaaaaaaaaaaaaaaaaaaaaaaaaaaaaaaaaaaaacaaagaaaaagagataaaaagagaaaggggagagactataaaataattttcagggaagaaagaaagagaaagagaaaccattatctgaaaagtgcatccacatacgagaattaaaaagacaagggaggaaattataaaaagtataagatagcaaagaatggattagaagagaaacataaggtagagaaaaagagaagaagaagaaagatgacggtgagataaaagagtgtaggtgaaaataatggcagagggagaagcgtgtatgaaatgaacaggaagaa

SEQ ID NO: 15428 - DNA, 1138 bp, Homo sapiens
acatacacatcaggaggtggccttgagaagctgagcggagaccggctagactttactcaaagaaaccaagagactgttaccatggcagggaagcccaagcttcactacttcaatggacggggcagaatggagcccatccggtggctcttggctgcagctggagtggagatgggagtttgatgttccagcaagtaccaatggttgagattgatgggatgaagttggtacagaccagagccattctcaactacattgccagcaaatacaacctctacgggaaagacataaaggagagagccctaattgatatgtatacagaaggtatggcagatttgaatgaaatgatccttcttctgcccttatgtcgacctgaggaaaaagatgccaagattgccttgatcaaagagaaaacaaaaagtcgctatttccctgccttcgaaaaaggctgacattagcctggtggaacttctctactatgtggaagagcttgactccagccttatctccaacttccctctgctgaaggccctgaaaaccagaatcagcaacctgcccacggtgaagaagtttctacagcctggcagcccaaggaagcctcccgcagatgcaaaagctttagaagaagccagaaagattttcaggttttaataaagcagccatggaggctaagaacatgcaagaccaatattctaaagttttgcaacaatgaagtgctttacttaagtgttgattgtgcctgttgtaaagctaatgaaccctttccaattatatgctaattaaataataaaaactcctatttgctaacttaaaaaaaaaaaaaaaaaaaaaaaaaaaaaaaaaaaaaaaaaaaaaaaaaacaaagaaaaagagataaaaagagaaaggggagagactataaaataattttcagggaagaaagaaagagaaagagaaaccattatctgaaaagtgcatccacatacgagaattaaaaagacaagggaggaaattataaaaagtataagatagcaaagaatggattagaagagaaacataaggtagagaaaaagagaagaagaagaaagatgacggtgagataaaagagtgtaggtgaaaataatggcagagggagaagcgtgtatgaaatgaacaggaagaa

SEQ ID NO: 15429 - DNA, 580 bp, Homo sapiens
agccttcgtgcagcctgtttgcccagcattgtgggtggcgtggctaattctgagccacagctgctctgtctttttcttcagggggtgaggccctgggatgggggcggatgggcacaaagagcctctgtggcctgtgaatggagcagcgccgtgtcgtggccgcgccgcgtgggcgcgaagccgcttgctcgatgtcttgcctccacgagcatccagtgaatctccttcctcccacctgagcctcagtgctctttccgcagggcttagctccatcatcactgctttgacgggattagcccagagaactttgagctcccgtagaccactccataggaccatgtgcccacccagctgtcagaaagacttgtcctaatgacccgtggtccccttctgctgtcagcaccagctgtttccaaacatctggctccatggcactcccttagtgtgcgaccacgtgtccttggttttcctgggctggatttcctagagtgtgggttttctcaaagtccaggaacaaagcttgattgtttctgagctcctggggtgaccttgctgctccctggccttctctcttgtcccc

SEQ ID NO: 15430 - DNA, 428 bp, Homo sapiens
aaatttcacagaggactatgcatggtagtgagtcagttgtgtatatgtgtgtgtgaaatgtgtttctttaccgatataaaagtttgaaagtcactgctttagagagtttctgttggaacaagcttccaagcaacccatatgtctgtactagaggaaaatctaggaatatcactgtaaggaaacatagggtcgtgtatgggaagatatggactcaaagagtttgtagagcaaggaaatcacagctgcttagcatgggagagtttgccaggataaatgatgatgatatgttgacagtgattatgttaatcatgctaattatgataaaaatgaaacttttttcaactcatgcattttcaccttttgacatttctgaagtagggaatattttaagatttagtggcaagtcatagtttttacttcatattttc

SEQ ID NO: 15431 - DNA, 370 bp, Homo sapiens
gaaataataagaaactgtaatattataagtacatagttcagcttcattatgggttaaaagaagggtttgtgggctggcatgagaatacaccagtttataacattgtatacttgggaaaatttcattctgaagtctaaactgctattttttagaagaaactgttagagcaccctgggatgtgtgggcctgggactgtttgcctttggcacggctatgctccgagctttggaggagccaaggaagaaaggcctagttcctgatcttaaggcctttgcagtgtgcattgggagacatagactgcaatgaaaagatcattattgcaagagacaaatggcatggagccacattcccaggtaacattttagtacat

SEQ ID NO: 15432 - DNA, 1262 bp, Homo sapiens
tgtgctcgtctgtaaaattagggatggggaaagaagtctaataaaaaggctcagagaaaggagatgctggagttgatgtaacaggattcaagactctacgatattaactgtttcaagtagaaaaccatcaagaaaggatagaaatttaggattgctttcaaggagcctctcattccagatttactacttagtactgtgtgaccttgggcaagtgactgtacctctctgggcctcagatgcctcatcttggaaatagattatcgtggtactcactttgtagtcttgttgtgaagagtaaatgaggtaattcttttttttttttttttttccagatgcagtctcatgcactccagcctggtgacagagtgagactccatctcaaaaaaaaaaaaaaaaaaaatcatacaatagtggaaaaaccacataacccaatttaaaaatgggcaaaagacctgaataggcatttctacagagaatatgcaaaaatggcccacaggtatatgaaaaggtgctcaacatcattcatcattaattaattattaatcaaaaccagatgagataccaccttacacccatttggatggcaactatcaagtcacaagataacaaatgttggtgagggtatgaagaaaagagaacccttgtacattgttgctgggaatgtagattggtccagctgttatgtaaaatagtatggatattcctaaggaaattaaaaataaaattaccagatgacctaacaatctctcttctgggcacatacccaaaggaaatgaaatcaccgcctcataaagagacctgcatgcctgtgttcactgcagcgttgtgacagtgaacataggcaacaacctaagtgtccggtgacagacaaatgaatacactgtggtatatgtctagattggaatattattcagccctaaaaaagatcttgcctttgccacaacatagacgagcctggagtgcactgtgttaagtgaaataaaccagacaaagaaagaaaaagattgcattgtttcaagtatatgtggaatctaaaaacaaacaaacaaacaaaaacccaactgtacagaaatagagaacaaaacagtgattaccaggcaggggatagctagggaggagatgggagatggaggtctgtattaagtagggagggtggccaggtctggagacctaatgtacaaccggaagactatgggtaagaaaactgtgctatatttgggattcatgctacaggagtagatttcagctgctcttgccaccaa

SEQ ID NO: 15433 - DNA, 1811 bp, Homo sapiens
aaaaaaaaaaaaaatcataggaaatgtttaaaaatcctgaggcttgggtcccatgaactgagatttttatttatttgatctagcgtctagctgggccttatgacttttagaaacactccaggtgattccaaggcaccacttggccagtggaaggccatgttaattttatattgaaaaagacctagaatataaatggtttactagtcaactaattttccacaagggcaccaagaggacacaatgggaaaaggatagtctgttcaataaatggtgctgagaaaactgaatttccacatgtaaaagaacgaaattggacccttaacttataccactcacaaaaaatagactcaaaatggataaaagacctacatgtaagatctgaaaccataaaactcctagaagagaacacggggaaaaagctcctggacaattgattggccttgacaggttttttttggatattgcaccaaaggctcaggacacaaaagcaaaagcaaataaatgagagcacatcaaactaaaaagtgtctgcatagcaaaggaaataatcaacaaaatgaaacagcttatgggttgggaaaaaaatatttacaagccatatatatggtaaagggttaatatcccaaattcataaagaactcatacaaaaggctgggtgtggtggctcacgcctgtaatcccagcactttgggaggctgaggcaggtggatcacaaggtcaagagatcaagaccatcctggccaacatggtgaaaacccgtctctactaaaaatacaaaaaattagccgggcgtggtggtggacacctgtagtcccagctactcgggaggctgaggcaggagaatcacttgaacccgggaggtggaggttgcagtgagccgagattgtgccactgcactccagcctggtgacagagtgagactccatctcaaaaaaaaaaaaaaaaaaaatcatacaatagtggaaaaaccacataacccaatttaaaaatgggcaaaagacctgaataggcatttctacagagaatatgcaaaaatggcccacaggtatatgaaaaggtgctcaacatcattcatcattaattaattattaatcaaaaccagatgagataccaccttacacccatttggatggcaactatcaagtcacaagataacaaatgttggtgagggtatgaagaaaagagaacccttgtacattgttgctgggaatgtagattggtccagctgttatgtaaaatagtatggatattcctaaggaaattaaaaataaaattaccagatgacctaacaatctctcttctgggcacatacccaaaggaaatgaaatcaccgcctcataaagagacctgcatgcctgtgttcactgcagcgttgtgacagtgaacataggcaacaacctaagtgtccggtgacagacaaatgaatacactgtggtatatgtctagattggaatattattcagccctaaaaaagatcttgcctttgccacaacatagacgagcctggagtgcactgtgttaagtgaaataaaccagacaaagaaagaaaaagattgcattgtttcaagtatatgtggaatctaaaaacaaacaaacaaacaaaaacccaactgtacagaaatagagaacaaaacagtgattaccaggcaggggatagctagggaggagatgggagatggaggtctgtattaagtagggagggtggccaggtctggagacctaatgtacaaccggaagactatgggtaagaaaactgtgctatatttgggattcatgctacaggagtagatttcagctgctcttgccaccaa

SEQ ID NO: 15434 - DNA, 522 bp, Homo sapiens
tctttctctctccttctctacatagagaagtgccagagcatccgtcagtagaagttacttaaggttggctgtgtcttccacatcttttgtttacccatgaagaactgtgaccatcttgttctgtgtcttgtcataaagatgggacgtgacttctttctgctcttgcttccatctggtgctgttttctgcacagcctccttgagaccttccagaaccttcttttttcctacttcgtatcacttaaccagtagctatctgggatggttccagaggctgaagtttgcagttgaataacattttaaatagtgttaagcgacttgggatctctggccctttgcgtttcagtatttgtcctttttatgcctgatgtttaacctgccacatgtttgtactgcaacatgaatcttggaaattttaatgttatgcatttcaaatgtttttggttatctgtaaactaaatgtgcccttattggctcacttgtcaataaagatgtttgtatatgtattgtcagaaaaaaaaaa

SEQ ID NO: 15435 - DNA, 342 bp, Homo sapiens
tctgcctgttgtctccagcacagcttcctattgaaagcaactctatgtctaacctgccttaaagcaggttacggctatattttaaaacccaccgcattaattcaggacatatctttttatcaaatggatttctcttctgcatacatatttaaacatgagccgtacactcagagcaatggactgttttatgaaaggtgattagcatatagtactcaatcaaagaatttgtaaatgaaaaaagttgaaaatatgaaatattgatcactggggtactcattaactgttcaaaagcataatttagttgaatttcaaatgtgttaatgtaggatatcattcatagaa

SEQ ID NO: 15436 - DNA, 2633 bp, Homo sapiens
gaatcctgatgtaaaagcataggttcttgcattactgagtaaacattgaattgggagcatcagtgtgtgaattcagctttgattttagaactgcagttcaattatgctttccttggaaaaagtatgtccaaaaacattaggaaagtagtgtgtattttcatatataacagtgtcaccagacccaggaaaagaaaccatctctattttattgaaagttggtggtagattttttacaaagtaaggagaaaagagaaaaactaaatagtgaattgaaaatgaataaagtaaacttagaatttttacccaagtgtagacttaaatgttgctttgagtatggctggatcttgggagaattccagggaaatattaggtattagaaaatgactttgattgcatttcagcaggtgtctttattctgagtagtatcttaggagacaaactgtctcaagcaagaaacaataaatttttaaatattatgacagttcagggcttaaggcagtttagaagtattttgctacttgaccttgattttcagttattttaactttgaatttttttttttttttttgagacggagtcttgctctgttgcccaggctggagtacaatggcaccatctcagctcactgcaagctccacctccagggttcatgccattctcctgcctcagcctcccgagtagctgggattataggcgccagccaccacgactggctaattttttgtatttttagtagagacggggtttcaccatgttagccagggtggtctcgatctcctgacctggtgatacacccacctcggcctcccaaagtgctgggattaaaggcgtgagccacccgtgcctggccttgaatttttttttaacctgttatatagtctcctgaatagttagccatggtgccttgatttaatcttatgtcattgttctcaaatgccatgatttctctttaatagtagttgtcattatgtaagggtaagttattgcccatttaattgtaattataagaagaggtgccagctagtgaccttacatcagtgatcttttaagttctgaagggttctgcagaaaagttacacttcttgagtttgggttgcccatcagagctggtcacatttctttgatcattgaaaaaatgaatatcttaatttttgtctttgctgactggtatttataaaatacaaatgcttttagtgggttgagctgttgtgataatctcttccatctaccttagagaagaagctgtactatttagacagttttggccaacactagaagcaaaagaattcaaaggctgggtggatatttaagaacttattctaacctgtcaggtttcaatttgtggggcttggtttaacagaggaaaaaaatataaattgattttctgatgtctcacaaatatcacatacctggaaaaaaattaaaacaaaaaatgaattttgtaaaaggttatgtatgacttccatttgctctgtaaaaaaatgaacaaagattgtgaaaggatcctcttccaccacatcatttaatgggttagcggaacagatagggagctatgacactagcaccaaagagagatttttcttctggttgggtggtgctggtgccacgcccctttctgggatttgacaagtctttcccactcacctatacaatatgccaaatcaactggagttgtcattctaatgttttaaagaatgattgggttcccccaaactgtaggaggtcgatggtaacaataaagtgatacaaaatgcttatgtcattataatttatgtaagggagaccattaggctgagaatcaatatgattgaggttatctattctcctgaaaagtgaattggagaataaagaaagaatatttgaaaggatgttgtgtactaggcaatatactagcatgtattagaaaatacggtaaactgtgggttagaagagtgaaagtagctggtatgatagagcactggactgagtaacgaagagattctagtcatggctcttgtggtcatttcatttttgagcctcacattcttccaattaatgagggtaccagattaaataaactctggggattcatcccaattcgaactctgtaattctctgaatgaactctctcttcaattaaagccaaattattaacattttaactcaagtttaaatttaatagagaagtcaaaatgaggtatgcactttgtggaatgtttttggtcttatcacaataacctgattaaaatggtgcctttatttccatgtttactcctttaaataagatgaaagctttcagaacatttatttgcaaaatgactgtcaatatcaacaatatgcatcaaagtaccatatatgctaagggagaggagcacttgatgggctgctatgttaactgtaaattgagaactgcttgttttatggcttttgctgttaaaaaaaaactgctggcttttaatatgtactttaaaatatactcatgtctgggagactcagaaaaaaacaacaaaaacaacaaaacaccattgtggcccacatgggccctaaaaaacgtttgaaaacaatgtcgtgaggcccggggcccatgaggtaagcggacacggccaagaggcgcccagagaaacggggcacaacaaggcgggatctccgcataa

SEQ ID NO: 15437 - DNA, 839 bp, Homo sapiens
agagataaaagagaattctaaggtataatagagatagtaactgcagaaaaagattgctgtacctaaggctgagggaaaagtgaaaaaggaaggaacttagagctccacaaggctgagattcagacctcagaggagagtatggctgctgtggcagtatgctgcttgttgctgtggtgaagaagaaactggctggagggcactcacctcagaacctggagagtcgctgctttgaaatgtaccaagattcccctgcacactgatctacttgctactttgtgaaaaactgagcattgcaactggctttgtattctccttccagcaccctctatcggcagaacctaatagccactcgctccactgggaaaggagaaatgtagtcagcctaggttagtctcgtatcacagagcaaggcaatgaagaattggtttggaactgtaaggcaataatttaacttctgtattataattgtctgtttttgatatgtcttccttattgcaccatgaacttggtagtgtctggaacagtctgatttgtctccatatctgcattgtcccagaagtgactttggcactaaaaagttgatcattaattactgtttgggccaggtgtggtggctcatgcctgtaatcctggcactttgggaggctgaggtggatgtatcacctgaggtcaggaattcgataccagcctgacaaacatggtgaaacctgtctctactaaaaatacaaaaattagctgggtgtggtgccgggcgcctgtaatcccagctactctggagactgaggcagaagaattgcttgaacccaggaggtggaggtttcagtgagctgcgattgctc

SEQ ID NO: 15438 - DNA, 378 bp, Homo sapiens
gagcccagagctgaacagggaccctttcacttcaaggcaggcacctttcatccccaacagcagagggcactgcagcctccccctggccacccggtgtgtcccagagccacagctctctagccctgagttcatgcaggtgactgtcacttccgcaagagtcctcctacctcccagctggccacactcccagctgccgtcccagcccacagatgggccaatgcagtcgagatggcagtgtctgcccaacccatgtcccccagcccgaccccatgtctgggagaggccatgtagccccttggcacccacccggttccctccactggccactgcctgcgtcagccctgcctcacagcctcaaaggcaggcctgccctcctgg

SEQ ID NO: 15439 - DNA, 331 bp, Homo sapiens
tgcatttgggcattactccagaattcccctcacccctatcagactttcaaaaatgtctaaaacataatggctaagagttctataaaaaggtctctggacagcaatgtgaccagccaaactccaggagttctattatagaagggaaaggggtcattcatgtttttgtgagcaactagtagtttctgccattgtttctgatgcacatttttctttttcattgtcttagaggcttacattgttctctgtggaataagggataaccagattaattaatacatttttcccatctgcactgataatattgcattttgcctctaaaagaaactgagaa

SEQ ID NO: 15440 - DNA, 381 bp, Homo sapiens
aaatagagactgagtcttaactatgttgcccaggctggtctcgaactcctggcctcaagtgatgctctcaccttggcctcccagggtgctgggattataggcgtgagccactgcaccaggcctcaaagtgatttttttatatgggttatatatgatatacatgtgcagatcttttgacccagctatcccatgtcgtagatttatatgcatatacatgtccaaaaatataaaaatacatatgtacaaggtgacttataacattattcgtaattgcaaaattttgaaaacctaattgcctataggtgggagagtgcttaaattcaccatggtgaatctacacaaaggagactggcagttttaaaaaagaaatgaaacgtgagc

SEQ ID NO: 15441 - DNA, 327 bp, Homo sapiens
gccaagaggaataattagactgttgcaacaattatgacaaaggcgtcctatacccttggtcttctttcatccatagggcatccaaaagagacctggtttctctgttgattggaagttcacatcaaattccttgaccctgggattaaacctacagtaaacatgtgtatttttgtgttgcagatgcgtatcatagatggatagtaatgaataccatttattgagcatttatcatgtgcgaagtactctgctttcttcttcacaggtagatttaatcatctccccaaccctttgaggtagggaatactgtgatccttgttgtatattttt

SEQ ID NO: 15442 - DNA, 761 bp, Homo sapiens
ggatgtgaagaggcaaggcagaaatggatgatgaacatcaaaaactgtcagaggacaggtctgtgccaggtaccaggaaggacaagataagtccaagccccggctggcctgctctcacgtgtctgtgtaagatcatgcaagagaaatcacagtgccttctacagaattttcgtctttacctatgtgaagcgaggtgacgtgatacgtcactggcgccgtcttataatttagatgtaaaaatctttagaaacaaataaaactctctatatatgtgtatgtctgtgtacaaaaaaatgacagagctgatggccagtgtatacagagcgtggcccgcggtgtacaatacccatataaggtacattgtgcaggaggggaattgctggctgcttttacttcctgaccaagactgaaaaattatttactgaaatctgtaaacctttttatgaaacttttaagcaccaggctgtttacttacacaatttaggtctgccagaaaattctatctgtgatagatctgtaaagagggtcaggggttagagtttactatttttgaagtttacattgttacatatgaaatggaaacattattttgaaacgttgtcataacccaatggtgcattctgtaaccatggagtcttctgtttcctgggggaaaggggcattcatgacctgaactttttagcaaattattattctcagtttccattacctgtttggccaaacagattaataaaatatttgaaaaagaagcgttcaaaaat

SEQ ID NO: 15443 - DNA, 851 bp, Homo sapiens
atatgagaaaattagtggggaaaatagtactttctgttatctgtgtgtcatgatagttttaccagggacttttggtttatattacttcttatatttcagtgtccttttaggatacacacacacacttacacaatggaaatacaatatatatggtgaactcatttacaatacgcgattaccagttttccatgttagtttttctacccttacctgatcatttttacgactacttaaaatttctctgctggatcaacaatattttatctacatcctatcaatggctcacttttaggtagcttcccatatttttactcttacaaatgaacattatggaggaacacctttgagcatatacctttctacacttgtccaagttttctctctctctcccccccttttttttttttcacctgcagacacagggcaaccaagttgtcgtcttcaaattaatttctcagagtctactctctggataataggggtgagtttattttcagttctaatgaaactgactccaggaggtctgtatggatttcattcccattcaaagtttggaaatgtgacggctgggtggggtggctcatgcctctaatcccagcactttgggaggccaaggcaggcagatcacgaggtcaggagatcgagaccatcctggctaacatggtgaaaccccgtctctactaaaaaaaaaaaaaaaaaaaaatcagctgggtgtggtggtgggcacctatagtcccagctactcaggaggctgaggcaggagaatggtgtgaaccggagaggtggagcttgcagtgagccgagatcgcgccgctccactccagcctgggctacagagggagactccgtct

SEQ ID NO: 15444 - DNA, 659 bp, Homo sapiens
catgataaaatatttcttaaacattttagtttctaaattttctacagacattgaacaatttaaaaataattacccttcactttcttaatgttggcttatatcactaggctcactttaattgaggtgctcatcattttataatagctagtcatggaagattattaagatattttcttggttcatgtgctcttacaaatctaagtatatagtttacctttttacaggaacaatggaaactattgcttttttcactttatgaacaacatatcaacaggatagtctttctcatttctgggagatatactttaacatttgtctatgggaatatttttttttaagttttcaaattacttcaagcttttaagtaattttggctgggtgcggtggctcacgtctgtaatcccagcactttgggaggccaaggcaggcagatcacgaggtcaggagatcgagaccatcctggctaacatggtgaaaccccgtctctactaaaaaaaaaaaaaaaaaaaaatcagctgggtgtggtggtgggcacctatagtcccagctactcaggaggctgaggcaggagaatggtgtgaaccggagaggtggagcttgcagtgagccgagatcgcgccgctccactccagcctgggctacagagggagactccgtct

SEQ ID NO: 15445 - DNA, 383 bp, Homo sapiens
aaaatctgcctctactaaaaatacaaaaaattagccgggtgttggggcaggtgcctgtaatcccagttacttgggaggctgaggcaggagaattgcttgaacaccggaggcaaaggttgcagtgagccgagatggcaccatttcactccagcctgggcaacaagcgtgaaactcagtctttaaaaaaaaaaagaaaaagaaaaaccacagacaacctaaggaagaaaatcactgagaatgaattcaagaaagtttcccagaaattaaggacaagagttcactcggaaaggggcctggcatggaaacagaccttcgccaaggcaggtattaatacgtcattctgaaattttggaacactgataacagaagggaaaaaaaaaaaa

SEQ ID NO: 15446 - DNA, 350 bp, Homo sapiens
tgagatggggtcccactctgtcacccaggtgggagtgcagtggtgcaatgttggctcactgcagcctccatttccaaggttcaagcaaccctcccacctcagcctcccaagtagctggaccccagacatgcaccaccacacccagctaattttttgcattttttggtagagacagggtttcaccatgttgcccaggctggtctcaaactcctgagctcaggcaatccacctgccttagcctcccaaagtgctggggttacaggcaggagccaccatgccaagtggcttttaaaagttcaacttttaaaagattccacatgtgaaatcacgcagttcagcaaatatttatt

SEQ ID NO: 15447 - DNA, 2326 bp, Homo sapiens
catttagccgcgcctaggttttctggatcggcctaggtcccggcagcggtggtgacggcggtgccggaggttgtccttggcaggttttcctcggcgcttctccatggaggaggcggtgcgaacggcttcagccccgaatgctcgcatctcccactggacggcgacgaaggcggtggccgtgcgagcgcaggactgggcggcctgtgtgggggtgtgagccgcggtgcccaaggctgcgccggcgaggggaagccgcgcggccggccggccgactagggtttgaagactgcttcattctgcctctagtaccagcggtttctctgttctgtgatcaatgtgattcacaggaactccttaagtaacaaacgaaatgagccaggggcgtggaaaatatgacttctatattggtctgggattggctatgagctccagcattttcattggaggaagtttcattttgaaaaaaaagggcctccttcgacttgccaggaaaggctctatgagagcaggtcaaggtggccatgcatatcttaaggaatggttgtggtgggctggactgctgtcaatgggagctggtgaggtggccaacttcgctgcgtatgcgtttgcaccagccactctagtgactccactaggagctctcagcgtgctagtaagtgccattctttcttcatactttctcaatgaaagacttaatcttcatgggaaaattgggtgtttgctaagtattctaggatctacagttatggtcattcatgctccaaaggaagaggagattgagactttaaatgaaatgtctcacaagctaggtgatccaggttttgtggtctttgcaacccttgtggtcattgtggccttgatattaatcttcgtggtgggtcctcgccatggacagacaaacattcttgtgtacataacaatctgctctgtaatcggcgcgttttcagtctcctgtgtgaagggcctgggcattgctatcaaggagctgtttgcagggaagcctgtgctgcggcatcccctggcttggattctgctgctgagcctcatcgtctgtgtgagcacacagattaattacctaaatagggccctggatatattcaacacttccattgtgactccaatatattatgtattctttacaacatcagttttaacttgttcagctattctttttaaggagtggcaagatatgcctgttgacgatgtcattggtactttgagtggcttctttacaatcattgtggggatattcttgttgcatgcctttaaagacgtcagctttagtctagcaagtctgcctgtgtcttttcgaaaagacgagaaagcaatgaatggcaatctctctaatatgtatgaagttcttaataataatgaagaaagcttaacctgtggaatcgaacaacacactggtgaaaatgtctcccgaagaaatggaaatctgacagctttttaagaaaggtgtaattaaaggttaatctgtgattgttatgaagtgaatttgaatatcatcagaatgtgtctgaaaaaacattgtcctcaaataatgttctttaaaggcaatctttttaaagatttcactaatttggaccaagaaattacttttcttgtatttaaacaaacaatggtagctcactaaaatgacctcagcacatgacgatttctattaacattttattgttgtagaagtattttacattttcatcccttctccaaaagccgaatgcactaatgacagttttaagtctatgaaaatgctttattttttcattggtgatgaaagtctgaaatgtgcatttgtcatccccactccatcaatccctgaccatgtaaggcttttttattttaaaaaaacagagttatcccaatacattatcctgtgatttaccttacctacaaaagtggctcctgtttgtttgatgatgattggttttatttttgaaatatttattaagggaaaactaagttactgaatgaaggaacctctttcttacaaaacaaaaaaaagggcagaaatcaccccaaggaacgatttctcaggttgagatgatcaccgtgaatccggcttcctctgagcattcgatggccttagcacctcatcaagccagcacatcctgcctgctgttgcagcctggctgggtttattcttcagttaccctaatcccatgatgcctggaaccttgattaccgttttacatcagctcttgtacttttcagtatattttcataatgagttatattgtcatttagactttgaacagctctgggaaatagaagactagggttgtttcttaaatttagctcatgttataataaaaagttgaaatga

SEQ ID NO: 15448 - DNA, 2584 bp, Homo sapiens
catttagccgcgcctaggttttctggatcggcctaggtcccggcagcggtggtgacggcggtgccggaggttgtccttggcaggttttcctcggcgcttctccatggaggaggcggtgcgaacggcttcagccccgaatgctcgcatctcccactggacggcgacgaaggcggtggccgtgcgagcgcaggactgggcggcctgtgtgggggtgtgagccgcggtgcccaaggctgcgccggcgaggggaagccgcgcggccggccggccgactagggctggagctactcggccagggtttaagactttaaatgagaataaagggtggtatttacgaggaaatgagagtgaataagtcatctctaacctctcccagcctttttttcataagagagaccatattaaacttacatgctctcccggctgtgatagaccttcagttacagagagagggagcagagtgggaccaggtctgagaatagtgaagcaactcattcctttcaggacattccctctgatgtcctattttcaaactgtttgaagactgcttcattctgcctctagtaccagcggtttctctgttctgtgatcaatgtgattcacaggaactccttaagtaacaaacgaaatgagccaggggcgtggaaaatatgacttctatattggtctgggattggctatgagctccagcattttcattggaggaagtttcattttgaaaaaaaagggcctccttcgacttgccaggaaaggctctatgagagcaggtcaaggtggccatgcatatcttaaggaatggttgtggtgggctggactgctgtcaatgggagctggtgaggtggccaacttcgctgcgtatgcgtttgcaccagccactctagtgactccactaggagctctcagcgtgctagtaagtgccattctttcttcatactttctcaatgaaagacttaatcttcatgggaaaattgggtgtttgctaagtattctaggatctacagttatggtcattcatgctccaaaggaagaggagattgagactttaaatgaaatgtctcacaagctaggtgatccaggttttgtggtctttgcaacccttgtggtcattgtggccttgatattaatcttcgtggtgggtcctcgccatggacagacaaacattcttgtgtacataacaatctgctctgtaatcggcgcgttttcagtctcctgtgtgaagggcctgggcattgctatcaaggagctgtttgcagggaagcctgtgctgcggcatcccctggcttggattctgctgctgagcctcatcgtctgtgtgagcacacagattaattacctaaatagggccctggatatattcaacacttccattgtgactccaatatattatgtattctttacaacatcagttttaacttgttcagctattctttttaaggagtggcaagatatgcctgttgacgatgtcattggtactttgagtggcttctttacaatcattgtggggatattcttgttgcatgcctttaaagacgtcagctttagtctagcaagtctgcctgtgtcttttcgaaaagacgagaaagcaatgaatggcaatctctctaatatgtatgaagttcttaataataatgaagaaagcttaacctgtggaatcgaacaacacactggtgaaaatgtctcccgaagaaatggaaatctgacagctttttaagaaaggtgtaattaaaggttaatctgtgattgttatgaagtgaatttgaatatcatcagaatgtgtctgaaaaaacattgtcctcaaataatgttctttaaaggcaatctttttaaagatttcactaatttggaccaagaaattacttttcttgtatttaaacaaacaatggtagctcactaaaatgacctcagcacatgacgatttctattaacattttattgttgtagaagtattttacattttcatcccttctccaaaagccgaatgcactaatgacagttttaagtctatgaaaatgctttattttttcattggtgatgaaagtctgaaatgtgcatttgtcatccccactccatcaatccctgaccatgtaaggcttttttattttaaaaaaacagagttatcccaatacattatcctgtgatttaccttacctacaaaagtggctcctgtttgtttgatgatgattggttttatttttgaaatatttattaagggaaaactaagttactgaatgaaggaacctctttcttacaaaacaaaaaaaagggcagaaatcaccccaaggaacgatttctcaggttgagatgatcaccgtgaatccggcttcctctgagcattcgatggccttagcacctcatcaagccagcacatcctgcctgctgttgcagcctggctgggtttattcttcagttaccctaatcccatgatgcctggaaccttgattaccgttttacatcagctcttgtacttttcagtatattttcataatgagttatattgtcatttagactttgaacagctctgggaaatagaagactagggttgtttcttaaatttagctcatgttataataaaaagttgaaatga

SEQ ID NO: 15449 - DNA, 3735 bp, Homo sapiens
catttagccgcgcctaggttttctggatcggcctaggtcccggcagcggtggtgacggcggtgccggaggttgtccttggcaggttttcctcggcgcttctccatggaggaggcggtgcgaacggcttcagccccgaatgctcgcatctcccactggacggcgacgaaggcggtggccgtgcgagcgcaggactgggcggcctgtgtgggggtgtgagccgcggtgcccaaggctgcgccggcgaggggaagccgcgcggccggccggccgactagggctggagctactcggccagggtttaagactttaaatgagaataaagggtggtatttacgaggaaatgagagtgaataagtcatctctaacctctcccagcctttttttcataagagagaccatattaaacttacatgctctcccggctgtgatagaccttcagttacagagagagggagcagagtgggaccaggtctgagaatagtgaagcaactcattcctttcaggacattccctctgatgtcctattttcaaactgtttgaagactgcttcattctgcctctagtaccagcggtttctctgttctgtgatcaatgtgattcacaggaactccttaagtaacaaacgaaatgagccaggggcgtggaaaatatgacttctatattggtctgggattggctatgagctccagcattttcattggaggaagtttcattttgaaaaaaaagggcctccttcgacttgccaggaaaggctctatgagagcaggtcaaggtggccatgcatatcttaaggaatggttgtggtgggctggactgctgtcaatgggagctggtgaggtggccaacttcgctgcgtatgcgtttgcaccagccactctagtgactccactaggagctctcagcgtgctagtaagtgccattctttcttcatactttctcaatgaaagacttaatcttcatgggaaaattgggtgtttgctaagtattctaggatctacagttatggtcattcatgctccaaaggaagaggagattgagactttaaatgaaatgtctcacaagctaggtgatccaggttttgtggtctttgcaacccttgtggtcattgtggccttgatattaatcttcgtggtgggtcctcgccatggacagacaaacattcttgtgtacataacaatctgctctgtaatcggcgcgttttcagtctcctgtgtgaagggcctgggcattgctatcaaggagctgtttgcagggaagcctgtgctgcggcatcccctggcttggattctgctgctgagcctcatcgtctgtgtgagcacacagattaattacctaaatagggccctggatatattcaacacttccattgtgactccaatatattatgtattctttacaacatcagttttaacttgttcagctattctttttaaggagtggcaagatatgcctgttgacgatgtcattggtactttgagtggcttctttacaatcattgtggggatattcttgttgcatgcctttaaagacgtcagctttagtctagcaagtctgcctgtgtcttttcgaaaagacgagaaagcaatgaatggcaatctctctaatatgtatgaagttcttaataataatgaagaaagcttaacctgtggaatcgaacaacacactggtgaaaatgtctcccgaagaaatggaaatctgacagctttttaagaaaggtgtaattaaaggttaatctgtgattgttatgaagtgaatttgaatatcatcagaatgtgtctgaaaaaacattgtcctcaaataatgttctttaaaggcaatctttttaaagatttcactaatttggaccaagaaattacttttcttgtatttaaacaaacaatggtagctcactaaaatgacctcagcacatgacgatttctattaacattttattgttgtagaagtattttacattttcatcccttctccaaaagccgaatgcactaatgacagttttaagtctatgaaaatgctttattttttcattggtgatgaaagtctgaaatgtgcatttgtcatccccactccatcaatccctgaccatgtaaggcttttttattttaaaaaaacagagttatcccaatacattatcctgtgatttaccttacctacaaaagtggctcctgtttgtttgatgatgattggttttatttttgaaatatttattaagggaaaactaagttactgaatgaaggaacctctttcttacaaaacaaaaaaaagggcagaaatcaccccaaggaacgatttctcaggttgagatgatcaccgtgaatccggcttcctctgagcattcgatggccttagcacctcatcaagccagcacatcctgcctgctgttgcagcctggctgggtttattcttcagttaccctaatcccatgatgcctggaaccttgattaccgttttacatcagctcttgtacttttcagtatattttcataatgagttatattgtcatttagactttgaacagctctgggaaatagaagactagggttgtttcttaaatttagctcatgttataataaaaagttgaaatgaagttcttattctaaaagtctgaatgcttagaacaaacttaacatgtttatagaatatggtctctttgtaccaagtactttgcttaagagctcctttgggccactacatattttggtttctagaaaatgttgtttgtttatgaagaagtcgatggaaaactgcaaacatatgcagaaaaggtagaataataaaaaaggtctaatgaactccattcagctttgaacctatccactcataaccattgactggcctttaaaaaaaagtattggcagaattaatttccacctaggtgatgggaagaaagtgttcgcctgttccagcctgtggctcctgcctggaggttacccagtggtgcgccagcgccaagccatcactccccgagggcctcccctgccaatggtgctggtatcccatgcagctcaccactggctgcgtggaaactcccttttttccaactttattattggccttctaaggagctgttttagatgttttttctaactgcctcctcccatgccattttaatactacagatgtactacgtatctgtttatatactgtacctacatctgtgctttgtacataaaagaaccagttttctcccccttgaggacagagactcatttgaacatgcataggttaataaataataaattcttatttaacattttgtagcacttgagattgtcttatacctaaggtattacatatttggtatataattaagccttataaaacttggtaattgattaagttttaccataatttttcatcctattctgtagtttctaagataagcacagctaccacctctaaatctgcagcagaatgctggccccagggttattaattcacattaccaaaagcatttttagggaactttttataaagaaagaataattgtttgttaggcttcatgtcacttgagtgagtttggcagtgtaacaggatggttcgtacacttactacttttctgtgccgtgcatcatatgcttctggacagtttccaaaggcctccggaaaagtaggcgaggcctgctttttatggcaacttggcatccatagaaaattttaaaattggtgaaggttgcaatactccaaataatgtaaaatgactgccaggctacaatataaagtgagttcagttaatc

SEQ ID NO: 15450 - DNA, 2683 bp, Homo sapiens
catttagccgcgcctaggttttctggatcggcctaggtcccggcagcggtggtgacggcggtgccggaggttgtccttggcaggttttcctcggcgcttctccatggaggaggcggtgcgaacggcttcagccccgaatgctcgcatctcccactggacggcgacgaaggcggtggccgtgcgagcgcaggactgggcggcctgtgtgggggtgtgagccgcggtgcccaaggctgcgccggcgaggggaagccgcgcggccggccggccgactagggctggagctactcggccagggtttaagactttaaatgagaataaagggtggtatttacgaggaaatgagagtgaataagtcatctctaacctctcccagcctttttttcataagagagaccatattaaacttacatgctctcccggctgtgatagaccttcagttacagagagagggagcagagtgggaccaggtctgagaatagtgaagcaactcattcctttcaggacattccctctgatgtcctattttcaaactgctggagtgcaatggtgtaatcttggctcaccacaacctctgcctcccgggttcaagcgattctcctgcctcagcctcccgagtagctacagattacaggtttgaagactgcttcattctgcctctagtaccagcggtttctctgttctgtgatcaatgtgattcacaggaactccttaagtaacaaacgaaatgagccaggggcgtggaaaatatgacttctatattggtctgggattggctatgagctccagcattttcattggaggaagtttcattttgaaaaaaaagggcctccttcgacttgccaggaaaggctctatgagagcaggtcaaggtggccatgcatatcttaaggaatggttgtggtgggctggactgctgtcaatgggagctggtgaggtggccaacttcgctgcgtatgcgtttgcaccagccactctagtgactccactaggagctctcagcgtgctagtaagtgccattctttcttcatactttctcaatgaaagacttaatcttcatgggaaaattgggtgtttgctaagtattctaggatctacagttatggtcattcatgctccaaaggaagaggagattgagactttaaatgaaatgtctcacaagctaggtgatccaggttttgtggtctttgcaacccttgtggtcattgtggccttgatattaatcttcgtggtgggtcctcgccatggacagacaaacattcttgtgtacataacaatctgctctgtaatcggcgcgttttcagtctcctgtgtgaagggcctgggcattgctatcaaggagctgtttgcagggaagcctgtgctgcggcatcccctggcttggattctgctgctgagcctcatcgtctgtgtgagcacacagattaattacctaaatagggccctggatatattcaacacttccattgtgactccaatatattatgtattctttacaacatcagttttaacttgttcagctattctttttaaggagtggcaagatatgcctgttgacgatgtcattggtactttgagtggcttctttacaatcattgtggggatattcttgttgcatgcctttaaagacgtcagctttagtctagcaagtctgcctgtgtcttttcgaaaagacgagaaagcaatgaatggcaatctctctaatatgtatgaagttcttaataataatgaagaaagcttaacctgtggaatcgaacaacacactggtgaaaatgtctcccgaagaaatggaaatctgacagctttttaagaaaggtgtaattaaaggttaatctgtgattgttatgaagtgaatttgaatatcatcagaatgtgtctgaaaaaacattgtcctcaaataatgttctttaaaggcaatctttttaaagatttcactaatttggaccaagaaattacttttcttgtatttaaacaaacaatggtagctcactaaaatgacctcagcacatgacgatttctattaacattttattgttgtagaagtattttacattttcatcccttctccaaaagccgaatgcactaatgacagttttaagtctatgaaaatgctttattttttcattggtgatgaaagtctgaaatgtgcatttgtcatccccactccatcaatccctgaccatgtaaggcttttttattttaaaaaaacagagttatcccaatacattatcctgtgatttaccttacctacaaaagtggctcctgtttgtttgatgatgattggttttatttttgaaatatttattaagggaaaactaagttactgaatgaaggaacctctttcttacaaaacaaaaaaaagggcagaaatcaccccaaggaacgatttctcaggttgagatgatcaccgtgaatccggcttcctctgagcattcgatggccttagcacctcatcaagccagcacatcctgcctgctgttgcagcctggctgggtttattcttcagttaccctaatcccatgatgcctggaaccttgattaccgttttacatcagctcttgtacttttcagtatattttcataatgagttatattgtcatttagactttgaacagctctgggaaatagaagactagggttgtttcttaaatttagctcatgttataataaaaagttgaaatga

SEQ ID NO: 15451 - DNA, 3249 bp, Homo sapiens
catttagccgcgcctaggttttctggatcggcctaggtcccggcagcggtggtgacggcggtgccggaggttgtccttggcaggttttcctcggcgcttctccatggaggaggcggtgcgaacggcttcagccccgaatgctcgcatctcccactggacggcgacgaaggcggtggccgtgcgagcgcaggactgggcggcctgtgtgggggtgtgagccgcggtgcccaaggctgcgccggcgaggggaagccgcgcggccggccggccgactagggctggagctactcggccagggtttaagactttaaatgagaataaagggtggtatttacgaggaaatgagagtgaataagtcatctctaacctctcccagcctttttttcataagagagaccatattaaacttacatgctctcccggctgtgatagaccttcagttacagagagagggagcagagtgggaccaggtctgagaatagtgaagcaactcattcctttcaggacattccctctgatgtcctattttcaaactgtttgaagactgcttcattctgcctctagtaccagcggtttctctgttctgtgatcaatgtgattcacaggaactccttaagtaacaaacgaaatgagccaggggcgtggaaaatatgacttctatattggtctgggattggctatgagctccagcattttcattggaggaagtttcattttgaaaaaaaagggcctccttcgacttgccaggaaaggctctatgagagcaggtcaaggtggccatgcatatcttaaggaatggttgtggtgggctggactgctgtcaatgggagctggtgaggtggccaacttcgctgcgtatgcgtttgcaccagccactctagtgactccactaggagctctcagcgtgctagtaagtgccattctttcttcatactttctcaatgaaagacttaatcttcatgggaaaattgggtgtttgctaagtattctaggatctacagttatggtcattcatgctccaaaggaagaggagattgagactttaaatgaaatgtctcacaagctaggtgatccaggttttgtggtctttgcaacccttgtggtcattgtggccttgatattaatcttcgtggtgggtcctcgccatggacagacaaacattcttgtgtacataacaatctgctctgtaatcggcgcgttttcagtctcctgtgtgaagggcctgggcattgctatcaaggagctgtttgcagggaagcctgtgctgcggcatcccctggcttggattctgctgctgagcctcatcgtctgtgtgagcacacagattaattacctaaatagggccctggatatattcaacacttccattgtgactccaatatattatgtattctttacaacatcagttttaacttgttcagctattctttttaaggagtggcaagatatgcctgttgacgatgtcattggtactttgagtggcttctttacaatcattgtggggatattcttgttgcatgcctttaaagacgtcagctttagtctagcaagtctgcctgtgtcttttcgaaaagacgagaaagcaatgaatggcaatctctctaatatgtatgaagttcttaataataatgaagaaagcttaacctgtggaatcgaacaacacactggtgaaaatgtctcccgaagaaatggaaatctgacagctttttaagaaaggtgtaattaaaggttaatctgtgattgttatgaagtgaatttgaatatcatcagaatgtgtctgaaaaaacattgtcctcaaataatgttctttaaaggcaatctttttaaagatttcactaatttggaccaagaaattacttttcttgtatttaaacaaacaatggtagctcactaaaatgacctcagcacatgacgatttctattaacattttattgttgtagaagtattttacattttcatcccttctccaaaagccgaatgcactaatgacagttttaagtctatgaaaatgctttattttttcattggtgatgaaagtctgaaatgtgcatttgtcatccccactccatcaatccctgaccatgtaaggcttttttattttaaaaaaacagagttatcccaatacattatcctgtgatttaccttacctacaaaagtggctcctgtttgtttgatgatgattggttttatttttgaaatatttattaagggaaaactaagttactgaatgaaggaacctctttcttacaaaacaaaaaaaagggcagaaatcaccccaaggaacgatttctcaggttgagatgatcaccgtgaatccggcttcctctgagcattcgatggccttagcacctcatcaagccagcacatcctgcctgctgttgcagcctggctgggtttattcttcagttaccctaatcccatgatgcctggaaccttgattaccgttttacatcagctcttgtacttttcagtatattttcataatgagttatattgtcatttagactttgaacagctctgggaaatagaagactagggttgtttcttaaatttagctcatgttataataaaaagttgaaatgaagttcttattctaaaagtctgaatgcttagaacaaacttaacatgtttatagaatatggtctctttgtaccaagtactttgcttaagagctcctttgggccactacatattttggtttctagaaaatgttgtttgtttatgaagaagtcgatggaaaactgcaaacatatgcagaaaaggtagaataataaaaaaggtctaatgaactccattcagctttgaacctatccactcataaccattgactggcctttaaaaaaaagtattggcagaattaatttccacctaggtgatgggaagaaagtgttcgcctgttccagcctgtggctcctgcctggaggttacccagtggtgcgccagcgccaagccatcactccccgagggcctcccctgccaatggtgctggtatcccatgcagctcaccactggctgcgtggaaactcccttttttccaactttattattggccttctaaggagctgttttagatgttttttctaactgcctcctcccatgccattttaatactacagatgtactacgtatctgtttatatactgtacctacatctgtgctttgtacataaaagaaccagttttctcccccttgaggacagagactcatttgaacatgcataggttaataaataataaattcttatttaa

SEQ ID NO: 15452 - DNA, 2964 bp, Homo sapiens
catttagccgcgcctaggttttctggatcggcctaggtcccggcagcggtggtgacggcggtgccggaggttgtccttggcaggttttcctcggcgcttctccatggaggaggcggtgcgaacggcttcagccccgaatgctcgcatctcccactggacggcgacgaaggcggtggccgtgcgagcgcaggactgggcggcctgtgtgggggtgtgagccgcggtgcccaaggctgcgccggcgaggggaagccgcgcggccggccggccgactagggtgaggtcgccactccttcctttcaggcaagcgcgaaggggctgacttggtggcgagccagcccgccttgtgtcggagaagggttcttcgggcaactttcctttccgggtgttctgaagcggttttcctgtaatcctcagtgaggaaacccaccgtgaatcggattgccgttcagtcccacggaagcctggctcgttggccatgtcggggacgcatgttcattaagttcattaaaataatttcatttgtcttggctggagctactcggccagggtttaagactttaaatgagaataaagggtggtatttacgaggaaatgagagtgaataagtcatctctaacctctcccagcctttttttcataagagagaccatattaaacttacatgggtcgtgattccaaattcttcagcagaaggctgagattggcagagatgaggaggcctggattatagttctgcttctgctacctcagctgtgtgacgtgttacttaacatctctggacttgggccaggctctcccggctgtgatagaccttcagttacagagagagggagcagagtgggaccaggtctgagaatagtgaagcaactcattcctttcaggacattccctctgatgtcctattttcaaactgtttgaagactgcttcattctgcctctagtaccagcggtttctctgttctgtgatcaatgtgattcacaggaactccttaagtaacaaacgaaatgagccaggggcgtggaaaatatgacttctatattggtctgggattggctatgagctccagcattttcattggaggaagtttcattttgaaaaaaaagggcctccttcgacttgccaggaaaggctctatgagagcaggtcaaggtggccatgcatatcttaaggaatggttgtggtgggctggactgctgtcaatgggagctggtgaggtggccaacttcgctgcgtatgcgtttgcaccagccactctagtgactccactaggagctctcagcgtgctagtaagtgccattctttcttcatactttctcaatgaaagacttaatcttcatgggaaaattgggtgtttgctaagtattctaggatctacagttatggtcattcatgctccaaaggaagaggagattgagactttaaatgaaatgtctcacaagctaggtgatccaggttttgtggtctttgcaacccttgtggtcattgtggccttgatattaatcttcgtggtgggtcctcgccatggacagacaaacattcttgtgtacataacaatctgctctgtaatcggcgcgttttcagtctcctgtgtgaagggcctgggcattgctatcaaggagctgtttgcagggaagcctgtgctgcggcatcccctggcttggattctgctgctgagcctcatcgtctgtgtgagcacacagattaattacctaaatagggccctggatatattcaacacttccattgtgactccaatatattatgtattctttacaacatcagttttaacttgttcagctattctttttaaggagtggcaagatatgcctgttgacgatgtcattggtactttgagtggcttctttacaatcattgtggggatattcttgttgcatgcctttaaagacgtcagctttagtctagcaagtctgcctgtgtcttttcgaaaagacgagaaagcaatgaatggcaatctctctaatatgtatgaagttcttaataataatgaagaaagcttaacctgtggaatcgaacaacacactggtgaaaatgtctcccgaagaaatggaaatctgacagctttttaagaaaggtgtaattaaaggttaatctgtgattgttatgaagtgaatttgaatatcatcagaatgtgtctgaaaaaacattgtcctcaaataatgttctttaaaggcaatctttttaaagatttcactaatttggaccaagaaattacttttcttgtatttaaacaaacaatggtagctcactaaaatgacctcagcacatgacgatttctattaacattttattgttgtagaagtattttacattttcatcccttctccaaaagccgaatgcactaatgacagttttaagtctatgaaaatgctttattttttcattggtgatgaaagtctgaaatgtgcatttgtcatccccactccatcaatccctgaccatgtaaggcttttttattttaaaaaaacagagttatcccaatacattatcctgtgatttaccttacctacaaaagtggctcctgtttgtttgatgatgattggttttatttttgaaatatttattaagggaaaactaagttactgaatgaaggaacctctttcttacaaaacaaaaaaaagggcagaaatcaccccaaggaacgatttctcaggttgagatgatcaccgtgaatccggcttcctctgagcattcgatggccttagcacctcatcaagccagcacatcctgcctgctgttgcagcctggctgggtttattcttcagttaccctaatcccatgatgcctggaaccttgattaccgttttacatcagctcttgtacttttcagtatattttcataatgagttatattgtcatttagactttgaacagctctgggaaatagaagactagggttgtttcttaaatttagctcatgttataataaaaagttgaaatga

SEQ ID NO: 15453 - DNA, 2512 bp, Homo sapiens
gaataagcagaaaatcataagactctttttatagtgtttaaaacgtcagtaggttatttttggaatttttaattctcttagtcgtggagtccttgaggataggccctttgatcatctttacaacttcagtgcctggcagataatagctgctcagtgtttgttgagcaatggtcacagttcggattactcccgagtccccctaagtaaactgggcaggtgaaccacatggagcttgggaacctagttgaagtgaaatttagaaaattttactgtttatctgtctttaatactggccctgcctcatggctaattcttaagaagaaaaaatatctctgttgcaggctctcccggctgtgatagaccttcagttacagagagagggagcagagtgggaccaggtctgagaatagtgaagcaactcattcctttcaggacattccctctgatgtcctattttcaaactgtttgaagactgcttcattctgcctctagtaccagcggtttctctgttctgtgatcaatgtgattcacaggaactccttaagtaacaaacgaaatgagccaggggcgtggaaaatatgacttctatattggtctgggattggctatgagctccagcattttcattggaggaagtttcattttgaaaaaaaagggcctccttcgacttgccaggaaaggctctatgagagcaggtcaaggtggccatgcatatcttaaggaatggttgtggtgggctggactgctgtcaatgggagctggtgaggtggccaacttcgctgcgtatgcgtttgcaccagccactctagtgactccactaggagctctcagcgtgctagtaagtgccattctttcttcatactttctcaatgaaagacttaatcttcatgggaaaattgggtgtttgctaagtattctaggatctacagttatggtcattcatgctccaaaggaagaggagattgagactttaaatgaaatgtctcacaagctaggtgatccaggttttgtggtctttgcaacccttgtggtcattgtggccttgatattaatcttcgtggtgggtcctcgccatggacagacaaacattcttgtgtacataacaatctgctctgtaatcggcgcgttttcagtctcctgtgtgaagggcctgggcattgctatcaaggagctgtttgcagggaagcctgtgctgcggcatcccctggcttggattctgctgctgagcctcatcgtctgtgtgagcacacagattaattacctaaatagggccctggatatattcaacacttccattgtgactccaatatattatgtattctttacaacatcagttttaacttgttcagctattctttttaaggagtggcaagatatgcctgttgacgatgtcattggtactttgagtggcttctttacaatcattgtggggatattcttgttgcatgcctttaaagacgtcagctttagtctagcaagtctgcctgtgtcttttcgaaaagacgagaaagcaatgaatggcaatctctctaatatgtatgaagttcttaataataatgaagaaagcttaacctgtggaatcgaacaacacactggtgaaaatgtctcccgaagaaatggaaatctgacagctttttaagaaaggtgtaattaaaggttaatctgtgattgttatgaagtgaatttgaatatcatcagaatgtgtctgaaaaaacattgtcctcaaataatgttctttaaaggcaatctttttaaagatttcactaatttggaccaagaaattacttttcttgtatttaaacaaacaatggtagctcactaaaatgacctcagcacatgacgatttctattaacattttattgttgtagaagtattttacattttcatcccttctccaaaagccgaatgcactaatgacagttttaagtctatgaaaatgctttattttttcattggtgatgaaagtctgaaatgtgcatttgtcatccccactccatcaatccctgaccatgtaaggcttttttattttaaaaaaacagagttatcccaatacattatcctgtgatttaccttacctacaaaagtggctcctgtttgtttgatgatgattggttttatttttgaaatatttattaagggaaaactaagttactgaatgaaggaacctctttcttacaaaacaaaaaaaagggcagaaatcaccccaaggaacgatttctcaggttgagatgatcaccgtgaatccggcttcctctgagcattcgatggccttagcacctcatcaagccagcacatcctgcctgctgttgcagcctggctgggtttattcttcagttaccctaatcccatgatgcctggaaccttgattaccgttttacatcagctcttgtacttttcagtatattttcataatgagttatattgtcatttagactttgaacagctctgggaaatagaagactagggttgtttcttaaatttagctcatgttataataaaaagttgaaatga

SEQ ID NO: 15454 - DNA, 2352 bp, Homo sapiens
catttagccgcgcctaggttttctggatcggcctaggtcccggcagcggtggtgacggcggtgccggaggttgtccttggcaggttttcctcggcgcttctccatggaggaggcggtgcgaacggcttcagccccgaatgctcgcatctcccactggacggcgacgaaggcggtggccgtgcgagcgcaggactgggcggcctgtgtgggggtgtgagccgcggtgcccaaggctgcgccggcgaggggaagccgcgcggccggccggccgactagggtgaggtcgccactccttcctttcaggtttgaagactgcttcattctgcctctagtaccagcggtttctctgttctgtgatcaatgtgattcacaggaactccttaagtaacaaacgaaatgagccaggggcgtggaaaatatgacttctatattggtctgggattggctatgagctccagcattttcattggaggaagtttcattttgaaaaaaaagggcctccttcgacttgccaggaaaggctctatgagagcaggtcaaggtggccatgcatatcttaaggaatggttgtggtgggctggactgctgtcaatgggagctggtgaggtggccaacttcgctgcgtatgcgtttgcaccagccactctagtgactccactaggagctctcagcgtgctagtaagtgccattctttcttcatactttctcaatgaaagacttaatcttcatgggaaaattgggtgtttgctaagtattctaggatctacagttatggtcattcatgctccaaaggaagaggagattgagactttaaatgaaatgtctcacaagctaggtgatccaggttttgtggtctttgcaacccttgtggtcattgtggccttgatattaatcttcgtggtgggtcctcgccatggacagacaaacattcttgtgtacataacaatctgctctgtaatcggcgcgttttcagtctcctgtgtgaagggcctgggcattgctatcaaggagctgtttgcagggaagcctgtgctgcggcatcccctggcttggattctgctgctgagcctcatcgtctgtgtgagcacacagattaattacctaaatagggccctggatatattcaacacttccattgtgactccaatatattatgtattctttacaacatcagttttaacttgttcagctattctttttaaggagtggcaagatatgcctgttgacgatgtcattggtactttgagtggcttctttacaatcattgtggggatattcttgttgcatgcctttaaagacgtcagctttagtctagcaagtctgcctgtgtcttttcgaaaagacgagaaagcaatgaatggcaatctctctaatatgtatgaagttcttaataataatgaagaaagcttaacctgtggaatcgaacaacacactggtgaaaatgtctcccgaagaaatggaaatctgacagctttttaagaaaggtgtaattaaaggttaatctgtgattgttatgaagtgaatttgaatatcatcagaatgtgtctgaaaaaacattgtcctcaaataatgttctttaaaggcaatctttttaaagatttcactaatttggaccaagaaattacttttcttgtatttaaacaaacaatggtagctcactaaaatgacctcagcacatgacgatttctattaacattttattgttgtagaagtattttacattttcatcccttctccaaaagccgaatgcactaatgacagttttaagtctatgaaaatgctttattttttcattggtgatgaaagtctgaaatgtgcatttgtcatccccactccatcaatccctgaccatgtaaggcttttttattttaaaaaaacagagttatcccaatacattatcctgtgatttaccttacctacaaaagtggctcctgtttgtttgatgatgattggttttatttttgaaatatttattaagggaaaactaagttactgaatgaaggaacctctttcttacaaaacaaaaaaaagggcagaaatcaccccaaggaacgatttctcaggttgagatgatcaccgtgaatccggcttcctctgagcattcgatggccttagcacctcatcaagccagcacatcctgcctgctgttgcagcctggctgggtttattcttcagttaccctaatcccatgatgcctggaaccttgattaccgttttacatcagctcttgtacttttcagtatattttcataatgagttatattgtcatttagactttgaacagctctgggaaatagaagactagggttgtttcttaaatttagctcatgttataataaaaagttgaaatga

SEQ ID NO: 15455 - DNA, 2462 bp, Homo sapiens
catttagccgcgcctaggttttctggatcggcctaggtcccggcagcggtggtgacggcggtgccggaggttgtccttggcaggttttcctcggcgcttctccatggaggaggcggtgcgaacggcttcagccccgaatgctcgcatctcccactggacggcgacgaaggcggtggccgtgcgagcgcaggactgggcggcctgtgtgggggtgtgagccgcggtgcccaaggctgcgccggcgaggggaagccgcgcggccggccggccgactagggctggagctactcggccagggtttaagactttaaatgagaataaagggtggtatttacgaggaaatgagagtgaataagtcatctctaacctctcccagcctttttttcataagagagaccatattaaacttacatgtttgaagactgcttcattctgcctctagtaccagcggtttctctgttctgtgatcaatgtgattcacaggaactccttaagtaacaaacgaaatgagccaggggcgtggaaaatatgacttctatattggtctgggattggctatgagctccagcattttcattggaggaagtttcattttgaaaaaaaagggcctccttcgacttgccaggaaaggctctatgagagcaggtcaaggtggccatgcatatcttaaggaatggttgtggtgggctggactgctgtcaatgggagctggtgaggtggccaacttcgctgcgtatgcgtttgcaccagccactctagtgactccactaggagctctcagcgtgctagtaagtgccattctttcttcatactttctcaatgaaagacttaatcttcatgggaaaattgggtgtttgctaagtattctaggatctacagttatggtcattcatgctccaaaggaagaggagattgagactttaaatgaaatgtctcacaagctaggtgatccaggttttgtggtctttgcaacccttgtggtcattgtggccttgatattaatcttcgtggtgggtcctcgccatggacagacaaacattcttgtgtacataacaatctgctctgtaatcggcgcgttttcagtctcctgtgtgaagggcctgggcattgctatcaaggagctgtttgcagggaagcctgtgctgcggcatcccctggcttggattctgctgctgagcctcatcgtctgtgtgagcacacagattaattacctaaatagggccctggatatattcaacacttccattgtgactccaatatattatgtattctttacaacatcagttttaacttgttcagctattctttttaaggagtggcaagatatgcctgttgacgatgtcattggtactttgagtggcttctttacaatcattgtggggatattcttgttgcatgcctttaaagacgtcagctttagtctagcaagtctgcctgtgtcttttcgaaaagacgagaaagcaatgaatggcaatctctctaatatgtatgaagttcttaataataatgaagaaagcttaacctgtggaatcgaacaacacactggtgaaaatgtctcccgaagaaatggaaatctgacagctttttaagaaaggtgtaattaaaggttaatctgtgattgttatgaagtgaatttgaatatcatcagaatgtgtctgaaaaaacattgtcctcaaataatgttctttaaaggcaatctttttaaagatttcactaatttggaccaagaaattacttttcttgtatttaaacaaacaatggtagctcactaaaatgacctcagcacatgacgatttctattaacattttattgttgtagaagtattttacattttcatcccttctccaaaagccgaatgcactaatgacagttttaagtctatgaaaatgctttattttttcattggtgatgaaagtctgaaatgtgcatttgtcatccccactccatcaatccctgaccatgtaaggcttttttattttaaaaaaacagagttatcccaatacattatcctgtgatttaccttacctacaaaagtggctcctgtttgtttgatgatgattggttttatttttgaaatatttattaagggaaaactaagttactgaatgaaggaacctctttcttacaaaacaaaaaaaagggcagaaatcaccccaaggaacgatttctcaggttgagatgatcaccgtgaatccggcttcctctgagcattcgatggccttagcacctcatcaagccagcacatcctgcctgctgttgcagcctggctgggtttattcttcagttaccctaatcccatgatgcctggaaccttgattaccgttttacatcagctcttgtacttttcagtatattttcataatgagttatattgtcatttagactttgaacagctctgggaaatagaagactagggttgtttcttaaatttagctcatgttataataaaaagttgaaatga

SEQ ID NO: 15456 - DNA, 2488 bp, Homo sapiens
catttagccgcgcctaggttttctggatcggcctaggtcccggcagcggtggtgacggcggtgccggaggttgtccttggcaggttttcctcggcgcttctccatggaggaggcggtgcgaacggcttcagccccgaatgctcgcatctcccactggacggcgacgaaggcggtggccgtgcgagcgcaggactgggcggcctgtgtgggggtgtgagccgcggtgcccaaggctgcgccggcgaggggaagccgcgcggccggccggccgactagggtgaggtcgccactccttcctttcaggctggagctactcggccagggtttaagactttaaatgagaataaagggtggtatttacgaggaaatgagagtgaataagtcatctctaacctctcccagcctttttttcataagagagaccatattaaacttacatgtttgaagactgcttcattctgcctctagtaccagcggtttctctgttctgtgatcaatgtgattcacaggaactccttaagtaacaaacgaaatgagccaggggcgtggaaaatatgacttctatattggtctgggattggctatgagctccagcattttcattggaggaagtttcattttgaaaaaaaagggcctccttcgacttgccaggaaaggctctatgagagcaggtcaaggtggccatgcatatcttaaggaatggttgtggtgggctggactgctgtcaatgggagctggtgaggtggccaacttcgctgcgtatgcgtttgcaccagccactctagtgactccactaggagctctcagcgtgctagtaagtgccattctttcttcatactttctcaatgaaagacttaatcttcatgggaaaattgggtgtttgctaagtattctaggatctacagttatggtcattcatgctccaaaggaagaggagattgagactttaaatgaaatgtctcacaagctaggtgatccaggttttgtggtctttgcaacccttgtggtcattgtggccttgatattaatcttcgtggtgggtcctcgccatggacagacaaacattcttgtgtacataacaatctgctctgtaatcggcgcgttttcagtctcctgtgtgaagggcctgggcattgctatcaaggagctgtttgcagggaagcctgtgctgcggcatcccctggcttggattctgctgctgagcctcatcgtctgtgtgagcacacagattaattacctaaatagggccctggatatattcaacacttccattgtgactccaatatattatgtattctttacaacatcagttttaacttgttcagctattctttttaaggagtggcaagatatgcctgttgacgatgtcattggtactttgagtggcttctttacaatcattgtggggatattcttgttgcatgcctttaaagacgtcagctttagtctagcaagtctgcctgtgtcttttcgaaaagacgagaaagcaatgaatggcaatctctctaatatgtatgaagttcttaataataatgaagaaagcttaacctgtggaatcgaacaacacactggtgaaaatgtctcccgaagaaatggaaatctgacagctttttaagaaaggtgtaattaaaggttaatctgtgattgttatgaagtgaatttgaatatcatcagaatgtgtctgaaaaaacattgtcctcaaataatgttctttaaaggcaatctttttaaagatttcactaatttggaccaagaaattacttttcttgtatttaaacaaacaatggtagctcactaaaatgacctcagcacatgacgatttctattaacattttattgttgtagaagtattttacattttcatcccttctccaaaagccgaatgcactaatgacagttttaagtctatgaaaatgctttattttttcattggtgatgaaagtctgaaatgtgcatttgtcatccccactccatcaatccctgaccatgtaaggcttttttattttaaaaaaacagagttatcccaatacattatcctgtgatttaccttacctacaaaagtggctcctgtttgtttgatgatgattggttttatttttgaaatatttattaagggaaaactaagttactgaatgaaggaacctctttcttacaaaacaaaaaaaagggcagaaatcaccccaaggaacgatttctcaggttgagatgatcaccgtgaatccggcttcctctgagcattcgatggccttagcacctcatcaagccagcacatcctgcctgctgttgcagcctggctgggtttattcttcagttaccctaatcccatgatgcctggaaccttgattaccgttttacatcagctcttgtacttttcagtatattttcataatgagttatattgtcatttagactttgaacagctctgggaaatagaagactagggttgtttcttaaatttagctcatgttataataaaaagttgaaatga

SEQ ID NO: 15457 - DNA, 3681 bp, Homo sapiens
catttagccgcgcctaggttttctggatcggcctaggtcccggcagcggtggtgacggcggtgccggaggttgtccttggcaggttttcctcggcgcttctccatggaggaggcggtgcgaacggcttcagccccgaatgctcgcatctcccactggacggcgacgaaggcggtggccgtgcgagcgcaggactgggcggcctgtgtgggggtgtgagccgcggtgcccaaggctgcgccggcgaggggaagccgcgcggccggccggccgactagggctggagctactcggccagggtttaagactttaaatgagaataaagggtggtatttacgaggaaatgagagtgaataagtcatctctaacctctcccagcctttttttcataagagagaccatattaaacttacatgctctcccggctgtgatagaccttcagttacagagagagggagcagagtgggaccaggtctgagaatagtgaagcaactcattcctttcaggacattccctctgatgtcctattttcaaactgtttgaagactgcttcattctgcctctagtaccagcggtttctctgttctgtgatcaatgtgattcacaggaactccttaagtaacaaacgaaatgagccaggggcgtggaaaatatgacttctatattggtctgggattggctatgagctccagcattttcattggaggaagtttcattttgaaaaaaaagggcctccttcgacttgccaggaaaggctctatgagagcaggtcaaggtggccatgcatatcttaaggaatggttgtggtgggctggactgctgtcaatgggagctggtgaggtggccaacttcgctgcgtatgcgtttgcaccagccactctagtgactccactaggagctctcagcgtgctagtaagtgccattctttcttcatactttctcaatgaaagacttaatcttcatgggccaaaggaagaggagattgagactttaaatgaaatgtctcacaagctaggtgatccaggttttgtggtctttgcaacccttgtggtcattgtggccttgatattaatcttcgtggtgggtcctcgccatggacagacaaacattcttgtgtacataacaatctgctctgtaatcggcgcgttttcagtctcctgtgtgaagggcctgggcattgctatcaaggagctgtttgcagggaagcctgtgctgcggcatcccctggcttggattctgctgctgagcctcatcgtctgtgtgagcacacagattaattacctaaatagggccctggatatattcaacacttccattgtgactccaatatattatgtattctttacaacatcagttttaacttgttcagctattctttttaaggagtggcaagatatgcctgttgacgatgtcattggtactttgagtggcttctttacaatcattgtggggatattcttgttgcatgcctttaaagacgtcagctttagtctagcaagtctgcctgtgtcttttcgaaaagacgagaaagcaatgaatggcaatctctctaatatgtatgaagttcttaataataatgaagaaagcttaacctgtggaatcgaacaacacactggtgaaaatgtctcccgaagaaatggaaatctgacagctttttaagaaaggtgtaattaaaggttaatctgtgattgttatgaagtgaatttgaatatcatcagaatgtgtctgaaaaaacattgtcctcaaataatgttctttaaaggcaatctttttaaagatttcactaatttggaccaagaaattacttttcttgtatttaaacaaacaatggtagctcactaaaatgacctcagcacatgacgatttctattaacattttattgttgtagaagtattttacattttcatcccttctccaaaagccgaatgcactaatgacagttttaagtctatgaaaatgctttattttttcattggtgatgaaagtctgaaatgtgcatttgtcatccccactccatcaatccctgaccatgtaaggcttttttattttaaaaaaacagagttatcccaatacattatcctgtgatttaccttacctacaaaagtggctcctgtttgtttgatgatgattggttttatttttgaaatatttattaagggaaaactaagttactgaatgaaggaacctctttcttacaaaacaaaaaaaagggcagaaatcaccccaaggaacgatttctcaggttgagatgatcaccgtgaatccggcttcctctgagcattcgatggccttagcacctcatcaagccagcacatcctgcctgctgttgcagcctggctgggtttattcttcagttaccctaatcccatgatgcctggaaccttgattaccgttttacatcagctcttgtacttttcagtatattttcataatgagttatattgtcatttagactttgaacagctctgggaaatagaagactagggttgtttcttaaatttagctcatgttataataaaaagttgaaatgaagttcttattctaaaagtctgaatgcttagaacaaacttaacatgtttatagaatatggtctctttgtaccaagtactttgcttaagagctcctttgggccactacatattttggtttctagaaaatgttgtttgtttatgaagaagtcgatggaaaactgcaaacatatgcagaaaaggtagaataataaaaaaggtctaatgaactccattcagctttgaacctatccactcataaccattgactggcctttaaaaaaaagtattggcagaattaatttccacctaggtgatgggaagaaagtgttcgcctgttccagcctgtggctcctgcctggaggttacccagtggtgcgccagcgccaagccatcactccccgagggcctcccctgccaatggtgctggtatcccatgcagctcaccactggctgcgtggaaactcccttttttccaactttattattggccttctaaggagctgttttagatgttttttctaactgcctcctcccatgccattttaatactacagatgtactacgtatctgtttatatactgtacctacatctgtgctttgtacataaaagaaccagttttctcccccttgaggacagagactcatttgaacatgcataggttaataaataataaattcttatttaacattttgtagcacttgagattgtcttatacctaaggtattacatatttggtatataattaagccttataaaacttggtaattgattaagttttaccataatttttcatcctattctgtagtttctaagataagcacagctaccacctctaaatctgcagcagaatgctggccccagggttattaattcacattaccaaaagcatttttagggaactttttataaagaaagaataattgtttgttaggcttcatgtcacttgagtgagtttggcagtgtaacaggatggttcgtacacttactacttttctgtgccgtgcatcatatgcttctggacagtttccaaaggcctccggaaaagtaggcgaggcctgctttttatggcaacttggcatccatagaaaattttaaaattggtgaaggttgcaatactccaaataatgtaaaatgactgccaggctacaatataaagtgagttcagttaatc

SEQ ID NO: 15458 - DNA, 2145 bp, Homo sapiens
ccacgcgtccgccacgcgtccggaagttcttaataataatgaagaaagcttaacctgtggaatcgaacaacacactggtgaaaatgtctcccgaagaaatggaaatctgacagctttttaagaaaggtgtaattaaaggttaatctgtgattgttatgaagtgaatttgaatatcatcagaatgtgtctgaaaaaacattgtcctcaaataatgttctttaaaggcaatctttttaaagatttcactaatttggaccaagaaattacttttcttgtatttaaacaaacaatggtagctcactaaaatgacctcagcacatgacgatttctattaacattttattgttgtagaagtattttacattttcatcccttctccaaaagccgaatgcactaatgacagttttaagtctatgaaaatgctttattttttcattggtgatgaaagtctgaaatgtgcatttgtcatccccactccatcaatccctgaccatgtaaggcttttttattttaaaaaaacagagttatcccaatacattatcctgtgatttaccttacctacaaaagtggctcctgtttgtttgatgatgattggttttatttttgaaatatttattaagggaaaactaagttactgaatgaaggaacctctttcttacaaaacaaaaaaaagggcagaaatcaccccaaggaacgatttctcaggttgagatgatcaccgtgaatccggcttcctctgagcattcgatggccttagcacctcatcaagccagcacatcctgcctgctgttgcagcctggctgggtttattcttcagttaccctaatcccatgatgcctggaaccttgattaccgttttacatcagctcttgtacttttcagtatattttcataatgagttatattgtcatttagactttgaacagctctgggaaatagaagactagggttgtttcttaaatttagctcatgttataataaaaagttgaaatgaagttcttattctaaaagtctgaatgcttagaacaaacttaacatgtttatagaatatggtctctttgtaccaagtactttgcttaagagctcctttgggccactacatattttggtttctagaaaatgttgtttgtttatgaagaagtcgatggaaaactgcaaacatatgcagaaaaggtagaataataaaaaaggtctaatgaactccattcagctttgaacctatccactcataaccattgactggcctttaaaaaaaagtattggcagaattaatttccacctaggtgatgggaagaaagtgttcgcctgttccagcctgtggctcctgcctggaggttacccagtggtgcgccagcgccaagccatcactccccgagggcctcccctgccaatggtgctggtatcccatgcagctcaccactggctgcgtggaaactcccttttttccaactttattattggccttctaaggagctgttttagatgttttttctaactgcctcctcccatgccattttaatactacagatgtactacgtatctgtttatatactgtacctacatctgtgctttgtacataaaagaaccagttttctcccccttgaggacagagactcatttgaacatgcataggttaataaataataaattcttatttaacattttgtagcacttgagattgtcttatacctaaggtattacatatttggtatataattaagccttataaaacttggtaattgattaagttttaccataatttttcatcctattctgtagtttctaagataagcacagctaccacctctaaatctgcagcagaatgctggccccagggttattaattcacattaccaaaagcatttttagggaactttttataaagaaagaataattgtttgttaggcttcatgtcacttgagtgagtttggcagtgtaacaggatggttcgtacacttactacttttctgtgccgtgcatcatatgcttctggacagtttccaaaggcctccggaaaagtaggcgaggcctgctttttatggcaacttggcatccatagaaaattttaaaattggtgaaggttgcaatactccaaataatgtaaaatgactgccaggctacaatataaagtgagttcagttaatc

SEQ ID NO: 15459 - DNA, 1160 bp, Homo sapiens
taacattttcccccaggaaacaagctattacattgatacgaatttaatcggcctccccataaggaatttggccctcagggcccagaattgggcccgagctcctttgggccactacatattttggtttctagaaaatgttgtttgtttatgaagaagtcgatggaaaactgcaaacatatgcagaaaaggtagaataataaaaaaggtctaatgaactccattcagctttgaacctatccactcataaccattgactggcctttaaaaaaaagtattggcagaattaatttccacctaggtgatgggaagaaagtgttcgcctgttccagcctgtggctcctgcctggaggttacccagtggtgcgccagcgccaagccatcactccccgagggcctcccctgccaatggtgctggtatcccatgcagctcaccactggctgcgtggaaactcccttttttccaactttattattggccttctaaggagctgttttagatgttttttctaactgcctcctcccatgccattttaatactacagatgtactacgtatctgtttatatactgtacctacatctgtgctttgtacataaaagaaccagttttctcccccttgaggacagagactcatttgaacatgcataggttaataaataataaattcttatttaacattttgtagcacttgagattgtcttatacctaaggtattacatatttggtatataattaagccttataaaacttggtaattgattaagttttaccataatttttcatcctattctgtagtttctaagataagcacagctaccacctctaaatctgcagcagaatgctggccccagggttattaattcacattaccaaaagcatttttagggaactttttataaagaaagaataattgtttgttaggcttcatgtcacttgagtgagtttggcagtgtaacaggatggttcgtacacttactacttttctgtgccgtgcatcatatgcttctggacagtttccaaaggcctccggaaaagtaggcgaggcctgctttttatggcaacttggcatccatagaaaattttaaaattggtgaaggttgcaatactccaaataatgtaaaatgactgccaggctacaatataaagtgagttcagttaatc

SEQ ID NO: 15460 - DNA, 913 bp, Homo sapiens
catttagccgcgcctaggttttctggatcggcctaggtcccggcagcggtggtgacggcggtgccggaggttgtccttggcaggttttcctcggcgcttctccatggaggaggcggtgcgaacggcttcagccccgaatgctcgcatctcccactggacggcgacgaaggcggtggccgtgcgagcgcaggactgggcggcctgtgtgggggtgtgagccgcggtgcccaaggctgcgccggcgaggggaagccgcgcggccggccggccgactagggtgaggtcgccactccttcctttcaggcaagcgcgaaggggctgacttggtggcgagccagcccgccttgtgtcggagaagggttcttcgggcaactttcctttccgggtgttctgaagcggttttcctgtaatcctcagtgaggaaacccaccgtgaatcggattgccgttcagtcccacggaagcctggctcgttggccatgtcggggacgcatgttcattaagttcattaaaataatttcatttgtcttggctggagctactcggccagggtttaagactttaaatgagaataaagggtggtatttacgaggaaatgagagtgaataagtcatctctaacctctcccagcctttttttcataagagagaccatattaaacttacatgggtcgtgattccaaattcttcagcagaaggctgagattggcagagatgaggaggcctggattatagttctgcttctgctacctcagctgtgtgacgtgttacttaacatctctggacttgggccaggtgcggtggctcacgcctgtaatcccagcactttaggaggccaaggctgttggatcacgaggtcaggagatcgagaccatcctggctaacatggtgaaacccccgtctctactaaaaaaa

SEQ ID NO: 15461 - DNA, 386 bp, Homo sapiens
gatttcacagtttcgactctgttttggtatttagaggtcttgcacagtgaagcctttttcctatatcctgttaacatatcaccctgaaagaaattgttagaaaaaggctgggtactgtgactcacacctgtaatcccatactttgggaggacaaagcaggaggatcccttgaggccaggaattcaagaccagtctgggcgtcatagcgagatccaccccatctcttaaaaaaaaagccagacctggtggtggcgcacacctgtaatcccagccactcaggaggctgatgcagaaggatcatttgagcccaggagttccagactgcagtgagctatgattgggccactgcactccagccattgtgacacagtgagatcatgtttctt

SEQ ID NO: 15462 - DNA, 275 bp, Homo sapiens
actgacaagaaacaaatctttaaaggacacagttgtttgaactaatgactccttcattagcagccatactaaaatctttgtaaaagttcaagaaattatacattttggaataaccactattatagtgttacatatatctataagcaactttgatcactggtattggctatgtaaaattatgttgatcgatactaagatgtttattgaagacagttaatttaaaatggcattaaaatggagcttctttgaaaaaaaatctaatgatgtatgaatgc

SEQ ID NO: 15463 - DNA, 679 bp, Homo sapiens
actgacaagaaacaaatctttaaaggacacagttgtttgaactaatgactccttcattagcagccatactaaaatctttgtaaaagttcaagaaattatacattttggaataaccactattatagtgttacatatatctataagcaactttgatcactggtattggctatgtaaaattatgttgatcgatactaagatgtttattgaagacagttaatttaattgcattcatacatcattagattttttttcaaagaagctccattttaatgccattttatattattttagaactttctattgtttgtttaccacagatttatatttgagagtaagagttgatattaatacaaatggcatgtgccttttctgatattactcttagaaataagaagaaaatgctgggtgtggtggctcacacctgtaatcccagcactttgggaggctgaggtgggcagatcatgaggtcaggagttcgagaccagcctgaccaacatggtgaaaccctgtctctactaaaaatacaaaaattagctgggcgtggtggcgcatgcctgtaatcccagctactcaggaggctgaggcaagagaattgcttgaacctgggatgtggaggttgcggtgagctgagatcacaccattgcactccagcctgagcaacagagcaagatgccaaaaa

SEQ ID NO: 15464 - DNA, 374 bp, Homo sapiens
ctaaaactcaatgacatttccatttttaatattctgactttatgttaaatgtcttcttgtttaaagatgtatggacaatgggccgggcatggtggctcacgccttaatcccaggactttgggagtctgaggcaggcggatcacgaggtcaggagattgagatcatcctggctaacacggtgaaaccccatctctactaaaaaaatacaaaataattagccaggcgtggtggcgggcgcctgtagtcccagctactcaggaggctgaggcaggagaatggcgtgaacccgggaggcggagcttgcagtgagccgagatcgcaccactgcactccagcctgggcaacagagcaagactctgtctcaaaaaaaaaaa

SEQ ID NO: 15465 - DNA, 582 bp, Homo sapiens
tagagtcttatgtttattcatttcacatttattgactgtaaactgtcttatggtctgtttttctttgagctaacttactttccacaagtgccatatcaaatgaagtaattaatgcaacaagaactttgtaaactctaaagcactatacaaatgtcattttccttccagtcccactgcgatgacatgaattaatgttacttcctcttccaatctatacaggagcctctaactgaactatctccttcccaaattctccttagattatatattttgcaccctgctgcccacttagtcttcttaaagccttgctataattatgcacctctcctactcaaaaactttgactgccttccagttcttgaccaaatagtatacaaagtccttgacttgtaaccaagaccttccctgatgtggcttcagattgccctttcactgtttctcactcttctcccacccaaaccctggattttcaagtaagtttagcccactaacctttccctgagcccaactgccttcccccacttgtctttcactcatgcttcccctctgaatggaaagcttcctgcataccttctccttaaa

SEQ ID NO: 15466 - DNA, 672 bp, Homo sapiens
tagagtcttatgtttattcatttcacatttattgactgtaaactgtcttatggtctgtttttctttgagctaacttactttccacaagtgccatatcaaatgaagtaattaatgcaacaagaactttgtaaactctaaagcactatacaaatgtcattttccttccagtcccactgcgatgacatgaattaatgttacttcctcttccaatctatacaggagcctctaactgaactatctccttcccaaattctccttagattatatattttgcaccctgctgcccacttagtcttcttaaagccttgctataattatgcacctctcctactcaaaaactttgactgccttccagttcttgaccaaatagtatacaaagtccttgacttgtaaccaagaccttccctgatgtggcttcagattgccctttcactgtttctcactcttctcccacccaaaccctggattttcaagtagaatggtggtcaccaggggctgggggagggggagaggagagttactattcaatgagtacagagtttcagcttaggaagaggaaaagagttacacagagctagatagtggtacaacaatgtaaatctacttaatgccactaaactgtatacctaaagctggttaagatgttaagttttatattatgtgtattttatc

SEQ ID NO: 15467 - DNA, 478 bp, Homo sapiens
ccatgtacacagctggaactgtattttgccgaacctgagccatctacaactgtgattctttgattcataactttctctacacactagctcaataagaattgctggtttgccattttcctaggaacctagttttgaaaaatcttggaaagaagataattcttcccgtttatgatatatgaactactcccctctgtatttctcctgattcctagtaatttacctattgtagcttcactgaataggaactcactatcttaatagagatcttttatttatttatttatttatttatttatttagagacagggtcttactctctcactcaggctagagtgcagtgacgtgatcacagctcactgcagcctcagcctcccaggctgaggcaggagaattgctggaacttgggaggcggaggtttcagtgagccgagatgtgccattgcactccagcggggggcagcagagcaagactccatctc

SEQ ID NO: 15468 - DNA, 307 bp, Homo sapiens
tgagacagggtctggctctgttgcccaggctggagtgcattggtgcaatctcggctcactgcacccttgctgtcctgggctcaagcagtcctcccacctcagcctcccaagtagctgggactacaggagtgtgccaccaccatgcctggtattttttggtatttttttatagaggcaaaattttaccatgttgcccaggctggtctcagactcttgtgctgaaaagcaatctgtccgccttggcctcccaaagtgttgggattgcaggtgtgagccaccacgcccataaaactgtttaaaactgttt

SEQ ID NO: 15469 - DNA, 484 bp, Homo sapiens
cttacatcatcattgtcatcatcaccatcatcatcatcatcatcatcgtcatcatcatcatcaccgtcgttactgttatataaatcatcttgatcaacttaacagaataaacatgacacctatttagaattctcttctgattgcttctaatattcctttgcagttttaacacagcttataagttcacctgacatattttttggtgctgattttgtcacttaacatgacttcaccaaatggtttcatcagatagtttccctctgtccatcctttcatatttcattctgttactcttccttaccgtaccataatctgaatgggctctatatacaggtgctgtggagcatcttttgtaaaaacttccttgtggtgacattttagattatttttatgggatatagtccaccaaccgtaattacctggtcagcgttttaaactcttgcaacactaaatatatacacctacaatatacccgcaaaaatta

SEQ ID NO: 15470 - DNA, 358 bp, Homo sapiens
attgtgaaatgcgtcgaccacactgaaggtatttgttaatgagggttccagaagcgttaaaagtagcaccaccaaaagccgggtgtggtggctcacgcctgtaatcccggcattttgggaggccgaggtgggcagatcacgaggtcaggagatcgagaccatcctggctaacacggtgaagccccgtctctactagaaatacaaaaaattggccgggtgcggtggtgggcaccagtggtcccagctactgggaggctgaggcgggagaatggcgtgaacccaggaggcgaagcttgcagtgagctgatatcatgccactgcactccagcctgggcaacagtgtgagactccatctcaa

SEQ ID NO: 15471 - DNA, 377 bp, Homo sapiens
taggttttgggacctatctttattttgtgccaacatactagaatgtgaactgcaaggacccacaatatatcctgaagtcttactttcgccttctggccagcaaatgtctaatatttaaagatggatgacttctgttcttgaagcttacctggatttaaccttcttcagcatcctcaacattttattacctggttcaggatcattaagaaacttactggtttttatccaaaatcttttacgttaaatagacttttttaaagatatagttagcatcacttttaaacagcttaaaggaatatcaaaattgttattgtgtatctcatctataaggaagtctgttactttgaaattttcataaatttaatatttaagataaa

SEQ ID NO: 15472 - DNA, 452 bp, Homo sapiens
accaagagtcattgtcaatggcctataatgcctttcaccccaccaggctgtgttcttcccacctcctgactttatacatggctactcccaggacaagcttcttccagatggtccagctcgtttcctgcctgactttcccaatgagcccttgtgttggctcctttggccctctttttgaaagagtggacaagaatcagatgattctgaggtcttgcatttgttttcattttgtgtgtgaaatggtgtttaaggtccatagcattaagtttgaaggaaagatagtttcaggagagagctgagactctatacttttcccaaggtttatttgcattgccaatgaaacatccattaaagccatctcagccaactatagagtttgaattggggaagaaaataccacggtggaaaagtagaatttgatgttagccatgcagatggcgactgaacttaag

SEQ ID NO: 15473 - DNA, 480 bp, Homo sapiens
tttagggcttactatttaactacatgagaagcaggcacagctggaagtaaaacgcatatccctcagaatcaaggatcccatttgcacattgaatcctgggtcccccaaaagagacaaacacaacaggaggagacagtgcaatgtttccacagtatacttcactgtgaggacattccctggaggctgctaggcaacccaacaccagtcagcacactctataatcagcccattccctagacattaaacacaccaaggtcaagttttttcacaatacaaagtaatttctcatgtccttcaaagccaaagagatcaggtaaggcaatgcaaaagagactgaatatgacaaagaggaaagaagaataaggtggattaaaaataaataagagaacaatttttaagaaaggaagcaaacgtaagtaccatgtacataatttagaaaaaagttttagccaactaaaaatattccgcaaaacaggatcc

SEQ ID NO: 15474 - DNA, 168 bp, Homo sapiens
ttgcaaaaattaacaaatgtgctgcttggttaaaatggctaggctcttctggctcactctttgatgtgttctattttagttggtttgcatcttgcctaaggtgcatattccaaactcttggtattatcttcctgatagtcatattagtagtctcctggtgtgttgtat

SEQ ID NO: 15475 - DNA, 406 bp, Homo sapiens
aaattcggtatcagattggaaagtacaattgaagacaccactcagaaaatacaacaaaaagcaaaggaactggacatgggggcacacacctgtagttccagcaactcaggaggctgaggcaggaagattgcttgagcccaagagttcaaggctgcggtgagctatcatcacgccactgcactccagcctgggtgacagagtgcagataagaccccatctctaaaaaaagagaaaaagaatacagtaagtaacatttaaaatttaaaaatcacaaattggcggggtgcggtggctcacgcctgtaatcccagcactctgggaggctgaggcaggtggatcacctgaggtcaggtgttcgagaccagtctggccaacatggtgaaaccccatctctaataaaaataca

SEQ ID NO: 15476 - DNA, 3399 bp, Homo sapiens
agcgggccgccgccgcgccgccgccgccgccgccgccgccacagcccgctgggccggaggaggcggagctggcgctgtcccggctctcttgcggggaagcaactgagggggcggcgcggcgggccccggcggccgaagaggctggcaggtggcgccgtggggtgggtgctcctggtgagaggagtccactccgtgcgtgcgggcggaggccggcccccgagagccgccgacatgaagaaagacgtgcggatcctgctggtgggagaacctagagttgggaagacatcactgattatgtctctggtcagtgaagaatttccagaagaggttcctccccgggcagaagaaatcaccattccagctgatgtcaccccagagagagttccaacacacattgtagattactcagaagcagaacagagtgatgaacaacttcatcaagaaatatctcaggctaatgtcatctgtatagtgtatgccgttaacaacaagcattctattgataaggtaacaagtcgatggattcctctcataaatgaaagaacagacaaagacagcaggctgcctttaatattggttgggaacaaatctgatctggtggaatatagtagtatggagaccatccttcctattatgaaccagtatacagaaatagaaacctgtgtggagtgttcagcgaaaaacctgaagaacatatcagagctcttttattacgcacagaaagctgttcttcatcctacagggcccctgtactgcccagaggagaaggagatgaaaccagcttgtataaaagcccttactcgtatatttaaaatatctgatcaagataatgatggtactctcaatgatgctgaactcaacttctttcagaggatttgtttcaacactccattagctcctcaagctctggaggatgtcaagaatgtagtcagaaaacatataagtgatggtgtggctgacagtgggttgaccctgaaaggttttctctttttacacacactttttatccagagagggagacacgaaactacttggactgtgcttcgacgatttggttatgatgatgacctggatttgacacctgaatatttgttccccctgctgaaaatacctcctgattgcactactgaattaaatcatcatgcatatttatttctccaaagcacctttgacaagcatgatttggatagagactgtgctttgtcacctgatgagcttaaagatttatttaaagttttcccttacataccttgggggccagatgtgaataacacagtttgtaccaatgaaagaggctggataacctaccagggattcctttcccagtggacgctcacgacttatttagatgtacagcggtgcctggaatatttgggctatctaggctattcaatattgactgagcaagagtctcaagcttcagctgttacagtgacaagagataaaaagatagacctgcagaaaaaacaaactcaaagaaatgtgttcagatgtaatgtaattggagtgaaaaactgtgggaaaagtggagttcttcaggctcttcttggaagaaacttaatgaggcagaagaaaattcgtgaagatcataaatcctactatgcgattaacactgtttatgtatatggacaagagaaatacttgttgttgcatgatatctcagaatcggaatttctaactgaagctgaaatcatttgtgatgttgtatgcctggtatatgatgtcagcaatcccaaatcctttgaatactgtgccaggatttttaagcaacactttatggacagcagaataccttgcttaatcgtagctgcaaagtcagacctgcatgaagttaaacaagaatacagtatttcacctactgatttctgcaggaaacacaaaatgcctccaccacaagccttcacttgcaatactgctgatgcccccagtaaggatatctttgttaaattgacaacaatggccatgtatccgtaagtacttgctgtcttcattttcatgttgcatggttcataacattgcatgccattattagccatgaagggaatatctttgtcacataggaattgttcagcaacagaaagatactttgtaatgagaaggtacaaatttgagtaaatgcaagtttggtttgaatgccataataaaatgatataaacagtgcttctgacaatatctgtatatttttgagcaggctgtaactatcttaatagaatagtacaataaaacacaaccccccacccagcattaaaaaatagttttactggaataaaatgggtttggcatcatgttgttttatgcttataaagcattttcatatgaacagaaagtttatatttttctgtttttgaccttaggtatatgaagttttctaaaatattttattaatttatgttgaaattgtgggtatgcttcagttaggatatgtcttttttaagtgctgtaaagagtagttgtaattggaatttctactgtataaatgttttacattaagtgttacgagccacaaatttcatgtacatttattatatatctatacatgcatatgcacaagcacataactgtggtcatctctgtagtttactaactgccttaaaattgcatggttcttaatggcattcgcctcaagtagtgtgtttgtataaattctgttttgtaacaaaatagtttttcaggcagtgcgtttctcaggactttatagcttattctacttattcttatgttagtctctaaattatttttcttcttatgaaaactacagtgtaacacagagtaataatcaaacattgctataaaccaagaatgacatttttcaaaaaggtgttgatttgtacagatttttaaagtcagttaactttactgctattttattacctaatactttttttagatgcaacaaacccttgaatttctatttgtattcgaagacaagtcattcctattattatagaataaccaaaaccttatttatgttttacctttgctttaaaactctcatgtatgttatctacagagaggatcattacagagacagactctcccgagacatgggccacactgatagaatagagaatttgagaaaaatctgggtctttctaaaaactgctttgtaagttactttttctttatgacttctgtgggattttgttgatattttcttagagaatgaccaaatctcctttcttgccataattaacatttagtaattatgtagaaacgcactgcttggtcaggcttcctgcctagctatatattacgttgtcttccttactacataaatgtacttctttaatcttgtgattacagtaactgcaagtgtgtttttacatctgcatttttaaaacattttactgtaattctgttgtgtgtgtgtgtgttatatgataaatgtacatacatgga

SEQ ID NO: 15477 - DNA, 453 bp, Homo sapiens
aagtaagaactcaactcctgtccttctgtgtgttttccgccagccatgcccggttacgctgtatgtgcacctgcaacaggtgtacattttgcatctgtcagaacttcctcaactcagacttgctgcaatctgtaaagaacaaaatcttcactgcagttcttaacaggttcttaactttatttactgggtacccaggcattctgttaaaatacaaaagaaaaaagcggataactatttattatacagatactcactacaaagacaagctgactgatgcccaactaacttccactaaaattctcactgtgatgacaatgtttagttttggaagcatccttaataatgtttttatattaataggtatatttagaggactataaaataagattttggatgtttttttcataaggaagataaattatctttcctattaaaagataatatgtataggga

SEQ ID NO: 15478 - DNA, 539 bp, Homo sapiens
  misc_feature (8)..(8): n is a, c, g, or t
  misc_feature (24)..(24): n is a, c, g, or t
  misc_feature (31)..(31): n is a, c, g, or t
cgttaccnggctttcccttgtgtntgctacnccatgtcattttgagggatgttagatgagtgttgcatagagtttagcttggccattagtttttatgggagtgtctgcgatatggaacattgagcttcctgtcatttgtagaagcagaacagagtgatgaacaacttcatcaagaaatatctcaggttcctccccgggcagaagaaatcaccattccagctgatgtcaccccagagagagttccaacacacattgtagattactcaggtaatgaatatcctcttgtagatgaaggtgtaggttaatttaatagacttgaaaaaagatacttactgagcttttacaaatgttcagagaggtggtcttttctctgtagcagtaaatgatcctttacgattcttatctcatttatgtctgtcaacctctaccctataccccacccagtgcctccatctgacagttcttcgtccccagattactaagttgggttccataatacctgtggctgttgacacttgaaatgtgactgttctaaatga

SEQ ID NO: 15479 - DNA, 280 bp, Homo sapiens
gatgggtattaatctcgatcagaccaaattatggtataatgaagattgccagcaggtggctctagaatatactttcagtaatacggatagtttccttcctttttagctactgcttgtactttatgcagaacaaatacatcttttattttaggtcttaagaactaagaaacataaaatcaatatctcctttgtactgataaatagtacacagtgtagggaagaatgcccttttatttataacacacctgcacatatacacagagatgtttgtatattgttg

SEQ ID NO: 15480 - DNA, 3082 bp, Homo sapiens
agcgggccgccgccgcgccgccgccgccgccgccgccgccacagcccgctgggccggaggaggcggagctggcgctgtcccggctctcttgcggggaagcaactgagggggcggcgcggcgggccccggcggccgaagaggctggcaggtggcgccgtggggtgggtgctcctggtgagaggagtccactccgtgcgtgcgggcggaggccggcccccgagagccgccgacatgaagaaagacgtgcggatcctgctggtgggagaacctagagttgggaagacatcactgattatgtctctggtcagtgaagaatttccagaagaggttcctccccgggcagaagaaatcaccattccagctgatgtcaccccagagagagttccaacacacattgtagattactcagaagcagaacagagtgatgaacaacttcatcaagaaatatctcaggctaatgtcatctgtatagtgtatgccgttaacaacaagcattctattgataaggtaacaagtcgatggattcctctcataaatgaaagaacagacaaagacagcaggctgcctttaatattggttgggaacaaatctgatctggtggaatatagtagtatggagaccatccttcctattatgaaccagtatacagaaatagaaacctgtgtggagtgttcagcgaaaaacctgaagaacatatcagagctcttttattacgcacagaaagctgttcttcatcctacagggcccctgtactgcccagaggagaaggagatgaaaccagcttgtataaaagcccttactcgtatatttaaaatatctgatcaagataatgatggtactctcaatgatgctgaactcaacttctttcagaggatttgtttcaacactccattagctcctcaagctctggaggatgtcaagaatgtagtcagaaaacatataagtgatggtgtggctgacagtgggttgaccctgaaaggttttctctttttacacacactttttatccagagagggagacacgaaactacttggactgtgcttcgacgatttggttatgatgatgacctggatttgacacctgaatatttgttccccctgctgaaaatacctcctgattgcactactgaattaaatcatcatgcatatttatttctccaaagcacctttgacaagcatgatttggatagagactgtgctttgtcacctgatgagcttaaagatttatttaaagttttcccttacataccttgggggccagatgtgaataacacagtttgtaccaatgaaagaggctggataacctaccagggattcctttcccagtggacgctcacgacttatttagatgtacagcggtgcctggaatatttgggctatctaggctattcaatattgactgagcaagagtctcaagcttcagctgttacagtgacaagagataaaaagatagacctgcagaaaaaacaaactcaaagaaatgtgttcagatgtaatgtaattggagtgaaaaactgtgggaaaagtggagttcttcaggctcttcttggaagaaacttaatgaggcagaagaaaattcgtgaagatcataaatcctactatgcgattaacactgtttatgtatatggacaagagaaatacttgttgttgcatgatatctcagaatcggaatttctaactgaagctgaaatcatttgtgatgttgtatgcctggtatatgatgtcagcaatcccaaatcctttgaatactgtgccaggatttttaagcaacactttatggacagcagaataccttgcttaatcgtagctgcaaagtcagacctgcatgaagttaaacaagaatacagtatttcacctactgatttctgcaggaaacacaaaatgcctccaccacaagccttcacttgcaatactgctgatgcccccagtaaggatatctttgttaaattgacaacaatggccatgtatccgcacgtgacacaagctgacctcaagagctccacgttttggcttcgagcaagttttggtgctactgtttttgcagttttgggctttgctatgtacaaagcattattgaaacagcgatgatataaaaagaaatactgtccctaccaaaaacaaatacttttatgtacattctgaatgctttaagttctgctagaattattgagatatttatacatgcagagttactttattaatatttgtaattcatgcataagagtattttaatgatagttataactgcagtattggctagcatatggaaagaaaacagctaacagccaaactaaaatggctaaattccagaggccaaaagggaatattttgtaaatatatgtacatattcaggcaagatatggtctcccaagctgagttctagaaatgatgtttctagacatttctaagtggtattgttagtgctcacttggctcactcttctaggtttaagttagcccagagattgtatttactcatggatcactttatttatttcacatttactcagaatgatcctttgggttctataaggacataaggtacaatttgccattgtctctccatttttaaaaacatacaagtcagtgtcagcttaccaacatgacattttttcagtcagttgtggtaggccagccttgaagccatcgcacagtctagaaacttgtgtagctgagtgtgcagctcacctttaagggtgaagttaggtaaaagcaattagcagaggcgttatctatgtgattatgttgcttccttgtcagtatgttgaattttatagccctttcaatgaaataaaaaaaaaatttgtatattaccaatgtttttagtttaaataaagagtcacccttactactgttgaatttcatcccaagtgtaaatcattctataatggctgtgtctgttatagtatattacagtaactgcatgtgtcaccaagtgttctatatcaggctaggataacctagaggcagtaattttttaaatgataaaataaatctaatgaatataaactctcatgataaacctattttttccatcatcagccttttcaagtatttaaataaataactgctgtgtactgtga

SEQ ID NO: 15481 - DNA, 3206 bp, Homo sapiens
agcgggccgccgccgcgccgccgccgccgccgccgccgccacagcccgctgggccggaggaggcggagctggcgctgtcccggctctcttgcggggaagcaactgagggggcggcgcggcgggccccggcggccgaagaggctggcaggtggcgccgtggggtgggtgctcctggtgagaggagtccactccgtgcgtgcgggcggaggccggcccccgagagccgccgacatgaagaaagacgtgcggatcctgctggtgggagaacctagagttgggaagacatcactgattatgtctctggtcagtgaagaatttccagaagagattgttgtggatttaaatacctcctcatttgcagagtatcttcagccttcaacaaaatagaatgaaaacaacatatttaaaaaatctaacaccgaaacaccaaattaatccaagaatccactgagttcctccccgggcagaagaaatcaccattccagctgatgtcaccccagagagagttccaacacacattgtagattactcagaagcagaacagagtgatgaacaacttcatcaagaaatatctcaggctaatgtcatctgtatagtgtatgccgttaacaacaagcattctattgataaggtaacaagtcgatggattcctctcataaatgaaagaacagacaaagacagcaggctgcctttaatattggttgggaacaaatctgatctggtggaatatagtagtatggagaccatccttcctattatgaaccagtatacagaaatagaaacctgtgtggagtgttcagcgaaaaacctgaagaacatatcagagctcttttattacgcacagaaagctgttcttcatcctacagggcccctgtactgcccagaggagaaggagatgaaaccagcttgtataaaagcccttactcgtatatttaaaatatctgatcaagataatgatggtactctcaatgatgctgaactcaacttctttcagaggatttgtttcaacactccattagctcctcaagctctggaggatgtcaagaatgtagtcagaaaacatataagtgatggtgtggctgacagtgggttgaccctgaaaggttttctctttttacacacactttttatccagagagggagacacgaaactacttggactgtgcttcgacgatttggttatgatgatgacctggatttgacacctgaatatttgttccccctgctgaaaatacctcctgattgcactactgaattaaatcatcatgcatatttatttctccaaagcacctttgacaagcatgatttggatagagactgtgctttgtcacctgatgagcttaaagatttatttaaagttttcccttacataccttgggggccagatgtgaataacacagtttgtaccaatgaaagaggctggataacctaccagggattcctttcccagtggacgctcacgacttatttagatgtacagcggtgcctggaatatttgggctatctaggctattcaatattgactgagcaagagtctcaagcttcagctgttacagtgacaagagataaaaagatagacctgcagaaaaaacaaactcaaagaaatgtgttcagatgtaatgtaattggagtgaaaaactgtgggaaaagtggagttcttcaggctcttcttggaagaaacttaatgaggcagaagaaaattcgtgaagatcataaatcctactatgcgattaacactgtttatgtatatggacaagagaaatacttgttgttgcatgatatctcagaatcggaatttctaactgaagctgaaatcatttgtgatgttgtatgcctggtatatgatgtcagcaatcccaaatcctttgaatactgtgccaggatttttaagcaacactttatggacagcagaataccttgcttaatcgtagctgcaaagtcagacctgcatgaagttaaacaagaatacagtatttcacctactgatttctgcaggaaacacaaaatgcctccaccacaagccttcacttgcaatactgctgatgcccccagtaaggatatctttgttaaattgacaacaatggccatgtatccgcacgtgacacaagctgacctcaagagctccacgttttggcttcgagcaagttttggtgctactgtttttgcagttttgggctttgctatgtacaaagcattattgaaacagcgatgatataaaaagaaatactgtccctaccaaaaacaaatacttttatgtacattctgaatgctttaagttctgctagaattattgagatatttatacatgcagagttactttattaatatttgtaattcatgcataagagtattttaatgatagttataactgcagtattggctagcatatggaaagaaaacagctaacagccaaactaaaatggctaaattccagaggccaaaagggaatattttgtaaatatatgtacatattcaggcaagatatggtctcccaagctgagttctagaaatgatgtttctagacatttctaagtggtattgttagtgctcacttggctcactcttctaggtttaagttagcccagagattgtatttactcatggatcactttatttatttcacatttactcagaatgatcctttgggttctataaggacataaggtacaatttgccattgtctctccatttttaaaaacatacaagtcagtgtcagcttaccaacatgacattttttcagtcagttgtggtaggccagccttgaagccatcgcacagtctagaaacttgtgtagctgagtgtgcagctcacctttaagggtgaagttaggtaaaagcaattagcagaggcgttatctatgtgattatgttgcttccttgtcagtatgttgaattttatagccctttcaatgaaataaaaaaaaaatttgtatattaccaatgtttttagtttaaataaagagtcacccttactactgttgaatttcatcccaagtgtaaatcattctataatggctgtgtctgttatagtatattacagtaactgcatgtgtcaccaagtgttctatatcaggctaggataacctagaggcagtaattttttaaatgataaaataaatctaatgaatataaactctcatgataaacctattttttccatcatcagccttttcaagtatttaaataaataactgctgtgtactgtga

SEQ ID NO: 15482 - DNA, 3301 bp, Homo sapiens
agcgggccgccgccgcgccgccgccgccgccgccgccgccacagcccgctgggccggaggaggcggagctggcgctgtcccggctctcttgcggggaagcaactgagggggcggcgcggcgggccccggcggccgaagaggctggcaggtggcgccgtggggtgggtgctcctggtgagaggagtccactccgtgcgtgcgggcggaggccggcccccgagagccgccgacatgaagaaagacgtgcggatcctgctggtgggagaacctagagttgggaagacatcactgattatgtctctggtcagtgaagaatttccagaagaggttcctccccgggcagaagaaatcaccattccagctgatgtcaccccagagagagttccaacacacattgtagattactcagaagcagaacagagtgatgaacaacttcatcaagaaatatctcaggctaatgtcatctgtatagtgtatgccgttaacaacaagcattctattgataaggtaacaagtcgatggattcctctcataaatgaaagaacagacaaagacagcaggctgcctttaatattggttgggaacaaatctgatctggtggaatatagtagtatggagaccatccttcctattatgaaccagtatacagaaatagaaacctgtgtggagtgttcagcgaaaaacctgaagaacatatcagagctcttttattacgcacagaaagctgttcttcatcctacagggcccctgtactgcccagaggagaaggagatgaaaccagcttgtataaaagcccttactcgtatatttaaaatatctgatcaagataatgatggtactctcaatgatgctgaactcaacttctttcagaggatttgtttcaacactccattagctcctcaagctctggaggatgtcaagaatgtagtcagaaaacatataagtgatggtgtggctgacagtgggttgaccctgaaaggttttctctttttacacacactttttatccagagagggagacacgaaactacttggactgtgcttcgacgatttggttatgatgatgacctggatttgacacctgaatatttgttccccctgctgaaaatacctcctgattgcactactgaattaaatcatcatgcatatttatttctccaaagcacctttgacaagcatgatttggatagagactgtgctttgtcacctgatgagcttaaagatttatttaaagttttcccttacataccttgggggccagatgtgaataacacagtttgtaccaatgaaagaggctggataacctaccagggattcctttcccagtggacgctcacgacttatttagatgtacagcggtgcctggaatatttgggctatctaggctattcaatattgactgagcaagagtctcaagcttcagctgttacagtgacaagagataaaaagatagacctgcagaaaaaacaaactcaaagaaatgtgttcagatgtaatgtaattggagtgaaaaactgtgggaaaagtggagttcttcaggctcttcttggaagaaacttaatgaggcagaagaaaattcgtgaagatcataaatcctactatgcgattaacactgtttatgtatatggacaagagaaatacttgttgttgcatgatatctcagaatcggaatttctaactgaagctgaaatcatttgtgatgttgtatgcctggtatatgatgtcagcaatcccaaatcctttgaatactgtgccaggatttttaagcaacactttatggacagcagaataccttgcttaatcgtagctgcaaagtcagacctgcatgaagttaaacaagaatacagtatttcacctactgatttctgcaggaaacacaaaatgcctccaccacaagccttcacttgcaatactgctgatgcccccagtaaggatatctttgttaaattgacaacaatggccatgtatccagaggatcattacagagacagactctcccgagacatgggccacactgatagaatagagaatttgagaaaaatctgggtctttctaaaaactgctttccatgcccggttacgctgtatgtgcacctgcaacaggtgtacattttgcatctgtcagaacttcctcaactcagacttgctgcaatctgtaaagaacaaaatcttcactgcagttcttaacaggcacgtgacacaagctgacctcaagagctccacgttttggcttcgagcaagttttggtgctactgtttttgcagttttgggctttgctatgtacaaagcattattgaaacagcgatgatataaaaagaaatactgtccctaccaaaaacaaatacttttatgtacattctgaatgctttaagttctgctagaattattgagatatttatacatgcagagttactttattaatatttgtaattcatgcataagagtattttaatgatagttataactgcagtattggctagcatatggaaagaaaacagctaacagccaaactaaaatggctaaattccagaggccaaaagggaatattttgtaaatatatgtacatattcaggcaagatatggtctcccaagctgagttctagaaatgatgtttctagacatttctaagtggtattgttagtgctcacttggctcactcttctaggtttaagttagcccagagattgtatttactcatggatcactttatttatttcacatttactcagaatgatcctttgggttctataaggacataaggtacaatttgccattgtctctccatttttaaaaacatacaagtcagtgtcagcttaccaacatgacattttttcagtcagttgtggtaggccagccttgaagccatcgcacagtctagaaacttgtgtagctgagtgtgcagctcacctttaagggtgaagttaggtaaaagcaattagcagaggcgttatctatgtgattatgttgcttccttgtcagtatgttgaattttatagccctttcaatgaaataaaaaaaaaatttgtatattaccaatgtttttagtttaaataaagagtcacccttactactgttgaatttcatcccaagtgtaaatcattctataatggctgtgtctgttatagtatattacagtaactgcatgtgtcaccaagtgttctatatcaggctaggataacctagaggcagtaattttttaaatgataaaataaatctaatgaatataaactctcatgataaacctattttttccatcatcagccttttcaagtatttaaataaataactgctgtgtactgtga

SEQ ID NO: 15483 - DNA, 3205 bp, Homo sapiens
agcgggccgccgccgcgccgccgccgccgccgccgccgccacagcccgctgggccggaggaggcggagctggcgctgtcccggctctcttgcggggaagcaactgagggggcggcgcggcgggccccggcggccgaagaggctggcaggtggcgccgtggggtgggtgctcctggtgagaggagtccactccgtgcgtgcgggcggaggccggcccccgagagccgccgacatgaagaaagacgtgcggatcctgctggtgggagaacctagagttgggaagacatcactgattatgtctctggtcagtgaagaatttccagaagaggttcctccccgggcagaagaaatcaccattccagctgatgtcaccccagagagagttccaacacacattgtagattactcagaagcagaacagagtgatgaacaacttcatcaagaaatatctcaggctaatgtcatctgtatagtgtatgccgttaacaacaagcattctattgataaggtaacaagtcgatggattcctctcataaatgaaagaacagacaaagacagcaggctgcctttaatattggttgggaacaaatctgatctggtggaatatagtagtatggagaccatccttcctattatgaaccagtatacagaaatagaaacctgtgtggagtgttcagcgaaaaacctgaagaacatatcagagctcttttattacgcacagaaagctgttcttcatcctacagggcccctgtactgcccagaggagaaggagatgaaaccagcttgtataaaagcccttactcgtatatttaaaatatctgatcaagataatgatggtactctcaatgatgctgaactcaacttctttcagaggatttgtttcaacactccattagctcctcaagctctggaggatgtcaagaatgtagtcagaaaacatataagtgatggtgtggctgacagtgggttgaccctgaaaggttttctctttttacacacactttttatccagagagggagacacgaaactacttggactgtgcttcgacgatttggttatgatgatgacctggatttgacacctgaatatttgttccccctgctgaaaatacctcctgattgcactactgaattaaatcatcatgcatatttatttctccaaagcacctttgacaagcatgatttggatagagactgtgctttgtcacctgatgagcttaaagatttatttaaagttttcccttacataccttgggggccagatgtgaataacacagtttgtaccaatgaaagaggctggataacctaccagggattcctttcccagtggacgctcacgacttatttagatgtacagcggtgcctggaatatttgggctatctaggctattcaatattgactgagcaagagtctcaagcttcagctgttacagtgacaagagataaaaagatagacctgcagaaaaaacaaactcaaagaaatgtgttcagatgtaatgtaattggagtgaaaaactgtgggaaaagtggagttcttcaggctcttcttggaagaaacttaatgaggcagaagaaaattcgtgaagatcataaatcctactatgcgattaacactgtttatgtatatggacaagagaaatacttgttgttgcatgatatctcagaatcggaatttctaactgaagctgaaatcatttgtgatgttgtatgcctggtatatgatgtcagcaatcccaaatcctttgaatactgtgccaggatttttaagcaacactttatggacagcagaataccttgcttaatcgtagctgcaaagtcagacctgcatgaagttaaacaagaatacagtatttcacctactgatttctgcaggaaacacaaaatgcctccaccacaagccttcacttgcaatactgctgatgcccccagtaaggatatctttgttaaattgacaacaatggccatgtatccccatgcccggttacgctgtatgtgcacctgcaacaggtgtacattttgcatctgtcagaacttcctcaactcagacttgctgcaatctgtaaagaacaaaatcttcactgcagttcttaacaggcacgtgacacaagctgacctcaagagctccacgttttggcttcgagcaagttttggtgctactgtttttgcagttttgggctttgctatgtacaaagcattattgaaacagcgatgatataaaaagaaatactgtccctaccaaaaacaaatacttttatgtacattctgaatgctttaagttctgctagaattattgagatatttatacatgcagagttactttattaatatttgtaattcatgcataagagtattttaatgatagttataactgcagtattggctagcatatggaaagaaaacagctaacagccaaactaaaatggctaaattccagaggccaaaagggaatattttgtaaatatatgtacatattcaggcaagatatggtctcccaagctgagttctagaaatgatgtttctagacatttctaagtggtattgttagtgctcacttggctcactcttctaggtttaagttagcccagagattgtatttactcatggatcactttatttatttcacatttactcagaatgatcctttgggttctataaggacataaggtacaatttgccattgtctctccatttttaaaaacatacaagtcagtgtcagcttaccaacatgacattttttcagtcagttgtggtaggccagccttgaagccatcgcacagtctagaaacttgtgtagctgagtgtgcagctcacctttaagggtgaagttaggtaaaagcaattagcagaggcgttatctatgtgattatgttgcttccttgtcagtatgttgaattttatagccctttcaatgaaataaaaaaaaaatttgtatattaccaatgtttttagtttaaataaagagtcacccttactactgttgaatttcatcccaagtgtaaatcattctataatggctgtgtctgttatagtatattacagtaactgcatgtgtcaccaagtgttctatatcaggctaggataacctagaggcagtaattttttaaatgataaaataaatctaatgaatataaactctcatgataaacctattttttccatcatcagccttttcaagtatttaaataaataactgctgtgtactgtga

SEQ ID NO: 15484 - DNA, 3178 bp, Homo sapiens
agcgggccgccgccgcgccgccgccgccgccgccgccgccacagcccgctgggccggaggaggcggagctggcgctgtcccggctctcttgcggggaagcaactgagggggcggcgcggcgggccccggcggccgaagaggctggcaggtggcgccgtggggtgggtgctcctggtgagaggagtccactccgtgcgtgcgggcggaggccggcccccgagagccgccgacatgaagaaagacgtgcggatcctgctggtgggagaacctagagttgggaagacatcactgattatgtctctggtcagtgaagaatttccagaagaggttcctccccgggcagaagaaatcaccattccagctgatgtcaccccagagagagttccaacacacattgtagattactcagaagcagaacagagtgatgaacaacttcatcaagaaatatctcaggctaatgtcatctgtatagtgtatgccgttaacaacaagcattctattgataaggtaacaagtcgatggattcctctcataaatgaaagaacagacaaagacagcaggctgcctttaatattggttgggaacaaatctgatctggtggaatatagtagtatggagaccatccttcctattatgaaccagtatacagaaatagaaacctgtgtggagtgttcagcgaaaaacctgaagaacatatcagagctcttttattacgcacagaaagctgttcttcatcctacagggcccctgtactgcccagaggagaaggagatgaaaccagcttgtataaaagcccttactcgtatatttaaaatatctgatcaagataatgatggtactctcaatgatgctgaactcaacttctttcagaggatttgtttcaacactccattagctcctcaagctctggaggatgtcaagaatgtagtcagaaaacatataagtgatggtgtggctgacagtgggttgaccctgaaaggttttctctttttacacacactttttatccagagagggagacacgaaactacttggactgtgcttcgacgatttggttatgatgatgacctggatttgacacctgaatatttgttccccctgctgaaaatacctcctgattgcactactgaattaaatcatcatgcatatttatttctccaaagcacctttgacaagcatgatttggatagagactgtgctttgtcacctgatgagcttaaagatttatttaaagttttcccttacataccttgggggccagatgtgaataacacagtttgtaccaatgaaagaggctggataacctaccagggattcctttcccagtggacgctcacgacttatttagatgtacagcggtgcctggaatatttgggctatctaggctattcaatattgactgagcaagagtctcaagcttcagctgttacagtgacaagagataaaaagatagacctgcagaaaaaacaaactcaaagaaatgtgttcagatgtaatgtaattggagtgaaaaactgtgggaaaagtggagttcttcaggctcttcttggaagaaacttaatgaggcagaagaaaattcgtgaagatcataaatcctactatgcgattaacactgtttatgtatatggacaagagaaatacttgttgttgcatgatatctcagaatcggaatttctaactgaagctgaaatcatttgtgatgttgtatgcctggtatatgatgtcagcaatcccaaatcctttgaatactgtgccaggatttttaagcaacactttatggacagcagaataccttgcttaatcgtagctgcaaagtcagacctgcatgaagttaaacaagaatacagtatttcacctactgatttctgcaggaaacacaaaatgcctccaccacaagccttcacttgcaatactgctgatgcccccagtaaggatatctttgttaaattgacaacaatggccatgtatccagaggatcattacagagacagactctcccgagacatgggccacactgatagaatagagaatttgagaaaaatctgggtctttctaaaaactgctttgcacgtgacacaagctgacctcaagagctccacgttttggcttcgagcaagttttggtgctactgtttttgcagttttgggctttgctatgtacaaagcattattgaaacagcgatgatataaaaagaaatactgtccctaccaaaaacaaatacttttatgtacattctgaatgctttaagttctgctagaattattgagatatttatacatgcagagttactttattaatatttgtaattcatgcataagagtattttaatgatagttataactgcagtattggctagcatatggaaagaaaacagctaacagccaaactaaaatggctaaattccagaggccaaaagggaatattttgtaaatatatgtacatattcaggcaagatatggtctcccaagctgagttctagaaatgatgtttctagacatttctaagtggtattgttagtgctcacttggctcactcttctaggtttaagttagcccagagattgtatttactcatggatcactttatttatttcacatttactcagaatgatcctttgggttctataaggacataaggtacaatttgccattgtctctccatttttaaaaacatacaagtcagtgtcagcttaccaacatgacattttttcagtcagttgtggtaggccagccttgaagccatcgcacagtctagaaacttgtgtagctgagtgtgcagctcacctttaagggtgaagttaggtaaaagcaattagcagaggcgttatctatgtgattatgttgcttccttgtcagtatgttgaattttatagccctttcaatgaaataaaaaaaaaatttgtatattaccaatgtttttagtttaaataaagagtcacccttactactgttgaatttcatcccaagtgtaaatcattctataatggctgtgtctgttatagtatattacagtaactgcatgtgtcaccaagtgttctatatcaggctaggataacctagaggcagtaattttttaaatgataaaataaatctaatgaatataaactctcatgataaacctattttttccatcatcagccttttcaagtatttaaataaataactgctgtgtactgtga

SEQ ID NO: 15485 - DNA, 3351 bp, Homo sapiens
agcgggccgccgccgcgccgccgccgccgccgccgccgccacagcccgctgggccggaggaggcggagctggcgctgtcccggctctcttgcggggaagcaactgagggggcggcgcggcgggccccggcggccgaagaggctggcaggtggcgccgtggggtgggtgctcctggtgagaggagtccactccgtgcgtgcgggcggaggccggcccccgagagccgccgacatgaagaaagacgtgcggatcctgctggtgggagaacctagagttgggaagacatcactgattatgtctctggtcagtgaagaatttccagaagaggttcctccccgggcagaagaaatcaccattccagctgatgtcaccccagagagagttccaacacacattgtagattactcagaagcagaacagagtgatgaacaacttcatcaagaaatatctcaggctaatgtcatctgtatagtgtatgccgttaacaacaagcattctattgataaggtaacaagtcgatggattcctctcataaatgaaagaacagacaaagacagcaggctgcctttaatattggttgggaacaaatctgatctggtggaatatagtagtatggagaccatccttcctattatgaaccagtatacagaaatagaaacctgtgtggagtgttcagcgaaaaacctgaagaacatatcagagctcttttattacgcacagaaagctgttcttcatcctacagggcccctgtactgcccagaggagaaggagatgaaaccagcttgtataaaagcccttactcgtatatttaaaatatctgatcaagataatgatggtactctcaatgatgctgaactcaacttctttcagaggatttgtttcaacactccattagctcctcaagctctggaggatgtcaagaatgtagtcagaaaacatataagtgatggtgtggctgacagtgggttgaccctgaaaggttttctctttttacacacactttttatccagagagggagacacgaaactacttggactgtgcttcgacgatttggttatgatgatgacctggatttgacacctgaatatttgttccccctgctgaaaatacctcctgattgcactactgaattaaatcatcatgcatatttatttctccaaagcacctttgacaagcatgatttggatagagactgtgctttgtcacctgatgagcttaaagatttatttaaagttttcccttacataccttgggggccagatgtgaataacacagtttgtaccaatgaaagaggctggataacctaccagggattcctttcccagtggacgctcacgacttatttagatgtacagcggtgcctggaatatttgggctatctaggctattcaatattgactgagcaagagtctcaagcttcagctgttacagtgacaagagataaaaagatagacctgcagaaaaaacaaactcaaagaaatgtgttcagatgtaatgtaattggagtgaaaaactgtgggaaaagtggagttcttcaggctcttcttggaagaaacttaatgaggcagaagaaaattcgtgaagatcataaatcctactatgcgattaacactgtttatgtatatggacaagagaaatacttgttgttgcatgatatctcagaatcggaatttctaactgaagctgaaatcatttgtgatgttgtatgcctggtatatgatgtcagcaatcccaaatcctttgaatactgtgccaggatttttaagcaacactttatggacagcagaataccttgcttaatcgtagctgcaaagtcagacctgcatgaagttaaacaagaatacagtatttcacctactgatttctgcaggaaacacaaaatgcctccaccacaagccttcacttgcaatactgctgatgcccccagtaaggatatctttgttaaattgacaacaatggccatgtatccagaggatcattacagagacagactctcccgagacatgggccacactgatagaatagagaatttgagaaaaatctgggtctttctaaaaactgctttccatgcccggttacgctgtatgtgcacctgcaacaggtgtacattttgcatctgtcagaacttcctcaactcagacttgctgcaatctgtaaagaacaaaatcttcactgcagttcttaacaggcacgtgacacaagctgacctcaagagctccacgttttggcttcgagcaagttttggtgctactgtttttgcagttttgggctttgctatgtacaaagcattattgaaacagcgatgatataaaaagaaatactgtccctaccaaaaacaaatacttttatgtacattctgaatgctttaagttctgctagaattattgagatatttatacatgcagagttactttattaatatttgtaattcatgcataagagtattttaatgatagttataactgcagtattggctagcatatggaaagaaaacagctaacagccaaactaaaatggctaaattccagaggccaaaagggaatattttgtaaatatatgtacatattcaggcaagatatggtctcccaagctgagttctagaaatgatgtttctagacatttctaagtggtattgttagtgctcacttggctcactcttctaggtttaagttagcccagagattgtatttactcatggatcactttatttatttcacatttactcagaatgatcctttgggttctataaggacataaggtacaatttgccattgtctctccatttttaaaaacatacaagtcagtgtcagcttaccaacatgacattttttcagtcagttgtggtaggccagccttgaagccatcgcacagtctagaaacttgtgtagctgagtgtgcagctcacctttaagggtgaagttaggtaaaagcaattagcagaggcgttatctatgtgattatgttgcttccttgtcagtatgttgaattttatagccctttcaatgaaataaaaaaaaaatttgtatattaccaatgtttttagtttaaataaagagtcacccttactactgttgaatttcatcccaagtgtaaatcattctataatggctgtgtctgttatagtatattacagtaactgcatgtgtcaccaagtgttctatatcaggctaggataacctagaggcagtaattttttaaatgataaaataaatctaatgaatataaactctcatgataaacctattttttccatcatcagccttttcaagtatttaaataaataactgctgtgtactgtgatcttgagttcttttgtcatctaaagtaaatatttctgtacagatgtgagt

SEQ ID NO: 15486 - DNA, 3134 bp, Homo sapiens
agcgggccgccgccgcgccgccgccgccgccgccgccgccacagcccgctgggccggaggaggcggagctggcgctgtcccggctctcttgcggggaagcaactgagggggcggcgcggcgggccccggcggccgaagaggctggcaggtggcgccgtggggtgggtgctcctggtgagaggagtccactccgtgcgtgcgggcggaggccggcccccgagagccgccgacatgaagaaagacgtgcggatcctgctggtgggagaacctagagttgggaagacatcactgattatgtctctggtcagtgaagaatttccagaagaggttcctccccgggcagaagaaatcaccattccagctgatgtcaccccagagagagttccaacacacattgtagattactcagaagcagaacagagtgatgaacaacttcatcaagaaatatctcaggctaatgtcatctgtatagtgtatgccgttaacaacaagcattctattgataaggtaacaagtcgatggattcctctcataaatgaaagaacagacaaagacagcaggctgcctttaatattggttgggaacaaatctgatctggtggaatatagtagtatggagaccatccttcctattatgaaccagtatacagaaatagaaacctgtgtggagtgttcagcgaaaaacctgaagaacatatcagagctcttttattacgcacagaaagctgttcttcatcctacagggcccctgtactgcccagaggagaaggagatgaaaccagcttgtataaaagcccttactcgtatatttaaaatatctgatcaagataatgatggtactctcaatgatgctgaactcaacttctttcagaggatttgtttcaacactccattagctcctcaagctctggaggatgtcaagaatgtagtcagaaaacatataagtgatggtgtggctgacagtgggttgaccctgaaaggttttctctttttacacacactttttatccagagagggagacacgaaactacttggactgtgcttcgacgatttggttatgatgatgacctggatttgacacctgaatatttgttccccctgctgaaaatacctcctgattgcactactgaattaaatcatcatgcatatttatttctccaaagcacctttgacaagcatgatttggatagagactgtgctttgtcacctgatgagcttaaagatttatttaaagttttcccttacataccttgggggccagatgtgaataacacagtttgtaccaatgaaagaggctggataacctaccagggattcctttcccagtggacgctcacgacttatttagatgtacagcggtgcctggaatatttgggctatctaggctattcaatattgactgagcaagagtctcaagcttcagctgttacagtgacaagagataaaaagatagacctgcagaaaaaacaaactcaaagaaatgtgttcagatgtaatgtaattggagtgaaaaactgtgggaaaagtggagttcttcaggctcttcttggaagaaacttaatgaggcagaagaaaattcgtgaagatcataaatcctactatgcgattaacactgtttatgtatatggacaagagaaatacttgttgttgcatgatatctcagaatcggaatttctaactgaagctgaaatcatttgtgatgttgtatgcctggtatatgatgtcagcaatcccaaatcctttgaatactgtgccaggatttttaaggaaaaaactggaaataatcaagatggctaacaatggacgatgatttactgaacaacactttatggacagcagaataccttgcttaatcgtagctgcaaagtcagacctgcatgaagttaaacaagaatacagtatttcacctactgatttctgcaggaaacacaaaatgcctccaccacaagccttcacttgcaatactgctgatgcccccagtaaggatatctttgttaaattgacaacaatggccatgtatccgcacgtgacacaagctgacctcaagagctccacgttttggcttcgagcaagttttggtgctactgtttttgcagttttgggctttgctatgtacaaagcattattgaaacagcgatgatataaaaagaaatactgtccctaccaaaaacaaatacttttatgtacattctgaatgctttaagttctgctagaattattgagatatttatacatgcagagttactttattaatatttgtaattcatgcataagagtattttaatgatagttataactgcagtattggctagcatatggaaagaaaacagctaacagccaaactaaaatggctaaattccagaggccaaaagggaatattttgtaaatatatgtacatattcaggcaagatatggtctcccaagctgagttctagaaatgatgtttctagacatttctaagtggtattgttagtgctcacttggctcactcttctaggtttaagttagcccagagattgtatttactcatggatcactttatttatttcacatttactcagaatgatcctttgggttctataaggacataaggtacaatttgccattgtctctccatttttaaaaacatacaagtcagtgtcagcttaccaacatgacattttttcagtcagttgtggtaggccagccttgaagccatcgcacagtctagaaacttgtgtagctgagtgtgcagctcacctttaagggtgaagttaggtaaaagcaattagcagaggcgttatctatgtgattatgttgcttccttgtcagtatgttgaattttatagccctttcaatgaaataaaaaaaaaatttgtatattaccaatgtttttagtttaaataaagagtcacccttactactgttgaatttcatcccaagtgtaaatcattctataatggctgtgtctgttatagtatattacagtaactgcatgtgtcaccaagtgttctatatcaggctaggataacctagaggcagtaattttttaaatgataaaataaatctaatgaatataaactctcatgataaacctattttttccatcatcagccttttcaagtatttaaataaataactgctgtgtactgtga

SEQ ID NO: 15487 - DNA, 1493 bp, Homo sapiens
cggacgcgtgggattgataaggtaacaagtcgatggattcctctcataaatgaaagaacagacaaagacagcaggctgcctttaatattggttgggaacaaatctgatctggtggaatatagtagtatggagaccatccttcctattatgaaccagtatacagaaatagaaacctgtgtggagtgttcagcgaaaaacctgaagaacatatcagagctcttttattacgcacagaaagctgttcttcatcctacagggcccctgtactgcccagaggagaaggagatgaaaccagcttgtataaaagcccttactcgtatatttaaaatatctgatcaagataatgatggtactctcaatgatgctgaactcaacttctttcagaggatttgtttcaacactccattactccacgttttggcttcgagcaagttttggtgctactgtttttgcagttttgggctttgctatgtacaaagcattattgaaacagcgatgatataaaaagaaatactgtccctaccaaaaacaaatacttttatgtacattctgaatgctttaagttctgctagaattattgagatatttatacatgcagagttactttattaatatttgtaattcatgcataagagtattttaatgatagttataactgcagtattggctagcatatggaaagaaaacagctaacagccaaactaaaatggctaaattccagaggccaaaagggaatattttgtaaatatatgtacatattcaggcaagatatggtctcccaagctgagttctagaaatgatgtttctagacatttctaagtggtattgttagtgctcacttggctcactcttctaggtttaagttagcccagagattgtatttactcatggatcactttatttatttcacatttactcagaatgatcctttgggttctataaggacataaggtacaatttgccattgtctctccatttttaaaaacatacaagtcagtgtcagcttaccaacatgacattttttcagtcagttgtggtaggccagccttgaagccatcgcacagtctagaaacttgtgtagctgagtgtgcagctcacctttaagggtgaagttaggtaaaagcaattagcagaggcgttatctatgtgattatgttgcttccttgtcagtatgttgaattttatagccctttcaatgaaataaaaaaaaaatttgtatattaccaatgtttttagtttaaataaagagtcacccttactactgttgaatttcatcccaagtgtaaatcattctataatggctgtgtctgttatagtatattacagtaactgcatgtgtcaccaagtgttctatatcaggctaggataacctagaggcagtaattttttaaatgataaaataaatctaatgaatataaactctcatgataaacctattttttccatcatcagccttttcaagtatttaaataaataactgctgtgtactgtga

SEQ ID NO: 15488 - DNA, 3302 bp, Homo sapiens
  misc_feature (3091)..(3091): n is a, c, g, or t
  misc_feature (3095)..(3095): n is a, c, g, or t
  misc_feature (3099)..(3099): n is a, c, g, or t
agcgggccgccgccgcgccgccgccgccgccgccgccgccacagcccgctgggccggaggaggcggagctggcgctgtcccggctctcttgcggggaagcaactgagggggcggcgcggcgggccccggcggccgaagaggctggcaggtggcgccgtggggtgggtgctcctggtgagaggagtccactccgtgcgtgcgggcggaggccggcccccgagagccgccgacatgaagaaagacgtgcggatcctgctggtgggagaacctagagttgggaagacatcactgattatgtctctggtcagtgaagaatttccagaagaggttcctccccgggcagaagaaatcaccattccagctgatgtcaccccagagagagttccaacacacattgtagattactcagaagcagaacagagtgatgaacaacttcatcaagaaatatctcaggctaatgtcatctgtatagtgtatgccgttaacaacaagcattctattgataaggtaacaagtcgatggattcctctcataaatgaaagaacagacaaagacagcaggctgcctttaatattggttgggaacaaatctgatctggtggaatatagtagtatggagaccatccttcctattatgaaccagtatacagaaatagaaacctgtgtggagtgttcagcgaaaaacctgaagaacatatcagagctcttttattacgcacagaaagctgttcttcatcctacagggcccctgtactgcccagaggagaaggagatgaaaccagcttgtataaaagcccttactcgtatatttaaaatatctgatcaagataatgatggtactctcaatgatgctgaactcaacttctttcagaggatttgtttcaacactccattagctcctcaagctctggaggatgtcaagaatgtagtcagaaaacatataagtgatggtgtggctgacagtgggttgaccctgaaaggttttctctttttacacacactttttatccagagagggagacacgaaactacttggactgtgcttcgacgatttggttatgatgatgacctggatttgacacctgaatatttgttccccctgctgaaaatacctcctgattgcactactgaattaaatcatcatgcatatttatttctccaaagcacctttgacaagcatgatttggatagagactgtgctttgtcacctgatgagcttaaagatttatttaaagttttcccttacataccttgggggccagatgtgaataacacagtttgtaccaatgaaagaggctggataacctaccagggattcctttcccagtggacgctcacgacttatttagatgtacagcggtgcctggaatatttgggctatctaggctattcaatattgactgagcaagagtctcaagcttcagctgttacagtgacaagagataaaaagatagacctgcagaaaaaacaaactcaaagaaatgtgttcagatgtaatgtaattggagtgaaaaactgtgggaaaagtggagttcttcaggctcttcttggaagaaacttaatgaggcagaagaaaattcgtgaagatcataaatcctactatgcgattaacactgtttatgtatatggacaagagaaatacttgttgttgcatgatatctcagaatcggaatttctaactgaagctgaaatcatttgtgatgttgtatgcctggtatatgatgtcagcaatcccaaatcctttgaatactgtgccaggatttttaagcaacactttatggacagcagaataccttgcttaatcgtagctgcaaagtcagacctgcatgaagttaaacaagaatacagtatttcacctactgatttctgcaggaaacacaaaatgcctccaccacaagccttcacttgcaatactgctgatgcccccagtaaggatatctttgttaaattgacaacaatggccatgtatccagaggatcattacagagacagactctcccgagacatgggccacactgatagaatagagaatttgagaaaaatctgggtctttctaaaaactgctttccatgcccggttacgctgtatgtgcacctgcaacaggtgtacattttgcatctgtcagaacttcctcaactcagacttgctgcaatctgtaaagaacaaaatcttcactgcagttcttaacaggcacgtgacacaagctgacctcaagagctccacgttttggcttcgagcaagttttggtgctactgtttttgcagttttgggctttgctatgtacaaagcattattgaaacagcgatgatataaaaagaaatactgtccctaccaaaaacaaatacttttatgtacattctgaatgctttaagttctgctagaattattgagatatttatacatgcagagttactttattaatatttgtaattcatgcataagagtattttaatgatagttataactgcagtattggctagcatatggaaagaaaacagctaacagccaaactaaaatggctaaattccagaggccaaaagggaatattttgtaaatatatgtacatattcaggcaagatatggtctcccaagctgagttctagaaatgatgtttctagacatttctaagtggtattgttagtgctcacttggctcactcttctaggtttaagttagcccagagattgtatttactcatggatcactttatttatttcacatttactcagaatgatcctttgggttctataaggacataaggtacaatttgccattgtctctccatttttaaaaacatacaagtcagtgtcagcttaccaacatgacattttttcagtcagttgtggtaggccagccttgaagccatcgcacagtctagaaacttgtgtagctgagtgtgcagctcacctttaagggtgaagttaggtaaaagcaattagcagaggcgttatctatgtgattatgttgcttccttgtcagtatgttgaattttatagccctttcaatgaaataaaaaaaaaatttgtatattaccaatgtttttagtttaaataaagagtcacccttactactgttgaatttcaaaaaaaaanaaanaaanaaaaaaaaaaattggggggggggtgggccggaaaaaaggttcacaaccactcgtggggcggggccagaggaaggaccatggccaaacgcgccaagagaaccgggcaggcaagggggggtctccccaataaaaccgcggggcacggggtctgacatccagggcggggctacggccacacggcagggcgagcgccggggggggcg

SEQ ID NO: 15489 - DNA, 2302 bp, Homo sapiens
agatattgagattttcggttctgttttcagaggcagaagaaaattcgtgaagatcataaatcctactatgcgattaacactgtttatgtatatggacaagagaaatacttgttgttgcatgatatctcagaatcggaatttctaactgaagctgaaatcatttgtgatgttgtatgcctggtatatgatgtcagcaatcccaaatcctttgaatactgtgccaggatttttaaggtttgttgctcctacagactatgactgaatgtaacttcatatggactttttatggaattgcagtgtggtgtttcctaaccacaaaaatgcaacaaaatcatgtgtattttaaaaatacatacatctttaccctattcctgaaggttctggttttgttctaaagtggtagagtctcagacatacatatttctgaaagttttcgacatgtgattgtgaggtgcattcctgattgagaacttttacattaatgcaagctcttcccagctgttaaaagttacatatgtctgccttctctctgatgaaaaaaaagagtagtacatatggattatatattgccaaatataccaagaataacagccagaggaaagggataaatctgaagcttagaaagtctatcagtcacttagggattatcaataagattcaataggagtaaaaagctatatgtacaaaggtgtttattctagcattgtttttaacaggaaaaaactggaaataatcaagatggctaacaatggacgatgatttactgaacaacactttatggacagcagaataccttgcttaatcgtagctgcaaagtcagacctgcatgaagttaaacaagaatacagtatttcacctactgatttctgcaggaaacacaaaatgcctccaccacaagccttcacttgcaatactgctgatgcccccagtaaggatatctttgttaaattgacaacaatggccatgtatccagaggatcattacagagacagactctcccgagacatgggccacactgatagaatagagaatttgagaaaaatctgggtctttctaaaaactgctttccatgcccggttacgctgtatgtgcacctgcaacaggtgtacattttgcatctgtcagaacttcctcaactcagacttgctgcaatctgtaaagaacaaaatcttcactgcagttcttaacaggcacgtgacacaagctgacctcaagagctccacgttttggcttcgagcaagttttggtgctactgtttttgcagttttgggctttgctatgtacaaagcattattgaaacagcgatgatataaaaagaaatactgtccctaccaaaaacaaatacttttatgtacattctgaatgctttaagttctgctagaattattgagatatttatacatgcagagttactttattaatatttgtaattcatgcataagagtattttaatgatagttataactgcagtattggctagcatatggaaagaaaacagctaacagccaaactaaaatggctaaattccagaggccaaaagggaatattttgtaaatatatgtacatattcaggcaagatatggtctcccaagctgagttctagaaatgatgtttctagacatttctaagtggtattgttagtgctcacttggctcactcttctaggtttaagttagcccagagattgtatttactcatggatcactttatttatttcacatttactcagaatgatcctttgggttctataaggacataaggtacaatttgccattgtctctccatttttaaaaacatacaagtcagtgtcagcttaccaacatgacattttttcagtcagttgtggtaggccagccttgaagccatcgcacagtctagaaacttgtgtagctgagtgtgcagctcacctttaagggtgaagttaggtaaaagcaattagcagaggcgttatctatgtgattatgttgcttccttgtcagtatgttgaattttatagccctttcaatgaaataaaaaaaaaatttgtatattaccaatgtttttagtttaaataaagagtcacccttactactgttgaatttcatcccaagtgtaaatcattctataatggctgtgtctgttatagtatattacagtaactgcatgtgtcaccaagtgttctatatcaggctaggataacctagaggcagtaattttttaaatgataaaataaatctaatgaatataaactctcatgataaacctattttttccatcatcagccttttcaagtatttaaataaataactgctgtgtactgtga

SEQ ID NO: 15490 - DNA, 1169 bp, Homo sapiens
gtatagggttttcatactaatcatgttttaaataataattatattttctgactgcaggcacgtgacacaagctgacctcaagagctccacgttttggcttcgagcaagttttggtgctactgtttttgcagttttgggctttgctatgtacaaagcattattgaaacagcgatgatataaaaagaaatactgtccctaccaaaaacaaatacttttatgtacattctgaatgctttaagttctgctagaattattgagatatttatacatgcagagttactttattaatatttgtaattcatgcataagagtattttaatgatagttataactgcagtattggctagcatatggaaagaaaacagctaacagccaaactaaaatggctaaattccagaggccaaaagggaatattttgtaaatatatgtacatattcaggcaagatatggtctcccaagctgagttctagaaatgatgtttctagacatttctaagtggtattgttagtgctcacttggctcactcttctaggtttaagttagcccagagattgtatttactcatggatcactttatttatttcacatttactcagaatgatcctttgggttctataaggacataaggtacaatttgccattgtctctccatttttaaaaacatacaagtcagtgtcagcttaccaacatgacattttttcagtcagttgtggtaggccagccttgaagccatcgcacagtctagaaacttgtgtagctgagtgtgcagctcacctttaagggtgaagttaggtaaaagcaattagcagaggcgttatctatgtgattatgttgcttccttgtcagtatgttgaattttatagccctttcaatgaaataaaaaaaaaatttgtatattaccaatgtttttagtttaaataaagagtcacccttactactgttgaatttcatcccaagtgtaaatcattctataatggctgtgtctgttatagtatattacagtaactgcatgtgtcaccaagtgttctatatcaggctaggataacctagaggcagtaattttttaaatgataaaataaatctaatgaatataaactctcatgataaacctattttttccatcatcagccttttcaagtatttaaataaataactgctgtgtactgtga

SEQ ID NO: 15491 - DNA, 3051 bp, Homo sapiens
agcgggccgccgccgcgccgccgccgccgccgccgccgccacagcccgctgggccggaggaggcggagctggcgctgtcccggctctcttgcggggaagcaactgagggggcggcgcggcgggccccggcggccgaagaggctggcaggtggcgccgtggggtgggtgctcctggtgagaggagtccactccgtgcgtgcgggcggaggccggcccccgagagccgccgacatgaagaaagacgtgcggatcctgctggtgggagaacctagagttgggaagacatcactgattatgtctctggtcagtgaagaatttccagaagaggttcctccccgggcagaagaaatcaccattccagctgatgtcaccccagagagagttccaacacacattgtagattactcagaagcagaacagagtgatgaacaacttcatcaagaaatatctcaggctaatgtcatctgtatagtgtatgccgttaacaacaagcattctattgataaggtaacaagtcgatggattcctctcataaatgaaagaacagacaaagacagcaggctgcctttaatattggttgggaacaaatctgatctggtggaatatagtagtatggagaccatccttcctattatgaaccagtatacagaaatagaaacctgtgtggagtgttcagcgaaaaacctgaagaacatatcagagctcttttattacgcacagaaagctgttcttcatcctacagggcccctgtactgcccagaggagaaggagatgaaaccagcttgtataaaagcccttactcgtatatttaaaatatctgatcaagataatgatggtactctcaatgatgctgaactcaacttctttcagaggatttgtttcaacactccattagctcctcaagctctggaggatgtcaagaatgtagtcagaaaacatataagtgatggtgtggctgacagtgggttgaccctgaaaggttttctctttttacacacactttttatccagagagggagacacgaaactacttggactgtgcttcgacgatttggttatgatgatgacctggatttgacacctgaatatttgttccccctgctgaaaatacctcctgattgcactactgaattaaatcatcatgcatatttatttctccaaagcacctttgacaagcatgatttggatagagactgtgctttgtcacctgatgagcttaaagatttatttaaagttttcccttacataccttgggggccagatgtgaataacacagtttgtaccaatgaaagaggctggataacctaccagggattcctttcccagtggacgctcacgacttatttagatgtacagcggtgcctggaatatttgggctatctaggctattcaatattgactgagcaagagtctcaagcttcagctgttacagtgacaagagataaaaagatagacctgcagaaaaaacaaactcaaagaaatgtgttcagatgtaatgtaattggagtgaaaaactgtgggaaaagtggagttcttcaggctcttcttggaagaaacttaatgaggcagaagaaaattcgtgaagatcataaatcctactatgcgattaacactgtttatgtatatggacaagagaaatacttgttgttgcatgatatctcagaatcggaatttctaactgaagctgaaatcatttgtgatgttgtatgcctggtatatgatgtcagcaatcccaaatcctttgaatactgtgccaggatttttaagcaacactttatggacagcagaataccttgcttaatcgtagctgcaaagtcagacctgcatgaagttaaacaagaatacagtatttcacctactgatttctgcaggaaacacaaaatgcctccaccacaagccttcacttgcaatactgctgatgcccccagtaaggatatctttgttaaattgacaacaatggccatgtatccgcacgtgacacaagctgacctcaagagctccacgttttggcttcgagcaagttttggtgctactgtttttgcagttttgggctttgctatgtacaaagcattattgaaacagcgatgatataaaaagaaatactgtccctaccaaaaacaaatacttttatgtacattctgaatgctttaagttctgctagaattattgagatatttatacatgcagagttactttattaatatttgtaattcatgcataagagtattttaatgatagttataactgcagtattggctagcatatggaaagaaaacagctaacagccaaactaaaatggctaaattccagaggccaaaagggaatattttgtaaatatatgtacatattcaggcaagatatggtctcccaagctgagttctagaaatgatgtttctagacatttctaagtggtattgttagtgctcacttggctcactcttctaggtttaagttagcccagagattgtatttactcatggatcactttatttatttcacatttactcagaatgatcctttgggttctataaggacataagaaacatacaagtcagtgtcagcttaccaacatgacattttttcagtcagttgtggtaggccagccttgaagccatcgcacagtctagaaacttgtgtagctgagtgtgcagctcacctttaagggtgaagttaggtaaaagcaattagcagaggcgttatctatgtgattatgttgcttccttgtcagtatgttgaattttatagccctttcaatgaaataaaaaaaaaatttgtatattaccaatgtttttagtttaaataaagagtcacccttactactgttgaatttcatcccaagtgtaaatcattctataatggctgtgtctgttatagtatattacagtaactgcatgtgtcaccaagtgttctatatcaggctaggataacctagaggcagtaattttttaaatgataaaataaatctaatgaatataaactctcatgataaacctattttttccatcatcagccttttcaagtatttaaataaataactgctgtgtactgtga

SEQ ID NO: 15492 - DNA, 2380 bp, Homo sapiens
agcgggccgccgccgcgccgccgccgccgccgccgccgccacagcccgctgggccggaggaggcggagctggcgctgtcccggctctcttgcggggaagcaactgagggggcggcgcggcgggccccggcggccgaagaggctggcaggtggcgccgtggggtgggtgctcctggtgagaggagtccactccgtgcgtgcgggcggaggccggcccccgagagccgccgacatgaagaaagacgtgcggatcctgctggtgggagaacctagagttgggaagacatcactgattatgtctctggtcagtgaagaatttccagaagaggttcctccccgggcagaagaaatcaccattccagctgatgtcaccccagagagagttccaacacacattgtagattactcagaagcagaacagagtgatgaacaacttcatcaagaaatatctcaggctaatgtcatctgtatagtgtatgccgttaacaacaagcattctattgataaggtaacaagtcgatggattcctctcataaatgaaagaacagacaaagacagcaggctgcctttaatattggttgggaacaaatctgatctggtggaatatagtagtatggagaccatccttcctattatgaaccagtatacagaaatagaaacctgtgtggagtgttcagcgaaaaacctgaagaacatatcagagctcttttattacgcacagaaagctgttcttcatcctacagggcccctgtactgcccagaggagaaggagatgaaaccagcttgtataaaagcccttactcgtatatttaaaatatctgatcaagataatgatggtactctcaatgatgctgaactcaacttctttcagaggatttgtttcaacactccattagctcctcaagctctggaggatgtcaagaatgtagtcagaaaacatataagtgatggtgtggctgacagtgggttgaccctgaaaggttttctctttttacacacactttttatccagagagggagacacgaaactacttggactgtgcttcgacgatttggttatgatgatgacctggatttgacacctgaatatttgttccccctgctgaaaatacctcctgattgcactactgaattaaatcatcatgcatatttatttctccaaagcacctttgacaagcatgatttggatagagactgtgctttgtcacctgatgagcttaaagatttatttaaagttttcccttacataccttgggggccagatgtgaataacacagtttgtaccaatgaaagaggctggataacctaccagggattcctttcccagtggacgctcacgacttatttagatgtacagcggtgcctggaatatttgggctatctaggctattcaatattgactgagcaagagtctcaagcttcagctgttacagtgacaagagataaaaagatagacctgcagaaaaaacaaactcaaagaaatgtgttcagatgtaatgtaattggagtgaaaaactgtgggaaaagtggagttcttcaggctcttcttggaagaaacttaatgaggcagaagaaaattcgtgaagatcataaatcctactatgcgattaacactgtttatgtatatggacaagagaaatacttgttgttgcatgatatctcagaatcggaatttctaactgaagctgaaatcatttgtgatgttgtatgcctggtatatgatgtcagcaatcccaaatcctttgaatactgtgccaggatttttaagcaacactttatggacagcagaataccttgcttaatcgtagctgcaaagtcagacctgcatgaagttaaacaagaatacagtatttcacctactgatttctgcaggaaacacaaaatgcctccaccacaagccttcacttgcaatactgctgatgcccccagtaaggatatctttgttaaattgacaacaatggccatgtatccccatgcccggttacgctgtatgtgcacctgcaacaggtgtacattttgcatctgtcagaacttcctcaactcagacttgctgcaatctgtaaagaacaaaatcttcactgcagttcttaacaggttcttaactttatttactgggtacccaggcattctgttaaaatacaaaagaaaaaagcggataactatttattatacagatactcactacaaagacaagctgactgatgcccaactaacttccactaaaattctcactgtgatgacaatgtttagttttggaagcatccttaataatgtttttatattaataggtatatttagaggactataaaataagattttggatgtttttttcataaggaagataaattatctttcctattaaaagataatatgtataggga

SEQ ID NO: 15493 - DNA, 3708 bp, Homo sapiens
agcgggccgccgccgcgccgccgccgccgccgccgccgccacagcccgctgggccggaggaggcggagctggcgctgtcccggctctcttgcggggaagcaactgagggggcggcgcggcgggccccggcggccgaagaggctggcaggtggcgccgtggggtgggtgctcctggtgagaggagtccactccgtgcgtgcgggcggaggccggcccccgagagccgccgacatgaagaaagacgtgcggatcctgctggtgggagaacctagagttgggaagacatcactgattatgtctctggtcagtgaagaatttccagaagaggttcctccccgggcagaagaaatcaccattccagctgatgtcaccccagagagagttccaacacacattgtagattactcagaagcagaacagagtgatgaacaacttcatcaagaaatatctcaggctaatgtcatctgtatagtgtatgccgttaacaacaagcattctattgataaggtaacaagtcgatggattcctctcataaatgaaagaacagacaaagacagcaggctgcctttaatattggttgggaacaaatctgatctggtggaatatagtagtatggagaccatccttcctattatgaaccagtatacagaaatagaaacctgtgtggagtgttcagcgaaaaacctgaagaacatatcagagctcttttattacgcacagaaagctgttcttcatcctacagggcccctgtactgcccagaggagaaggagatgaaaccagcttgtataaaagcccttactcgtatatttaaaatatctgatcaagataatgatggtactctcaatgatgctgaactcaacttctttcagaggatttgtttcaacactccattagctcctcaagctctggaggatgtcaagaatgtagtcagaaaacatataagtgatggtgtggctgacagtgggttgaccctgaaaggttttctctttttacacacactttttatccagagagggagacacgaaactacttggactgtgcttcgacgatttggttatgatgatgacctggatttgacacctgaatatttgttccccctgctgaaaatacctcctgattgcactactgaattaaatcatcatgcatatttatttctccaaagcacctttgacaagcatgatttggatagagactgtgctttgtcacctgatgagcttaaagatttatttaaagttttcccttacataccttgggggccagatgtgaataacacagtttgtaccaatgaaagaggctggataacctaccagggattcctttcccagtggacgctcacgacttatttagatgtacagcggtgcctggaatatttgggctatctaggctattcaatattgactgagcaagagtctcaagcttcagctgttacagtgacaagagataaaaagatagacctgcagaaaaaacaaactcaaagaaatgtgttcagatgtaatgtaattggagtgaaaaactgtgggaaaagtggagttcttcaggctcttcttggaagaaacttaatgaggcagaagaaaattcgtgaagatcataaatcctactatgcgattaacactgtttatgtatatggacaagagaaatacttgttgttgcatgatatctcagaatcggaatttctaactgaagctgaaatcatttgtgatgttgtatgcctggtatatgatgtcagcaatcccaaatcctttgaatactgtgccaggatttttaagcaacactttatggacagcagaataccttgcttaatcgtagctgcaaagtcagacctgcatgaagttaaacaagaatacagtatttcacctactgatttctgcaggaaacacaaaatgcctccaccacaagccttcacttgcaatactgctgatgcccccagtaaggatatctttgttaaattgacaacaatggccatgtatccgtaagtacttgctgtcttcattttcatgttgcatggttcataacattgcatgccattattagccatgaagggaatatctttgtcacataggaattgttcagcaacagaaagatactttgtaatgagaaggtacaaatttgagtaaatgcaagtttggtttgaatgccataataaaatgatataaacagtgcttctgacaatatctgtatatttttgagcaggctgtaactatcttaatagaatagtacaataaaacacaaccccccacccagcattaaaaaatagttttactggaataaaatgggtttggcatcatgttgttttatgcttataaagcattttcatatgaacagaaagtttatatttttctgtttttgaccttaggtatatgaagttttctaaaatattttattaatttatgttgaaattgtgggtatgcttcagttaggatatgtcttttttaagtgctgtaaagagtagttgtaattggaatttctactgtataaatgttttacattaagtgttacgagccacaaatttcatgtacatttattatatatctatacatgcatatgcacaagcacataactgtggtcatctctgtagtttactaactgccttaaaattgcatggttcttaatggcattcgcctcaagtagtgtgtttgtataaattctgttttgtaacaaaatagtttttcaggcagtgcgtttctcaggactttatagcttattctacttattcttatgttagtctctaaattatttttcttcttatgaaaactacagtgtaacacagagtaataatcaaacattgctataaaccaagaatgacatttttcaaaaaggtgttgatttgtacagatttttaaagtcagttaactttactgctattttattacctaatactttttttagatgcaacaaacccttgaatttctatttgtattcgaagacaagtcattcctattattatagaataaccaaaaccttatttatgttttacctttgctttaaaactctcatgtatgttatctacagagaggatcattacagagacagactctcccgagacatgggccacactgatagaatagagaatttgagaaaaatctgggtctttctaaaaactgctttccctagagaaacaggagctcagctgacaatgacctgaggggacccctacagtgcttcaaacagtggatggaggaggagatgccttcctggttaagaaattatccctgagcccttgtagaggacagtccagcacaggaaattctggaactacaagatgaaaatgtgtgccagcatgcttctactttcagggtacagtctgaggccctagggaggaggagttcctcaagtgctttgacctcttgccaggacaaagacggagaagtattttagaagcatctgaatttgttagctcttcagttttcctcctccactccctaccctgcacacagagcctcagaaggacagaccagcttcacccccttaccagcaattactgaagaatcacaccccacccacctcaggatcactgatctccttcctatatgggaaccctgacccttggagaaaaaccgctgacctacaaactccccacattcacctagagagcaccagagcagagttctgagtgagataagcagtcctttagggggatctgtttttccagctctcatttttccccccttatttcctttatctctagaattctaagagctgtactgtta

SEQ ID NO: 15494 - DNA, 1117 bp, Homo sapiens
agcgggccgccgccgcgccgccgccgccgccgccgccgccacagcccgctgggccggaggaggcggagctggcgctgtcccggctctcttgcggggaagcaactgagggggcggcgcggcgggccccggcggccgaagaggctggcaggtggcgccgtggggtgggtgctcctggtgagaggagtccactccgtgcgtgcgggcggaggccggcccccgagagccgccgacatgaagaaagacgtgcggatcctgctggtgggagaacgtgagtccgcaccctctggccggcccctgagtccctgccctccctgcccctgcagcccctgtcgcccctgtcgcccctgcagccccaacctttgcagccccggcccttctcgcgcctcacagctccgctcgcctttctccgcgttcctaggccttccagccccttcactcttctcttttggctggccgccggcggccctcaccctgtcacctcacctgggccctccagagatctcctttccctgttccccagccgtcctcccaagccatgtccctattagccctaaccgcccgacctcatccctccgaagcttctctcctccttttcctcttcgaaccctgtccttctgggcctcacagtttcccaggccgcctcctttcagaccttcttgtcttctggagattcccttatcactgccaggcaggtgctggaataagcagaccgaccaatagggattgcgtgaaccggctcccggggaagctgggggaggggtgcagaactattcgacttgtgggcaaggtcaggtttctgcatttttttggcactcgcagtcttcactctctctatgtattgacattaagatatgagtagtggagagggccggatcctttttagcagtacttgtactttgcattggactaactcctcgtactcgagatatttcatcaaaaatttttactcaacttcgagttatgcaagcgctcaatgaattagaattatctggggagggtccaattgttgttaccctaaagcgtaatctttgccctctttttaagcattatttattccatagttactacgtagttaacttattaataaccataggcactgtttgtacgggtaccgagc

SEQ ID NO: 15495 - DNA, 526 bp, Homo sapiens
ccacaccctgccgacatatttctagatgggtattaatctcgatcagaccaaattatggtataatgaagattgccagcaggtggctctagaatatactttcagtaatacggatagtttccttcctttttagctactgcttgtactttatgcagaacaaatacatcttttattttaggtcttaagaactaagaaacataaaatcaatatctcctttgtactgataaatagtacacagtgtagggaagaatgcccttttatttataacacacctgcacatatacacagagatgtttgtatattgttgaaaactagttactgcagatattgagattttcggttctgttttcagaggcagaagaaaattcgtgaagatcataaatcctactatgcgattaacactgtttatgtatatggacaagagaaatacttgttggtaagaaattctgtggcatacaaaaattactaattattgggtacatttttaaatgactctttgaaaacaaattggcttcaattgaatgactct

SEQ ID NO: 15496 - DNA, 678 bp, Homo sapiens
cccttcccccaagcccaggaaagtgaaaagagaagcaggaacagtaaaatactccacaggaaagaaaaatcttagtgatccctcctgctgtctctttccttttgcctattctggcaaattttgtaagtgaaatttgttaccaagatgtgaaaatcttataagaaagtctctaaatatttgagaataaaattatcaatgtctcagctctgcaggctgaaaaaacggaggctttacaaaataaaatcatgcttggaaaacttctcctctgagggatgtcaaaggctgcactgaataagctctaaggtggtgctgaaatgagtcatttatttgcctgtgtaagctcaggcaggtgttggaattgaggaagtataggtaatgaaaaaagtaaacatgtcctcgggacatagcgactggtgatgaccacacaatcaacacaataaactctagcattcacattgtagtccagctcattcaagcaaagctatctccaatagggagtttaccctgtacagaacacgtgcatttccacctgttctcagactgaccctttgctcatcacaatagtgaaaaaaaacacagccctgggtggagatttaagatgctaatgagtcatgagatgtatgaacaagcatgtacagctactgcacacgtgcacccagaagaccgcccagaacatgc

SEQ ID NO: 15497 - DNA, 287 bp, Homo sapiens
gtaggaagtgttcctagtaaatctatgctgactcaaaggactcagtgtagagttgtgttcacagctataatttgtcatagtggaagactagaaggcaaaatcagcaaaggaaaagtatggaatgaagtgtaggggaaaccagatgtaagctttcaagggtcctctcccggaggagtcacacggagtgcttaaatccagcagcaacaagttaagataacacatgtgaaatgttttccacccaggtagcttattagagaactagagtttttattgggggctggttaagt

SEQ ID NO: 15498 - DNA, 470 bp, Homo sapiens
caagtctcagcttggccaaggcctgtcgctcactcatttacaaaagtcgatgtgaggaggagcctttacacctgtggagacagtgatagctttggagcagataaggtggagctgctcatttttgctggatttggtggccgatccccgcccccacccccaccccctccatctcacctttcccttgttatgcctcctcaattggaggctggacagagagctgaataggaaggacttgccattacctaaggccatgtgtgacagcctcctgaggacctccccaacccagtgtgatgggcctgcatggcagagacaaaagggtagactgggggtcatttgcttcctgtggccttaagcctactaggccccatccttacctgagacctcacctccaagaaattaatggtcttttcaatggagaaaaaaaaagactagtatttgcaacttcaaatagatgtagtttcctttacagc

SEQ ID NO: 15499 - DNA, 496 bp, Homo sapiens
gttttttaacttttgttttaggtttgggggtacatatgcaggtttgttatataggtaaactcatgtcacaggggtttgttgtacagataatttcctcacccaggtactaagcctagtacccaatagttgctttttctcctcctctctctcctcccaccctccaccctcaaataggccccagtgtatgttgttctcttcattatgttcatgaagttgagagagtgttttgaaaaagaatgttggaaagcatttccactgttagatgattttaagtcaaaaagttatacaacagtgtgacctatttgcacacaagcatggacacagaattgtgtcatatgtttaaaacttttctagatccttttgtggttcataagcttgatgattgagttttcgcgtccacatgtgagatgtgcctcccttgagccttgtcattggcacattacctgcctgatgtgaacaataaaaataaaaaataaaaatttgctaagcagaaaaa

SEQ ID NO: 15500 - DNA, 447 bp, Homo sapiens
cacctgtcgcacagggtttgttgtactcaaaggaaaaaaaatgtcttttttctagaacgaaacagggaactgaaaaagactttgtcctttgacaaaaaccgagtcctttctgatgagacccacctttgggcttccctctcagtcactgtagaatccagtctgagcaacaatcgtgctagttcagtttagtgaaaatccccagcccttggtatctgaccaccctggatatcctgtcactttggcctgccttcagcaataatcctatcaagtcagtttggccagaagtccttatccttgatgtttcctcatagtaattttccatctgctggcgctcaccttactccatggttctaaatctccatgtacgcttgttggggtaagggttgagcccttatacctatcaccatggctccctacccctttgaataaagtccactttaccatgtt

SEQ ID NO: 15501 - DNA, 316 bp, Homo sapiens
gatatatttcagtatctctaagagcccagcacagtgcttagactacattaggaacttaaatgtttataataatgaaataaaatactaccgaataattttggttttcatgagcacatagaagcagatgataaaattaaaaagctctgacatgtgataggaagccagagaaagtacatttggaaatatagttacgttgacaaatcaagagttgactgtatttctaccagagatcaaacctcccatagaacatgtatgtctacaaccaaatctggaaccagccactgtgacataaactcttgaacactctacttcaaag

SEQ ID NO: 15502 - DNA, 944 bp, Homo sapiens
gagaattgcttgaactcaggaggtgaaggttgcagtaagctgagattgtgccactgcaccccagcctgggtgacagagcaagactccatcacaaaaaaaaaaaaaaaaaaaaaaaattcaggccgttactggagagtcttggggaaatttttttttaaaatgtctgaaaatttttccacttaatccattgatgaatttcaaagcaattgtattttttcatacaagcctgccactgtgagcctgttcttattgtatctgagctctttgtgctgcctgaattttgtctcttaatttcttttcagcttcatagtgtttcattcttcaattgtgttggagggaaaaataatggtagaaactaaaacacactttgaccttttttttccaatttgtagatggcatttggtaggcttttggagtaatagcctatttcaaaaaataaaaggtgatgcaaattattgtggaagtgagaggcaagaaatttgtatttggaggttgacattagagtaagtttaacccttcacactcaaaaactcccatcctctgaaggcaggagttctcaaccttggctgtctgttaggattgcttggggagctttctgcaattctgatgcctgggttgcttctcagaccaaaaatcagaatctcaggtagtggaaccaaggcatcagctttaaaaaaaactcctttggtagttccagtgggcagctaagaacactacagtgacttttaggtatttgcagacaatatttaatttttttcttaatatctctgtggttggaaaggatctttgtagcaggaatttttttattagaaatagaccaaggcacagagaggttgaatttctgccttgtgtgcccggttccagcacagtgcggttgtgtcgttggtcttttttagtatttcctatttccaattttctaagaaaagacagaattaaaaaaaaaa

SEQ ID NO: 15503 - DNA, 491 bp, Homo sapiens
agactgaagatcaggtgggtacattgtgtttgaagcaacatctgtatctcccaagccacggcaaaggagcatctgaaactcatccagatttagtagatgagactaagctggtgaacactcagttccatttaaccccttattggcagcctatgctcacactctttcctggttggcaagtgaagaaggtgggtataggggattttggcaaggatgttagtggatagagtattttttgactgggcatggtggctcatgcctgtaatcccagcactttgggaggctgaggcgggtggatcacctgaagtcaggagttcaagaccagcctggccaacatggtgaaaccctgtctctactaaaaatacaaaaaattatctgggagtggtggcagacgcctgtaatcccagctactcgggaggctgaggcaggagaatcgcttgaacccaggaagcagaggttgcggtgagccaagattgcatcactgcactccagcc

SEQ ID NO: 15504 - DNA, 349 bp, Homo sapiens
atgagggacatttggactgagatttggcctaggaatttgggccacccgggtggaaagtcccggaagagaatgccgggcaagtagatcagcaaagggtctgactctcccttggtaggggtctagagaggtattttgagggatgtccattgaacatattctttttggagcctgcctccgtcctgctgaattcctgccttgtgatttgtcgtgtcagaacacttagaaataatgctctacccagctcatgcctctaatcccaacactttgggaggccgaggctggaggattgcttgaggccaggagtttgagaccagccaggacaacatagcaagactcgatctctagttaa

SEQ ID NO: 15505 - DNA, 394 bp, Homo sapiens
caggctagtagtcttggcatcacttggggatttggtaagcatgcagattgccaggctccctccacacctactgaaccagaaattctggaggtgggcttagaaatctgtattgtaacaagccttccagataattctggtgctcactcaagtttgagaaccattggaatagtggtttcattataaagaacatgaagcctgtaggataacttagtggctattgctgactagcttcagtgatcaaattttcaactttatgtctcctgtgaaaaatgtcttgttctgggaaaaatattctgtgaaattttttaagcccagttgagttgtgcctttttggctatgtgcccctcattttggcaaagggccagtgctgagtgcaatgcagttacccaactca

SEQ ID NO: 15506 - DNA, 526 bp, Homo sapiens
cgatatgaattgccattgcctcccacaaagaaaaatggacaaaatatgggaccacatctttgagatgaaatgtgcccaaaatgaaaagtaacttgagtatcccaagttaaacttaatcattagctgcaaatggacgattttcaaatttcaaatagtgatttttgaagatttgcccaaactagagtactatccctcttcacactaagaggcagaaagtggtttcacacacccttttatttaatcagctaaagtgggtgcggtgacacacacctgtaaactcaaccactaaggagactgaggcgggaggattacttgagcccaggagttcgagatcagcctgagcaacataacaagaccctgtctcaaataatacttagctattacccatattgcttttagcctgctgccaggaggggagaaatgttattgtttgaacagatgtcagatgtgagtaatgctcagctgtgttcaatgtagaaaattaataaaagttccaggagtcatcctggctagatcaaaaagcaca

SEQ ID NO: 15507 - DNA, 5784 bp, Homo sapiens
  misc_feature (1594)..(1594): n is a, c, g, or t
ggccaggacagtgactgctggccgcgaatttcacaacacaggtggcttcctcacaggaagctcctctgtataccacaccctgttgctactgagtggagcagccaaattaaattaagcttgcattgctcaaaattaattttcctaagagaaatacaaatacaccaatagattagggtattttatacatttttaatttcatttttgctcttcttttatagccagtgtgcacatgtaagagttatggaatcacttagagcaatactgagcattttcatttatataaaacccaaatcatttgggtgcagaagtttggatgattgaagctcagagggaaggagaaaagcatttgagatgaaaaccaaagagtaaatttgagtttggcaaaagaacagattgcacttttggtttgtaccacctctttacaaatttgttaaaggaatactaggtgccaagcctgtgtgggcaccatagataatgcagataaatagaatacaatcccagcaagctcatcttctagctagaaacctcagaaagacacaaataagagcagtaaaaagggattggccggaaagaatgacagaaaagagtaatggagaaatcctagaggtgctgaagggagaaggagaatagatcaaagatcaggcagtgttctttcttttaaatgattagcctttcatttcatcccaacaactggacagcaagataagtaactggacttcaaactagtgagtgtatttttaaggccctgcttgttaaagaaaggcttgaactggcctctcctcatcactgcttcttccaacaggccctcatcaccttttttcaagtcaagatttcatcccatacatgcatgactcaatcagatttggaaatgtggatatgccctgcgtccaagcccaatatagcccttcccctccaggttccagttatgcggcgcagacatacagctcggaatacaccacggagatcatgaaccccgactacaccaagctgaccatggaccttggcagcactgagatcacggctacagccaccacgtccctgcccagcatcagtaccttcgtggagggctactcgagcaactacgaactcaagccttcctgcgtgtaccaaatgcagcggcccttgatcaaagtggaggaggggcgggcgcccagctaccatcaccatcaccaccaccaccaccaccaccaccaccatcaccagcagcagcatcagcagccatccattcctccagcctccagcccggaggacgaggtgctgcccagcacctccatgtacttcaagcagtccccaccgtccacccccaccacgccggccttccccccgcaggcgggggcgttatgggacgaggcactgccctcggcgcccggctgcatcgcacccggcccgctgctggacccgccgatgaaggcggtccccacggtggccggcgcgcgcttcccgctcttccacttcaagccctcgccgccgcatccccccgcgcccagcccggccggcggccaccacctcggctacgacccgacggccgctgccgcgctcagcctgccgctgggagccgcagccgccgcgggcagccaggccgccgcgcttgagngccacccgtacgggctgccgctggccaagagggcggccccgctggccttcccgcctctcggcctcacgccctcccctaccgcgtccagcctgctgggcgagagtcccagcctgccgtcgccgcccagcaggagctcgtcgtctggcgagggcacgtgtgccgtgtgcggggacaacgccgcctgccagcactacggcgtgcgaacctgcgagggctgcaagggctttttcaagagaacagtgcagaaaaatgcaaaatatgtttgcctggcaaataaaaactgcccagtagacaagagacgtcgaaaccgatgtcagtactgtcgatttcagaagtgtctcagtgttggaatggtaaaagaagttgtccgtacagatagtctgaaagggaggagaggtcgtctgccttccaaaccaaagagcccattacaacaggaaccttctcagccctctccaccttctcctccaatctgcatgatgaatgctcttgtccgagctttaacagactcaacacccagagatcttgattattccagatactgtcccactgaccaggctgctgcaggcacagatgctgagcatgtgcaacaattctacaacctcctgacagcctccattgatgtatccagaagctgggcagaaaagattccgggatttactgatctccccaaagaagatcagacattacttattgaatcagcctttttggagctgtttgtcctcagactttccatcaggtcaaacactgctgaagataagtttgtgttctgcaatggacttgtcctgcatcgacttcagtgccttcgtggatttggggagtggctcgactctattaaagacttttccttaaatttgcagagcctgaaccttgatatccaagccttagcctgcctgtcagcactgagcatgatcacagaaagacatgggttaaaagaaccaaagagagtcgaagagctatgcaacaagatcacaagcagtttaaaagaccaccagagtaagggacaggctctggagcccaccgagtccaaggtcctgggtgccctggtagaactgaggaagatctgcaccctgggcctccagcgcatcttctacctgaagctggaagacttggtgtctccaccttccatcattgacaagctcttcctggacaccctacctttctaatcaggagcagtggagcagtgagctgcctcctctcctagcacctgcttgctacgcagcaaagggataggtttggaaacctatcatttcctgtccttccttaagaggaaaagcagctcctgtagaaagcaaagactttcttttttttctggctcttttccttacaacctaaagccagaaaacttgcagagtattgtgttggggttgtgttttatatttaggcattgggggatggggtgggagggggttatagttcatgagggttttctaagaaattgctaacaaagcacttttggacaatgctatcccagcaggaaaaaaaaggataatataactgttttaaaactctttctggggaatccaattatagttgctttgtatttaaaaacaagaacagccaagggttgttcgccagggtaggatgtgtcttaaagattggtcccttgaaaatatgcttcctgtatcaaaggtacgtatgtggtgcaaacaaggcagaaacttccttttaatttccttcttcctttattttaacaaatggtgaaagatggaggattacctacaaatcagacatggcaaaacaataatggctgtttgcttccataaacaagtgcaattttttaaagtgctgtcttactaagtcttgtttattaactctcctttattctatatggaaataaaaaggaggcagtcatgttagcaaatgacacgttaatatccctagcagaggctgtgttcaccttccctgtcgatcccttctgaggtatggcccatccaagacttttaggccattcttgatggaaccagatccctgccctgactgtccagctatcctgaaagtggatcagattataaactggattacatgtaactgttttggttgtgttctatcaaccccaccagagttccctaaacttgcttcagttatagtaactgactggtatattcattcagaagcgccataagtcagttgagtatttgatccctagataagaacatgcaaatcagcaggaactggtcatacagggtaagcaccagggacaataaggatttttatagatataatttaatttttgttattggttaaggagacaattttggagagcaagcaaatcttctttttaaaaaatagtatgaatgtgaatactagaaaagatttaagaaatagtatgagtgtgagtactaggaaggattagtgggctgcgtttcaacattccgtgttcgtactcccttttgtatgtttctactgttaatgccatattactatgagataatttgttgcatagtgtccttatttgtataaacatttgtatgcacgttatattgtaatagctttgcctgtatttattgcaagaccaccagctcctggaagctgagttacagagtaattaaatggggtgttcacagtgacttggatacaccaattagaaattaaataagcaaatatatatatatatataaatatagcaggttacatatatatatttataatgtgtctttttattaaccatttgtacaataaatgtcacttcccatgccgttattttatggttcatttgcagtgacttttaaggcagtactgtttagcactttgatattaaaattttgcttatgttttgctaaattcgaataatgtttgaagatttttaggtctaaaagtctttatattatatactctgtatcaagtcaaaatatctttggccattttgctaagaaacaaactttgaatgtcaaactgatgtcacagtagtttttgttagctttaaatcatttttgctttagtctttttaaaggaaaataacaaaactatgctgtttatattgtcattaaattatacaatcaaacaaatgccaaatgaattgcctaattgctgcaaagtataacccagataggaaatcatatgtttttttccaagagtcattctaatatttgattatgttatgtgtgcttttatgaaagattgttatttttatatatcaagatgatagaacctggaatgttaggattttgaaatgttagacttggaaggggcctggtctgtcaactagtccaaccccttaaaattcatagaggagcaaactggggcccattgaagggtgaagagttactcaaggtcaaacagctggtaacagaatcaagactaagacctaatttacctttccatactctttttttttctcaacttcatctatataaaatcaggcttttaaacataaccactaatatttacctgaagataaccatgagtaaagtatacttttgcattaattttttgagcttatatgcaaacataataaatattattaaatatcaggaaagctaacatttcatacaagatagcttcagaccaaattcaaattgaatttgaataaattagaaatactgtgcatacataaccttcttgtgcaccatgagtatttggaaagttaatccttgtttttgtcgtgtctataaaggaagaacaaaacaaaataaaaacagagccctagagaaatgctgttactttttatttttacacccatcagatttaaggaaaagactttttagccattataatctagtggttggaaggaatgaagaagcttttttagtaataggtccagatatgagtgctaaaaataaagatgatagcatgttcttctgtcttccatagttattacaactatgagagcctcccaagtcatcttatcaactcaactcccttttttttgtcttaatgttgcacataagtttatacagagtggatgaccacactagcacagaagagaacaacatgtattaaagcaggtgattcctccccttggcgggagagctctctcagtgtgaacatgccttctgtgggcggaaatcaggaagccaccagctgttaatggagagtgccttgcttttatttcagacagcagagttttccaaagtttctctgctcctctaacagcattgctctttagtgtgtgttaacctgtggtttgaaagaaatgctcttgtacattaacaatgtaaatttaaatgattaaattacattttatcaatggc

SEQ ID NO: 15508 - DNA, 2588 bp, Homo sapiens
  misc_feature (1447)..(1447): n is a, c, g, or t
  misc_feature (2568)..(2568): n is a, c, g, or t
ataaatgacgtgccgagagagcgagcgaacgcgcagccgggagagcggagtctcctgcctcccgccccccacccctccagctcctgctcctcctccgctccccatacacagacgcgctcacacccgctccctcactcgaacacacagacacaagcgcgcacacaggctccgcacacacacttcgctctcccgcgcgctcacacccctcttgccctgagcccttgccggtgcagcgcggcgccgcagctggacgcccctcccgggctcactttgcaacgctgacggtgccggcagtggccgtggaggtgggaacagcggcggcatcctcccccctggtcacagcccaagccaggacgcccgcggaacctctcggctgtgctctcccatgagtcgggatcgcagcatcccccaccagccgctcaccgcctccgggagccgctgggcttgtacaccgcagcccttccgggacagcagctgtgactcccccccagtgcagatttcgggacagctctctagaaactcgctctaaagacggaaccgccacagcactcaaagcccactgcggaagagggcagcccggcaagcccgggccctgagcctggacccttagcggtgccgggcagcactgccggcgcttcgcctcgccggacgtccgctcctcctacactctcagcctccgctggagagacccccagccccaccattcagcgcgcaagataccctccagatatgccctgcgtccaagcccaatatagcccttcccctccaggttccagttatgcggcgcagacatacagctcggaatacaccacggagatcatgaaccccgactacaccaagctgaccatggaccttggcagcactgagatcacggctacagccaccacgtccctgcccagcatcagtaccttcgtggagggctactcgagcaactacgaactcaagccttcctgcgtgtaccaaatgcagcggcccttgatcaaagtggaggaggggcgggcgcccagctaccatcaccatcaccaccaccaccaccaccaccaccaccatcaccagcagcagcatcagcagccatccattcctccagcctccagcccggaggacgaggtgctgcccagcacctccatgtacttcaagcagtccccaccgtccacccccaccacgccggccttccccccgcaggcgggggcgttatgggacgaggcactgccctcggcgcccggctgcatcgcacccggcccgctgctggacccgccgatgaaggcggtccccacggtggccggcgcgcgcttcccgctcttccacttcaagccctcgccgccgcatccccccgcgcccagcccggccggcggccaccacctcggctacgacccgacggccgctgccgcgctcagcctgccgctgggagccgcagccgccgcgggcagccaggccgccgcgcttgagngccacccgtacgggctgccgctggccaagagggcggccccgctggccttcccgcctctcggcctcacgccctcccctaccgcgtccagcctgctgggcgagagtcccagcctgccgtcgccgcccagcaggagctcgtcgtctggcgagggcacgtgtgccgtgtgcggggacaacgccgcctgccagcactacggcgtgcgaacctgcgagggctgcaagggctttttcaagagaacagtgcagaaaaatgcaaaatatgtttgcctggcaaataaaaactgcccagtagacaagagacgtcgaaaccgatgtcagtactgtcgatttcagaagtgtctcagtgttggaatggtaaaagaagttgtccgtacagatagtctgaaagggaggagaggtcgtctgccttccaaaccaaagagcccattacaacaggaaccttctcagccctctccaccttctcctccaatctgcatgatgaatgctcttgtccgagctttaacagactcaacacccagagatcttgattattccagagtaagttttatgatttcctgctttcaaatgaatgatcagggtctctatttatggctactagtaataagagttgattgaatgattttgtgtctggcaccatgttagacagttttcatactttttctatatttctcgcttcatttagcaattcagtgcatccattgcagcaaataatttttgccttattgaatctctaaatgccttaacaagtgaccctgacagtgctgcacctgtcatacacattgttgcaggattcctggtggttgtgccaatgaaaatctgcacagacaaactacaatttgtagatttatctcgtgatctagacaaagtgactactgttttttttcatattgtgttcaaaccatctgggtgagcctcaagttattactaagcagtttatccaattgcatcagcattgattgacctgctgcttattcagagggattagaccattggtggagagaagcgagctctggctgtgacatcagttgtcaggagaactgggatggaacgccacctctgctacttcctgcctgtgtcacctggttcctgcttttggctctctcctgcctacagtggaaatgnctacaatatttaacctcaga

SEQ ID NO: 15509 - DNA, 2446 bp, Homo sapiens
  misc_feature (1709)..(1709): n is a, c, g, or t
  misc_feature (1763)..(1763): n is a, c, g, or t
  misc_feature (1853)..(1853): n is a, c, g, or t
  misc_feature (1920)..(1920): n is a, c, g, or t
ggagacagagtgccactctggcacccatgctggagtgcagtggcacgatcttggctcactgcaacctccaccttgcaggttcaagcgattctcgtgcctcagcctcccgagtagctgggattacaggcacatgccaccacacccagctaatttttatatttttagtggagatggggtttcaccatgttggccaggctggtctcgaactcctgacctcaggtgattcaccaccacccccccaccccccagcctcccaaagtggtggaattacaggcatgagccaccgcccaggccgaaattatcacttctaacacattcctgggtgttgctgatgctgccagtctggagaccacactttgagaaccactgggttaatttagcatctcatggggagacagctgtgctatagtgaaatgagtagacccttgagatctacttggacacaaactcctggggcagtagttctcaattgggctactccactttggagtcacctggggagcttttaaaattcttgacccctgggctccaccccagaccaattaaatgagaatctctaggcgcaggacccagacaagagttgtttcttcaagctccccaggtgattgcactgcacagtcaagggtgaaaaccactttgccaattcggcttaagcaaatttccttgtctattaagtgataacgataaaatttgctgtatttgtatcacagggccattgtgagaatcacatgagactgtgaatgtgaaggggttttataaactgtaacacctaaaagtaagaatttaggcattgatggtcttggaagggcctgtttgcaagtgatgccatcatccccactgaagcaggataatgctgctctctctggtttgcattctagtactgtcccactgaccaggctgctgcaggcacagatgctgagcatgtgcaacaattctacaacctcctgacagcctccattgatgtatccagaagctgggcagaaaagattccgggatttactgatctccccaaagaagatcagacattacttattgaatcagcctttttggagctgtttgtcctcagactttccatcaggtaattactactattttatcttcagtctacgtcctttgaagaagcctgaaaccttctgtgtttgtaactgaatcattggtgaaacgttttctcaagaagcaaatgtgaaatatgatcaggcactaaaaagactgagcagcgagtcacggagggagcactaggcttgccaccaggacccgtgggttctagtcccagttctaatgtggacttgctgtcacaccctgagcaggtcacttgcctgacgggaagttcaattccatcctccttaaaaggaagaggttggatttgatgatctcttgaggtcccttgcagctccaacattctatgattctcgaaagattctcatagtgcataagctatttcctgggagcaagtgtttgctttggaacattgtatttacctcgtgggtttctgtttaacaagttactattctagcacacctgatggggccctaaagagttcccacaccttctcaacccccagttttattccaagagaacactcttagatagaaagatttagtccatcctatcatactcagtgacgccaaacacaaaaaggaaaagtgatttttcaaaaacatagaaccttggatctaagctcctctagtaagttccacatgtagattttntaaagtttattttattattgtttttattcacaaatagcctgtttaactccatcntccttgcttcctttcagttatatatttttaggagatgataccaactttttaccaaatattatcagaaaaatccatctttcccctctttcnctttcctgccatcacctccccaatttcatatcactaccagaaactcctgtttaatttttaaagtgcngattgccaggcctcattgccatctattttggtttggtagactgtggaagtccagaaatctgcatttttaacatatgctttaatgattctgatgtcatcagggtccatgttttatactctgagactaaatcattctgtcctgtgtatgccttctgtggagggatcagtaggagagatggggtggagttacaactagagtgccagtaatagcttaatttgtagccaatctagtgtacaccagagctgagccagcaatgtgactgtcatctattaggcatgcaacaaaggattaagtagactgtaagctccatgcaggcaggtgccatatatgtcctattcaccatgttttctcccagtgcctggctccaggaataacacatacttcatgctcagtagacacttggctgagtgaaggaatgaatgaagctgttcatccaagaagcacaaagagatatttgacttgtgaatacaacaggccaagatagatacatacgtggcaagagatttgaaagttaaaggaaatctaa

SEQ ID NO: 15510 - DNA, 1037 bp, Homo sapiens
ggccaggacagtgactgctggccgcgaatttcacaacacaggtggcttcctcacaggaagctcctctgtataccacaccctgttgctactgagtggagcagccaaattaaattaagcttgcattgctcaaaattaattttcctaagagaaatacaaatacaccaatagattagggtattttatacatttttaatttcatttttgctcttcttttatagccagtgtgcacatgtaagagttatggaatcacttagagcaatactgagcattttcatttatataaaacccaaatcatttgggtgcagaagtttggatgattgaagctcagagggaaggagaaaagcatttgagatgaaaaccaaagagtaaatttgagtttggcaaaagaacagattgcacttttggtttgtaccacctctttacaaatttgttaaaggaatactaggtgccaagcctgtgtgggcaccatagataatgcagataaatagaatacaatcccagcaagctcatcttctagctagaaacctcagaaagacacaaataagagcagtaaaaagggattggccggaaagaatgacagaaaagagtaatggagaaatcctagaggtgctgaagggagaaggagaatagatcaaagatcaggcagtgttctttcttttaaatgattagcctttcatttcatcccaacaactggacagcaagataagtaactggacttcaaactagtgagtgtatttttaaggccctgcttgttaaagaaaggcttgaactggcctctcctcatcactgcttcttccaacaggccctcatcaccttttttcaagtcaagatttcatcccatacatgcatgactcaatcagatttggaaatgtgggtaagagaaagatgtcaaaggaaatgtgaagtattcacttctctattagtcacaccttttacaccatagactccaaagaggcgttaagcacctggttttcctttggctcagaaaaaccaaccaccaaaaaccgccgtttttttaccatttatatttagccata

SEQ ID NO: 15511 - DNA, 5637 bp, Homo sapiens
  misc_feature (1447)..(1447): n is a, c, g, or t
ataaatgacgtgccgagagagcgagcgaacgcgcagccgggagagcggagtctcctgcctcccgccccccacccctccagctcctgctcctcctccgctccccatacacagacgcgctcacacccgctccctcactcgaacacacagacacaagcgcgcacacaggctccgcacacacacttcgctctcccgcgcgctcacacccctcttgccctgagcccttgccggtgcagcgcggcgccgcagctggacgcccctcccgggctcactttgcaacgctgacggtgccggcagtggccgtggaggtgggaacagcggcggcatcctcccccctggtcacagcccaagccaggacgcccgcggaacctctcggctgtgctctcccatgagtcgggatcgcagcatcccccaccagccgctcaccgcctccgggagccgctgggcttgtacaccgcagcccttccgggacagcagctgtgactcccccccagtgcagatttcgggacagctctctagaaactcgctctaaagacggaaccgccacagcactcaaagcccactgcggaagagggcagcccggcaagcccgggccctgagcctggacccttagcggtgccgggcagcactgccggcgcttcgcctcgccggacgtccgctcctcctacactctcagcctccgctggagagacccccagccccaccattcagcgcgcaagataccctccagatatgccctgcgtccaagcccaatatagcccttcccctccaggttccagttatgcggcgcagacatacagctcggaatacaccacggagatcatgaaccccgactacaccaagctgaccatggaccttggcagcactgagatcacggctacagccaccacgtccctgcccagcatcagtaccttcgtggagggctactcgagcaactacgaactcaagccttcctgcgtgtaccaaatgcagcggcccttgatcaaagtggaggaggggcgggcgcccagctaccatcaccatcaccaccaccaccaccaccaccaccaccatcaccagcagcagcatcagcagccatccattcctccagcctccagcccggaggacgaggtgctgcccagcacctccatgtacttcaagcagtccccaccgtccacccccaccacgccggccttccccccgcaggcgggggcgttatgggacgaggcactgccctcggcgcccggctgcatcgcacccggcccgctgctggacccgccgatgaaggcggtccccacggtggccggcgcgcgcttcccgctcttccacttcaagccctcgccgccgcatccccccgcgcccagcccggccggcggccaccacctcggctacgacccgacggccgctgccgcgctcagcctgccgctgggagccgcagccgccgcgggcagccaggccgccgcgcttgagngccacccgtacgggctgccgctggccaagagggcggccccgctggccttcccgcctctcggcctcacgccctcccctaccgcgtccagcctgctgggcgagagtcccagcctgccgtcgccgcccagcaggagctcgtcgtctggcgagggcacgtgtgccgtgtgcggggacaacgccgcctgccagcactacggcgtgcgaacctgcgagggctgcaagggctttttcaagagaacagtgcagaaaaatgcaaaatatgtttgcctggcaaataaaaactgcccagtagacaagagacgtcgaaaccgatgtcagtactgtcgatttcagaagtgtctcagtgttggaatggtaaaagaagttgtccgtacagatagtctgaaagggaggagaggtcgtctgccttccaaaccaaagagcccattacaacaggaaccttctcagccctctccaccttctcctccaatctgcatgatgaatgctcttgtccgagctttaacagactcaacacccagagatcttgattattccagatactgtcccactgaccaggctgctgcaggcacagatgctgagcatgtgcaacaattctacaacctcctgacagcctccattgatgtatccagaagctgggcagaaaagattccgggatttactgatctccccaaagaagatcagacattacttattgaatcagcctttttggagctgtttgtcctcagactttccatcaggtcaaacactgctgaagataagtttgtgttctgcaatggacttgtcctgcatcgacttcagtgccttcgtggatttggggagtggctcgactctattaaagacttttccttaaatttgcagagcctgaaccttgatatccaagccttagcctgcctgtcagcactgagcatgatcacagaaagacatgggttaaaagaaccaaagagagtcgaagagctatgcaacaagatcacaagcagtttaaaagaccaccagagtaagggacaggctctggagcccaccgagtccaaggtcctgggtgccctggtagaactgaggaagatctgcaccctgggcctccagcgcatcttctacctgaagctggaagacttggtgtctccaccttccatcattgacaagctcttcctggacaccctacctttctaatcaggagcagtggagcagtgagctgcctcctctcctagcacctgcttgctacgcagcaaagggataggtttggaaacctatcatttcctgtccttccttaagaggaaaagcagctcctgtagaaagcaaagactttcttttttttctggctcttttccttacaacctaaagccagaaaacttgcagagtattgtgttggggttgtgttttatatttaggcattgggggatggggtgggagggggttatagttcatgagggttttctaagaaattgctaacaaagcacttttggacaatgctatcccagcaggaaaaaaaaggataatataactgttttaaaactctttctggggaatccaattatagttgctttgtatttaaaaacaagaacagccaagggttgttcgccagggtaggatgtgtcttaaagattggtcccttgaaaatatgcttcctgtatcaaaggtacgtatgtggtgcaaacaaggcagaaacttccttttaatttccttcttcctttattttaacaaatggtgaaagatggaggattacctacaaatcagacatggcaaaacaataatggctgtttgcttccataaacaagtgcaattttttaaagtgctgtcttactaagtcttgtttattaactctcctttattctatatggaaataaaaaggaggcagtcatgttagcaaatgacacgttaatatccctagcagaggctgtgttcaccttccctgtcgatcccttctgaggtatggcccatccaagacttttaggccattcttgatggaaccagatccctgccctgactgtccagctatcctgaaagtggatcagattataaactggattacatgtaactgttttggttgtgttctatcaaccccaccagagttccctaaacttgcttcagttatagtaactgactggtatattcattcagaagcgccataagtcagttgagtatttgatccctagataagaacatgcaaatcagcaggaactggtcatacagggtaagcaccagggacaataaggatttttatagatataatttaatttttgttattggttaaggagacaattttggagagcaagcaaatcttctttttaaaaaatagtatgaatgtgaatactagaaaagatttaagaaatagtatgagtgtgagtactaggaaggattagtgggctgcgtttcaacattccgtgttcgtactcccttttgtatgtttctactgttaatgccatattactatgagataatttgttgcatagtgtccttatttgtataaacatttgtatgcacgttatattgtaatagctttgcctgtatttattgcaagaccaccagctcctggaagctgagttacagagtaattaaatggggtgttcacagtgacttggatacaccaattagaaattaaataagcaaatatatatatatatataaatatagcaggttacatatatatatttataatgtgtctttttattaaccatttgtacaataaatgtcacttcccatgccgttattttatggttcatttgcagtgacttttaaggcagtactgtttagcactttgatattaaaattttgcttatgttttgctaaattcgaataatgtttgaagatttttaggtctaaaagtctttatattatatactctgtatcaagtcaaaatatctttggccattttgctaagaaacaaactttgaatgtcaaactgatgtcacagtagtttttgttagctttaaatcatttttgctttagtctttttaaaggaaaataacaaaactatgctgtttatattgtcattaaattatacaatcaaacaaatgccaaatgaattgcctaattgctgcaaagtataacccagataggaaatcatatgtttttttccaagagtcattctaatatttgattatgttatgtgtgcttttatgaaagattgttatttttatatatcaagatgatagaacctggaatgttaggattttgaaatgttagacttggaaggggcctggtctgtcaactagtccaaccccttaaaattcatagaggagcaaactggggcccattgaagggtgaagagttactcaaggtcaaacagctggtaacagaatcaagactaagacctaatttacctttccatactctttttttttctcaacttcatctatataaaatcaggcttttaaacataaccactaatatttacctgaagataaccatgagtaaagtatacttttgcattaattttttgagcttatatgcaaacataataaatattattaaatatcaggaaagctaacatttcatacaagatagcttcagaccaaattcaaattgaatttgaataaattagaaatactgtgcatacataaccttcttgtgcaccatgagtatttggaaagttaatccttgtttttgtcgtgtctataaaggaagaacaaaacaaaataaaaacagagccctagagaaatgctgttactttttatttttacacccatcagatttaaggaaaagactttttagccattataatctagtggttggaaggaatgaagaagcttttttagtaataggtccagatatgagtgctaaaaataaagatgatagcatgttcttctgtcttccatagttattacaactatgagagcctcccaagtcatcttatcaactcaactcccttttttttgtcttaatgttgcacataagtttatacagagtggatgaccacactagcacagaagagaacaacatgtattaaagcaggtgattcctccccttggcgggagagctctctcagtgtgaacatgccttctgtgggcggaaatcaggaagccaccagctgttaatggagagtgccttgcttttatttcagacagcagagttttccaaagtttctctgctcctctaacagcattgctctttagtgtgtgttaacctgtggtttgaaagaaatgctcttgtacattaacaatgtaaatttaaatgattaaattacattttatcaatggc

SEQ ID NO: 15512 - DNA, 5824 bp, Homo sapiens
  misc_feature (1447)..(1447): n is a, c, g, or t
ataaatgacgtgccgagagagcgagcgaacgcgcagccgggagagcggagtctcctgcctcccgccccccacccctccagctcctgctcctcctccgctccccatacacagacgcgctcacacccgctccctcactcgaacacacagacacaagcgcgcacacaggctccgcacacacacttcgctctcccgcgcgctcacacccctcttgccctgagcccttgccggtgcagcgcggcgccgcagctggacgcccctcccgggctcactttgcaacgctgacggtgccggcagtggccgtggaggtgggaacagcggcggcatcctcccccctggtcacagcccaagccaggacgcccgcggaacctctcggctgtgctctcccatgagtcgggatcgcagcatcccccaccagccgctcaccgcctccgggagccgctgggcttgtacaccgcagcccttccgggacagcagctgtgactcccccccagtgcagatttcgggacagctctctagaaactcgctctaaagacggaaccgccacagcactcaaagcccactgcggaagagggcagcccggcaagcccgggccctgagcctggacccttagcggtgccgggcagcactgccggcgcttcgcctcgccggacgtccgctcctcctacactctcagcctccgctggagagacccccagccccaccattcagcgcgcaagataccctccagatatgccctgcgtccaagcccaatatagcccttcccctccaggttccagttatgcggcgcagacatacagctcggaatacaccacggagatcatgaaccccgactacaccaagctgaccatggaccttggcagcactgagatcacggctacagccaccacgtccctgcccagcatcagtaccttcgtggagggctactcgagcaactacgaactcaagccttcctgcgtgtaccaaatgcagcggcccttgatcaaagtggaggaggggcgggcgcccagctaccatcaccatcaccaccaccaccaccaccaccaccaccatcaccagcagcagcatcagcagccatccattcctccagcctccagcccggaggacgaggtgctgcccagcacctccatgtacttcaagcagtccccaccgtccacccccaccacgccggccttccccccgcaggcgggggcgttatgggacgaggcactgccctcggcgcccggctgcatcgcacccggcccgctgctggacccgccgatgaaggcggtccccacggtggccggcgcgcgcttcccgctcttccacttcaagccctcgccgccgcatccccccgcgcccagcccggccggcggccaccacctcggctacgacccgacggccgctgccgcgctcagcctgccgctgggagccgcagccgccgcgggcagccaggccgccgcgcttgagngccacccgtacgggctgccgctggccaagagggcggccccgctggccttcccgcctctcggcctcacgccctcccctaccgcgtccagcctgctgggcgagagtcccagcctgccgtcgccgcccagcaggagctcgtcgtctggcgagggcacgtgtgccgtgtgcggggacaacgccgcctgccagcactacggcgtgcgaacctgcgagggctgcaagggctttttcaagagaacagtgcagaaaaatgcaaaatatgtttgcctggcaaataaaaactgcccagtagacaagagacgtcgaaaccgatgtcagtactgtcgatttcagaagtgtctcagtgttggaatggtaaaagaagttgtccgtacagatagtctgaaagggaggagaggtcgtctgccttccaaaccaaagagcccattacaacaggaaccttctcagccctctccaccttctcctccaatctgcatgatgaatgctcttgtccgagctttaacagactcaacacccagagatcttgattattccagatactgtcccactgaccaggctgctgcaggcacagatgctgagcatgtgcaacaattctacaacctcctgacagcctccattgatgtatccagaagctgggcagaaaagattccgggatttactgatctccccaaagaagatcagacattacttattgaatcagcctttttggagctgtttgtcctcagactttccatcaggtcaaacactgctgaagataagtttgtgttctgcaatggacttgtcctgcatcgacttcagtgccttcgtggatttggggagtggctcgactctattaaagacttttccttaaatttgcagagcctgaaccttgatatccaagccttagcctgcctgtcagcactgagcatgatcacagaaagacatgggttaaaagaaccaaagagagtcgaagagctatgcaacaagatcacaagcagtttaaaagaccaccagagtaagggacaggctctggagcccaccgagtccaaggtcctgggtgccctggtagaactgaggaagatctgcaccctgggcctccagcgcatcttctacctgaagctggaagacttggtgtctccaccttccatcattgacaagctcttcctggacaccctacctttctaatcaggagcagtggagcagtgagctgcctcctctcctagcacctgcttgctacgcagcaaagggataggtttggaaacctatcatttcctgtccttccttaagaggaaaagcagctcctgtagaaagcaaagactttcttttttttctggctcttttccttacaacctaaagccagaaaacttgcagagtattgtgttggggttgtgttttatatttaggcattgggggatggggtgggagggggttatagttcatgagggttttctaagaaattgctaacaaagcacttttggacaatgctatcccagcaggaaaaaaaaggataatataactgttttaaaactctttctggggaatccaattatagttgctttgtatttaaaaacaagaacagccaagggttgttcgccagggtaggatgtgtcttaaagattggtcccttgaaaatatgcttcctgtatcaaaggtacgtatgtggtgcaaacaaggcagaaacttccttttaatttccttcttcctttattttaacaaatggtgaaagatggaggattacctacaaatcagacatggcaaaacaataatggctgtttgcttccataaacaagtgcaattttttaaagtgctgtcttactaagtcttgtttattaactctcctttattctatatggaaataaaaaggaggcagtcatgttagcaaatgacacgttaatatccctagcagaggctgtgttcaccttccctgtcgatcccttctgaggtatggcccatccaagacttttaggccattcttgatggaaccagatccctgccctgactgtccagctatcctgaaagtggatcagattataaactggattacatgtaactgttttggttgtgttctatcaaccccaccagagttccctaaacttgcttcagttatagtaactgactggtatattcattcagaagcgccataagtcagttgagtatttgatccctagataagaacatgcaaatcagcaggaactggtcatacagggtaagcaccagggacaataaggatttttatagatataatttaatttttgttattggttaaggagacaattttggagagcaagcaaatcttctttttaaaaaatagtatgaatgtgaatactagaaaagatttaagaaatagtatgagtgtgagtactaggaaggattagtgggctgcgtttcaacattccgtgttcgtactcccttttgtatgtttctactgttaatgccatattactatgagataatttgttgcatagtgtccttatttgtataaacatttgtatgcacgttatattgtaatagctttgcctgtatttattgcaagaccaccagctcctggaagctgagttacagagtaattaaatggggtgttcacagtgacttggatacaccaattagaaattaaataagcaaatatatatatatatataaatatagcaggttacatatatatatttataatgtgtctttttattaaccatttgtacaataaatgtcacttcccatgccgttattttatggttcatttgcagtgacttttaaggcagtactgtttagcactttgatattaaaattttgcttatgttttgctaaattcgaataatgtttgaagatttttaggtctaaaagtctttatattatatactctgtatcaagtcaaaatatctttggccattttgctaagaaacaaactttgaatgtcaaactgatgtcacagtagtttttgttagctttaaatcatttttgctttagtctttttaaaggaaaataacaaaactatgctgtttatattgtcattaaattatacaatcaaacaaatgccaaatgaattgcctaattgctgcaaagtataacccagataggaaatcatatgtttttttccaagagtcattctaatatttgattatgttatgtgtgcttttatgaaagattgttatttttatatatcaagatgatagaacctggaatgttaggattttgaaatgttagacttggaaggggcctggtctgtcaactagtccaaccccttaaaattcatagaggagcaaactggggcccattgaagggtgaagagttactcaaggtcaaacagctggtaacagaatcaagactaagacctaatttacctttccatactctttttttttctcaacttcatctatataaaatcaggcttttaaacataaccactaatatttacctgaagataaccatgagtaaagtatacttttgcattaattttttgagcttatatgcaaacataataaatattattaaatatcaggaaagctaacatttcatacaagatagcttcagaccaaattcaaattgaatttgaataaattagaaatactgtgcatacataaccttcttgtgcaccatgagtatttggaaagttaatccttgtttttgtcgtgtctataaaggaagaacaaaacaaaataaaaacagagccctagagaaatgctgttactttttatttttacacccatcagatttaaggaaaagactttttagccattataatctagtggttggaaggaatgaagaagcttttttagtaataggtccagatatgagtgctaaaaataaagatgatagcatgttcttctgtcttccatagttattacaactatgagagcctcccaagtcatcttatcaactcaactcccttttttttgtcttaatgttgcacataagtttatacagagtggatgaccacactagcacagaagagaacaacatgtattaaagcaggtgattcctccccttggcgggagagctctctcagtgtgaacatgccttctgtgggcggaaatcaggaagccaccagctgttaatggagagtgccttgcttttatttcagacagcagagttttccaaagtttctctgctcctctaacagcattgctctttagtgtgtgttaacctgtggtttgaaagaaatgctcttgtacattaacaatgtaaatttaaatgattaaattacattttatcaatggctactggtgtattgaataagcctgcttcatttaacagttttctcttaattattatgtaatagtatttgctgtgaactcttaagcacatccccaaaattgattttttaaaggcttagtaatgctgaaaaattaataggatttctgtattggatatatattaaaccttactgattggaaagaaggacatt

SEQ ID NO: 15513 - DNA, 5583 bp, Homo sapiens
  misc_feature (1447)..(1447): n is a, c, g, or t
ataaatgacgtgccgagagagcgagcgaacgcgcagccgggagagcggagtctcctgcctcccgccccccacccctccagctcctgctcctcctccgctccccatacacagacgcgctcacacccgctccctcactcgaacacacagacacaagcgcgcacacaggctccgcacacacacttcgctctcccgcgcgctcacacccctcttgccctgagcccttgccggtgcagcgcggcgccgcagctggacgcccctcccgggctcactttgcaacgctgacggtgccggcagtggccgtggaggtgggaacagcggcggcatcctcccccctggtcacagcccaagccaggacgcccgcggaacctctcggctgtgctctcccatgagtcgggatcgcagcatcccccaccagccgctcaccgcctccgggagccgctgggcttgtacaccgcagcccttccgggacagcagctgtgactcccccccagtgcagatttcgggacagctctctagaaactcgctctaaagacggaaccgccacagcactcaaagcccactgcggaagagggcagcccggcaagcccgggccctgagcctggacccttagcggtgccgggcagcactgccggcgcttcgcctcgccggacgtccgctcctcctacactctcagcctccgctggagagacccccagccccaccattcagcgcgcaagataccctccagatatgccctgcgtccaagcccaatatagcccttcccctccaggttccagttatgcggcgcagacatacagctcggaatacaccacggagatcatgaaccccgactacaccaagctgaccatggaccttggcagcactgagatcacggctacagccaccacgtccctgcccagcatcagtaccttcgtggagggctactcgagcaactacgaactcaagccttcctgcgtgtaccaaatgcagcggcccttgatcaaagtggaggaggggcgggcgcccagctaccatcaccatcaccaccaccaccaccaccaccaccaccatcaccagcagcagcatcagcagccatccattcctccagcctccagcccggaggacgaggtgctgcccagcacctccatgtacttcaagcagtccccaccgtccacccccaccacgccggccttccccccgcaggcgggggcgttatgggacgaggcactgccctcggcgcccggctgcatcgcacccggcccgctgctggacccgccgatgaaggcggtccccacggtggccggcgcgcgcttcccgctcttccacttcaagccctcgccgccgcatccccccgcgcccagcccggccggcggccaccacctcggctacgacccgacggccgctgccgcgctcagcctgccgctgggagccgcagccgccgcgggcagccaggccgccgcgcttgagngccacccgtacgggctgccgctggccaagagggcggccccgctggccttcccgcctctcggcctcacgccctcccctaccgcgtccagcctgctgggcgagagtcccagcctgccgtcgccgcccagcaggagctcgtcgtctggcgagggcacgtgtgccgtgtgcggggacaacgccgcctgccagcactacggcgtgcgaacctgcgagggctgcaagggctttttcaagagaacagtgcagaaaaatgcaaaatatgtttgcctggcaaataaaaactgcccagtagacaagagacgtcgaaaccgatgtcagtactgtcgatttcagaagtgtctcagtgttggaatggtaaaagaagttgtccgtacagatagtctgaaagggaggagaggtcgtctgccttccaaaccaaagagcccattacaacaggaaccttctcagccctctccaccttctcctccaatctgcatgatgaatgctcttgtccgagctttaacagactcaacacccagagatcttgattattccagatactgtcccactgaccaggctgctgcaggcacagatgctgagcatgtgcaacaattctacaacctcctgacagcctccattgatgtatccagaagctgggcagaaaagattccgggatttactgatctccccaaagaagatcagacattacttattgaatcagcctttttggagctgtttgtcctcagactttccatcaggtcaaacactgctgaagataagtttgtgttctgcaatggacttgtcctgcatcgacttcagtgccttcgtggatttggggagtggctcgactctattaaagacttttccttaaatttgcagagcctgaaccttgatatccaagccttagcctgcctgtcagcactgagcatgatcacagaaagacatgggttaaaagaaccaaagagagtcgaagagctatgcaacaagatcacaagcagtttaaaagaccaccagagtaagggacaggctctggagcccaccgagtccaaggtcctgggtgccctggtagaactgaggaagatctgcaccctgggcctccagcgcatcttctacctgaagctggaagacttggtgtctccaccttccatcattgacaagctcttcctggacaccctacctttctaatcaggagcagtggagcagtgagctgcctcctctcctagcacctgcttgctacgcagcaaagggataggtttggaaacctatcatttcctgtccttccttaagaggaaaagcagctcctgtagaaagcaaagactttcttttttttctggctcttttccttacaacctaaagccagaaaacttgcagagtattgtgttggggttgtgttttatatttaggcattgggggatggggtgggagggggttatagttcatgagggttttctaagaaattgctaacaaagcacttttggacaatgctatcccagcaggaaaaaaaaggataatataactgttttaaaactctttctggggaatccaattatagttgctttgtatttaaaaacaagaacagccaagggttgttcgccagggtaggatgtgtcttaaagattggtcccttgaaaatatgcttcctgtatcaaaggtacgtatgtggtgcaaacaaggcagaaacttccttttaatttccttcttcctttattttaacaaatggtgaaagatggaggattacctacaaatcagacatggctcttactaagtcttgtttattaactctcctttattctatatggaaataaaaaggaggcagtcatgttagcaaatgacacgttaatatccctagcagaggctgtgttcaccttccctgtcgatcccttctgaggtatggcccatccaagacttttaggccattcttgatggaaccagatccctgccctgactgtccagctatcctgaaagtggatcagattataaactggattacatgtaactgttttggttgtgttctatcaaccccaccagagttccctaaacttgcttcagttatagtaactgactggtatattcattcagaagcgccataagtcagttgagtatttgatccctagataagaacatgcaaatcagcaggaactggtcatacagggtaagcaccagggacaataaggatttttatagatataatttaatttttgttattggttaaggagacaattttggagagcaagcaaatcttctttttaaaaaatagtatgaatgtgaatactagaaaagatttaagaaatagtatgagtgtgagtactaggaaggattagtgggctgcgtttcaacattccgtgttcgtactcccttttgtatgtttctactgttaatgccatattactatgagataatttgttgcatagtgtccttatttgtataaacatttgtatgcacgttatattgtaatagctttgcctgtatttattgcaagaccaccagctcctggaagctgagttacagagtaattaaatggggtgttcacagtgacttggatacaccaattagaaattaaataagcaaatatatatatatatataaatatagcaggttacatatatatatttataatgtgtctttttattaaccatttgtacaataaatgtcacttcccatgccgttattttatggttcatttgcagtgacttttaaggcagtactgtttagcactttgatattaaaattttgcttatgttttgctaaattcgaataatgtttgaagatttttaggtctaaaagtctttatattatatactctgtatcaagtcaaaatatctttggccattttgctaagaaacaaactttgaatgtcaaactgatgtcacagtagtttttgttagctttaaatcatttttgctttagtctttttaaaggaaaataacaaaactatgctgtttatattgtcattaaattatacaatcaaacaaatgccaaatgaattgcctaattgctgcaaagtataacccagataggaaatcatatgtttttttccaagagtcattctaatatttgattatgttatgtgtgcttttatgaaagattgttatttttatatatcaagatgatagaacctggaatgttaggattttgaaatgttagacttggaaggggcctggtctgtcaactagtccaaccccttaaaattcatagaggagcaaactggggcccattgaagggtgaagagttactcaaggtcaaacagctggtaacagaatcaagactaagacctaatttacctttccatactctttttttttctcaacttcatctatataaaatcaggcttttaaacataaccactaatatttacctgaagataaccatgagtaaagtatacttttgcattaattttttgagcttatatgcaaacataataaatattattaaatatcaggaaagctaacatttcatacaagatagcttcagaccaaattcaaattgaatttgaataaattagaaatactgtgcatacataaccttcttgtgcaccatgagtatttggaaagttaatccttgtttttgtcgtgtctataaaggaagaacaaaacaaaataaaaacagagccctagagaaatgctgttactttttatttttacacccatcagatttaaggaaaagactttttagccattataatctagtggttggaaggaatgaagaagcttttttagtaataggtccagatatgagtgctaaaaataaagatgatagcatgttcttctgtcttccatagttattacaactatgagagcctcccaagtcatcttatcaactcaactcccttttttttgtcttaatgttgcacataagtttatacagagtggatgaccacactagcacagaagagaacaacatgtattaaagcaggtgattcctccccttggcgggagagctctctcagtgtgaacatgccttctgtgggcggaaatcaggaagccaccagctgttaatggagagtgccttgcttttatttcagacagcagagttttccaaagtttctctgctcctctaacagcattgctctttagtgtgtgttaacctgtggtttgaaagaaatgctcttgtacattaacaatgtaaatttaaatgattaaattacattttatcaatggc

SEQ ID NO: 15514 - DNA, 5665 bp, Homo sapiens
  misc_feature (178)..(178): n is a, c, g, or t
  misc_feature (1475)..(1475): n is a, c, g, or t
gtgtgtatatatatatatatgggtgggtgttttgttgcagctgctgatctttttctttgcagatggtacaaactctcccgagtcaatttcctgggcctatgtccccacctagctgactgaagttatcaacaggggtccagtttgtgcaggctgctagccctattggaagagtggggangaggtgggagaaagcaaccacaacgtgtgtgggcaacctcaattggcactcataaaatgttagaatgtcaactctctcccttggccactaaatctctcacagggtagtttttcttgcctaactcaggtttacaaatcaatgtgtatgccttgggggaccaatggcctctttcctcccaaataaaccactggctttctctttgtccccctaggttatagctgaggagcccactccaattagtttataggattcaaagcctctttttaaaaacatctctgagcttatgaggaaagacttcaagtttcccaaatctagtggaggacagggcaagggaggaaagataggtacaggagtccacaggaggccaggttttggcacccctttgtcaggaattcagcttccttactagggatgaagaaaataagtgtggggctttgtgtctatgctaccagaaggaggagaggatgacacttcctctctgtttcccagattagagaacagtgaacccaatgctgcctgttggctagaaaacaagtgttaacttgcttctgagagacccttttctctgtccctgcagatatgccctgcgtccaagcccaatatagcccttcccctccaggttccagttatgcggcgcagacatacagctcggaatacaccacggagatcatgaaccccgactacaccaagctgaccatggaccttggcagcactgagatcacggctacagccaccacgtccctgcccagcatcagtaccttcgtggagggctactcgagcaactacgaactcaagccttcctgcgtgtaccaaatgcagcggcccttgatcaaagtggaggaggggcgggcgcccagctaccatcaccatcaccaccaccaccaccaccaccaccaccatcaccagcagcagcatcagcagccatccattcctccagcctccagcccggaggacgaggtgctgcccagcacctccatgtacttcaagcagtccccaccgtccacccccaccacgccggccttccccccgcaggcgggggcgttatgggacgaggcactgccctcggcgcccggctgcatcgcacccggcccgctgctggacccgccgatgaaggcggtccccacggtggccggcgcgcgcttcccgctcttccacttcaagccctcgccgccgcatccccccgcgcccagcccggccggcggccaccacctcggctacgacccgacggccgctgccgcgctcagcctgccgctgggagccgcagccgccgcgggcagccaggccgccgcgcttgagngccacccgtacgggctgccgctggccaagagggcggccccgctggccttcccgcctctcggcctcacgccctcccctaccgcgtccagcctgctgggcgagagtcccagcctgccgtcgccgcccagcaggagctcgtcgtctggcgagggcacgtgtgccgtgtgcggggacaacgccgcctgccagcactacggcgtgcgaacctgcgagggctgcaagggctttttcaagagaacagtgcagaaaaatgcaaaatatgtttgcctggcaaataaaaactgcccagtagacaagagacgtcgaaaccgatgtcagtactgtcgatttcagaagtgtctcagtgttggaatggtaaaagaagttgtccgtacagatagtctgaaagggaggagaggtcgtctgccttccaaaccaaagagcccattacaacaggaaccttctcagccctctccaccttctcctccaatctgcatgatgaatgctcttgtccgagctttaacagactcaacacccagagatcttgattattccagatactgtcccactgaccaggctgctgcaggcacagatgctgagcatgtgcaacaattctacaacctcctgacagcctccattgatgtatccagaagctgggcagaaaagattccgggatttactgatctccccaaagaagatcagacattacttattgaatcagcctttttggagctgtttgtcctcagactttccatcaggtcaaacactgctgaagataagtttgtgttctgcaatggacttgtcctgcatcgacttcagtgccttcgtggatttggggagtggctcgactctattaaagacttttccttaaatttgcagagcctgaaccttgatatccaagccttagcctgcctgtcagcactgagcatgatcacagaaagacatgggttaaaagaaccaaagagagtcgaagagctatgcaacaagatcacaagcagtttaaaagaccaccagagtaagggacaggctctggagcccaccgagtccaaggtcctgggtgccctggtagaactgaggaagatctgcaccctgggcctccagcgcatcttctacctgaagctggaagacttggtgtctccaccttccatcattgacaagctcttcctggacaccctacctttctaatcaggagcagtggagcagtgagctgcctcctctcctagcacctgcttgctacgcagcaaagggataggtttggaaacctatcatttcctgtccttccttaagaggaaaagcagctcctgtagaaagcaaagactttcttttttttctggctcttttccttacaacctaaagccagaaaacttgcagagtattgtgttggggttgtgttttatatttaggcattgggggatggggtgggagggggttatagttcatgagggttttctaagaaattgctaacaaagcacttttggacaatgctatcccagcaggaaaaaaaaggataatataactgttttaaaactctttctggggaatccaattatagttgctttgtatttaaaaacaagaacagccaagggttgttcgccagggtaggatgtgtcttaaagattggtcccttgaaaatatgcttcctgtatcaaaggtacgtatgtggtgcaaacaaggcagaaacttccttttaatttccttcttcctttattttaacaaatggtgaaagatggaggattacctacaaatcagacatggcaaaacaataatggctgtttgcttccataaacaagtgcaattttttaaagtgctgtcttactaagtcttgtttattaactctcctttattctatatggaaataaaaaggaggcagtcatgttagcaaatgacacgttaatatccctagcagaggctgtgttcaccttccctgtcgatcccttctgaggtatggcccatccaagacttttaggccattcttgatggaaccagatccctgccctgactgtccagctatcctgaaagtggatcagattataaactggattacatgtaactgttttggttgtgttctatcaaccccaccagagttccctaaacttgcttcagttatagtaactgactggtatattcattcagaagcgccataagtcagttgagtatttgatccctagataagaacatgcaaatcagcaggaactggtcatacagggtaagcaccagggacaataaggatttttatagatataatttaatttttgttattggttaaggagacaattttggagagcaagcaaatcttctttttaaaaaatagtatgaatgtgaatactagaaaagatttaagaaatagtatgagtgtgagtactaggaaggattagtgggctgcgtttcaacattccgtgttcgtactcccttttgtatgtttctactgttaatgccatattactatgagataatttgttgcatagtgtccttatttgtataaacatttgtatgcacgttatattgtaatagctttgcctgtatttattgcaagaccaccagctcctggaagctgagttacagagtaattaaatggggtgttcacagtgacttggatacaccaattagaaattaaataagcaaatatatatatatatataaatatagcaggttacatatatatatttataatgtgtctttttattaaccatttgtacaataaatgtcacttcccatgccgttattttatggttcatttgcagtgacttttaaggcagtactgtttagcactttgatattaaaattttgcttatgttttgctaaattcgaataatgtttgaagatttttaggtctaaaagtctttatattatatactctgtatcaagtcaaaatatctttggccattttgctaagaaacaaactttgaatgtcaaactgatgtcacagtagtttttgttagctttaaatcatttttgctttagtctttttaaaggaaaataacaaaactatgctgtttatattgtcattaaattatacaatcaaacaaatgccaaatgaattgcctaattgctgcaaagtataacccagataggaaatcatatgtttttttccaagagtcattctaatatttgattatgttatgtgtgcttttatgaaagattgttatttttatatatcaagatgatagaacctggaatgttaggattttgaaatgttagacttggaaggggcctggtctgtcaactagtccaaccccttaaaattcatagaggagcaaactggggcccattgaagggtgaagagttactcaaggtcaaacagctggtaacagaatcaagactaagacctaatttacctttccatactctttttttttctcaacttcatctatataaaatcaggcttttaaacataaccactaatatttacctgaagataaccatgagtaaagtatacttttgcattaattttttgagcttatatgcaaacataataaatattattaaatatcaggaaagctaacatttcatacaagatagcttcagaccaaattcaaattgaatttgaataaattagaaatactgtgcatacataaccttcttgtgcaccatgagtatttggaaagttaatccttgtttttgtcgtgtctataaaggaagaacaaaacaaaataaaaacagagccctagagaaatgctgttactttttatttttacacccatcagatttaaggaaaagactttttagccattataatctagtggttggaaggaatgaagaagcttttttagtaataggtccagatatgagtgctaaaaataaagatgatagcatgttcttctgtcttccatagttattacaactatgagagcctcccaagtcatcttatcaactcaactcccttttttttgtcttaatgttgcacataagtttatacagagtggatgaccacactagcacagaagagaacaacatgtattaaagcaggtgattcctccccttggcgggagagctctctcagtgtgaacatgccttctgtgggcggaaatcaggaagccaccagctgttaatggagagtgccttgcttttatttcagacagcagagttttccaaagtttctctgctcctctaacagcattgctctttagtgtgtgttaacctgtggtttgaaagaaatgctcttgtacattaacaatgtaaatttaaatgattaaattacattttatcaatggc

SEQ ID NO: 15515 - DNA, 5124 bp, Homo sapiens
  misc_feature (934)..(934): n is a, c, g, or t
agtcaatatagccaacagagcagcagctacgggcagcagaagcccactgcggaagagggcagcccggcaagcccgggccctgagcctggacccttagcggtgccgggcagcactgccggcgcttcgcctcgccggacgtccgctcctcctacactctcagcctccgctggagagacccccagccccaccattcagcgcgcaagataccctccagatatgccctgcgtccaagcccaatatagcccttcccctccaggttccagttatgcggcgcagacatacagctcggaatacaccacggagatcatgaaccccgactacaccaagctgaccatggaccttggcagcactgagatcacggctacagccaccacgtccctgcccagcatcagtaccttcgtggagggctactcgagcaactacgaactcaagccttcctgcgtgtaccaaatgcagcggcccttgatcaaagtggaggaggggcgggcgcccagctaccatcaccatcaccaccaccaccaccaccaccaccaccatcaccagcagcagcatcagcagccatccattcctccagcctccagcccggaggacgaggtgctgcccagcacctccatgtacttcaagcagtccccaccgtccacccccaccacgccggccttccccccgcaggcgggggcgttatgggacgaggcactgccctcggcgcccggctgcatcgcacccggcccgctgctggacccgccgatgaaggcggtccccacggtggccggcgcgcgcttcccgctcttccacttcaagccctcgccgccgcatccccccgcgcccagcccggccggcggccaccacctcggctacgacccgacggccgctgccgcgctcagcctgccgctgggagccgcagccgccgcgggcagccaggccgccgcgcttgagngccacccgtacgggctgccgctggccaagagggcggccccgctggccttcccgcctctcggcctcacgccctcccctaccgcgtccagcctgctgggcgagagtcccagcctgccgtcgccgcccagcaggagctcgtcgtctggcgagggcacgtgtgccgtgtgcggggacaacgccgcctgccagcactacggcgtgcgaacctgcgagggctgcaagggctttttcaagagaacagtgcagaaaaatgcaaaatatgtttgcctggcaaataaaaactgcccagtagacaagagacgtcgaaaccgatgtcagtactgtcgatttcagaagtgtctcagtgttggaatggtaaaagaagttgtccgtacagatagtctgaaagggaggagaggtcgtctgccttccaaaccaaagagcccattacaacaggaaccttctcagccctctccaccttctcctccaatctgcatgatgaatgctcttgtccgagctttaacagactcaacacccagagatcttgattattccagatactgtcccactgaccaggctgctgcaggcacagatgctgagcatgtgcaacaattctacaacctcctgacagcctccattgatgtatccagaagctgggcagaaaagattccgggatttactgatctccccaaagaagatcagacattacttattgaatcagcctttttggagctgtttgtcctcagactttccatcaggtcaaacactgctgaagataagtttgtgttctgcaatggacttgtcctgcatcgacttcagtgccttcgtggatttggggagtggctcgactctattaaagacttttccttaaatttgcagagcctgaaccttgatatccaagccttagcctgcctgtcagcactgagcatgatcacagaaagacatgggttaaaagaaccaaagagagtcgaagagctatgcaacaagatcacaagcagtttaaaagaccaccagagtaagggacaggctctggagcccaccgagtccaaggtcctgggtgccctggtagaactgaggaagatctgcaccctgggcctccagcgcatcttctacctgaagctggaagacttggtgtctccaccttccatcattgacaagctcttcctggacaccctacctttctaatcaggagcagtggagcagtgagctgcctcctctcctagcacctgcttgctacgcagcaaagggataggtttggaaacctatcatttcctgtccttccttaagaggaaaagcagctcctgtagaaagcaaagactttcttttttttctggctcttttccttacaacctaaagccagaaaacttgcagagtattgtgttggggttgtgttttatatttaggcattgggggatggggtgggagggggttatagttcatgagggttttctaagaaattgctaacaaagcacttttggacaatgctatcccagcaggaaaaaaaaggataatataactgttttaaaactctttctggggaatccaattatagttgctttgtatttaaaaacaagaacagccaagggttgttcgccagggtaggatgtgtcttaaagattggtcccttgaaaatatgcttcctgtatcaaaggtacgtatgtggtgcaaacaaggcagaaacttccttttaatttccttcttcctttattttaacaaatggtgaaagatggaggattacctacaaatcagacatggcaaaacaataatggctgtttgcttccataaacaagtgcaattttttaaagtgctgtcttactaagtcttgtttattaactctcctttattctatatggaaataaaaaggaggcagtcatgttagcaaatgacacgttaatatccctagcagaggctgtgttcaccttccctgtcgatcccttctgaggtatggcccatccaagacttttaggccattcttgatggaaccagatccctgccctgactgtccagctatcctgaaagtggatcagattataaactggattacatgtaactgttttggttgtgttctatcaaccccaccagagttccctaaacttgcttcagttatagtaactgactggtatattcattcagaagcgccataagtcagttgagtatttgatccctagataagaacatgcaaatcagcaggaactggtcatacagggtaagcaccagggacaataaggatttttatagatataatttaatttttgttattggttaaggagacaattttggagagcaagcaaatcttctttttaaaaaatagtatgaatgtgaatactagaaaagatttaagaaatagtatgagtgtgagtactaggaaggattagtgggctgcgtttcaacattccgtgttcgtactcccttttgtatgtttctactgttaatgccatattactatgagataatttgttgcatagtgtccttatttgtataaacatttgtatgcacgttatattgtaatagctttgcctgtatttattgcaagaccaccagctcctggaagctgagttacagagtaattaaatggggtgttcacagtgacttggatacaccaattagaaattaaataagcaaatatatatatatatataaatatagcaggttacatatatatatttataatgtgtctttttattaaccatttgtacaataaatgtcacttcccatgccgttattttatggttcatttgcagtgacttttaaggcagtactgtttagcactttgatattaaaattttgcttatgttttgctaaattcgaataatgtttgaagatttttaggtctaaaagtctttatattatatactctgtatcaagtcaaaatatctttggccattttgctaagaaacaaactttgaatgtcaaactgatgtcacagtagtttttgttagctttaaatcatttttgctttagtctttttaaaggaaaataacaaaactatgctgtttatattgtcattaaattatacaatcaaacaaatgccaaatgaattgcctaattgctgcaaagtataacccagataggaaatcatatgtttttttccaagagtcattctaatatttgattatgttatgtgtgcttttatgaaagattgttatttttatatatcaagatgatagaacctggaatgttaggattttgaaatgttagacttggaaggggcctggtctgtcaactagtccaaccccttaaaattcatagaggagcaaactggggcccattgaagggtgaagagttactcaaggtcaaacagctggtaacagaatcaagactaagacctaatttacctttccatactctttttttttctcaacttcatctatataaaatcaggcttttaaacataaccactaatatttacctgaagataaccatgagtaaagtatacttttgcattaattttttgagcttatatgcaaacataataaatattattaaatatcaggaaagctaacatttcatacaagatagcttcagaccaaattcaaattgaatttgaataaattagaaatactgtgcatacataaccttcttgtgcaccatgagtatttggaaagttaatccttgtttttgtcgtgtctataaaggaagaacaaaacaaaataaaaacagagccctagagaaatgctgttactttttatttttacacccatcagatttaaggaaaagactttttagccattataatctagtggttggaaggaatgaagaagcttttttagtaataggtccagatatgagtgctaaaaataaagatgatagcatgttcttctgtcttccatagttattacaactatgagagcctcccaagtcatcttatcaactcaactcccttttttttgtcttaatgttgcacataagtttatacagagtggatgaccacactagcacagaagagaacaacatgtattaaagcaggtgattcctccccttggcgggagagctctctcagtgtgaacatgccttctgtgggcggaaatcaggaagccaccagctgttaatggagagtgccttgcttttatttcagacagcagagttttccaaagtttctctgctcctctaacagcattgctctttagtgtgtgttaacctgtggtttgaaagaaatgctcttgtacattaacaatgtaaatttaaatgattaaattacattttatcaatggc

SEQ ID NO: 15516 - DNA, 266 bp, Homo sapiens
cgggacagctctctagaaactcgctctaaagacggaaccgccacagcactcaagtacgtatgagattcgcccagttaataaggggacttgctaaaaaagttggcttgctgggaagcgtcgctcctgaaattgacaactttgagtgtggggttccctcccctgaccttgccgcccggctccggctttgctagcccagcggcccgtaggttctgatctgaaacttttcccctgtagtgggcccgcggggatctctggagctcgtggga

SEQ ID NO: 15517 - DNA, 4029 bp, Homo sapiens
  misc_feature (32)..(32): n is a, c, g, or t
  misc_feature (106)..(106): n is a, c, g, or t
  misc_feature (108)..(108): n is a, c, g, or t
  misc_feature (1471)..(1471): n is a, c, g, or t
  misc_feature (1492)..(1492): n is a, c, g, or t
ttttatacattgtatgatttaagatctttcanggcagacatttatacttggtaacaattgccaatttttttttctggtttttgttgtagtatttcaaaatacttcntngacattgatagactcctacactacccctgggagctaggtaggtggaattatcatccaggccttctgtagggactgctgccacaacagagtggttgttcctaagacaaaggtcaaaaaaaggggtgttaataaacagtcctcaggtttaagggacttttttaggattacatcttaaattccaacaaatcagatttaggagttactgaaagtgaaattgatccatccctcatccaaactttgcaatactttcctgttctgacatcatttagatagttagctgtattatcagattagaaaccattgtaccaggctgctgaaaggaaaaggaggcaaaaagctaaacatgggatgaattctgaaccttttaacctggctgaagtacgttggtccctgttatgcaaataccttcaatcctctgctaagttcagtggaaataattttcttgaatgacaggtttattcagcaaggattcagttggtgattaatccccctttgatctagggtatttcacttaactaccagttacctcgttctgacaaagtgcaactgagattagggagatcactagaacactaccagggtgtgcgtttattctctataaccttttaaagcaagggccaagaatgcaatttattttcagtatttgaagatgtaaagtcctgtctgctaagttagaaagtcaattgaataccaaatgaagtttatttcttacgtaatagaacaaacatttctttttgcttcgcctaacaatgatattaggaaacataggctttgaagaaagaagaaacaaagactacattctaagtattgcttctagttttgtttcatgcactagggtatacttaactggcccttgacataaccaaaaatcaaagcagtggctacaacttagactgagaaaatgcttctgttttattaagctgcatggtttcttctcacctttccccctaccaccaccaccaccattagaaaatgtcatactgtgtggtaaagaaatccagttgaggaaaatgtgttgcagtacacagttatccaccttaagactaatgatttcgaagctttgttaactatttcttttcttgaggcaaaggagcttcttgtgtttccattataagaataattgcattcattttcagaatgcttttttaaaaaaaaaagtgacagcattaccaaaatagccgagtaattaaattttttctgcctgcctttttctcagttatctgagtacctcttcttccataattttaaattttgaaatattatatggaattttgcacagtattttgagaaagaaaaggtaatgtttcatggtaggtttctcaatttgctgtttaaaactgtttcaatagcaatgtcagtcttnatcttgtaagatgtcaaatcnggatttattcctccagtatattttaagacctttaaaaaaaaagtatagtgatttgttacaaaatatgtttttaaagattagattttgattaatgatttagttatatacagcattttaatgcttagtaattactgttctagtagcattttgcaatacaagggatgtatttagattattatactttttttggctcagactttttgtgatctaatttataaattgaaacaatgactcaaagaagtgcatacctaacttacgtttgtgccaagccagcctcctctagtttcaatttaataactagtttcaaaatatattttgatagcaagttcctaaaccacagcagaattgcggatcaggaaaaatacaagataacggcattctataaagatagagggcaggttcccatggctatgttgctaagaaactagtgtttttaatcattacactccgtgcagtcatatttaatcaataaaacaggatatattttgaaattcaccatcacagaatatatatatatatacacacaacatatatatacaagtatatgaatttacgtaaatgtgtacaacactagtgtgtctgacttggtgggtttccctgtgaaacatgtcagtatcatgtaagatgaagaatattttaagggcaaatattcaaatatctttcctccaaacacagtattagttaatagtaatgaaatgattcattaaactgaaaattgcaaaggaactcatgagttcctttgtgattgaaacaaagtgattaaaactcttatgacctgaaggctttccaactagcctccaactgtccgcaccagctgtttcatggatataacattagtgtttgtgtatagcctggaacaatacaaggctgtatctgtatcactagcttcttgccttataagcaggatactgcaaggtctggttgatttctctaatgccctagctaatctgcctaattgacatcagtgtcatgttaatgtatgatgcacaagcatttacagatggacaaatgctctacactaaaaaccacctgctgaattttttttccagtaggatgtgaaattttgcacttctaatctgttgaacatttaaagtcaaaactacatgtttcctttaaatggcctctttaaatgatattttatgtttataaattttgttatgaaaaatttaaaaattagttattcctcttaaatttttactttttccttcaaaggacttgggtgccctctgcaggttataaagagataattagtgactatatctattttaaaaccctgtgatttttctctttcatacacatagcctgcttacacccaatttcaaagaaagtgtgagctaatttatttatattaactcttattaatttgccagtggttgaagttggagtttcttttctccactggttttataggtgtgtttagtgtgaagaatgtgataccattgaacttccagactacttagctggggctctttaaatgttggaactatagtaacacacattccctcacagaaaggagattgggaaaatagctattttgaaagttattgcagatgtagggaatagcttgtttcccattatgtttctagaatattacacatttggagtaagccttgctttttcaacatgcatcatgtaaaattacatgaaagaaaataatttgaaaattacacaagatttctctttcttgatcttgttgatgatgattgtgttctagctcaaaaaacagaccttcttagaatttcttattttttaaaaaagtgagtactcaacagataatactttggtactgcccgttgcagacatgggcctactaaactagaaagagcatttgaagagcaaaaggcaaaggttccatcaccatcctgtggaaatacgtgagttgttcatttcagtacacccatagtttctcaacaggtgtagcagatttgtttctaaaggacataggagtgcattttttatatgaaaccagaactggagtggtaatggcacttctgattcaattaacttacttggtgaagctgccagggaaactaaatatgatgagaagaagaggaatgactggatcaaattaatagaaatagatctttttgcaagcaacataatgattctgatcatcaaccttgaaaagtaaattagaacaagcaaattgctgttgaaaaattctttcagcactctgctgttgctactcagctagtcatagctcagccagagggaaggaaaaaatgcactcggttttgcattaacaaaggaaacattattaaagtgaatgtttacattgtgtttattgaagtgttgaaagaatatttgttgcatcttcaagcaacctgctgctctccagactgttacagtgcatgagtgataataaaaatgagtcagtcacttgtacattttagaaaataaataacttttaacatagtatttctcaactatgttacttcaaaatgtttaagtgccaaacttaatgttaccttctctgctaaagatttttgtctctaggaaatatattccattaaaaaaaaaaagaaagaaactcattt

SEQ ID NO: 15518 - DNA, 528 bp, Homo sapiens
ttcttctcctcatccccctcctccttcttccttcctcctccctcctttttccttcttcttcttcttttttttttttaaataaccataacaaagcccaaaatgtcagcctccaaatgtcctctgttcccatctctggtctggggaagatcacagtccttatttgaagaggctggagcagtggtccttccagtgtctgttcaggatgtgtagggggtctgatatagtttggagatatgtcccctccaaattgcatgttgaaatttggtccccagtgttggaggtagggcctaatgggaggtgtttgggtccttggggtggatccatcatgaatggcttgatactgtccttgtggttatgagtgagttcttgctctattagtccctggagaactgatagttaaaaagaggctggtatctccctcctcctcttgctcctttgtcttgccatgtgtcaggccctccttcgccttctgctaggagtgaaagcagcccaagaccctcaccagatacagatgctgctgccatgctt

SEQ ID NO: 15519 - DNA, 252 bp, Homo sapiens
  misc_feature (207)..(207): n is a, c, g, or t
tccttcacctcagccactcaagtagctgggaccactggcacaccaccatgcctggctaatttttgtattattggtagagatgggggttcaccatgttacctgggctggtcttgaactctgggctcaagcaatctgcctgcctcggcctctcaaggtgttgggataacaggcgtcaagccaccgtgcccaaatttgtcttttagagcngtgctggagcatcctctcctaggctgggaggttgctaatgtaaat

SEQ ID NO: 15520 - DNA, 399 bp, Homo sapiens
acaaaaatgataaataatgctttataaaggtaaaacacaagtcaaattatatgaaagccatctataactgccaaatttcttgttgttttctcaaattttggaaaaaatacaaaaaataatgttaagtataaagtaaaacaaaatgtcaaagtgtcaaattaaaaattattttatgacatgcaaatatagagtaacttgagatagattgtttaattcataaatagaagaaacaatagtgtggtttaaagagtatgtgaggaacagagattttatatagtcagttgaaaaaattatactgaaattattttgctaagttagactcctatagggcagtaaaaccatattttttatagttatcttttctatagaacagaaatcatctgcatctctacctttaaa

SEQ ID NO: 15521 - DNA, 257 bp, Homo sapiens
ctgagcgcttgggctgaggtgagggatggctcgtttctgctgctgcggacatgcgggctgagcagctgcggactgtgtccgttttcacttagaaacaatgtactggccatagaccgcatactgtagctcacctgtctccctcggcctgtgagttaagtattattttactgatgaggaaataggcttagatgggctgaggagcctgactggctgagtccccgggctgtctgccccacgccgtgtccagtggtttcatc

SEQ ID NO: 15522 - DNA, 530 bp, Homo sapiens
atgtgcaatgggcataacactgttaatgtaaagaaaatggcttttccattccctaaatttagggttaagcttagaaatccatctcctttcctactatttttaactcttctccccatgcaatgatagaaacactgcctgtgaaaaagtggtgctaatgctagagatttttgtagctgtcatgacctagtctaggaagcaaagttaaaaaaaaaaagtttttactgaaaatatgtaatctcttgctggacacaggatatttgattttatgtccctgacatgtgttcttccaatgttagtactaaaaaaaacctgtaaaatctaggccaggtgtggtggctcactcctgtaatctcagcactttgggaggctgaggcggttgaattcctgaccatgtgatccgcccaccttgggttctcaaagtgctgagattacaggcgttgagccactgcacccggcctaaactttgccagttctatagtaccaaaagagtacctttaaaatacaaatcatgacactctaagagcttagag

SEQ ID NO: 15523 - DNA, 383 bp, Homo sapiens
agattcagagtctaggatgcatctctaggttgttaagaccccaatcacacatatatgtttttcttctcctaccccctgatatttaataaaaataaacatattattaaggagaaacctgtttaaaattggtgtcattggtgagaggtagatagggaaagaagcaactactgatatttaataaaaataaacatgttatcacacaccgggacctgtcggggtgggggacaaggggagggagagcattaggacaaatatctaatgcatgcggagcttaaaacctagatgatgggttgataggtgcagcagaccaccatgacacatgtatacctatgtaacaaacctgcacatcccgcacatgtatcctggaacttaaagtaaattta

SEQ ID NO: 15524 - DNA, 496 bp, Homo sapiens
ccttttatttaaatcaggcagtgtagtaattgctcaagaatacagtcatgaaaagacttacttcccatgtctttgtggagcctatggtagggtagttaagtagataaaaacatcttaggatgtggagatgttattgcaaggaattgtttagtaaatagtttcaaatatggctgaaaataagagattaaaattaaagttaattgagttcaataactcaaatagtttattgaggcattactatgggttttgaggcagttgttttagggagttatggcaacagaagctatattagtacatcagtaagaggaaagaaggacatcaatatttaatgtacagtcccctccgtatatgcaggggattggttacaaatccatctataccagaatccatgcatactcaagtcctctggaatccacatataggaaaactcagtcctgactatacatgggttcctcatccttcaaatactgtttttaatccacatttggttggtggc

SEQ ID NO: 15525 - DNA, 447 bp, Homo sapiens
gctatcatattcttagaaaattataggttgaaacagtcactgaattgccaagagacggatttgcttgtctgtctggtgcccagctccaactgggcttacatggctagggaaaagaagggaaatttcacgtagtctaggattttattttagtcagataaatactggatggagtatttagtcagataaatacagtggatggagatacattggaccaccccaccaaatctccgttttaagtgtaagttttctaagttttgtacacttgtcattccagagggtccagatatttcatagatgaagcccaggtgggctttgctttgcactgaaactagcaagaaaggacacaaaagactgcagagaatgttggggcagattgctggctgcgtatgccaggtcccttgaggagcaagaacatccagtgccaaataggacactagtttggtcttt

SEQ ID NO: 15526 - DNA, 177 bp, Homo sapiens
cctggaaatactgtgttgctattcccaaggttagtttcctatataattgacactaattcaggcccaatcttctccggaatagtctaactgtcctctcgatatgttcaaatacatcaggagttctgcagttttcatccccttggtgatctctctcctggagcatcctgactgtctcca

SEQ ID NO: 15527 - DNA, 2070 bp, Homo sapiens
  misc_feature (441)..(441): n is a, c, g, or t
  misc_feature (1309)..(1309): n is a, c, g, or t
  misc_feature (1815)..(1815): n is a, c, g, or t
  misc_feature (1973)..(1973): n is a, c, g, or t
cctcccactccagtgcagccagcattgtcctggggccaccttggcaccacaggtttcctccctggcaaacctgcatgacggccttgcgtgccctcccccagggccaaggcgctgttgctgaactgaagtggcaacctacccggtcagagctttaagctgcagctctgatgccccagggacctctcagacccccctgcccagagcaggcagcccggtaagccctcctcctcttcccctgcagcctcagggctggagccacagctgggagggctcccagatcctgaccatatcctcccagaggctgagccaggcctgggcactgtcccctcaaatgtgagaatactgggcagggggaggggagaaaggagggaatggagggctgagcctggaggcatgaaaggggcaacctaggcagcggtatgggggagtgctcagagcttngagtcctgtggaaggcagagaactgccccagcccctgcctctcatcccccaccctctgtgtccctggccgagaggttcctggaggacatttttccagcaaaagagggagggtggtgtctgggcctagatccttggatgggcttttctctgcctgcttgtggggtgcctagggcgagtgggcttttggagacaatttctggcctaacctgacttggacagcagcccccagaggcacagctctcccctcaggcatgggggcatgattccacctcgctagcccacatgtgttcttcacggagggctgctggcccgtctccctggggttaccctgagcagcagagctgtgtttgttgagactccatggggtggagggattgcgatgttgtcctctcagttcccggggctgatgtggaagctcaagggcttgccctggattcttcagggtagccctgccatccctagtgagtcagtgagttgggaggttgggggctggagaatcaggtagggaggacacagctagacctcaggccctgatgggaacgtactaggctccaagtgggacctgccaggagacaagaattgatgacagccacacctttggagtctcaagccctctgccacccatgcggtggcctagttcaaatgacaggaacacaaggtccagctggcccaatgggcaggtagagggctgcagccagggctggaactggccttgcactgcctctgggcccttctctacccacccagtagtattgttcaagcccaggagggaaaaaggccagctcagggttaatgttacctcagcaagtagctgagtggcactgagcctcctggtagccactgtaaagaaggacacagaatggtttgngggcattcgctaggaggaaggaagcagatggatactctatggagacagaatgtcctctgtgtttgctctacaggaacgggttgtcaaccttctgcagggccaggaattgtcatgaggctgtagtaggcagcagagcttggcggggtgaggcgagatcacaggtataggctcagggcctggattcaaatcccctgggctgccacttgttggatgtgtaaccataggcagagtaaggacctgccatagcaaattaccacaaactcagtggcttaaagcaacagaatagttctggaggctaaaagtctgaaatccaagtataggccaagccacactccctttgaggactccaggggaagatccttccttgtctcttcagcttctggtggctcctggcaatccttggccttccttggctgctgctgcatcactccagtctctgaaaccatctaccctatgtgtctgtgtggccttcacatggcattccttatttttgcagtggggtctcnctatgttgcccaggctggtcttgaactcctgggtccaagcagtcctcctgcttcagcctcccaagtagctgggattatgagtgagtgccaccatgcccggctcacatggcctccttgtaataacgctagtgcctgggtgcggtggctcacgcctgtantcccagcacttttggaggctgcggtggacggaccatgaggtcaggaaattgaggccatcctgtccaacatggtgaaaccctgtctctactaaaatac

SEQ ID NO: 15528 - DNA, 310 bp, Homo sapiens
acttccttctatatgaagcatatatttgttctagaggcattacaggtccaactccaaacatgtaaagcagaatgcaaaggtgaatgcaaattgtggtcataagccaacttgttttgccatgtggaaaatatggaaatagttgctatgcattgcacaaaacatctgttgaaataaggctttcaatttgaatgcttcaagatagactgtttctaaaacccaagattgcctggtgagcaagcagatgggcaatttagacaatcttatactagctcatcatcgcttctgaaacacggcttcattggcaattgta

SEQ ID NO: 15529 - DNA, 451 bp, Homo sapiens
ctttatccggccctacccacatcctgctgattggtccatttcacagagagctgactggtccactttacagagagctgattgggccgtttttcagagagctgattgatccgttttgacagagtgctgattggtgcatttacaaacctttagctagacacagagtgctgattggtgcatttacaatcctgtagctagacacaaaagttctccaagtccccatcagattagctagacacagaacattgattggtacgtttacaaccctttagctagtgagaaaagtctccaggtccccacccaacccagaagcccagtggggttcacttctcaatggtactccctgcaggactttccggcaccggcagcccagagggagctcgtcccccatcaagcccagcaggcgccggctggccacacctaggcccaccaagcctgcacccacccagaaccc

SEQ ID NO: 15530 - DNA, 208 bp, Homo sapiens
ccagttctggccgtaccactttctagctgtggactcaagggagttgtttaccttctgtcagtccatgtttattcatctgcacaatcaatgcgtagaaccatagcccttacctcacagcgtttccgggaggatcagatgacacaatccgaggaaatgaaccattattgctacttactgtcactgctttcttctgaggccaacgtttggg

SEQ ID NO: 15531 - DNA, 464 bp, Homo sapiens
aattagctgagtgtgggggtgtatgcctatagtctctgctattcaggaggctgaggtgggaggattgattgcttgagcctgggagctggagggtacagtgagccaagatacaccactgcactccaatcttggtgatggagcaagaccctgtctcaaaaaaaaaaaaaaaaaacaccaaaaagcaaagactaatcccccctaatatgtaaagagcatccatgaattgataagaaaaagaccaacaacagaaagatacagaatttgaatgtatagctcatataaagcatgtaggaatggcttgtaaacatatgtaaaatgttctactcactgcttattcatttaataaatatttaactccctgtatatgctcttggaactatagaatatagaactgaccaacagggacaaaaatctctgttcttgtggaacttagcagggaaatgcaaattaaagctatgttgttt

SEQ ID NO: 15532 - DNA, 412 bp, Homo sapiens
tttcaagaaggagaggagacagccagctgtgccaagggctgctgagacttggacaaggatgcagagagcagagtgaccattaggtctgatgacatggacagggttggtgatcttgataagataagatgtcagttcagtgcagtggtggggacagaagccctgctggagtggaggggagagagaatttggggggaagacagaaggaaagggaattcaggcaagtgtgtgtgtgtgtgtgtgtgtgtgtgtgtgtgtaactgacacaaaggccaggtgcgatggctcacgtgtgtaatcccagcactttgggaggccgaagtgggtggatcacttgaggtcaggagttcgagaccagcctggccaatatggtgaaaccccgtctctactaaaaatacagaaattagacaggtgc

SEQ ID NO: 15533 - DNA, 362 bp, Homo sapiens
tgattggctctagcaactaaaagtccaggggaaggactggctccagttacacttggattcagcactcaaaacactgcattggcactcacactttttctttcactattgtgttgttctccatgctggctttatgttgagccactacatgttggccctagctttagaaattctcaggttcattcaagtttagcaaaagaagtattagaatcctttcttgcatcctcaaaaatcctcagattcactcgaattggaccaatttaggtcacatgcccggccctgaagcaatggctatggcttgtgatgtggtgattggtttcatagatcaaactaaaaagtagaggttgttgccagatccacagaca

SEQ ID NO: 15534 - DNA, 943 bp, Homo sapiens
ggagatctgagtgactaagccgctatcattgttgtgactagagctctgttagttgaaggggagtgagagggaatttgcaatactagatttttacccatattagagttgtgactagagtccttgagtttacctcctctcttccaaccttcaaatttattggaataacagaagaaattttctagagtaaacaatgtaaaatagaagatttttattttcagcagggtggtggactatatctattctccaggtgcagtgcaactaaaaatgttaagagaacataagcatgtggttgagctggtggcaaagtaaaacagttccttggaggccagacatgataagaaacaaatccaaagcaaaagaaaacattttaaaaaacagaaatcaatgaaattgaaaacaggaagtcaacacaaccaaaagctatttctttgaaaagataataaaattaataagcttccagacaggctaacttaaaaaaaaaacaacaacaaacaaaaacaaacaaacaaaaaaaacgagagaaggcacagattgctaataccaaaaatgatagaggggacagtactgtagattccatgttcatagataggaagactcaatattgttaagatgtctgttcttcccaacttgatctatagatacaatggaaatcctattcaaaatcctaacaagttattttgtgagtaccaactaactttctcccatgaattatgaactttcttaatggcatccagaaggctaaacttcctaggttttcatagctagagaggagccagggaggagacatcaaggcctggcttcaaagcttcaaaggacaggctgactctcttgttagagtttaatggagctggtgactttgaaggcaatgctcatttgccattctgtaaatcctagggcccttaagaattatgctaaatctcccctgcctgtactctataaatgg

SEQ ID NO: 15535 - DNA, 310 bp, Homo sapiens
tgggtgattctggtcataataaactattttcaaactaggaaaaagtatccaaatgctagagcacataatgagttcagcttggtcagttttgagacagataagcataaaaccctactagaaaaaaataatagtcaaacctaaagctttaaaaaatgtgagtcacatcacttttctccaggaaaggcagaacgtgctcagggtggaatttaatcaaaaatgtacccagaacaatttcccacaaagagctgtaatactttgcagcaaggggcattaataaactctaatttttaccgaaagtcaagagacacac

SEQ ID NO: 15536 - DNA, 401 bp, Homo sapiens
gtcttaccctttaatggagttttctccaggattctgtgcttggcctgctgttttctccctatctgctggcctgtccttatgggtaaggagagatggatttagctatggcctctagcacatgaatcctaaatctttagatctgaactgtctctaaaactggaaagttacggtctgaatacttattggacatcttcaattgaatgtgccaggcactgcaaaacaaaaatgttcaagaccaaactaataatctctcctctgaccagggtagctctttttgctgacttcttatttcccaccatgacactagcattctccaaatgcttaggcttgatgttttgatcatttttaaaatttttactctctctacttatattctatcagttgctaagtcctgtaacttc

SEQ ID NO: 15537 - DNA, 630 bp, Homo sapiens
tcacacattatttacagcaccataacactagacccagcctaactgtcctgcaacaggggatgggtaaaagggatgatggcgctggaggttagccagtgatactatgcagccattagcaagcatgcttctgaagaaaatgcaataatttgggaaagtactcacaacataaaatagagtaaaaaaaaaaaagtaggacacacattgcatatatagtcagtcttatttggcagaaggaatctatacttatctatacttaggaagaaggactaggaaggaaaactgggaaaacgtacggtggctctgtctggcgtcttgaaggtcatggcctatccaattgggacttttgacaatgtctggagacgtttggattgtcacgcctggggaggggggtgctactggcaactagtaggtgacacccagggatgacgctgagtatctcgcaaggcatgggacaccacagcaaagaagtgctcaacttgaaaacatgaatcgtgctgaagttgagaacctttggtctaagatcatgggtcattttattttctttacacttgttgttatttttcaaatttcctaaaatgaacacattttacttttatagaaggcagatacaattttttacttaaaaaaaaa

SEQ ID NO: 15538 - DNA, 343 bp, Homo sapiens
agggtctcactctgtcacccaggctggagtgtagtggcacaatctcggctcactgcaacctccgcctcccgggttcaagcgattctcctgcctcccaagtagctggtattacaggtgcccatcaccacacctggctaatttttgtatttttcatagagacagggtttcactatgttggctcagctggtctctgaacttctgatctcaagtgatccgcccgcctcggcctcccaaagtgctgggaatacaggtgtgagccagcgcacctggctgacatccacaacttaaggctagaaatgtaaaatgttggttcgcagtgtaacaagcacattccaaagaaaac

SEQ ID NO: 15539 - DNA, 343 bp, Homo sapiens
gaatatgtcatttgcatattaaattacttattgcaacacagttcaccctctcatgagcatttatattctcaatacattcttgattttttaaaaacattttttctgttaactttgtttccctaaaaatgtgtaagagaaaggaaagtagccctaattagcgatttgtgtatccgtggttttttgaaaatgaaattgacaaaaagagacaggatgctcacttttattgctttttgcaggagggttcttaccctgagctggcctggccactttaggaattcacaggcacgctctgaggggcctgtgagtagggaggctctcttacccagaggggagaggaaggcat

SEQ ID NO: 15540 - DNA, 270 bp, Homo sapiens
gctgtggcaccccagtttacaagacgcaggcactgtggggtactggtaagagacagtaactatgacaacatgactgtctttctgggaactcgtgagttttgactattcttgatagatttggtttggaaggtgaaatggttttaaagtactgaattgaaattatgtaaacttatgcatccaatttttaaattaaaataaatgtaaagaaaaactaaaaagatgcataaatattgtagatgttgggactgatcaaatcatatttgattgtcc

SEQ ID NO: 15541 - DNA, 993 bp, Homo sapiens
aaacttcagtctttaagagtctgttgtgcagcggagtaggctttaaagaaacagtgcagcagtggtttcagtaataatcctcacttccatcagaatctgcctgggagggagcttttacaatgtacaagtggtgagaatgtttccaaggtgctaattatggacatagattctttgtgtgggttgatagctaccaatgggacagtgtagaaacaagtttccacctttctaaaaccagtttggtacatatctttttaaagatcgctttataaaaacaaaaagataacattaacatttattgaaacaagtcactctgagaagaccaggaacaaagttctcttggcagatctgggtgatgtgtgtgtctcacatttttatcatgtttttatgactgttttatcttgcaggtaagctttacagctttcagaggagttgtagtacactacagaaatatgtcttctttccaggttcaaaaagcaaaatctgattggcattgcattgaattattaattaaataaatttattaattggcattgcattgaatttataggttaattttgaaagaatgtggcgtctttgaaatgctgattttttttcactttaaaaaaatgacttttttttttaccactgatagtatttcatatggtccctcagtaatatttcttagagatggttaaaaataggttctgagtcatcttaagcatatttctaggaatttgttttattgctgtcatgaatataatggttttgctccagttcatttcatagtttaacatatcaaatattaggtatcttaaaaatcacaaatgctatttcaccctgcaggttagcagtattaaaatagaatcatcaaatcccccatcagtgggggcgggggggggggttgtagaaacagtctgatatggtttggctctgttccccacccaaatcccatctcaattttaatccccatgtgtcagaggagggccttggtgggagatgactggatcacgaggg

SEQ ID NO: 15542 - DNA, 271 bp, Homo sapiens
tagagacgggtctcactatattgcccaggctggtcccaaactcttggcctcccaaagcactgggattacaagtgtgagccaccgtgccctgcctcttcttcttttgagctagtcggtttctgaggttgccttctgctctattgttgctgtggttttcaggatgtagttagggccctacaggaaagtgcctggtggcccttagggcctggcttcacctccctctgctcctccaagaccttggccccatggatatttgtcctgggtctcacca

SEQ ID NO: 15543 - DNA, 516 bp, Homo sapiens
ttttgatgggaggaaacaaaaagatctgatcactctctctcattcatgcggaatcactgactgttgaatgaccaaagcagtcaaagccaaaatattcaccttgaagcttcaataaaccagattgagtatccataataactaatttaagtaattttatccccattctctgctaaatcatatttcataatataaaatgtaaccacttccctctatccaaagcttttggtcagactctccattgagttagagaaattggactttggcaaaaagcaacataaagattattgttgttcctagaaccattgttgccatggacccctcatttgctcctcaactttttcaaccaaattatagcgggaaagattcctgatgaagccaagactgcaaacaggaagaatacctagctagtaaactatgcaaaatcacaacaaagattcatttataattccatgttacagtgtttgatagtcctaagtatttaatattggtatattatgtcacagccatgaactgtca

SEQ ID NO: 15544 - DNA, 481 bp, Homo sapiens
gggattagctttgcattatctaacccatttattttaaatctgccaggaaatcctctaactttccttcctttttgtttcagtaagtatcaggcagcttcaccatacctgagtccttttgtcttgaagctgccacagaaaaatcttacagcaatcattgctgattagaaactgtttcagacaatcagcatgggtgttatttaccaaattccccccagagtcctaggcctcttctccagaaatatctgatgatgaagtgaggggagggcaacggtgctacaaaacacggaacagaggtaaagagaaggcactactttcttgccatacttgtaaatgattgctttgttcaaacataaataatcttaagtccaacaccaaatacctgttactcctacatcaatctcattagtggtttaagacacagtactagaattttcattttttaaaatcccttggcccttaaaaaaatttacagaacacaaag

SEQ ID NO: 15545 - DNA, 521 bp, Homo sapiens
ggtattttgtggatgtttgcttctcctagtttccttctagaattaaccccagctgtgaagccagctttcttctcaggtcctcgttgtgtaactttaagtggcgtggacgcagagaatgaagcagatgtgagtaagaatgaagggctcaggcatcctcaatatccccttttgtgggagagagggagagagcagagtggttttgctttaccaaaatttggggctcctgtttctttcctcagacggctcccaaagacattccctttattttcctgggctgtcctccctccctgggagggcagaaggaggagggcaatgcttcatgctgtagaaaggacacatttgttcttccttgagcagtccctgggaaccttctggagtgaatgcctttgagcatcctgagtggcacatgcaactgttggcacggccaagggggagagttggagacaggcatgaagcatttgaatggtaggaatcttaaaatctgtctctgggggttttatgtatgaaataagtatgaacgc

SEQ ID NO: 15546 - DNA, 437 bp, Homo sapiens
acatactcgggctgtctcaatgttttcctacggtatttaagtgccagtttatggaggttttaaagaaaagattttctcagacgagaagagcttataatatacttcctgcaaacattctagaaaatgtaggtccttatcagtcaaccttcagaatggggaaaccacaaaataagtgaaattttgttaacctatctaagtaaacattaaagagttgcttttagaaatgacacaatgtaaagagaccatcagggtctaaaacctcattagccagaactggaaaatgagcttttaaatacaggtaaaaagtaaataagcaatttatcctctactttgttagagtacagaaatagtatttcaaagcaaccactagcagaataaaagactatacttaactttgaaatcaccaggaaaaaggctaggaaaacagcccacaaagc

SEQ ID NO: 15547 - DNA, 439 bp, Homo sapiens
attcattttaacaatcatgctgtttctgcttcactggacaggtgaaattaagttaaactgagtctcaaggactgtcttgaagaataaaataagtcatagcagtactatagctcaaataatgtcataaatagagagaaccagttttatctgccttgtctccatgacaggaagttttaagactgtttgcatcctatatgagcctcaatttttttaaccaactggtaaagctgccttttcctccacttccatatatgcttttatagaaagatgtatattttcttaagagatcaaatcagggatgaattggactttacaaatattgtaacagtaaatcgcaatcataatttgattcaaggatctttcaaaattagagaataccagttattgatagctgctatctagatagcaacaatataccattacaatgtttctactactt

SEQ ID NO: 15548 - DNA, 383 bp, Homo sapiens
aaacattagccaggcatgatggtgggtgcatgtaatcccagttactcaggaggctgaggcaggagagttgcttgaacccgggaggcggaggttgcagtgagccaagagtgcgccattgcactccagcctgggcaacaagagcgagattctgtctcaaaaaaaaaaaaagagttgtcaaattgccaccccaatgctgtggttctctaacctgtgtaacaggatcacctggagggaccctacccgagaccttccgattcagtcctgggggaaccctaccccagatcttccgattcagtcctggggggaccctaccccagatcttccgattcagtcctgggggaaccccaccccagaccttccgattcagtcctggagggacccta

SEQ ID NO: 15549 - DNA, 308 bp, Homo sapiens
ggtgccatggtgtaataaacaccagctttagagacagacagaccaagctctgagttccagctcagcctcttagtctccatttattcacttgcaaaagggaaatggtaacagtcttgtttcatagggttgtgataaaaattaaataatcagctattaagacttatttcttgagcacctatcatgtaccacaaactgtggaaaacaagatgagcagaaacagagggagctaaatccagtggggtaaacatcaccagatggacataaactcactggatagcagtctgtgatgatggagttgtggcatggag

SEQ ID NO: 15550 - DNA, 1327 bp, Homo sapiens
aatcgaagaagccccggaagtttcgaactaccaccggcgtgcgttcgcaggtagatcgcggtgccagttgccatggagccggccgggccctgtggcttctgcccggcgggggaggtccagccagcgcgttacacctgccctcgctgtaatgcgccctactgctcgctgcgctgctaccggacgcatggcacctgcgcagaaaacttctaccgtgaccaggtgctgggagagctccgcggttgcagcgctcctcccagccgcctagcaagcgccctacgccggctgcgtcagcaacgcgagaccgaggacgagcctggggaagcaggcctcagctccggcccggcgcccggcggcctatcgggactctgggagcggctggcgccgggcgaaaaagctgccttcgagcggctgctgagccgcggtgaggccgggcggctgctgcctccatggcggccgtggtggtggaaccgcggagccggaccgcagcttctggaggagctggataatgccccgggtagtgacgccgcggagctggagctcgcccctgcgaggaccccgccggattctgtgaaagatgcctccgccgcggagcccgcggccgccgagcgggttcttggagatgtcccgggggcctgcacgcccgtcgtacccacccgcatccccgcgatagtcagcctgagccgcggcccagtctcgccgctcgtgcgcttccagctgcccaatgtgctgttcgcctacgcgcatactctcgccctgtatcacggcggtgacgacgcgctgctctctgacttctgtgccacactgctcggcgtttccggagccctgggtgcccagcaagtcttcgcctctgcggaagaagccctgcaggcggcagcccacgtgctggaagcaggcgagcacccgccggggcccctgggcacacgaggggctatgcacgaggtcgcccgcatcctgctgggcgagggcccgaccaaccagaaaggctacacgctggcagcactgggggacctggcacagaccctgggccgtgcccggaaacaggccgtggctagagaagagcgagatcatctttaccgggcccggaaaaagtgccagttcctcctggcctggaccaacgaaaatgaggcggccctcacacccctggctctagactgcgccagggctcaccaagcccatgctgtggtagccgaggaggtggccgccctcactggggagctggagcggctttggggaggccccgtgccacctgccccaagaactctcattgaggagctccctagctgaacgggttaccctggtcattaataaagctgtgactggtcagccc

SEQ ID NO: 15551 - DNA, 1187 bp, Homo sapiens
  misc_feature (79)..(79): n is a, c, g, or t
  misc_feature (88)..(88): n is a, c, g, or t
  misc_feature (107)..(109): n is a, c, g, or t
  misc_feature (112)..(112): n is a, c, g, or t
catggcacctgcgcagaaaacttctcccgtaccaggtgtggagagggctcctttccccccccggccccggggtttttgncaagggcgngctctttcccccttccttnnnccnccagcccgcctagcaagcgccctacgccggctgcgtcagcaacgcgagaccgaggacgagcctggggaagcaggcctcagctccggcccggcgcccggcggcctatcgggactctgggagcggctggcgccgggcgaaaaagctgccttcgagcggctgctgagccgcggtgaggccgggcggctgctgcctccatggcggccgtggtggtggaaccgcggagccggaccgcagcttctggaggagctggataatgccccgggtagtgacgccgcggagctggagctcgcccctgcgaggaccccgccggattctgtgaaagatgcctccgccgcggagcccgcggccgccgagcgggttcttggagatgtcccgggggcctgcacgcccgtcgtacccacccgcatccccgcgatagtcagcctgagccgcggcccagtctcgccgctcgtgcgcttccagctgcccaatgtgctgttcgcctacgcgcatactctcgccctgtatcacggcggtgacgacgcgctgctctctgacttctgtgccacactgctcggcgtttccggagccctgggtgcccagcaagtcttcgcctctgcggaagaagccctgcaggcggcagcccacgtgctggaagcaggcgagcacccgccggggcccctgggcacacgaggggctatgcacgaggtcgcccgcatcctgctgggcgagggcccgaccaaccagaaaggctacacgctggcagcactgggggacctggcacagaccctgggccgtgcccggaaacaggccgtggctagagaagagcgagatcatctttaccgggcccggaaaaagtgccagttcctcctggcctggaccaacgaaaatgaggcggccctcacacccctggctctagactgcgccagggctcaccaagcccatgctgtggtagccgaggaggtggccgccctcactggggagctggagcggctttggggaggccccgtgccacctgccccaagaactctcattgaggagctccctagctgaacgggttaccctggtcattaataaagctgtgactggtcagccc

SEQ ID NO: 15552 - DNA, 1012 bp, Homo sapiens
tcccacatcaagtggagttagaaggaaggtagaggggctctccggacatggacagtgcggctggcgccgggcgaaaaagctgccttcgagcggctgctgagccgcggtgaggccgggcggctgctgcctccatggcggccgtggtggtggaaccgcggagccggaccgcagcttctggaggagctggataatgccccgggtagtgacgccgcggagctggagctcgcccctgcgaggaccccgccggattctgtgaaagatgcctccgccgcggagcccgcggccgccgagcgggttcttggagatgtcccgggggcctgcacgcccgtcgtacccacccgcatccccgcgatagtcagcctgagccgcggcccagtctcgccgctcgtgcgcttccagctgcccaatgtgctgttcgcctacgcgcatactctcgccctgtatcacggcggtgacgacgcgctgctctctgacttctgtgccacactgctcggcgtttccggagccctgggtgcccagcaagtcttcgcctctgcggaagaagccctgcaggcggcagcccacgtgctggaagcaggcgagcacccgccggggcccctgggcacacgaggggctatgcacgaggtcgcccgcatcctgctgggcgagggcccgaccaaccagaaaggctacacgctggcagcactgggggacctggcacagaccctgggccgtgcccggaaacaggccgtggctagagaagagcgagatcatctttaccgggcccggaaaaagtgccagttcctcctggcctggaccaacgaaaatgaggcggccctcacacccctggctctagactgcgccagggctcaccaagcccatgctgtggtagccgaggaggtggccgccctcactggggagctggagcggctttggggaggccccgtgccacctgccccaagaactctcattgaggagctccctagctgaacgggttaccctggtcattaataaagctgtgactggtcagccc

SEQ ID NO: 15553 - DNA, 1060 bp, Homo sapiens
  misc_feature (79)..(79): n is a, c, g, or t
  misc_feature (88)..(88): n is a, c, g, or t
  misc_feature (107)..(109): n is a, c, g, or t
  misc_feature (112)..(112): n is a, c, g, or t
catggcacctgcgcagaaaacttctcccgtaccaggtgtggagagggctcctttccccccccggccccggggtttttgncaagggcgngctctttcccccttccttnnnccnccagcccgcctagcaagcgccctacgccggctgcgtcagcaacgcgagaccgaggacgagcctggggaagcaggcctcagctccggcccggcgcccggcggccgcagcttctggaggagctggataatgccccgggtagtgacgccgcggagctggagctcgcccctgcgaggaccccgccggattctgtgaaagatgcctccgccgcggagcccgcggccgccgagcgggttcttggagatgtcccgggggcctgcacgcccgtcgtacccacccgcatccccgcgatagtcagcctgagccgcggcccagtctcgccgctcgtgcgcttccagctgcccaatgtgctgttcgcctacgcgcatactctcgccctgtatcacggcggtgacgacgcgctgctctctgacttctgtgccacactgctcggcgtttccggagccctgggtgcccagcaagtcttcgcctctgcggaagaagccctgcaggcggcagcccacgtgctggaagcaggcgagcacccgccggggcccctgggcacacgaggggctatgcacgaggtcgcccgcatcctgctgggcgagggcccgaccaaccagaaaggctacacgctggcagcactgggggacctggcacagaccctgggccgtgcccggaaacaggccgtggctagagaagagcgagatcatctttaccgggcccggaaaaagtgccagttcctcctggcctggaccaacgaaaatgaggcggccctcacacccctggctctagactgcgccagggctcaccaagcccatgctgtggtagccgaggaggtggccgccctcactggggagctggagcggctttggggaggccccgtgccacctgccccaagaactctcattgaggagctccctagctgaacgggttaccctggtcattaataaagctgtgactggtcagccc

SEQ ID NO: 15554 - DNA, 148 bp, Homo sapiens
ctttctcatcacataattcagtaagaaataagtaacaaaaggaattgcaaatccataagcctatgaatcaacgagttaatcaaaatggcaaattataagatattttaaattggataatagtggaaaacatggatacagttaaaactgt

SEQ ID NO: 15555 - DNA, 858 bp, Homo sapiens
ggggtgaaggagtggggcaaagtgtaatttggggaaccaagcagggcctggagctatctccatcttcagctccagagtccttggtttctgtctgagaacaaatggcacagcatccctgccaggatcaggaacaaaaggtagaaatgacctccaagcagcagagaagcacatccatagaagagacaatgagaccacaggaaaaacaggtaaccatcactgaaaccctgtgggaccaggtgctgacagtttttaaggatatacaaaaggagctgcaggaagatgctcggattcgagggatgagcaactgctccatgacacccatgacatcagcacccaggactggaagcataaggcctccagattccttgatgaccccaaagttgagaagattgcagttcagctctggagagcagccatcaggaggccgtatccacaacctgaagacacagctcttcagtcaatcagcttactaccctggaccctaactctacaatcaaggaagaaggacatctctgcttccgccagcacagcttcagttggggaagatattagcagacatcatcactgaacccagaagagagggtggtgcccatgagtggagatgccagggtctatggctgaaactgggaacttggaaatcaagtgagacccaagcaaggaaaccaactgccaaagcaaggaaaccagcttggtttggcaaacagctgatgaaataaatgtgacgtagaagacttgccttcctggttcttcctgggctgtggaatgggtagtgatagaatttccaagtatgatagtgcatttggttcaaagaacagcactgtagcatgggagaacctgcactataatgtcataaactca

SEQ ID NO: 15556 - DNA, 513 bp, Homo sapiens
gtctacaactaatggatctcctccttagttcctgttggatatcttgggatggggtcatgagggtagaagcgtcaccacgaggactgcttttactctcagggtcacctgcctagtaaattgtccagcagggaggagaataaatttcttttattcccatccatatgactatgtcatctacagcacagcttcagttggggaagatattagcagacatcatcactgaacccagaagagagggtggtgcccatgagtggagatgccagggtctatggctgaaactgggaacttggaaatcaagtgagacccaagcaaggaaaccaactgccaaagcaaggaaaccagcttggtttggcaaacagctgatgaaataaatgtgacgtagaagacttgccttcctggttcttcctgggctgtggaatgggtagtgatagaatttccaagtatgatagtgcatttggttcaaagaacagcactgtagcatgggagaacctgcactataatgtcataaactca

SEQ ID NO: 15557 - DNA, 902 bp, Homo sapiens
ggggtgaaggagtggggcaaagtgtaatttggggaaccaagcagggcctggagctatctccatcttcagctccagagtccttggtttctgtctgagaacaaatggcacagcatccctgccaggatcaggaacaaaaggtagaaatgacctccaagcagcagagaagcacatccatagaagagacaatgagaccacaggaaaaacaggtaaccatcactgaaaccctgtgggaccaggtgctgacagtttttaaggatatacaaaaggagctgcaggaagatgctcggattcgagggatgagcaactgctccatgacacccatgacatcagcacccaggactggaagcataaggcctccagattccttgatgaccccaaagttgagaagattgcagttcagctctggagagcagccatcaggaggccgtatccacaacctgaagacacagctcttcagtcaatcagcttactaccctggaccctaactctacaatcaaggaagaaggacatctctgcttccgccaggctcatctgacacctaacccacctggagaagaagactgtctcagcacagcttcagttggggaagatattagcagacatcatcactgaacccagaagagagggtggtgcccatgagtggagatgccagggtctatggctgaaactgggaacttggaaatcaagtgagacccaagcaaggaaaccaactgccaaagcaaggaaaccagcttggtttggcaaacagctgatgaaataaatgtgacgtagaagacttgccttcctggttcttcctgggctgtggaatgggtagtgatagaatttccaagtatgatagtgcatttggttcaaagaacagcactgtagcatgggagaacctgcactataatgtcataaactca

SEQ ID NO: 15558 - DNA, 638 bp, Homo sapiens
tcaggagttcgagtccagcctggccaacatggtgaaaccctgtctctactaaaaatacaaaaattagctgggagaggtggtgagcacctgtaatgctagttactcgggaggctgaggccggagaatcacttgaacccaggaggtggaggttgtactgagccgagatcatgccacactgcactccagcctgggtgacagagcgaaactctgacttaatttaaaaaaacaaaaaaaacaacaaaaaaccttggccttatttgtcttactccaaagtcgttatgattgtttcctatgttttcctttaaaagcttaattcatttagttttatgtttaagtccactattcatctcaaattcatttttgtggatggtggaggtgatttttttttctttatggatctccagtattccagcagtaccatttgtgaaaaagattttcctttcctcgttggatcactttggtgttttagtcaaaaatcaaatgactgttttaagtgcaggtctatttctgtgccctcttttgttgcattgatcaattttttaatccttacatcagtactatactgtctttttagtaaggtttgaagtaaggtagggtcatttgcatgtctcttacactatcaaattttaccaaaaaaa

SEQ ID NO: 15559 - DNA, 425 bp, Homo sapiens
atccaatttatcaatactttcctttatagttagtgtattttatgtcctattagacaatcctgttagacagtcctgtcctgttaaaaaatcttgactggctgtggtggctcatgcctgtaatcccagcactttgggaggccaaggcaggaggatcacttgagctcaagagttccagaccagcctgggcaaaatgatgagaccctgtccctacaaaaaagtaaagaaattagccgggtgtggtggagcatacctgtagtctcagctactcagaggccaagacaggagggtcccttgagcctaggaagtcgaggcagcagggagctatgatcgcgccactgcactgcaggctgggccacaaagtgagacccccatctctaaaaacttttttaatataaaaacaaattttttaatctttgctttcacgc

SEQ ID NO: 15560 - DNA, 215 bp, Homo sapiens
tcacttcaattaaagactataaacaacagaaatctcattgtgtctacacatcgggtgaccttaggtcggtttgtaagtggatacaattaataaaataaaatccgtcacctttttttcctgttacattaactgaagatgcacccaatcttgaggcagcttctgagttgagaattatattgttatccaatactgttgattcattttgaatctttaga

SEQ ID NO: 15561 - DNA, 2402 bp, Homo sapiens
agcggatgaagggtcgttggtgggaaagatggcggcgactctgggaccccttgggtcgtggcagcagtggcggcgatgtttgtcggctcgggatgggtccaggatgttactccttcttcttttgttggggtctgggcaggggccacagcaagtcggggcgggtcaaacgttcgagtacttgaaacgggagcactcgctgtcgaagccctaccagggtgtgggcacaggcagttcctcactgtggaatctgatgggcaatgccatggtgatgacccagtatatccgccttaccccagatatgcaaagtaaacagggtgccttgtggaaccgggtgccatgtttcctgagagactgggagttgcaggtgcacttcaaaatccatggacaaggaaagaagaatctgcatggggatggcttggcaatctggtacacaaaggatcggatgcagccagggcctgtgtttggaaacatggacaaatttgtggggctgggagtatttgtagacacctaccccaatgaggagaagcagcaagagcgggtattcccctacatctcagccatggtgaacaacggctccctcagctatgatcatgagcgggatgggcggcctacagagctgggaggctgcacagccattgtccgcaatcttcattacgacaccttcctggtgattcgctacgtcaagaggcatttgacgataatgatggatattgatggcaagcatgagtggagggactgcattgaagtgcccggagtccgcctgccccgcggctactacttcggcacctcctccatcactggggatctctcagataatcatgatgtcatttccttgaagttgtttgaactgacagtggagagaaccccagaagaggaaaagctccatcgagatgtgttcttgccctcagtggacaatatgaagctgcctgagatgacagctccactgccgcccctgagtggcctggccctcttcctcatcgtctttttctccctggtgttttctgtatttgccatagtcattggtatcatactctacaacaaatggcaggaacagagccgaaagcgcttctactgagccctcctgctgccaccacttttgtgactgtcacccatgaggtatggaaggagcaggcactggcctgagcatgcagcctggagagtgttcttgtctctagcagctggttggggactatattctgtcactggagttttgaatgcagggaccccgcattcccatggttgtgcatggggacatctaactctggtctgggaagccacccaccccagggcaatgctgctgtgatgtgcctttccctgcagtccttccatgtgggagcagaggtgtgaagagaatttacgtggttgtgatgccaaaatcacagaacagaatttcatagcccaggctgccgtgttgtttgactcagaaggcccttctacttcagttttgaatccacaaagaattaaaaactggtaacaccacaggctttctgaccatccattcgttgggttttgcatttgacccaaccctctgcctacctgaggagctttctttggaaaccaggatggaaacttcttccctgccttaccttcctttcactccattcattgtcctctctgtgtgcaacctgagctgggaaaggcatttggatgcctctctgttggggcctggggctgcagaacacacctgcgtttcactggccttcattaggtggccctagggagatggctttctgctttggatcactgttccctagcatgggtcttgggtctattggcatgtccatggccttcccaatcaagtctcttcaggccctcagtgaagtttggctaaaggttggtgtaaaaatcaagagaagcctggaagacatcatggatgccatggattagctgtgcaactgaccagctccaggtttgatcaaaccaaaagcaacatttgtcatgtggtctgaccatgtggagatgtttctggacttgctagagcctgcttagctgcatgttttgtagttacgatttttggaatcccactttgagtgctgaaagtgtaaggaagctttcttcttacaccttgggcttggatattgcccagagaagaaatttggctttttttttcttaatggacaagagacagttgctgttctcatgttccaagtctgagagcaacagaccctcatcatctgtgcctggaagagttcactgtcattgagcagcacagcctgagtgctggcctctgtcaacccttattccactgccttatttgacaaggggttacatgctgctcaccttactgccctgggattaaatcagttacaggccagagtctccttggagggcctggaactctgagtcctcctatgaacctctgtagcctaaatgaaattcttaaaatcaccgatggaaccaaa

SEQ ID NO: 15562 - DNA, 2400 bp, Homo sapiens
ggcctgagtggcgaattcggcacgagatggcggcgactctgggaccccttgggtcgtggcagcagtggcggcgatgtttgtcggctcgggatgggtccaggatgttactccttcttcttttgttggggtctgggcaggggccacagcaagtcggggcgggtcaaacgttcgagtacttgaaacgggagcactcgctgtcgaagccctaccagggtgtgggcacaggcagttcctcactgtggaatctgatgggcaatgccatggtgatgacccagtatatccgccttaccccagatatgcaaagtaaacagggtgccttgtggaaccgggtgccatgtttcctgagagactgggagttgcaggtgcacttcaaaatccatggacaaggaaagaagaatctgcatggggatggcttggcaatctggtacacaaaggatcggatgcagccagggcctgtgtttggaaacatggacaaatttgtggggctgggagtatttgtagacacctaccccaatgaggagaagcagcaagagcgggtattcccctacatctcagccatggtgaacaacggctccctcagctatgatcatgagcgggatgggcggcctacagagctgggaggctgcacagccattgtccgcaatcttcattacgacaccttcctggtgattcgctacgtcaagaggcatttgacgataatgatggatattgatggcaagcatgagtggagggactgcattgaagtgcccggagtccgcctgccccgcggctactacttcggcacctcctccatcactggggatctctcagataatcatgatgtcatttccttgaagttgtttgaactgacagtggagagaaccccagaagaggaaaagctccatcgagatgtgttcttgccctcagtggacaatatgaagctgcctgagatgacagctccactgccgcccctgagtggcctggccctcttcctcatcgtctttttctccctggtgttttctgtatttgccatagtcattggtatcatactctacaacaaatggcaggaacagagccgaaagcgcttctactgagccctcctgctgccaccacttttgtgactgtcacccatgaggtatggaaggagcaggcactggcctgagcatgcagcctggagagtgttcttgtctctagcagctggttggggactatattctgtcactggagttttgaatgcagggaccccgcattcccatggttgtgcatggggacatctaactctggtctgggaagccacccaccccagggcaatgctgctgtgatgtgcctttccctgcagtccttccatgtgggagcagaggtgtgaagagaatttacgtggttgtgatgccaaaatcacagaacagaatttcatagcccaggctgccgtgttgtttgactcagaaggcccttctacttcagttttgaatccacaaagaattaaaaactggtaacaccacaggctttctgaccatccattcgttgggttttgcatttgacccaaccctctgcctacctgaggagctttctttggaaaccaggatggaaacttcttccctgccttaccttcctttcactccattcattgtcctctctgtgtgcaacctgagctgggaaaggcatttggatgcctctctgttggggcctggggctgcagaacacacctgcgtttcactggccttcattaggtggccctagggagatggctttctgctttggatcactgttccctagcatgggtcttgggtctattggcatgtccatggccttcccaatcaagtctcttcaggccctcagtgaagtttggctaaaggttggtgtaaaaatcaagagaagcctggaagacatcatggatgccatggattagctgtgcaactgaccagctccaggtttgatcaaaccaaaagcaacatttgtcatgtggtctgaccatgtggagatgtttctggacttgctagagcctgcttagctgcatgttttgtagttacgatttttggaatcccactttgagtgctgaaagtgtaaggaagctttcttcttacaccttgggcttggatattgcccagagaagaaatttggctttttttttcttaatggacaagagacagttgctgttctcatgttccaagtctgagagcaacagaccctcatcatctgtgcctggaagagttcactgtcattgagcagcacagcctgagtgctggcctctgtcaacccttattccactgccttatttgacaaggggttacatgctgctcaccttactgccctgggattaaatcagttacaggccagagtctccttggagggcctggaactctgagtcctcctatgaacctctgtagcctaaatgaaattcttaaaatcaccgatggaaccaaa

SEQ ID NO: 15563 - DNA, 2434 bp, Homo sapiens
agcggatgaagggtcgttggtgggaaagatggcggcgactctgggaccccttgggtcgtggcagcagtggcggcgatgtttgtcggctcgggatgggtccaggatgttactccttcttcttttgttggggtctgggcaggggccacagcaagtcggggcgggtcaaacgttcgagtacttgaaacgggagcactcgctgtcgaagccctaccagggtgtgggcacaggcagttcctcactgtggaatctgatgggcaatgccatggtgatgacccagtatatccgccttaccccagatatgcaaagtaaacagggtgccttgtggaaccgggtgccatgtttcctgagagactgggagttgcaggtgcacttcaaaatccatggacaaggaaagaagaatctgcatggggatggcttggcaatctggtacacaaaggatcggatgcagccagggcctgtgtttggaaacatggacaaatttgtggggctgggagtatttgtagacacctaccccaatgaggagaagcagcaagagcccagaagaggcgatattctccaggagtccagcgggtattcccctacatctcagccatggtgaacaacggctccctcagctatgatcatgagcgggatgggcggcctacagagctgggaggctgcacagccattgtccgcaatcttcattacgacaccttcctggtgattcgctacgtcaagaggcatttgacgataatgatggatattgatggcaagcatgagtggagggactgcattgaagtgcccggagtccgcctgccccgcggctactacttcggcacctcctccatcactggggatctctcagataatcatgatgtcatttccttgaagttgtttgaactgacagtggagagaaccccagaagaggaaaagctccatcgagatgtgttcttgccctcagtggacaatatgaagctgcctgagatgacagctccactgccgcccctgagtggcctggccctcttcctcatcgtctttttctccctggtgttttctgtatttgccatagtcattggtatcatactctacaacaaatggcaggaacagagccgaaagcgcttctactgagccctcctgctgccaccacttttgtgactgtcacccatgaggtatggaaggagcaggcactggcctgagcatgcagcctggagagtgttcttgtctctagcagctggttggggactatattctgtcactggagttttgaatgcagggaccccgcattcccatggttgtgcatggggacatctaactctggtctgggaagccacccaccccagggcaatgctgctgtgatgtgcctttccctgcagtccttccatgtgggagcagaggtgtgaagagaatttacgtggttgtgatgccaaaatcacagaacagaatttcatagcccaggctgccgtgttgtttgactcagaaggcccttctacttcagttttgaatccacaaagaattaaaaactggtaacaccacaggctttctgaccatccattcgttgggttttgcatttgacccaaccctctgcctacctgaggagctttctttggaaaccaggatggaaacttcttccctgccttaccttcctttcactccattcattgtcctctctgtgtgcaacctgagctgggaaaggcatttggatgcctctctgttggggcctggggctgcagaacacacctgcgtttcactggccttcattaggtggccctagggagatggctttctgctttggatcactgttccctagcatgggtcttgggtctattggcatgtccatggccttcccaatcaagtctcttcaggccctcagtgaagtttggctaaaggttggtgtaaaaatcaagagaagcctggaagacatcatggatgccatggattagctgtgcaactgaccagctccaggtttgatcaaaccaaaagcaacatttgtcatgtggtctgaccatgtggagatgtttctggacttgctagagcctgcttagctgcatgttttgtagttacgatttttggaatcccactttgagtgctgaaagtgtaaggaagctttcttcttacaccttgggcttggatattgcccagagaagaaatttggctttttttttcttaatggacaagagacagttgctgttctcatgttccaagtctgagagcaacagaccctcatcatctgtgcctggaagagttcactgtcattgagcagcacagcctgagtgctggcctctgtcaacccttattccactgccttatttgacaaggggttacatgctgctcaccttactgccctgggattaaatcagttacaggccagagtctccttggagggcctggaactctgagtcctcctatgaacctctgtagcctaaatgaaattcttaaaatcaccgatggaaccaaa

SEQ ID NO: 15564 - DNA, 2317 bp, Homo sapiens
ggcctgagtggcgaattcggcacgagatggcggcgactctgggaccccttgggtcgtggcagcagtggcggcgatgtttgtcggctcgggatgggtccaggatgttactccttcttcttttgttggggtctgggcaggggccacagcaagtcggggcgggtcaaacgttcgagtacttgaaacgggagcactcgctgtcgaagccctaccagggtgtgggcacaggcagttcctcactgtggaatctgatgggcaatgccatggtgatgacccagtatatccgccttaccccagatatgcaaagtaaacagggtgccttgtggaaccgggtgccatgtttcctgagagactgggagttgcaggtgcacttcaaaatccatggacaaggaaagaagaatctgcatggggatggcttggcaatctggtacacaaaggatcggatgcagccagcgggtattcccctacatctcagccatggtgaacaacggctccctcagctatgatcatgagcgggatgggcggcctacagagctgggaggctgcacagccattgtccgcaatcttcattacgacaccttcctggtgattcgctacgtcaagaggcatttgacgataatgatggatattgatggcaagcatgagtggagggactgcattgaagtgcccggagtccgcctgccccgcggctactacttcggcacctcctccatcactggggatctctcagataatcatgatgtcatttccttgaagttgtttgaactgacagtggagagaaccccagaagaggaaaagctccatcgagatgtgttcttgccctcagtggacaatatgaagctgcctgagatgacagctccactgccgcccctgagtggcctggccctcttcctcatcgtctttttctccctggtgttttctgtatttgccatagtcattggtatcatactctacaacaaatggcaggaacagagccgaaagcgcttctactgagccctcctgctgccaccacttttgtgactgtcacccatgaggtatggaaggagcaggcactggcctgagcatgcagcctggagagtgttcttgtctctagcagctggttggggactatattctgtcactggagttttgaatgcagggaccccgcattcccatggttgtgcatggggacatctaactctggtctgggaagccacccaccccagggcaatgctgctgtgatgtgcctttccctgcagtccttccatgtgggagcagaggtgtgaagagaatttacgtggttgtgatgccaaaatcacagaacagaatttcatagcccaggctgccgtgttgtttgactcagaaggcccttctacttcagttttgaatccacaaagaattaaaaactggtaacaccacaggctttctgaccatccattcgttgggttttgcatttgacccaaccctctgcctacctgaggagctttctttggaaaccaggatggaaacttcttccctgccttaccttcctttcactccattcattgtcctctctgtgtgcaacctgagctgggaaaggcatttggatgcctctctgttggggcctggggctgcagaacacacctgcgtttcactggccttcattaggtggccctagggagatggctttctgctttggatcactgttccctagcatgggtcttgggtctattggcatgtccatggccttcccaatcaagtctcttcaggccctcagtgaagtttggctaaaggttggtgtaaaaatcaagagaagcctggaagacatcatggatgccatggattagctgtgcaactgaccagctccaggtttgatcaaaccaaaagcaacatttgtcatgtggtctgaccatgtggagatgtttctggacttgctagagcctgcttagctgcatgttttgtagttacgatttttggaatcccactttgagtgctgaaagtgtaaggaagctttcttcttacaccttgggcttggatattgcccagagaagaaatttggctttttttttcttaatggacaagagacagttgctgttctcatgttccaagtctgagagcaacagaccctcatcatctgtgcctggaagagttcactgtcattgagcagcacagcctgagtgctggcctctgtcaacccttattccactgccttatttgacaaggggttacatgctgctcaccttactgccctgggattaaatcagttacaggccagagtctccttggagggcctggaactctgagtcctcctatgaacctctgtagcctaaatgaaattcttaaaatcaccgatggaaccaaa

SEQ ID NO: 15565 - DNA, 2481 bp, Homo sapiens
ggcctgagtggcgaattcggcacgagatggcggcgactctgggaccccttgggtcgtggcagcagtggcggcgatgtttgtcggctcgggatgggtccaggatgttactccttcttcttttgttggggtctgggcaggggccacagcaagtcggggcgggtcaaacgttcgagtacttgaaacgggagcactcgctgtcgaagccctaccagggtgtgggcacaggcagttcctcactgtggaatctgatgggcaatgccatggtgatgacccagtatatccgccttaccccagatatgcaaagtaaacagggtgccttgtggaaccgggtgctgcattgtcttccttgaggtatggcgacaagaagtgaatgcagtattcctggtgtggctgcactgtgattttgtacaagtccatgtttcctgagagactgggagttgcaggtgcacttcaaaatccatggacaaggaaagaagaatctgcatggggatggcttggcaatctggtacacaaaggatcggatgcagccagggcctgtgtttggaaacatggacaaatttgtggggctgggagtatttgtagacacctaccccaatgaggagaagcagcaagagcgggtattcccctacatctcagccatggtgaacaacggctccctcagctatgatcatgagcgggatgggcggcctacagagctgggaggctgcacagccattgtccgcaatcttcattacgacaccttcctggtgattcgctacgtcaagaggcatttgacgataatgatggatattgatggcaagcatgagtggagggactgcattgaagtgcccggagtccgcctgccccgcggctactacttcggcacctcctccatcactggggatctctcagataatcatgatgtcatttccttgaagttgtttgaactgacagtggagagaaccccagaagaggaaaagctccatcgagatgtgttcttgccctcagtggacaatatgaagctgcctgagatgacagctccactgccgcccctgagtggcctggccctcttcctcatcgtctttttctccctggtgttttctgtatttgccatagtcattggtatcatactctacaacaaatggcaggaacagagccgaaagcgcttctactgagccctcctgctgccaccacttttgtgactgtcacccatgaggtatggaaggagcaggcactggcctgagcatgcagcctggagagtgttcttgtctctagcagctggttggggactatattctgtcactggagttttgaatgcagggaccccgcattcccatggttgtgcatggggacatctaactctggtctgggaagccacccaccccagggcaatgctgctgtgatgtgcctttccctgcagtccttccatgtgggagcagaggtgtgaagagaatttacgtggttgtgatgccaaaatcacagaacagaatttcatagcccaggctgccgtgttgtttgactcagaaggcccttctacttcagttttgaatccacaaagaattaaaaactggtaacaccacaggctttctgaccatccattcgttgggttttgcatttgacccaaccctctgcctacctgaggagctttctttggaaaccaggatggaaacttcttccctgccttaccttcctttcactccattcattgtcctctctgtgtgcaacctgagctgggaaaggcatttggatgcctctctgttggggcctggggctgcagaacacacctgcgtttcactggccttcattaggtggccctagggagatggctttctgctttggatcactgttccctagcatgggtcttgggtctattggcatgtccatggccttcccaatcaagtctcttcaggccctcagtgaagtttggctaaaggttggtgtaaaaatcaagagaagcctggaagacatcatggatgccatggattagctgtgcaactgaccagctccaggtttgatcaaaccaaaagcaacatttgtcatgtggtctgaccatgtggagatgtttctggacttgctagagcctgcttagctgcatgttttgtagttacgatttttggaatcccactttgagtgctgaaagtgtaaggaagctttcttcttacaccttgggcttggatattgcccagagaagaaatttggctttttttttcttaatggacaagagacagttgctgttctcatgttccaagtctgagagcaacagaccctcatcatctgtgcctggaagagttcactgtcattgagcagcacagcctgagtgctggcctctgtcaacccttattccactgccttatttgacaaggggttacatgctgctcaccttactgccctgggattaaatcagttacaggccagagtctccttggagggcctggaactctgagtcctcctatgaacctctgtagcctaaatgaaattcttaaaatcaccgatggaaccaaa

SEQ ID NO: 15566 - DNA, 2198 bp, Homo sapiens
ggcctgagtggcgaattcggcacgagatggcggcgactctgggaccccttgggtcgtggcagcagtggcggcgatgtttgtcggctcgggatgggtccaggatgttactccttcttcttttgttggggtctgggcaggggccacagcaagtcggggcgggtcaaacgttcgagtacttgaaacgggagcactcgctgtcgaagccctaccaggccatgtttcctgagagactgggagttgcaggtgcacttcaaaatccatggacaaggaaagaagaatctgcatggggatggcttggcaatctggtacacaaaggatcggatgcagccagcgggtattcccctacatctcagccatggtgaacaacggctccctcagctatgatcatgagcgggatgggcggcctacagagctgggaggctgcacagccattgtccgcaatcttcattacgacaccttcctggtgattcgctacgtcaagaggcatttgacgataatgatggatattgatggcaagcatgagtggagggactgcattgaagtgcccggagtccgcctgccccgcggctactacttcggcacctcctccatcactggggatctctcagataatcatgatgtcatttccttgaagttgtttgaactgacagtggagagaaccccagaagaggaaaagctccatcgagatgtgttcttgccctcagtggacaatatgaagctgcctgagatgacagctccactgccgcccctgagtggcctggccctcttcctcatcgtctttttctccctggtgttttctgtatttgccatagtcattggtatcatactctacaacaaatggcaggaacagagccgaaagcgcttctactgagccctcctgctgccaccacttttgtgactgtcacccatgaggtatggaaggagcaggcactggcctgagcatgcagcctggagagtgttcttgtctctagcagctggttggggactatattctgtcactggagttttgaatgcagggaccccgcattcccatggttgtgcatggggacatctaactctggtctgggaagccacccaccccagggcaatgctgctgtgatgtgcctttccctgcagtccttccatgtgggagcagaggtgtgaagagaatttacgtggttgtgatgccaaaatcacagaacagaatttcatagcccaggctgccgtgttgtttgactcagaaggcccttctacttcagttttgaatccacaaagaattaaaaactggtaacaccacaggctttctgaccatccattcgttgggttttgcatttgacccaaccctctgcctacctgaggagctttctttggaaaccaggatggaaacttcttccctgccttaccttcctttcactccattcattgtcctctctgtgtgcaacctgagctgggaaaggcatttggatgcctctctgttggggcctggggctgcagaacacacctgcgtttcactggccttcattaggtggccctagggagatggctttctgctttggatcactgttccctagcatgggtcttgggtctattggcatgtccatggccttcccaatcaagtctcttcaggccctcagtgaagtttggctaaaggttggtgtaaaaatcaagagaagcctggaagacatcatggatgccatggattagctgtgcaactgaccagctccaggtttgatcaaaccaaaagcaacatttgtcatgtggtctgaccatgtggagatgtttctggacttgctagagcctgcttagctgcatgttttgtagttacgatttttggaatcccactttgagtgctgaaagtgtaaggaagctttcttcttacaccttgggcttggatattgcccagagaagaaatttggctttttttttcttaatggacaagagacagttgctgttctcatgttccaagtctgagagcaacagaccctcatcatctgtgcctggaagagttcactgtcattgagcagcacagcctgagtgctggcctctgtcaacccttattccactgccttatttgacaaggggttacatgctgctcaccttactgccctgggattaaatcagttacaggccagagtctccttggagggcctggaactctgagtcctcctatgaacctctgtagcctaaatgaaattcttaaaatcaccgatggaaccaaa

SEQ ID NO: 15567 - DNA, 2696 bp, Homo sapiens
agcggatgaagggtcgttggtgggaaagatggcggcgactctgggaccccttgggtcgtggcagcagtggcggcgatgtttgtcggctcgggatgggtccaggatgttactccttcttcttttgttggggtctgggcaggggccacagcaagtcggggcgggtcaaacgttcgagtacttgaaacgggagcactcgctgtcgaagccctaccagggtgtgggcacaggcagttcctcactgtggaatctgatgggcaatgccatggtgatgacccagtatatccgccttaccccagatatgcaaagtaaacagggtgccttgtggaaccgggtgccatgtttcctgagagactgggagttgcaggtgcacttcaaaatccatggacaaggaaagaagaatctgcatggggatggcttggcaatctggtacacaaaggatcggatgcagccagggcctgtgtttggaaacatggacaaatttgtggggctgggagtatttgtagacacctaccccaatgaggagaagcagcaagagcgggtattcccctacatctcagccatggtgaacaacggctccctcagctatgatcatgagcgggatgggcggcctacagagctgggaggctgcacagccattgtccgcaatcttcattacgacaccttcctggtgattcgctacgtcaagaggcatttgacgataatgatggatattgatggcaagcatgagtggagggactgcattgaagtgcccggagtccgcctgccccgcggctactacttcggcacctcctccatcactggggatctctcagataatcatgatgtcatttccttgaagttgtttgaactgacagtggagagaaccccagaagaggaaaagctccatcgagatgtgttcttgccctcagtggacaatatgaagctgcctgagatgacagctccactgccgcccctgagtggcctggccctcttcctcatcgtctttttctccctggtgttttctgtatttgccatagtcattggtatcatactctacaacaaatggcaggaacagagccgaaagcgcttctactgagccctcctgctgccaccacttttgtgactgtcacccatgaggtatggaaggagcaggcactggcctgagcatgcagcctggagagtgttcttgtctctagcagctggttggggactatattctgtcactggagttttgaatgcagggaccccgcattcccatggttgtgcatggggacatctaactctggtctgggaagccacccaccccagggcaatgctgctgtgatgtgcctttccctgcagtccttccatgtgggagcagaggtgtgaagagaatttacgtggttgtgatgccaaaatcacagaacagaatttcatagcccaggctgccgtgttgtttgactcagaaggcccttctacttcagttttgaatccacaaagaattaaaaactggtaacaccacaggctttctgaccatccattcgttgggttttgcatttgacccaaccctctgcctacctgaggagctttctttggaaaccaggatggaaacttcttccctgccttaccttcctttcactccattcattgtcctctctgtgtgcaacctgagctgggaaaggcatttggatgcctctctgttggggcctggggctgcagaacacacctgcgtttcactggccttcattaggtggccctagggagatggctttctgctttggatcactgttccctagcatgggtcttgggtctattggcatgtccatggccttcccaatcaagtctcttcaggccctcagtgaagtttggctaaaggttggtgtaaaaatcaagagaagcctggaagacatcatggatgccatggattagctgtgcaactgaccagctccaggtttgatcaaaccaaaagcaacatttgtcatgtggtctgaccatgtggagatgtttctggacttgctagagcctgcttagctgcatgttttgtagttacgatttttggaatcccactttgagtgctgaaagtgtaaggaagctttcttcttacaccttgggcttggatattgcccagagaagaaatttggctttttttttcttaatggacaagagacagttgctgttctcatgttccaagtctgagagcaacagaccctcatcatctgtgcctggaagagttcactgtcattgagcagcacagcctgagtgctggcctctgtcaacccttattccactgccttatttgacaaggggttacatgctgctcaccttactgccctgggattaaatcagttacaggccagagtctccttggagggcctggaactctgagtcctcctatgaacctctgtagcctaaatgaaattcttaaaatcaccgatggaaccaaaaaaaaaaaaaaaaaaaaaaaaaaaaaaaaaaaaaaaaaaaaaaaaaaaaaaaaaaaaaaaaaaaaagaaagccgagcgacgcctaatcattcgtggggcggcggagcgagaaaaagaagtagatatacacaaagcagcgagcagcagggtgaccacaaactgtgttgccgacgacaccactattcttgttgtagaacaacggggtagaaacacacgcggggctcgccacaaggaggaggagcagatataaacgcaggaaagacagccacgagtatagaccaccgccggtaaagg

SEQ ID NO: 15568 - DNA, 2347 bp, Homo sapiens
agcggatgaagggtcgttggtgggaaagatggcggcgactctgggaccccttgggtcgtggcagcagtggcggcgatgtttgtcggctcgggatgggtccaggatgttactccttcttcttttgttggggtctgggcaggggccacagcaagtcggggcgggtcaaacgttcgagtacttgaaacgggagcactcgctgtcgaagccctaccagggtgtgggcacaggcagttcctcactgtggaatctgatgggcaatgccatggtgatgacccagtatatccgccttaccccagatatgcaaagtaaacagggtgccttgtggaaccgggtgccatgtttcctgagagactgggagttgcaggtgcacttcaaaatccatggacaaggaaagaagaatctgcatggggatggcttggcaatctggtacacaaaggatcggatgcagccagggcctgtgtttggaaacatggacaaatttgtggggctgggagtatttgtagacacctaccccaatgaggagaagcagcaagagcgggtattcccctacatctcagccatggtgaacaacggctccctcagctatgatcatgagcgggatgggcggcctacagagctgggaggctgcacagccattgtccgcaatcttcattacgacaccttcctggtgattcgctacgtcaagaggcatttgacgataatgatggatattgatggcaagcatgagtggagggactgcattgaagtgcccggagtccgcctgccccgcggctactacttcggcacctcctccatcactggggatctctcagataatcatgatgtcatttccttgaagttgtttgaactgacagtggagagaaccccagaagaggaaaagctccatcgagatgtgttcttgccctcagtggacaatatgaagctgcctgagatgacagctccactgccgcccctgagtggcctggccctcttcctcatcgtctttttctccctggtgttttctgtatttgccatagtcattggtatcatactctacaacaaatggcaggaacagagccgaaagcgcttctactgagccctcctgctgccaccacttttgtgactgtcacccatgaggtatggaaggagcaggcactggcctgagcatgcagcctggagagtgttcttgtctctagcagctggttggggactatattctgtcactggagttttgaatgcagggaccccgcattcccatggttgtgcatggggacatctaactctggtctgggaagccacccaccccagggcaatgctgctgtgatgtgcctttccctgcagtccttccatgtgggagcagaggtgtgaagagaatttacgtggttgtgatgccaaaatcacagaacagaatttcatagcccaggctgccgtgttgtttgactcagaaggcccttctacttcagttttgaatccacaaagaattaaaaactggtaacaccacaggctttctgaccatccattcgttgggttttgcatttgacccaaccctctgcctacctgaggagctttctttggaaaccaggatggaaacttcttccctgccttaccttcctttcactccattcattgtcctctctgtgtgcaacctgagctgggaaaggcatttggatgcctctctgttggggcctggggctgcagaacacacctgcgtttcactggccttcattaggtggccctagggagatggctttctgctttggatcactgttccctagcatgggtcttgggtctattggcatgtccatggccttcccaatcaagtctcttcaggccctcagtgaagtttggctaaaggttggtgtaaaaatcaagagaagcctggaagacatcatggatgccatggattagctgtgcaactgaccagctccaggtttgatcaaaccaagcctgcttagctgcatgttttgtagttacgatttttggaatcccactttgagtgctgaaagtgtaaggaagctttcttcttacaccttgggcttggatattgcccagagaagaaatttggctttttttttcttaatggacaagagacagttgctgttctcatgttccaagtctgagagcaacagaccctcatcatctgtgcctggaagagttcactgtcattgagcagcacagcctgagtgctggcctctgtcaacccttattccactgccttatttgacaaggggttacatgctgctcaccttactgccctgggattaaatcagttacaggccagagtctccttggagggcctggaactctgagtcctcctatgaacctctgtagcctaaatgaaattcttaaaatcaccgatggaaccaaa

SEQ ID NO: 15569 - DNA, 1120 bp, Homo sapiens
agcggatgaagggtcgttggtgggaaagatggcggcgactctgggaccccttgggtcgtggcagcagtggcggcgatgtttgtcggctcgggatgggtccaggatgttactccttcttcttttgttggggtctgggcaggggccacagcaagtcggggcgggtcaaacgttcgagtacttgaaacgggagcactcgctgtcgaagccctaccagggtgtgggcacaggcagttcctcactgtggaatctgatgggcaatgccatggtgatgacccagtatatccgccttaccccagatatgcaaagtaaacagggtgccttgtggaaccgggtgccatgtttcctgagagactgggagttgcaggtgcacttcaaaatccatggacaaggaaagaagaatctgcatggggatggcttggcaatctggtacacaaaggatcggatgcagccagggcctgtgtttggaaacatggacaaatttgtggggctgggagtatttgtagacacctaccccaatgaggagaagcagcaagagcgggtattcccctacatctcagccatggtgaacaacggctccctcagctatgatcatgagcgggatgggcggcctacagagctgggaggctgcacagccattgtccgcaatcttcattacgacaccttcctggtgattcgctacgtcaagaggcatttgacgataatgatggatattgatggcaagcatgagtggagggactgcattgaagtgcccggagtccgcctgccccgcggctactacttcggcacctcctccatcactggggatctctcagataatcatgatgtcatttccttgaagttgtttgaactgacagtggagagaaccccagaagaggaaaagctccatcgagatgtgttcttgccctcagtggacaatatgaagctgcctgagatgacagctccactgccgcccctgagtggcctggccctcttcctcatcgtctttttctccctggtgttttctgtatttgccatagtcattggtatcatactctacaacaaatggcaggaacagagccgaaagcgcttctactgagccctcctgcattcacacctttcagtctccatccttctggccgcc

SEQ ID NO: 15570 - DNA, 968 bp, Homo sapiens
agcggatgaagggtcgttggtgggaaagatggcggcgactctgggaccccttgggtcgtggcagcagtggcggcgatgtttgtcggctcgggatgggtccaggatgttactccttcttcttttgttggggtctgggcaggggccacagcaagtcggggcgggtcaaacgttcgagtacttgaaacgggagcactcgctgtcgaagccctaccagggtgtgggcacaggcagttcctcactgtggaatctgatgggcaatgccatggtgatgacccagtatatccgccttaccccagatatgcaaagtaaacagggtgccttgtggaaccgggtgccatgtttcctgagagactgggagttgcaggtgcacttcaaaatccatggacaaggaaagaagaatctgcatggggatggcttggcaatctggtacacaaaggatcggatgcagccagggcctgtgtttggaaacatggacaaatttgtggggctgggagtatttgtagacacctaccccaatgaggagaagcagcaagagcgggtattcccctacatctcagccatggtgaacaacggctccctcagctatgatcatgagcgggatgggcggcctacagagctgggaggctgcacagccattgtccgcaatcttcattacgacaccttcctggtgattcgctacgtcaagaggcatttgacgataatgatggatattgatggcaagcatgagtggagggactgcattgaagtgcccggagtccgcctgccccgcggctactacttcggcacctcctccatcactggggatctctcagataatcatgatgtcatttccttgaagttgtttgaactgacagtggagagaaccccagaagaggaaaagctccatcgagatgtgttcttgccctcagtggacaatatgaagctgcctgagagtgagcacaggggcccgcgggaaatggtcccatagt

SEQ ID NO: 15571 - DNA, 287 bp, Homo sapiens
ctgttggtcattttatttgtccttctctggaccttttctagctgcattgtcttccttgaggtatggcgacaagaagtgaatgcagtattcctggtgtggctgcactgtgattttgtacaagtgtaagatgatgctttcttttctgtttccagggctttctaaatcttttacgaccagtttacttttgggcatgactctggcatcctttgatactttctctggaattctcttaaactaagaacttacttttttacgtggcttttctcattagttgtagataagcgaat

SEQ ID NO: 15572 - DNA, 155 bp, Homo sapiens
tgttgctataaacttttctggcttcagattggatgatactagctctgaaagatggtaattgattttcccgacaaaaaggcctattagcaccaggaaaagagatcagaagcaagtagaaacatttctcatttttggaatgatggggttgatttgag

SEQ ID NO: 15573 - DNA, 401 bp, Homo sapiens
gtcactgggttcaatgacttcattgacaccaaactcaattctccgatattcttgtccatcaggtagtttatccccagcttgtgtgccacacagaactgttccactgcatggaggaagctcaactgaagatcgaggagtcacaaagaactgattgaattcatcagggctaaaatctccaaaaatatactgcgggctgtggagggccatggctgccggtttcaatgggactcggcgctcctccggctgctcacgctgcctcccccgccgccgccatcttctcccccgcacatacacccatctatgactatttcaataactcctataacagatggaatttttgcaagttttagaataacaaataacattaaaaatcgttatgaataaacattaatttacctaaa

SEQ ID NO: 15574 - DNA, 280 bp, Homo sapiens
cccttatccacagtccacccttatccactgtccaaccttctccacccttctctctgccccagaagctgctgattcacatgcactctatcaacaggcttcattgtcctcttgcttccagttgggtgtgatcaatgtgaggcattctcaggagactggaggacaaggacaaagtgagatggagataagtgtcctagttatagtgggttatcatggttagatggcacacttgtatccaatgcctctgtttctgtcagtttctcaaagcagctacttttcctgg

SEQ ID NO: 15575 - DNA, 433 bp, Homo sapiens
ctccctagtcatgcggaacaacatagtctaaaaaggaagatgtggactggggagttaggagacctgatttctattccctatgcttctactaactagcctcgagatcttaaccgctctgtgcctcagtgttcccatctgcaaaatggggatagtgttaattgccctacctacctcacagggttgttgtgaggataaactgagacaatgaattcaaagcaagttgacaagtaagtgctatgcaaattgtaagaaatggaaacaatcatgttaaaagcaatggaatggacattggcagaagggttaatggattgtccagccctttctctgtgtggcttaaacccaggtcgccattgctttatacattttcacttagcacagatttgtaattatgcatgtaataaagcacagccttatccaccctggtgtctggtgt

SEQ ID NO: 15576 - DNA, 745 bp, Homo sapiens
tctcagcagttgccctgaggcaagtggaaaggcaggcagtgctctggggtcaccgagaaagtctaaaaacaggaggctgaaggtactgtgatggctttaaaaatggccaccttattaaatagggattgtatcaatattgaaatgaagacaatctttccaactttgggtgtttcacttgctgttttaattgtttgtttttaacactttgtaggtttgtgttttcataatctttaatttgaaactcatgtgtcctcatggatcgtggatgccttcatttcttgagctctcaatgcagacatttaaatggctgcaatcagtagagtgacccgcggatggcataaatgcacctccttttcttggccttggatctatgggtctgggattgtggtcatctcctcaatcctcaaaaagaggctgaatcaatgtggccgtgggtgggaacttacatacagaacccaatgaagaacttgactgtctaaacaagggggcctcgcatggagctgtaaagcatctaacaaatatgaaaaatgtgaagttccaaggtccaagaagaaaaataatgatgtttctgaaagtgatgataaataattacttttaaagtgctgcatatttatacaattgagagattatttttgtaaatgcaatgtctgtgagctgggatacatgggcagtgcttcagacatttaaaaatcactttttactcctagggagatgccaataaacagaactcttttgtttcttctga

SEQ ID NO: 15577 - DNA, 1543 bp, Homo sapiens
gagaaaggagaggagggaggaggcgcgccgcgccatggtgtcctgcgcggggccagggccagggccggggccgggccaggccgggccatgagccgcgccgggagctgggacatggacgggctgcgggcagacggcgggggcgccggtggcgccccggcctcttcctcctcctcatcggtggcggcggcggcggcgtcaggccagtgccgcggctttctctccgcgcctgtgttcgccgggacgcattcggggcgggcggcggcggcggcagcggcggctgcggcggcggcggcggcagcctccggctttgcgtaccccgggacctctgagcgcacgggctcttcctcgtcgtcgtcctcttctgccgttgtagcggcgcgcccggaggctcccccagccaaagagtgcccagcacccacgcctgcagcggccgctgcagcgcccccgagcgctccagcgctgggctacggctaccacttcggcaacggctactacagctgccgtatgtcgcacggcgtgggcttacagcagaatgcgctcaagtcatcgccgcacgcctcgctgggaggctttcccgtggagaagtacatggacgtgtcaggcctggcgagcagcagcgtaccggccaacgaggtgccagcgcgagccaaggaggtatccttctaccagggctatacgagcccttaccagcacgtgcccggctatatcgacatggtgtccactttcggctccggggagcctcggcacgaggcctacatctccatggaggggtaccagtcctggacgctggctaacgggtggaacagccaggtgtactgcaccaaggaccagccacaggggtcccacttttggaaatcttcctttccaggggatgtggctctaaatcagccggacatgtgcgtctaccgaagagggaggaagaagagagtgccttacaccaaactgcagcttaaagaactggagaacgagtatgccattaacaaattcattaacaaggacaagcggcggcgtatctcggctgctacgaacctatctgagagacaagtgaccatttggtttcagaaccgaagagtgaaggacaagaaaattgtctccaagctcaaagatactgtctcctgatgtggtccaggttggccacagacagcttagaagccattcggttgtctccaaaaggcctttggaaagacttgaatatgtatttaattccccccaccccctgccaatggtggcaaattttgtgaattgtttttctctcttccccttatctggctctaaaaccttctgctgcccaacctgactttgtagttctgatttttacttgtttattattggttttgttcttgcctagggtttttaaaatatctgtttttaatgttttgtttctccctccaggccagtataaagggacttgaagtattttttaataatctgccccccaatgaacttcagaagtgccattctgatttaagggtttttttaaaaaattactttatttgttcattcccagcactgattatcttcataatccattaggacagaatgg

SEQ ID NO: 15578 - DNA, 421 bp, Homo sapiens
acctgggaggtggaagttgcagtgaactgagatatcgccattgcactccagcctgggcaacaagagcgaaactccgtctcaaaaacaaacaaacaaacaaacaaacacacacacacacacacacacgaaaaagaaaagaaaattaaaaccttttttctgcatggtggcagaccctaatgtctgctcacccaatacccctggccccatgctgctggcaacacccacatgatctgaagtggctgcctgggaggttcctctgaggaacgttccctggccacaggagggagagtaaccagataagcccaccaccacgatcacgttcccctttgcaagtgacacaatctcagctaagggaatctgaaggtacactgaaccaggaccattgtggaaaaggtgttccttcctcacagcaatggatgct

SEQ ID NO: 15579 - DNA, 567 bp, Homo sapiens
cactccagcctgggggacagagcgagaccctatctctaaaaaacaataaaagaaatagatgtgtccttcaccctcatggaactgccagtctagccttcaacctggtgactgtagaaatgtgtgattagatgctatattgccatgttgagtgtcacccctgagaagcagggttttttttgagaaggtaggatgggggatctgactgtgggaccaccagagggaaaagcacatgtaaaagctgcgtgtaccaactggaggaaatcggagacgtgatcagagaaccagagtcaaccaggggccatgccgtacagggtcctgttaagatctgtgacttttttctaaacgttttcttctggataacatctaaatttctagttccaaatgtgaaactccaagggcgttctgtgctaaacattttgcatgtattaattaatttccaccacacaacattgctgtgaattaagacagtttctaagcatggcaagaaacccagaaatcataatggaaaaatctgataaatttaacaatgccaacatgaacctctgtaggaaaaaaaataccacagac

SEQ ID NO: 15580 - DNA, 358 bp, Homo sapiens
tcatccttgaaggacctggcccattcattcccatgtgcagagtaaggatgagggcagctcatgtcagatgagtggggaggcaactggacctccattcaaggtgctgggcccaggcctggtacggccaggcagggaggagcacctgattctgggtgtattggccatttgtgacagaacccacgccacaccctacgcccagccctcccctccatttcctagggcctcctcttccacctgtgttcaatcagagtggagtgcctgtttcttcactgcattattctttttttttttttttttttggcactgcattattcttaacaatcataggactgggcccagcatggtggctcacgcctgt

SEQ ID NO: 15581 - DNA, 387 bp, Homo sapiens
tattaggctttaaaaacaagtatgtgtaaaaataagattgtatataaaaatgtgaattatgggccattacaacatcctttgtgagaaatgtgaatttcaaggaaatagaagaatggctaggtgctagcactgattccaggcttttgtgtggttttgtaggtaaagaattgggacattgggaggccgaggtgggcaggtcacctgaggtcaggagtttgagaccagcctgaccaacatggagaaaccatgtctctactaaaaaataataaaattcgccatgcgtggtggtgcatgtctgtaatctcagctactttggaggctgaggcaggagaatcgcttgaattcgggaggcggaggttgcggtgagctgagatcgcgcctttgcac

SEQ ID NO: 15582 - DNA, 291 bp, Homo sapiens
tagcatttattgttcacttgctgtgtgctgagtcctttgtattcattactcctaggcaattcttctaacagccctatgaggtaagaatttcaaaccccattttacataccagtaactggaactccaaggggatatagataccttggccaaagttttacagtgggaaatatcagaactaagacttgaacccatctgtctgactccgtagtgtgcttaaaaatatattttacttgtttacacttaatgtttaatatattcagttttaaaggtaatgcacatttgttatggaaa

SEQ ID NO: 15583 - DNA, 3202 bp, Homo sapiens
aagacgctagcgctgcgatggcggaggccgtggagcgcactgacgagctggtccgggagtacctgctcttccgcgggttcacgcacacactgcggcagctggacgccgagatcaaggcggacaaggagaaggggttccgggtggataagattgtggaccagctgcagcagttaatgcaggtgtatgacttggctgcccttcgggattattggagctacttggagcgtcggctcttcagccgcttggaggatatatacagacccacaatccacaagctgaaaaccagcctgtttcgattttatcttgtctacacaatccagacaaacagaaatgacaaggctcaggagttctttgcaaagcaggccacggaactccagaaccaggctgagtggaaggattggtttgtcctgcccttcctgccatccccggacaccaaccccacctttgctacctacttttctcgacagtgggctgacaccttcattgtgtccctgcacaacttcctgagcgtcctgtttcagtgcatgccagtccctgtgatcctgaactttgatgcggagtgtcagaggactaaccaggttcaagaagaaaatgaagttctgcgtcagaagctttttgcattgcaagctgaaatccaccgactgaagaaagaggagcaacagccagaagaggaagaggccttggtccaacacaaattgcctccttatgtctccaacatggaccgcctgggggactcggaacttgccatggtgtgcagccaaaggaatgcctccctctcccagtcacttcgtgtgggcttcctgtcctcgctgctgcctcagagtaagaagagcccctcaaggttgtcgcctgctcagggccctcctcaacctcagagctcggccaagaaagagtccttcggtggtcagggcaccaagggaaaggacccgacgtccggagccaaggatgggaagagcctcctcagcgggctggccactggggagtccggttggtcacagcaccggcagcggcgcctgcaggaccatggcaaggagaggaaggagcttttctccacaaccacttcccagtgtgcagagaagaaaccagaagccagtggcccagaggctgagccctgcccagagctccacacggagccagtggagccactgactcgggcatcctcggcaggccctgagggtggaggagtccgccccgagcagccctttattgtgctgggacaggaggagtacggggaacaccactcatccatcatgcactgcagagtggattgctctgggaggagagtcgccagcttagacgtagatggggtcatcaaagtgtggtccttcaaccccatcatgcagaccaaagcatcctccatttccaaatcaccgctgctgtctttggaatgggccaccaaacgggacagactgctcttgctgggcagtggtgtgggaacagtgcgtctctatgacacggaagccaagaagaatctctgtgaaatcaatatcaacgacaacatgcccagaatcctgtctcttgcgtgcagccccaacggggcctctttcgtctgttcggcagcagctccgagcctcacttcccaggtggacttctcagcaccagacatcggcagcaagggcatgaaccaggttcctggcaggctgctgctgtgggacacgaaaaccatgaagcagcagctccagttctccctggatccagaacccattgctatcaactgtacagccttcaatcacaacgggaacctgctggtcacaggggcagctgatggcgtcatccggctgtttgacatgcagcagcatgagtgcgcgatgagctggagggcccactacggggaggtctactctgtggagttcagctatgatgagaacaccgtgtacagcatcggcgaggacgggaagttcatccagtggaacatccacaagagtggcctcaaggtatccgagtacagcctcccctcagatgccacgggcccctttgtgctgtctggatacagcggctacaagcaggttcaagtccccaggggccgactcttcgcttttgactcagagggaaattacatgctgacatgttctgccacaggcggcgtcatctacaagctgggtggcgatgagaaggttctggagagctgcttgagcctaggtggccaccgagcccctgtggtcaccgtggactggagcactgccatggactgtgggacctgcctcaccgcctccatggatggcaagatcaagctgaccaccctcctggcccataaagcctgatgacttgccccaagggccacccgaggaagcagtattatctgcggtggggggaggagatataggacaggaaaaccacgtgctccactccagctccctgccagtgcagtgactctgcagggaaagactggcaaggaggctcaggtgcttccatctgtggtgactggaatgggacccacgtggagtaggtgacatatgcttcccagagactggtattgtggctgtgccaggagtacatgtgagactatgggaggaaagctccggaagaaggagaaacattgcagtggctactgtgttggcccagtagaaattgacagtattttgtatatatgtgcccatttatctttttcttttttaaaaaaagagaatactcttgtggtcccctgatgtctctttctaggatgtgtgtcactttgcttcagtgacagccctcccacccagcctggctctgctggccccgaactgaacctctccaggctctcctgttgctttgccatggagccaggtcagctctctgtctgttctgctgggtaacaaggtttggcagttcctgtttctctgggcttaagtcaaggccacagaattctttttcttccctgaaagctggcagcttttgttacagaagattctcaggatgaaggcaggggctgaggcctctgctactggctgcccctttccatccagtggctgctgtttcccaagacgggctaagcgtttcttatctgaaatgcttgggacaggagtgttacagattttggattttttcagactttggaatatttgcatatatacataatgaggtatcttggtaggtctcatgtctaaacatgaaattcattcatgttttatatataccttatacatgtagcctgaaggtaactctatacagtattttaaataattttgtacatgaaacaaagtattgattgtggtcaggtgtggta

SEQ ID NO: 15584 - DNA, 886 bp, Homo sapiens
aagacgctagcgctgcgatggcggaggccgtggagcgcactgacgagctggtccgggagtacctgctcttccgcgggttcacgcacacactgcggcagctggacgccgagatcaaggcggacaaggagaaggggttccgggtggataagattgtggaccagctgcagcagttaatgcaggtgtatgacttggctgcccttcgggattattggagctacttggagcgtcggctcttcagccgcttggaggatatatacagacccacaatccacaagctgaaaaccagcctgtttcgattttatcttgtctacacaatccagacaaacagaaatgacaaggctcaggagttctttgcaaagcaggccacggaactccagaaccaggctgagtggaaggattggtttgtcctgcccttcctgccatccccggacaccaaccccacctttgctacctacttttctcgacagtgggctgacaccttcattgtgtccctgcacaacttcctgagcgtcctgtttcagtgcatgccagtccctgtgatcctgaactttgatgcggagtgtcagaggactaaccaggttcaagaagaaaatgaagttctgcgtcagaagctttttgcattgcaagctgaaatccaccgactgaagaaagaggagcaacagccagaagaggaagaggccttggtccaacacaaattgcctccttatgtctccaacatggaccgcctgggggactcggaacttcacttcgtgtgggcttcctgtcctcgctgctgcctcagagtaagaagagcccctcaaggttgtcgcctgctcagggccctcctcaacctcagagctcggccaagaaagagtccttcggtggtcaggtaagcacaagtcctgcc

SEQ ID NO: 15585 - DNA, 434 bp, Homo sapiens
cagtgtcttcctagacttagggctcccaggtgagctccccccagggactcctgagcctcacttctgacctggtgaaagaagctgcctctgaggcttagaagcagcctgacctcttgggcaggggcagctttatggcgctcattgggtcctgggtgcctgcccttggcttccagaacagctgtcagcctgagtagagggtgagggggcctcctgctgcaggcagattccttctgcagagccctggccaggatgtgagtggccgtgtctcattgcctcagacatgcagcagcatgagtgcgcgatgagctggagggcccactacggggaggtctactctgtggagttcagctatgatgagaacaccgtgtacagcatcggcgaggacgggaaggtaggcggctgcaggattcagataagagagcaccgggatgaca

SEQ ID NO: 15586 - DNA, 3089 bp, Homo sapiens
aagacgctagcgctgcgatggcggaggccgtggagcgcactgacgagctggtccgggagtacctgctcttccgcgggttcacgcacacactgcggcagctggacgccgagatcaaggcggacaaggagaaggggttccgggtggataagattgtggaccagctgcagcagttaatgcaggtgtatgacttggctgcccttcgggattattggagctacttggagcgtcggctcttcagccgcttggaggatatatacagacccacaatccacaagctgaaaaccagcctgtttcgattttatcttgtctacacaatccagacaaacagaaatgacaaggctcaggagttctttgcaaagcaggccacggaactccagaaccaggctgagtggaaggattggtttgtcctgcccttcctgccatccccggacaccaaccccacctttgctacctacttttctcgacagtgggctgacaccttcattgtgtccctgcacaacttcctgagcgtcctgtttcagtgcatgccagtccctgtgatcctgaactttgatgcggagtgtcagaggactaaccaggttcaagaagaaaatgaagttctgcgtcagaagctttttgcattgcaagctgaaatccaccgactgaagaaagaggagcaacagccagaagaggaagaggccttggtccaacacaaattgcctccttatgtctccaacatggaccgcctgggggactcggaacttgccatggtgtgcagccaaaggaatgcctccctctcccagtcacttcgtgtgggcttcctgtcctcgctgctgcctcagagtaagaagagcccctcaaggttgtcgcctgctcagggccctcctcaacctcagagctcggccaagaaagagtccttcggtggtcagggcaccaagggaaaggacccgacgtccggagccaaggatgggaagagcctcctcagcgggctggccactggggagtccggttggtcacagcaccggcagcggcgcctgcaggaccatggcaaggagaggaaggagcttttctccacaaccacttcccagtgtgcagagaagaaaccagaagccagtggcccagaggctgagccctgcccagagctccacacggagccagtggagccactgactcgggcatcctcggcaggccctgagggtggaggagtccgccccgagcagccctttattgtgctgggacaggaggagtacggggaacaccactcatccatcatgcactgcagagtggattgctctgggaggagagtcgccagcttagacgtagatggggtcatcaaagtgtggtccttcaaccccatcatgcagaccaaagcatcctccatttccaaatcaccgctgctgtctttggaatgggccaccaaacgggacagactgctcttgctgggcagtggtgtgggaacagtgcgtctctatgacacggaagccaagaagaatctctgtgaaatcaatatcaacgacaacatgcccagaatcctgtctcttgcgtgcagccccaacggggcctctttcgtctgttcggcagcagctccgagcctcacttcccaggtggacttctcagcaccagacatcggcagcaagggcatgaaccaggttcctggcaggctgctgctgtgggacacgaaaaccatgaagcagcagctccagttctccctggatccagaacccattgctatcaactgtacagccttcaatcacaacgggaacctgctggtcacaggggcagctgatggcgtcatccggctgtttgttcatccagtggaacatccacaagagtggcctcaaggtatccgagtacagcctcccctcagatgccacgggcccctttgtgctgtctggatacagcggctacaagcaggttcaagtccccaggggccgactcttcgcttttgactcagagggaaattacatgctgacatgttctgccacaggcggcgtcatctacaagctgggtggcgatgagaaggttctggagagctgcttgagcctaggtggccaccgagcccctgtggtcaccgtggactggagcactgccatggactgtgggacctgcctcaccgcctccatggatggcaagatcaagctgaccaccctcctggcccataaagcctgatgacttgccccaagggccacccgaggaagcagtattatctgcggtggggggaggagatataggacaggaaaaccacgtgctccactccagctccctgccagtgcagtgactctgcagggaaagactggcaaggaggctcaggtgcttccatctgtggtgactggaatgggacccacgtggagtaggtgacatatgcttcccagagactggtattgtggctgtgccaggagtacatgtgagactatgggaggaaagctccggaagaaggagaaacattgcagtggctactgtgttggcccagtagaaattgacagtattttgtatatatgtgcccatttatctttttcttttttaaaaaaagagaatactcttgtggtcccctgatgtctctttctaggatgtgtgtcactttgcttcagtgacagccctcccacccagcctggctctgctggccccgaactgaacctctccaggctctcctgttgctttgccatggagccaggtcagctctctgtctgttctgctgggtaacaaggtttggcagttcctgtttctctgggcttaagtcaaggccacagaattctttttcttccctgaaagctggcagcttttgttacagaagattctcaggatgaaggcaggggctgaggcctctgctactggctgcccctttccatccagtggctgctgtttcccaagacgggctaagcgtttcttatctgaaatgcttgggacaggagtgttacagattttggattttttcagactttggaatatttgcatatatacataatgaggtatcttggtaggtctcatgtctaaacatgaaattcattcatgttttatatataccttatacatgtagcctgaaggtaactctatacagtattttaaataattttgtacatgaaacaaagtattgattgtggtcaggtgtggta

SEQ ID NO: 15587 - DNA, 3163 bp, Homo sapiens
aagacgctagcgctgcgatggcggaggccgtggagcgcactgacgagctggtccgggagtacctgctcttccgcgggttcacgcacacactgcggcagctggacgccgagatcaaggcggacaaggagaaggggttccgggtggataagattgtggaccagctgcagcagttaatgcaggtgtatgacttggctgcccttcgggattattggagctacttggagcgtcggctcttcagccgcttggaggatatatacagacccacaatccacaagctgaaaaccagcctgtttcgattttatcttgtctacacaatccagacaaacagaaatgacaaggctcaggagttctttgcaaagcaggccacggaactccagaaccaggctgagtggaaggattggtttgtcctgcccttcctgccatccccggacaccaaccccacctttgctacctacttttctcgacagtgggctgacaccttcattgtgtccctgcacaacttcctgagcgtcctgtttcagtgcatgccagtccctgtgatcctgaactttgatgcggagtgtcagaggactaaccaggttcaagaagaaaatgaagttctgcgtcagaagctttttgcattgcaagctgaaatccaccgactgaagaaagaggagcaacagccagaagaggaagaggccttggtccaacacaaattgcctccttatgtctccaacatggaccgcctgggggactcggaacttgccatggtgtgcagccaaaggaatgcctccctctcccagtcacttcgtgtgggcttcctgtcctcgctgctgcctcagagtaagaagagcccctcaaggttgtcgcctgctcagggccctcctcaacctcagagctcggccaagaaagagtccttcggtggtcagggcaccaagggaaaggacccgacgtccggagccaaggatgggaagagcctcctcagcgggctggccactggggagtccggttggtcacagcaccggcagcggcgcctgcaggaccatggcaaggagaggaaggagcttttctccacaaccacttcccagtgtgcagagaagaaaccagaagccagtggcccagaggctgagccctgcccagagctccacacggagccagtggagccactgactcgggcatcctcggcaggccctgagggtggaggagtccgccccgagcagccctttattgtgctgggacaggaggagtacggggaacaccactcatccatcatgcactgcagagtggattgctctgggaggagagtcgccagcttagacgtagatggggtcatcaaagtgtggtccttcaaccccatcatgcagaccaaagcatcctccatttccaaatcaccgctgctgtctttggaatgggccaccaaacgggacagactgctcttgctgggcagtggtgtgggaacagtgcgtctctatgacacggaagccaagaagaatctctgtgaaatcaatatcaacgacaacatgcccagaatcctgtctcttgcgtgcagccccaacggggcctctttcgtctgttcggcagcagctccgagcctcacttcccaggtggacttctcagcaccagacatcggcagcaagggcatgaaccaggttcctggcaggctgctgctgtgggacacgaaaaccatgaagcagcagtgtacagccttcaatcacaacgggaacctgctggtcacaggggcagctgatggcgtcatccggctgtttgacatgcagcagcatgagtgcgcgatgagctggagggcccactacggggaggtctactctgtggagttcagctatgatgagaacaccgtgtacagcatcggcgaggacgggaagttcatccagtggaacatccacaagagtggcctcaaggtatccgagtacagcctcccctcagatgccacgggcccctttgtgctgtctggatacagcggctacaagcaggttcaagtccccaggggccgactcttcgcttttgactcagagggaaattacatgctgacatgttctgccacaggcggcgtcatctacaagctgggtggcgatgagaaggttctggagagctgcttgagcctaggtggccaccgagcccctgtggtcaccgtggactggagcactgccatggactgtgggacctgcctcaccgcctccatggatggcaagatcaagctgaccaccctcctggcccataaagcctgatgacttgccccaagggccacccgaggaagcagtattatctgcggtggggggaggagatataggacaggaaaaccacgtgctccactccagctccctgccagtgcagtgactctgcagggaaagactggcaaggaggctcaggtgcttccatctgtggtgactggaatgggacccacgtggagtaggtgacatatgcttcccagagactggtattgtggctgtgccaggagtacatgtgagactatgggaggaaagctccggaagaaggagaaacattgcagtggctactgtgttggcccagtagaaattgacagtattttgtatatatgtgcccatttatctttttcttttttaaaaaaagagaatactcttgtggtcccctgatgtctctttctaggatgtgtgtcactttgcttcagtgacagccctcccacccagcctggctctgctggccccgaactgaacctctccaggctctcctgttgctttgccatggagccaggtcagctctctgtctgttctgctgggtaacaaggtttggcagttcctgtttctctgggcttaagtcaaggccacagaattctttttcttccctgaaagctggcagcttttgttacagaagattctcaggatgaaggcaggggctgaggcctctgctactggctgcccctttccatccagtggctgctgtttcccaagacgggctaagcgtttcttatctgaaatgcttgggacaggagtgttacagattttggattttttcagactttggaatatttgcatatatacataatgaggtatcttggtaggtctcatgtctaaacatgaaattcattcatgttttatatataccttatacatgtagcctgaaggtaactctatacagtattttaaataattttgtacatgaaacaaagtattgattgtggtcaggtgtggta

SEQ ID NO: 15588 - DNA, 3175 bp, Homo sapiens
aagacgctagcgctgcgatggcggaggccgtggagcgcactgacgagctggtccgggagtacctgctcttccgcgggttcacgcacacactgcggcagctggacgccgagatcaaggcggacaaggagaaggggttccgggtggataagattgtggaccagctgcagcagttaatgcaggtgtatgacttggctgcccttcgggattattggagctacttggagcgtcggctcttcagccgcttggaggatatatacagacccacaatccacaagctgaaaaccagcctgtttcgattttatcttgtctacacaatccagacaaacagaaatgacaaggctcaggagttctttgcaaagcaggccacggaactccagaaccaggctgagtggaaggattggtttgtcctgcccttcctgccatccccggacaccaaccccacctttgctacctacttttctcgacagtgggctgacaccttcattgtgtccctgcacaacttcctgagcgtcctgtttcagtgcatgccagtccctgtgatcctgaactttgatgcggagtgtcagaggactaaccaggttcaagaagaaaatgaagttctgcgtcagaagctttttgcattgcaagctgaaatccaccgactgaagaaagaggagcaacagccagaagaggaagaggccttggtccaacacaaattgcctccttatgtctccaacatggaccgcctgggggactcggaacttgccatggtgtgcagccaaaggaatgcctccctctcccagtcacttcgtgtgggcttcctgtcctcgctgctgcctcagagtaagaagagcccctcaaggttgtcgcctgctcagggccctcctcaacctcagagctcggccaagaaagagtccttcggtggtcagggcaccaagggaaaggacccgacgtccggagccaaggatgggaagagcctcctcagcgggctggccactggggagtccggttggtcacagcaccggcagcggcgcctgcaggaccatggcaaggagaggaaggagcttttctccacaaccacttcccagtgtgcagagaagaaaccagaagccagtggcccagaggctgagccctgcccagagctccacacggagccagtggagccactgactcgggcatcctcggcaggccctgagggtggaggagtccgccccgagcagccctttattgtgctgggacaggaggagtacggggaacaccactcatccatcatgcactgcagagtggattgctctgggaggagagtcgccagcttagacgtagatggggtcatcaaagtgtggtccttcaaccccatcatgcagaccaaagcatcctccatttccaaatcaccgctgctgtctttggaatgggccaccaaacgggacagactgctcttgctgggcagtggtgtgggaacagtgcgtctctatgacacggaagccaagaagaatctctgtgaaatcaatatcaacgacaacatgcccagaatcctgtctcttgcgtgcagccccaacggggcctctttcgtctgttcggcagcagctccgagcctcacttcccaggtggacttctcagcaccagacatcggcagcaagggcatgaaccaggttcctggcaggctgctgctgtgggacacgaaaaccatgaagcagcagctccagttctccctggatccagaacccattgctatcaactgtacagccttcaatcacaacgggaacctgctggtcacaggggcagctgatggcgtcatccggctgtttgttcatccagtggaacatccacaagagtggcctcaaggtatccgagtacagcctcccctcagatgccacgggcccctttgtgctgtctggatacagcggctacaagcaggttcaagtccccaggggccgactcttcgcttttgactcagagggaaattacatgctgacatgttctgccacaggcggcgtcatctacaagctgggtggcgatgagaaggttctggagagctgcttgagcctaggtggccaccgagcccctgtggtcaccgtggactggagcactgccatggactgtgggacctgcctcaccgcctccatggatggcaagatcaagctgaccaccctcctggcccataaagcctgatgacttgccccaagggccacccgaggaagcagtattatctgcggtggggggaggagatataggacaggaaaaccacgtgctccactccagctccctgccagtgcagtgactctgcagggaaagactggcaaggaggctcaggtgcttccatctgtggtgactggaatgggacccacgtggagtaggtgacatatgcttcccagagactggtattgtggctgtgccaggagtacatgtgagactatgggaggaaagctccggaagaaggagaaacattgcagtggctactgtgttggcccagtagaaattgacagtattttgtatatatgtgcccatttatctttttcttttttaaaaaaagagaatactcaaaaaaaaaaaaaaaaaaacaaaaagcaaaaaaaaaaaaaaaaaaaaaaaaaaaaaaaaaaaaaaaaaaaaaaacaaaaaaaaaaagaggcgggggcggggcagcagaacagcactcaccgcgggggggggcgcccaacgtccggacggaccacgatgctgggaggaaaaggcggcgggcccacaaacaagaggagcgcacgtaaacaaaccaaccaggcagagccggagcgacgcagctacaaccccgacacgccgccggaggaaaacaacacgtacgataggaggaagattagaggaaagaaaaacccacaacaggggggggaaggaacaaaaggggcgaaagccaacacaagaacaagtcaccagcccgcgcgggcaacaacacaaagccagaagggggagagagaggggtaaccaaaacagacaagtaaaccgagcgcgagcagaacaagatggccgcccacgcagatcgatgacgcggaaaacaaatacacgagcggggccggatacaacagcaagcggaggacaagagacgacagcgaaggcgcacgagacgccgaaccaagcagacgacacggacaggcagacagagcgaagcagaaagcccaagaagccgagccaaggagaacagaagcgacacacgcagaaacagaaa

SEQ ID NO: 15589 - DNA, 2361 bp, Homo sapiens
gtgacaacagacccctaaggctcagatcataagttctggcatttcaggattcaagatgcacttgggggccacccagagccccataatgtctgaagttcctctgttatttttttttattgttgaactcctcctcctgcctctctgaggaagcacttgcaggagcatccggaccccagggctggtagagagtgccctggccgatgcccccagcctggattgtgtctagtgtgcagagaagaaaccagaagccagtggcccagaggctgagccctgcccagagctccacacggagccagtggagccactgactcgggcatcctcggcaggccctgagggtggaggagtccgccccgagcagccctttattgtgctgggacaggaggagtacggggaacaccactcatccatcatgcactgcagagtggattgctctgggaggagagtcgccagcttagacgtagatggggtcatcaaagtgtggtccttcaaccccatcatgcagaccaaagcatcctccatttccaaatcaccgctgctgtctttggaatgggccaccaaacgggacagactgctcttgctgggcagtggtgtgggaacagtgcgtctctatgacacggaagccaagaagaatctctgtgaaatcaatatcaacgacaacatgcccagaatcctgtctcttgcgtgcagccccaacggggcctctttcgtctgttcggcagcagctccgagcctcacttcccaggtggacttctcagcaccagacatcggcagcaagggcatgaaccaggttcctggcaggctgctgctgtgggacacgaaaaccatgaagcagcagctccagttctccctggatccagaacccattgctatcaactgtacagccttcaatcacaacgggaacctgctggtcacaggggcagctgatggcgtcatccggctgtttgacatgcagcagcatgagtgcgcgatgagctggagggcccactacggggaggtctactctgtggagttcagctatgatgagaacaccgtgtacagcatcggcgaggacgggaagttcatccagtggaacatccacaagagtggcctcaaggtatccgagtacagcctcccctcagatgccacgggcccctttgtgctgtctggatacagcggctacaagcaggttcaagtccccaggggccgactcttcgcttttgactcagagggaaattacatgctgacatgttctgccacaggcggcgtcatctacaagctgggtggcgatgagaaggttctggagagctgcttgagcctaggtggccaccgagcccctgtggtcaccgtggactggagcactgccatggactgtgggacctgcctcaccgcctccatggatggcaagatcaagctgaccaccctcctggcccataaagcctgatgacttgccccaagggccacccgaggaagcagtattatctgcggtggggggaggagatataggacaggaaaaccacgtgctccactccagctccctgccagtgcagtgactctgcagggaaagactggcaaggaggctcaggtgcttccatctgtggtgactggaatgggacccacgtggagtaggtgacatatgcttcccagagactggtattgtggctgtgccaggagtacatgtgagactatgggaggaaagctccggaagaaggagaaacattgcagtggctactgtgttggcccagtagaaattgacagtattttgtatatatgtgcccatttatctttttcttttttaaaaaaagagaatactcttgtggtcccctgatgtctctttctaggatgtgtgtcactttgcttcagtgacagccctcccacccagcctggctctgctggccccgaactgaacctctccaggctctcctgttgctttgccatggagccaggtcagctctctgtctgttctgctgggtaacaaggtttggcagttcctgtttctctgggcttaagtcaaggccacagaattctttttcttccctgaaagctggcagcttttgttacagaagattctcaggatgaaggcaggggctgaggcctctgctactggctgcccctttccatccagtggctgctgtttcccaagacgggctaagcgtttcttatctgaaatgcttgggacaggagtgttacagattttggattttttcagactttggaatatttgcatatatacataatgaggtatcttggtaggtctcatgtctaaacatgaaattcattcatgttttatatataccttatacatgtagcctgaaggtaactctatacagtattttaaataattttgtacatgaaacaaagtattgattgtggtcaggtgtggta

SEQ ID NO: 15590 - DNA, 1867 bp, Homo sapiens
tggaacctaccccccaccatcaaggccgcaggctgccaagtgtggtccgcggggctggtcctttcccaagcctaatgccccatctcctgtgcaggatccagcctcaggaccaaagtgcaccctccctctgtgggcaggcagagggtctgacccaggcccatgtgtgttgcagaatcctgtctcttgcgtgcagccccaacggggcctctttcgtctgttcggcagcagctccgagcctcacttcccaggtggacttctcagcaccagacatcggcagcaagggcatgaaccaggttcctggcaggctgctgctgtgggacacgaaaaccatgaagcagcagctccagttctccctggatccagaacccattgctatcaactgtacagccttcaatcacaacgggaacctgctggtcacaggggcagctgatggcgtcatccggctgtttgacatgcagcagcatgagtgcgcgatgagctggagggcccactacggggaggtctactctgtggagttcagctatgatgagaacaccgtgtacagcatcggcgaggacgggaagttcatccagtggaacatccacaagagtggcctcaaggtatccgagtacagcctcccctcagatgccacgggcccctttgtgctgtctggatacagcggctacaagcaggttcaagtccccaggggccgactcttcgcttttgactcagagggaaattacatgctgacatgttctgccacaggcggcgtcatctacaagctgggtggcgatgagaaggttctggagagctgcttgagcctaggtggccaccgagcccctgtggtcaccgtggactggagcactgccatggactgtgggacctgcctcaccgcctccatggatggcaagatcaagctgaccaccctcctggcccataaagcctgatgacttgccccaagggccacccgaggaagcagtattatctgcggtggggggaggagatataggacaggaaaaccacgtgctccactccagctccctgccagtgcagtgactctgcagggaaagactggcaaggaggctcaggtgcttccatctgtggtgactggaatgggacccacgtggagtaggtgacatatgcttcccagagactggtattgtggctgtgccaggagtacatgtgagactatgggaggaaagctccggaagaaggagaaacattgcagtggctactgtgttggcccagtagaaattgacagtattttgtatatatgtgcccatttatctttttcttttttaaaaaaagagaatactcttgtggtcccctgatgtctctttctaggatgtgtgtcactttgcttcagtgacagccctcccacccagcctggctctgctggccccgaactgaacctctccaggctctcctgttgctttgccatggagccaggtcagctctctgtctgttctgctgggtaacaaggtttggcagttcctgtttctctgggcttaagtcaaggccacagaattctttttcttccctgaaagctggcagcttttgttacagaagattctcaggatgaaggcaggggctgaggcctctgctactggctgcccctttccatccagtggctgctgtttcccaagacgggctaagcgtttcttatctgaaatgcttgggacaggagtgttacagattttggattttttcagactttggaatatttgcatatatacataatgaggtatcttggtaggtctcatgtctaaacatgaaattcattcatgttttatatataccttatacatgtagcctgaaggtaactctatacagtattttaaataattttgtacatgaaacaaagtattgattgtggtcaggtgtggta

SEQ ID NO: 15591 - DNA, 1695 bp, Homo sapiens
cagtgtcttcctagacttagggctcccaggtgagctccccccagggactcctgagcctcacttctgacctggtgaaagaagctgcctctgaggcttagaagcagcctgacctcttgggcaggggcagctttatggcgctcattgggtcctgggtgcctgcccttggcttccagaacagctgtcagcctgagtagagggtgagggggcctcctgctgcaggcagattccttctgcagagccctggccaggatgtgagtggccgtgtctcattgcctcagacatgcagcagcatgagtgcgcgatgagctggagggcccactacggggaggtctactctgtggagttcagctatgatgagaacaccgtgtacagcatcggcgaggacgggaagttcatccagtggaacatccacaagagtggcctcaaggtatccgagtacagcctcccctcagatgccacgggcccctttgtgctgtctggatacagcggctacaagcaggttcaagtccccaggggccgactcttcgcttttgactcagagggaaattacatgctgacatgttctgccacaggcggcgtcatctacaagctgggtggcgatgagaaggttctggagagctgcttgagcctaggtggccaccgagcccctgtggtcaccgtggactggagcactgccatggactgtgggacctgcctcaccgcctccatggatggcaagatcaagctgaccaccctcctggcccataaagcctgatgacttgccccaagggccacccgaggaagcagtattatctgcggtggggggaggagatataggacaggaaaaccacgtgctccactccagctccctgccagtgcagtgactctgcagggaaagactggcaaggaggctcaggtgcttccatctgtggtgactggaatgggacccacgtggagtaggtgacatatgcttcccagagactggtattgtggctgtgccaggagtacatgtgagactatgggaggaaagctccggaagaaggagaaacattgcagtggctactgtgttggcccagtagaaattgacagtattttgtatatatgtgcccatttatctttttcttttttaaaaaaagagaatactcttgtggtcccctgatgtctctttctaggatgtgtgtcactttgcttcagtgacagccctcccacccagcctggctctgctggccccgaactgaacctctccaggctctcctgttgctttgccatggagccaggtcagctctctgtctgttctgctgggtaacaaggtttggcagttcctgtttctctgggcttaagtcaaggccacagaattctttttcttccctgaaagctggcagcttttgttacagaagattctcaggatgaaggcaggggctgaggcctctgctactggctgcccctttccatccagtggctgctgtttcccaagacgggctaagcgtttcttatctgaaatgcttgggacaggagtgttacagattttggattttttcagactttggaatatttgcatatatacataatgaggtatcttggtaggtctcatgtctaaacatgaaattcattcatgttttatatataccttatacatgtagcctgaaggtaactctatacagtattttaaataattttgtacatgaaacaaagtattgattgtggtcaggtgtggta

SEQ ID NO: 15592 - DNA, 1782 bp, Homo sapiens
aagacgctagcgctgcgatggcggaggccgtggagcgcactgacgagctggtccgggagtacctgctcttccgcgggttcacgcacacactgcggcagctggacgccgagatcaaggcggacaaggagaaggggttccgggtggataagattgtggaccagctgcagcagttaatgcaggtgtatgacttggctgcccttcgggattattggagctacttggagcgtcggctcttcagccgcttggaggatatatacagacccacaatccacaagctgaaaaccagcctgtttcgattttatcttgtctacacaatccagacaaacagaaatgacaaggctcaggagttctttgcaaagcaggccacggaactccagaaccaggctgagtggaaggattggtttgtcctgcccttcctgccatccccggacaccaaccccacctttgctacctacttttctcgacagtgggctgacaccttcattgtgtccctgcacaacttcctgagcgtcctgtttcagtgcatgccagtccctgtgatcctgaactttgatgcggagtgtcagaggactaaccaggttcaagaagaaaatgaagttctgcgtcagaagctttttgcattgcaagctgaaatccaccgactgaagaaagaggagcaacagccagaagaggaagaggccttggtccaacacaaattgcctccttatgtctccaacatggaccgcctgggggactcggaacttgccatggtgtgcagccaaaggaatgcctccctctcccagtcacttcgtgtgggcttcctgtcctcgctgctgcctcagagtaagaagagcccctcaaggttgtcgcctgctcagggccctcctcaacctcagagctcggccaagaaagagtccttcggtggtcagggcaccaagggaaaggacccgacgtccggagccaaggatgggaagagcctcctcagcgggctggccactggggagtccggttggtcacagcaccggcagcggcgcctgcaggaccatggcaaggagaggaaggagcttttctccacaaccacttcccagtgtgcagagaagaaaccagaagccagtggcccagaggctgagccctgcccagagctccacacggagccagtggagccactgactcgggcatcctcggcaggccctgagggtggaggagtccgccccgagcagccctttattgtgctgggacaggaggagtacggggaacaccactcatccatcatgcactgcagagtggattgctctgggaggagagtcgccagcttagacgtagatggggtcatcaaagtgtggtccttcaaccccatcatgcagaccaaagcatcctccatttccaaatcaccgctgctgtctttggaatgggccaccaaacgggacagactgctcttgctgggcagtggtgtgggaacagtgcgtctctatgacacggaagccaagaagaatctctgtgaaatcaatatcaacgacaacatgcccaggatccagcctcaggaccaaagtgcaccctccctctgtgggcaggcagagggtctgacccaggcccatgtgtgttgcagaatcctgtctcttgcgtgcagccccaacggggcctctttcgtctgttcggcagcagctccgagcctcacttcccaggtggacttctcagcaccagacatcggcagcaagggcatgaaccaggttcctggcaggctgctgctgtgggacacgaaaaccatgaagcagcaggcaggtacgggcctgccctgtggctctc

SEQ ID NO: 15593 - DNA, 921 bp, Homo sapiens
  misc_feature (93)..(93): n is a, c, g, or t
cccccccaaaaaaatttttttttggggggggggaaaaattaagaaaaaaaaacccgggttccccccccccccccctcgcaatgctgtgttttnagaaggaaagactggcaaggaggctcaggtgcttccatctgtggtgactggaatgggacccacgtggagtaggtgacatatgcttcccagagactggtattgtggctgtgccaggagtacatgtgagactatgggaggaaagctccggaagaaggagaaacattgcagtggctactgtgttggcccagtagaaattgacagtattttgtatatatgtgcccatttatctttttcttttttaaaaaaagagaatactcttgtggtcccctgatgtctctttctaggatgtgtgtcactttgcttcagtgacagccctcccacccagcctggctctgctggccccgaactgaacctctccaggctctcctgttgctttgccatggagccaggtcagctctctgtctgttctgctgggtaacaaggtttggcagttcctgtttctctgggcttaagtcaaggccacagaattctttttcttccctgaaagctggcagcttttgttacagaagattctcaggatgaaggcaggggctgaggcctctgctactggctgcccctttccatccagtggctgctgtttcccaagacgggctaagcgtttcttatctgaaatgcttgggacaggagtgttacagattttggattttttcagactttggaatatttgcatatatacataatgaggtatcttggtaggtctcatgtctaaacatgaaattcattcatgttttatatataccttatacatgtagcctgaaggtaactctatacagtattttaaataattttgtacatgaaacaaagtattgattgtggtcaggtgtggta

SEQ ID NO: 15594 - DNA, 576 bp, Homo sapiens
gtgggctgacaccttcattgtgtccctgcacaacttcctgagcgtcctgtttcagtgcatgcatatcctttcagttgcctggggctgaaggcccagcctgaggcacccagacctcaggatcagtagcccgctggtctccatacaggcatttcttctacaaaaatgcccagggaccatttttatgggtcacatgagggggctggacaaattgtggttgtttttgtcagtaagccagggaatcataaatcttagttctgacactgtgctgctgaagtattagctgacgtgtgggcagtgacagtggcagcagtggggtgctagtactggctttgtcagcaggcactggggttggaaggcagctgctgcttggagaaaccgggcagccttgagagtaccctctctgtgcatgaaacgtgttcccggggatatacctttgctgggattaggtacagatgagaagacttcttgggttggaacttctgtctgtgttagtgtttgggttattgtctctaatagtaacttcagtgttcctcaagttgccagagaacacagtagctttaagaatatatatgcggg

SEQ ID NO: 15595 - DNA, 384 bp, Homo sapiens
tatgttatccccaacacctgaaaacaggatgaaagcgctgtttactgcaattccttttacccagtgtatcatgtctacctatcaacagaaaattacaaagcatacttaaaaggcagaaaatgcaggtgatgttatccccaacacctgaaaacaggatgaaagccctgtttactgcaattccttttacccagtgtatcatgtctacctatcaacagaaaattacaaagcatacttaaaaggcagaaaatgcagtttgaagagactgaacaagcattagaaccagagtcagtcgtggcaggagtgttgggcgataacgtatttatccccaacacagaaaagataatattgctaataaaatttaaaaagtgttgggcgataacatca

SEQ ID NO: 15596 - DNA, 432 bp, Homo sapiens
  misc_feature (5)..(5): n is a, c, g, or t
  misc_feature (107)..(107): n is a, c, g, or t
tggantgaggcccactgtccccccagcccaataacccccccttttaaaaaaggttatttatttaatatttttaagagatgggggtcctcacctcctattgcctcagncctagagtgcagtagccttgatcatgacctcatggcagccttgagcccccaggagttcaaggccagcctaggcagcatagcgagatcatctttcttaaaaaaaaaaaaaaaagaaaaaaaagaaaagaaaaagaaattttaagaattttttaaatactagagaccaaaaacaccataaccgaaaggaacagtgcctttgacaggctcgttagtggatggtacacggcctccaagagattgttatttgaaagtggacttgtattagctgtaaatgcagattgcaaaccaatttaaaaagttaaaaaagaagtatagttgatatgct

SEQ ID NO: 15597 - DNA, 584 bp, Homo sapiens
ctctattaggtactgacagtgaatatcagagaaaaatctccttgtgcttctggcaggaggaagtgaaaagggaccactttggaatataccattctgttcttaacaagacctgccctcaggagaaacaattttaccagggcctaacctgctggtgtttttatcagaacttaaccttcctgggggaagggaaatacctaacactagctacttctggatattctgtcccacctaatggcaggtgggggaagctgaaaagcacttgggaagttcatagtccagggacacaagctcagcaagactgagccctgctcatagtatcatagaacactttcccaccccaacacctgaaaacaggatgaaagccctgtttactgcaattccttttacccagtgtatcatgtctacctatcaacagaaaattacaaagcatacttaaaaggcagaaaatgcagtttgaagagactgaacaagcattagaaccagagtcagtcgtggcaggagtgttgggcgataacgtatttatccccaacacagaaaagataatattgctaataaaatttaaaaagtgttgggcgataacatca

SEQ ID NO: 15598 - DNA, 282 bp, Homo sapiens
aacaagcattagaaccagagtcagtcgtggcaggagtgttggagtaatcagaccaggtatttttttaaaactatgattaacgtgctgagggctttaagggaaaaagtagacagtatgcaaaaacagattgataatgtaagcaaaagagattaaaattttaagaagctggatgtggtggcacatacctgtatttgcaactcctcatagtgtagcaggattgcttgagcccaggagttcaaggccagcctaggcagcatagcgagatcatctttcttaaaaaaa

SEQ ID NO: 15599 - DNA, 441 bp, Homo sapiens
gacatcagaatacaactcaatgcacctcacgccattagacagcatgagtgacaagccgcagggaggatatatcagacagcaccagatcttagctggtaggaagctgattgacaagttctgtggaggacagagcagcagagccctgaagtccacagcaataaggggaagatggtgttctagacacaccagcagggaagagccaaacctggatggtcagtttgacctcccagggtaaggagcctctgggtcttctctacctctcccaggaccaccacagtgaaactagagccagagggttctttgctgaaaagagggtgagtgaggtggagagatgcagatgagaggaggctttatgcagaagccatcaggttgtgccatatctaaagcctggaaaaaggaggataccagctgataggatttggctctatgtccccaaccaaa

SEQ ID NO: 15600 - DNA, 947 bp, Homo sapiens
tataacaaagctaaacacaattaaatggtaaaagccactacaacttttaactcttgaaggactgaacagtaagatatcagaattttacatgcttttttagccacttctcccttgtctaggaaacccagtgcttttttctgacatagtggcatgcccaaacccagccataggttttcaggtttgacctctcaacaccactactttgttgcttttaaaataaatgtgctttcagagccttcagaaacatgtctacccattccagagagctatgacaatacagagaaagagagaaaaaagaaagagtcccaggagttgtgggcatatgccaggagaggccccacagagaagagacgtgccctcaagaaataatgccaacattaatccaagtctctgaagtggattgagccccaccagtaacaacaaagaggagcccagcacccttcccacagtgctctgtcacacagatatttatgaaggggttgcctcagaagcccacattcatccaagaggtggtgtcagtggtggaattagtcacacctgccagtgaatagcatataacagctgtacagacacaagtgagttattggtcttgggctacaatctcccaggaagcaaactatgcaatttctgctgcttccaggccaattgaaaggaacttaaacttgcaaatgattaagtgtcttaattgtgtcatcttaaagctttaagaataccaaaaggctgggagaaacccagctggggcattcagatgcctgaccctaaattttagcagccatgacacctttcatcctacttctccctcctcttcagatcctatacacaggttcttacttgcccaaagcaagctagttagtagaagaggcagccctagaaaccaaggcttctgactcctagtccagcattccttcttaccacagtgttctcttgtttttatataacaggaaagg

SEQ ID NO: 15601 - DNA, 2603 bp, Homo sapiens
ccctccacttttggagcttatcaggtaaaaatctcaagccacatgaattgttaacacctctgttgggaaaagcctttgtgagtttttatgtacttggtctttgtttttgttattcatcctgtgtcctccctcttcccgatgtgctgttttacctaggagttagtctgctttctgaggatcttttagagagaggctgtgaagtgctgaatcacctttaatgatacagcacttctgccatctcagcatctacataggacttacatagacttcctgaatgtgtcttcttcagatactaaagtacagttggatcattttcttatctccttttcttaagcagtactttgcaggtactcccctttgaaagccagaagcataaaccattggggaatcttaacttgtagacatgcagtaaaagaaatgcatttatgtaagatctgtgagtacttaaaaagaaagccctcagtgtgtgtgaagtgaatgtgaaatgtgtgtgaaatacatagaattcccaaatagtttagcaaaggcagggcgcaatatcaagtaatttaaaaatggtccaaggaactgtaagaaggaggaactaattctagaataaatgttaaaatgccattcaagaacaaaaccacagatgccatacagacctcctgtgcttaagttatagaagaataaaaatctgaatgaatggaaggccttacgtgtatacagtttacaaattcctatttctaaaatttaagtcccttatttaacagaagtatgtattttaatgcttaactgtctcgggaaacctcatttgtgacatcatctaaggggatgggaagactagggagccagtgccacgttgaacagaacagtggtttagtgaatgtgtgaggaaagacatgggcaactgattattaatgtttttgtaattcagtttataacttggaaccaatgaaaagcaacaaaactaaactggtttgacagcctgccacttctggcatttcctgtaagtcactagcagtaggtgtgaggtgggcttgcccatgaccaggaggggtgtgtgtgtgtgtgtgcatgtgtgtatatgcgtgttggtctgcagtcacagcatacctttatgtgcatgtgtcctcgcagcttgggactcagcagtattctgggagggtggaggtgaactgtcccatgtattgtattatatattttggagatggggtcttgctctgttgcccaggctggagtgcagtggtgcgatctcagctcactgcaacttttgcctcctggttcaagcagttctcctgcctcagcctgccaaatagctgggattacaggtgtgtaccaccactcccagctaatttttgtatttttagtagagatggggttttaccatgttggccaggctggtctcgagctcctggcctcaggtgatccacctgctttggcctcccaaagtgctgagattacaggcgtgaactaccgcgcctggccccatgtattgtatttttttcaggttatattgaaatctactaccaggaatgtcggaatgggttttggtatgtataatggaaatagatagagtggttaagtctagaaacacatacattaattgtattgaaatgttatatcaatacatcatttatgatgtgtgtgtggtcccagacctcatggccaccagtttgtttaagcattgtgaatgctttttaatagcattcattagcattaatggaggaggacactgtgttttctcaattaatctcattgatttgtttggtataagtttgggtcagaaatgaaactgccaaaacatcgatcagtacaaggaagggacacagggcttaaaatgtccacagtcttggcagtggacttggcagttctcccagtaagcagaagtacttgagctttaattctgaacttcaaagtaatattttatacttaattttaggagttttcatttacatattgaaaaatgccttgactgtattcacataaatggtgctaaaacattgtaccccttataagaactgcagcaatccacagtaatgttggttacttctgagtatttgataaaggaacaaagtcaaaatgaatgtatttaataagcttctttctcatttccattgtttttataaaaatattttggtattgttgcctgcattttagccacttctaactttttgtattatgaatttggagaggataacaagccaactttagaccctctgccagtggcgatggtgtttttcttccatgggtaagccattgtgaatggaggctggtggagcagcacactgtgtgaacctggcagcgctcatcttggcttgtttagcagtgcctctgtttacaccataagatgttccgcatgtgtccaaaatttcgcctgctctgaaaaacatgcccccgaggctctgtgcagtttggggccttggttcccacctgcagatgcggtcagttgcctggctcctggggccagagtttcctctgttacttgttgagtctcttgtcttcactgtcagaagctgaactgacttgggggctttgctgttgatccactttagcaaaccctgctgcagaggactgtaaaaacaaataactaaaaataaacttagaaaatacaactcagaaac

SEQ ID NO: 15602 - DNA, 199 bp, Homo sapiens
ctctgccttcctcctgcagaggacccccacttcagaaaccccagtgccaggggtttggactggaacggagaggtgcggcgccttgaactggttggccaagtctgcaggcctgtttctccttctcatttatcattaatcttggccacaaccctggacaccagagagctcaaaatgatcagctttttgagagacctgggat

SEQ ID NO: 15603 - DNA, 493 bp, Homo sapiens
ctgggccattgtgctgctgatgcttggtggatgctgttgagtgagtgacttcacctttctgtggcctcagtttcctcatgtggaaaatgggagacataatagtgtctatctcataggtaaattattcagaaaggcatccagcacagagtaagcacactcttaacagctctttcaccggtagttatttaaacatgtattgtgaaatacattcttgcaacttctttctcactacttattctagaaacagagactcggagatctgaaagtggaacagcatcaaacacacacatcacccagaaacctagaacgttagagcttgcaagaagctcaaagaagctcaggcctaatctgaaacctattaacagaacccagttccaatgtaacaaatgcttattgagcacctactatgtgcatgcccttcactggacgtttagaatccgagactgatctcggctcttgaacagttcagaacttaatggggtagacaaagacc

SEQ ID NO: 15604 - DNA, 408 bp, Homo sapiens
gcggctggcgctcttcttcgtcaagagctccatgcacctggcgcgctgccgctgggccagtgcgcccccgctctacacgctcatcgacgtgctcaagtacagctacgtgcggcttgtgtgcaaggacgtgcgtgcgcccagccggcccgccgtgggaaacagagactcggagatctgaaagtggaacagcatcaaacacacacatcacccagaaacctagaacgttagagcttgcaagaagctcaaagaagctcaggcctaatctgaaacctattaacagaacccagttccaatgtaacaaatgcttattgagcacctactatgtgcatgcccttcactggacgtttagaatccgagactgatctcggctcttgaacagttcagaacttaatggggtagacaaagacc

SEQ ID NO: 15605 - DNA, 411 bp, Homo sapiens
gacaggtaggcagagtaaactagttcacttcgggtctgtttgtggattggtgatactctgtgtgaagacctggagaggattgttcccagacctagcacggccctggacccagttcatcagcagatgtttcccaaggaaaacagacatcaccctctaccctggctgacctctgccttccttttcctcctttgtcctgagtgagtaactgcacttagagaaaagctgcaccccaccaccattaagtggctttcaccaaacacacacctttccaagacccaatacttggaaggagaggcggttttcccttgcaagatggcagcaggatacagactctgccctgcctgggggactctgagcaggaccccaaagagctctgaccgtctcatgcctacactttttgggtccaccgcc

SEQ ID NO: 15606 - DNA, 316 bp, Homo sapiens
tactgacattgaatttaagttttgcctatatatgtgtatatgtttgtatatttgtatatttgtcacataaattcctagaaatggaattgatgagtcagagggtgtatgcatttgtaattttgactgatattgccgtctttatagagacactcctgctcataatatgaggatgcctatttccccatacctatgctagcctaagtttcaacagaccttgatcatttccaatcagatgggccagtttccacctgtcttctttttacagggctcagtcacaagtattttacaaaggattttctgtgttttcaagtggttt

SEQ ID NO: 15607 - DNA, 467 bp, Homo sapiens
tcagtggctctcagtgggcacaagaatagcagcaggaacaagattttgttatgtgtcttaggtcattttggagaatcagccttcctttctgtggtgctagctggggttagtcctgacggatcctaaggactgggtgcctaggggccattcctccctggggtctcagtggtgacagggctttccttaccccaagccagacaccaacctacactttaaacatagctcttggaggcccagttcattattgcagtgttatgtcagttgcacatttaagacttaccggcttttagctactttagggaataatttattggccaaagaaagtaagtctggttataaaatggcactttccagggaggtaccgggccccaaggtggaggctgtcgaggggacccgtttccaaggtccttcttcctagagtatgtgctgagggctgacacacacgtgcagtgtgagtcactgctgag

SEQ ID NO: 15608 - DNA, 435 bp, Homo sapiens
gacctcctactccccttcaggagcctctgcctggtcatctcgtcctgcaaataaagtggccattctgtgggtctgctcagccttttttttagaggaagatggagatgtttcctcactcgtggactgcacctcaggaaagataaagccagtgaattgaggattgcggagtattgcacacattcaggtgtcctgcagtggacaccatgacactgactccagcatgcctagaaatcaccatgggggtttaagagagtggcaccccctcagctctgcccccagaatgactggatttttgaacagactcccaggaagttctgatgtatctggttgatggaccacactggtggaacactgtgggaaaggtggggtgtacccctttcccaagcattctctgtcatctgcttttagaaaaataaagtacatgtagaaacaaag

SEQ ID NO: 15609 - DNA, 193 bp, Homo sapiens
aggagtaagagcatgcttaccgttttgatgcttttagccactgctcattagatgactccagccccaacttacttcctaaaaaccacctcaagtccaacatggatgttttattattaacagcatctcaaaccaaatactgactactctgagccccaaaccagaacactgaagcttttttttttttttttttttg

SEQ ID NO: 15610 - DNA, 470 bp, Homo sapiens
ctgtggaacactaggcgcgtcctggtgccaggaaggagtcgggacttgtttcttctgtacccatacatcccctgtggcttccgcctcctcctgggctttacggggaggtccagagggaagaggctgccaatttaagaaggaagacaccgtccttgccctgagggagtctctccattccgagggactccccatcacccacatgatatagtccaaccccataacccttcataactctcatctctcctgacctgtctgacctcgttttctgatcctcctaagaaattaaattcattcattcattcattcattcactcagcacttactgagaatctgctgaggatttagcagtaaacaaggatgacaagcatccagccgttttgcttgggttttgtttgtatgttttggttttcgttttgagacggagtctcgctctgttgcccaggctggagtgcagtggctcaatctcagct

SEQ ID NO: 15611 - DNA, 179 bp, Homo sapiens
tcaaggtctaagtgttcttcagtcagcttgtgtgaatgctgcttccaggcctgagaattacctttcagggaaatgggcttccctctggcccagagcaggtcccaaactgccatccaagagcccaggcttggatttatggaccccaagaccccacttggtgttctatcctatggtggctg

SEQ ID NO: 15612 - DNA, 942 bp, Homo sapiens
cacacgctcgcgctcgcggtccgcgggtcgccggggccgaaggcggcagagtcagagcgggagccgaagtcggagcaggagccatgggcggcgaaaccgacggcgccgggaggacgagggacggcgcagacggaggcggcggagccgggagcgcaggtcagattcagaggaagagcggtggcagcgctcagggatgcgaagccggagccccccgcggcccaagtggcactcaagagatgggtcctctcagtcggactcaggagaggagcagtcacggggccagtgggctcgccggcgacggcgcgcacgctcgtggtctcctagctcctcagcatccagctccgcgtctccagggcgatcccagagcccccgggcggccgcggctgccctgagccagcagcagagcctgcaggagcggctgcggctgcgggaggagcggaagcagcaggaggagctgatgaaggccttcgagacgcccgaggagaagcgcgcacggcggctggccaagaaggaggccaaggagcgcaagaagcgggagaagatgggctggggtgaggagtacatgggctacaccaacaccgacaaccccttcggagacaacaacctgctgggcaccttcatctggaataaggccctggagaagaaggggatcagccacctggaggagaaggagctgaaggagcggaacaagaggatccaggaggacaaccggctggagctgcagaaggtgaagcagctgcggctggagcgggagcgggagaaggccatgcgcgagcaggagctggagatgctgcagcgcgagaaggaggcagagcacttcaagacatgggaggagcaggaggacaacttccacctccagcaggccaagctgcgttccaagatccgcatccgggacgggcgggccaagcccatcgacctgctggccaagtacatcagcgctga

SEQ ID NO: 15613 - DNA, 168 bp, Homo sapiens
tcacttgattatttggttcagtgagaagtttatgaactggaacttaatgtgcaggcaactgcagggagcttgactacttgatagacatttgggggaaacttagtgattctcattgtaatacagtaaaatgcttgctagtaattgctacctttaggaagtaaaaagctt

SEQ ID NO: 15614 - DNA, 374 bp, Homo sapiens
tgtgtgcttcccctttaccctgttctcacttgggtccaaaccccacgcagcctgtgccaatcagaagccaagcctgggctccaggtcacagtgagacggagcccacataagggttcaggaggcagtcactgatgtggctgtgggggtcctcgggtgagcaggaccccgccccagcctcccaacctggggaggtcagagctcctgtctggttgaggcaagggctgtggatgcggggtgtggccagcagtgcagtgatgctaatgaagggattttctaatgagttttgtatagattttcatttttaatgaaggcagggaaaggataggctttattctgcaagcaatcaaataataaatctattctgctaagagatc

SEQ ID NO: 15615 - DNA, 461 bp, Homo sapiens
  misc_feature (121)..(121): n is a, c, g, or t
gggaactatcctcttgctttgttttacaagtgaggaaactgaggcgcagagtggtccaccatccatttagccctcagaatccctagagttaagtggttgctgaagcccaggatgagaactncaggcctcctggcccactgttcactgacctgctgttgagggcctcaagcactgaatggggctttcctggccccatattcttgtgtttccaaaacaaacctcccatgcaatgatgtttagataaatctcaactctaatcagtaaaaaacaagcaaaggacaagtatatttgcatctatagctatttaggtaaactgaagttaaataaaaattcaattccttagttgcattagccacatgtatctagtggccaccatattggactgtgcaaatacagaacatttccttcatggcaccgggttgggtagcactgacgtggattatcccaaggatcaaaaaaaa

SEQ ID NO: 15616 - DNA, 393 bp, Homo sapiens
caccactgtaggccccaggggatgcaagtcagggcctgcaaaagtgccttttccctcaccctctcccagtccgcacacaagagcagccacccctggtcttgccctcatgctggcccagccacacccaatggcaagggttctattgttaactcagattttttaaaaggacaaagaggagacatgttaggggcaggatgcacatttgtcattttaaaatatctccttaaattcttttcaatgaaacacaaatttgaattactgaaaagccatctatccaagtttttttttttttttagacagggtctcactctgtcacccataccagagtgcagtgagccgagatttgccactgcactccagcctgggcaacggaatgagactgtccccccacca

SEQ ID NO: 15617 - DNA, 155 bp, Homo sapiens
aagggagcagacagaaaccaatgtcaattatactcaatggtgagttgcagtgagggaggatcagttctccaaagggagtgaggacagagaactaaaagaagggagcagacagaaaccaatgtcaattatactcaatggtgagatactcttttatt

SEQ ID NO: 15618 - DNA, 328 bp, Homo sapiens
ataggcaacacacgtcactgctctcacagttcaatttataaccctccactgacacacctaccccactttattttacttttttattaaatgtctatctcctgaattagggaattcattgaggagagaagcaatatactaatcacctttaaatcagaactgcctcacacatagtaggcactcaataaaaatgccctagaaaaagcagagagttcaacaataatatgagagagcaagactgccaactattgattacagttatagagtttcataacttgagagcaaagtctataaaatatttctgtttccagtataatatatagcacattat

SEQ ID NO: 15619 - DNA, 300 bp, Homo sapiens
tattgacttgttttctgtcccagacagaatatggtgataaatgtcttacctgtatgtgagtagaatacgtattgtgctcttgttggcaggagtgttccataaatgtcaattacgtcaaattcattgatagtattattagagtttctgactaattttatcagttattgagagaggggatccagctattgtggatttgtccatttcttttttatttctgtcagttttgctttacgtattttgaagctctgtcattaggtatataaacatttagaatcattgtgtaccccttgttgaaatgat

SEQ ID NO: 15620 - DNA, 250 bp, Homo sapiens
aaggtgtgtaagtgatatcaggtaactattggattctgaaaggccccctggaaataaattatattcataaactctatagaaaccacacataaagggagcaactcgaagagggtagaagagggcttttatattaatcaggaaggaatgttgatatgtaatggtccagaaataactgaatggagcacctttatcctgacctagattgtagatttgagaacatttagtttacagatcatatgctggtgagcaa

SEQ ID NO: 15621 - DNA, 509 bp, Homo sapiens
agtttgggtgggagagaacaaaccgacaagttggttccagatgaggtggctgggagccaaccctcaggtacttggctctgagtaatgtgacggccccggcaagagggctcccactgcccaatgaggaacaaaagcctcaaggtctagtagtgtattcagcacatgcctaggaaacaagagttgggaccgtggacaaggagaggagcaaaggccaggggttaactgcttttggtttttcctctataaaagtcagggactatgatttatatgggtgagaaggtttggagtaggactgaagctgccatttacaaaccccttgccctaatttattgtagttttgggtgtgtttctgaaagaaccttttgcaggtgatttttattcagtactcattaacttacagcttttatgaattcacatcttctacactattgaaaaacatacttttgtattgtgttaagtgcagcatgagttattatatgaataaatcacattaaatttgcaaaaaaaaa

SEQ ID NO: 15622 - DNA, 354 bp, Homo sapiens
agaaagtgaggccaagaaacattaggtaactcatagcaggttacagagaaagctaagtggcagaaccggcattcgactctgctccagcaagcatgctcttttcttctacttcttttttctttatcccgtttttcaaatttccaacatggtgaaaccccatctctactaaaaaaaaaaaaaaaaaaaaaaaaaaaaaaaaaaaaaaaaatagccaggtgtggtggtgcatgcctgtaaccctagctgcttgggaggctgagttgggaggatcccttgaacctgggaggcagagattgcagtaagctgagatcatgacactgcactatagcctgggtgacaaggcaagacaatgtc

SEQ ID NO: 15623 - DNA, 565 bp, Homo sapiens
tcccgagtagctgggactacaggcgcccgccaccacgcctggctaatttttgtacttttagtagagacggggtttcaccctgttagccaggatggtctcgatctcctgacctcgtgttccgcccgcctgggcctcccagagtgctgggattacaggcgtgagccaccgcaccctgccttaaaccttaactttttaaaccttattttaaaagcagtattttctaagtccctctcactaaaacaatcctctcaaccaagccttctcttttcagataaattcatagaaactttaggtttaagatactttgttggccaggtgtggtggcttacaccaggaatcccagcactttgggaggccaaggctggtagatcacttgagtccaggagttccagaccagccagggcaacatggcgaaaccccatctcaacaaaaagtacaaatattagctgggcttgatggcatgcatctgtggtcccagctactcaggcggctaaggtgggaggttcacttgagctcaggaggcagaggttgcagtgagccaagatcacaccattccactccagcc

SEQ ID NO: 15624 - DNA, 2497 bp, Homo sapiens
gaaaattacacaatggcattcacgatcctagtcttatatcagtatataaattggtttattatttcattctattaaagaggcttttttttggtaccaggaaaacttcaaaatgcattgtgttgtcagcctcactgaattttcttttggaggaggaggtagggaggggaagccaaagccccgatttctcctgctccttttgctaattgtattggctaaatgagctttcacagaggggggtcctggctgctttttgctctcccccagaccacttgtaggttgcacacagggcttctataactctttctgagtcaggacaaagatatccgccgtgcacaccctgtgacataggtggatatttatttcatcccgggcaattctaaattttgtcatgatgactgaaagaggcaatcccctcctgagcattaagaggccaggggtgagagggtggcagcatagaaaagccaccacccagagacagcttggagccatgatcctggaggaaatgttattaataaacatcttttggacatttggtagcccgtggagcttgctccagcttaaagcaattaattcaggacactgacataaactctccagatctttgacagcttggagccgaaataaaaatgctagttctccggggaagagaagaggatggctagcccttttctggactgtttgcttataggcccagagagcaaccttccttgcagaatgaaatgcaagggcacaaacaatgtaccagggagagaatagaagatgggaatgaacagtttgaactatttgctcagcagaagggcaccacaatgctggggtagtggttttcccatgcgtccactgtcccttctttgggatcttttgttgtcccctgtctcctttggccagataaaagcacagctgcagcattgcagataacaagtaggccgtacttatccccctaaatctcggggtgcctttactgtaacaagttatgctcggctctcttttattttacaagaggatggtgagggagagaatggaagaacagagggggcggacgtataagacatttgacactgcctatgtctgatttctctttctttctttctttctttctttctttctttctttctttctttcctttctttctttcttgcaagctgtgatcggatgcaatctttgtgggacatttaaatggaagggttcattgatgtgtattgcttgccaagccaaaatgttgcctttggggaaaagggagagaggtgttcatggagtgcagggaaaggaggttttggggcagagattttgacttaaaataaccagacttcttctggctgctgaaaagaggcaaaagttttaaattgtcaagtttaaaactatgttcagttatgatttgccacttctgaatattattttggatttcccctttcatgcttattttgttcagaatcctaatgaatagaggttgctggactcagggtaaaagcaggatgaactggagatgggacatacaaggtacttttggaattgccatagattacacctataatcagagtaaatgtcatcaacaaataatcaaaatattttttacatttgctcttctaaaatcagagcctattttaaatataaaagaaagtagatgtgataataatataaactacagtcacattaagttgatattaaattcaaaatctaacatagatttgcactgttgggtgtgtgttccgaatcagtgggttttcccactgatgttgatttcgggagccaggcttcaatgtttaattctattgtaatgtggttatttagcctgaatggttttataaggtggaaaggcaaaaaatttaattccgaagaaaactagtgttttactatgactgtggtaaacatttccaaagcccacctgtgggaaatacaaagttttaatgctgtgtgtttttttgtttttgtattttgtctcatcgacaaaactggcagaaaaaaacgctttcgtatatttttcctgctgggtggtcagaaggaaaggccgtgaagctaaaggtctcccactgagacgctgttctgcaaggagccgacctcacgtgccgccgccgccagagaagagagcacctgttcatctcggctcactgtgaggctgagctcagcgctggcaggcgaggggccgcaagcatcccccacagccaccgagagggcatccctgcagggaaatcatatccgacatgcctgtgcccacagcagacttaagactgcctctaaaatgtccatgaagccattgtccagtagagctgttagttttaacaccagtgagtattacctttggttaaaaggatgcatgtgtataggtgtatgtgtgtgcgtgtgtgtttgtgtttttggacttgtgtggagaatgaagaaagggttccatttaggcatttgcaaatattcgatggcatcatgaaaagacaaaaaaatcctataaaatatatcatattttgctatgattttgtgtgtacatgtaataaaattattaagtataaat

SEQ ID NO: 15625 - DNA, 2439 bp, Homo sapiens
gaaaattacacaatggcattcacgatcctagtcttatatcagtatataaattggtttattatttcattctattaaagaggcttttttttggtaccaggaaaacttcaaaatgcattgtgttgtcagcctcactgaattttcttttggaggaggaggtagggaggggaagccaaagccccgatttctcctgctccttttgctaattgtattggctaaatgagctttcacagaggggggtcctggctgctttttgctctcccccagaccacttgtaggttgcacacagggcttctataactctttctgagtcaggacaaagatatccgccgtgcacaccctgtgacataggtggatatttatttcatcccgggcaattctaaattttgtcatgatgactgaaagaggcaatcccctcctgagcattaagaggccaggggtgagagggtggcagcatagaaaagccaccacccagagacagcttggagccatgatcctggaggaaatgttattaataaacatcttttggacatttggtagcccgtggagcttgctccagcttaaagcaattaattcaggacactgacataaactctccagatctttgacagcttggagccgaaataaaaatgctagttctccggggaagagaagaggatggctagcccttttctggactgtttgcttataggcccagagagcaaccttccttgcagaatgaaatgcaagggcacaaacaatgtaccagggagagaatagaagatgggaatgaacagtttgaactatttgctcagcagaagggcaccacaatgctggggtagtggttttcccatgcgtccactgtcccttctttgggatcttttgttgtcccctgtctcctttggccagataaaagcacagctgcagcattgcagataacaagtaggccgtacttatccccctaaatctcggggtgcctttactgtaacaagttatgctcggctctcttttattttacaagaggatggtgagggagagaatggaagaacagagggggcggacgtataagacatttgacactgcctatgtctgatttctctttctttctttctttctttctttctttctttctttctttctttcctttctttctttcttgcaagctgtgatcggatgcaatctttgtgggacatttaaatggaagggttcattgatgtgtattgcttgccaagccaaaatgttgcctttggggaaaagggagagaggtgttcatggagtgcagggaaaggaggttttggggcagagattttgacttaaaataaccagacttcttctggctgctgaaaagaggcaaaagttttaaattgtcaagtttaaaactatgttcagttatgatttgccacttctgaatattattttggatttcccctttcatgcttattttgttcagaatcctaatgaatagaggttgctggactcagggtaaaagcaggatgaactggagatgggacatacaaggtacttttggaattgccatagattacacctataatcagagtaaatgtcatcaacaaataatcaaaatattttttacatttgctcttctaaaatcagagcctattttaaatataaaagaaagtagatgtgataataatataaactacagtcacattaagttgatattaaattcaaaatctaacatagatttgcactgttgggtgtgtgttccgaatcagtgggttttcccactgatgttgatttcgggagccaggcttcaatgtttaattctattgtaatgtggttatttagcctgaatggttttataaggtggaaaggcaaaaaatttaattccgaagaaaactagtgttttactatgactgtggtaaacatttccaaagcccacctgtgggaaatacaaagttttaatgctgtgtgtttttttgtttttgtattttgtctcatcgacaaaactggcagaaaaagtctcccactgagacgctgttctgcaaggagccgacctcacgtgccgccgccgccagagaagagagcacctgttcatctcggctcactgtgaggctgagctcagcgctggcaggcgaggggccgcaagcatcccccacagccaccgagagggcatccctgcagggaaatcatatccgacatgcctgtgcccacagcagacttaagactgcctctaaaatgtccatgaagccattgtccagtagagctgttagttttaacaccagtgagtattacctttggttaaaaggatgcatgtgtataggtgtatgtgtgtgcgtgtgtgtttgtgtttttggacttgtgtggagaatgaagaaagggttccatttaggcatttgcaaatattcgatggcatcatgaaaagacaaaaaaatcctataaaatatatcatattttgctatgattttgtgtgtacatgtaataaaattattaagtataaat

SEQ ID NO: 15626 - DNA, 2861 bp, Homo sapiens
gaaaattacacaatggcattcacgatcctagtcttatatcagtatataaattggtttattatttcattctattaaagaggcttttttttggtaccaggaaaacttcaaaatgcattgtgttgtcagcctcactgaattttcttttggaggaggaggtagggaggggaagccaaagccccgatttctcctgctccttttgctaattgtattggctaaatgagctttcacagaggggggtcctggctgctttttgctctcccccagaccacttgtaggttgcacacagggcttctataactctttctgagtcaggacaaagatatccgccgtgcacaccctgtgacataggtggatatttatttcatcccgggcaattctaaattttgtcatgatgactgaaagaggcaatcccctcctgagcattaagaggccaggggtgagagggtggcagcatagaaaagccaccacccagagacagcttggagccatgatcctggaggaaatgttattaataaacatcttttggacatttggtagcccgtggagcttgctccagcttaaagcaattaattcaggacactgacataaactctccagatctttgacagcttggagccgaaataaaaatgctagttctccggggaagagaagaggatggctagcccttttctggactgtttgcttataggcccagagagcaaccttccttgcagaatgaaatgcaagggcacaaacaatgtaccagggagagaatagaagatgggaatgaacagtttgaactatttgctcagcagaagggcaccacaatgctggggtagtggttttcccatgcgtccactgtcccttctttgggatcttttgttgtcccctgtctcctttggccagataaaagcacagctgcagcattgcagataacaagtaggccgtacttatccccctaaatctcggggtgcctttactgtaacaagttatgctcggctctcttttattttacaagaggatggtgagggagagaatggaagaacagagggggcggacgtataagacatttgacactgcctatgtctgatttctctttctttctttctttctttctttctttctttctttctttctttcctttctttctttcttgcaagctgtgatcggatgcaatctttgtgggacatttaaatggaagggttcattgatgtgtattgcttgccaagccaaaatgttgcctttggggaaaagggagagaggtgttcatggagtgcagggaaaggaggttttggggcagagattttgacttaaaataaccagacttcttctggctgctgaaaagaggcaaaagttttaaattgtcaagtttaaaactatgttcagttatgatttgccacttctgaatattattttggatttcccctttcatgcttattttgttcagaatcctaatgaatagaggttgctggactcagggtaaaagcaggatgaactggagatgggacatacaaggtacttttggaattgccatagattacacctataatcagagtaaatgtcatcaacaaataatcaaaatattttttacatttgctcttctaaaatcagagcctattttaaatataaaagaaagtagatgtgataataatataaactacagtcacattaagttgatattaaattcaaaatctaacatagatttgcactgttgggtgtgtgttccgaatcagtgggttttcccactgatgttgatttcgggagccaggcttcaatgtttaattctattgtaatgtggttatttagcctgaatggttttataaggtggaaaggcaaaaaatttaattccgaagaaaactagtgttttactatgactgtggtaaacatttccaaagcccacctgtgggaaatacaaagttttaatgctgtgtgtttttttgtttttgtattttgtctcatcgacaaaactggcagaaaaagtctcccactgagacgctgttctgcaaggagccgacctcacgtgccgccgccgccagagaagagagcacctgttcatctcggctcactgtgaggctgagctcagcgctggcaggcgaggggccgcaagcatcccccacagccaccgagagggcatccctgcagggaaatcatatccgacatgcctgtgcccacagcagacttaagactgcctctaaaatgtccatgaagccattgtccagtagagctgttagttttaacaccagttcataggtggaagggacttgccttgtctcagatgagactttggactgtggatttctaagttaatgctgaaatgagttaagacttttggggactgctgggaagtctcaggtatgtctttatcagcagcatgaaaacggactaatatagcacctctgctgacagctataggaccaaggactgtagacccaaatgcagcagccacacgtattttcctgtcatgaagattttctttaataaagctgcaagttttggggaaagtatgtgtgatgactgggaactgattcccgaaggctagctgcaaaccacgactgggaaagaagcaggatgggcccagactttgcggtggctgctgtccaccagaacattcaggttcagaagggtcgtgggggtccccgagcctgctgaaagatgaggcccagtcctggctccactcaacttaccgcacccatgcttcattgctcctcaaagcactcacgactctgatattttgcttctatatttgcttcttatttgtctcccatcactaggatgaaatcttccagagagcaatggttttctctgtcttattcactgttgtaaatagtgcctggcacatagtaggcactgaataaatatttgttgaatcaatgcatgaatga

SEQ ID NO: 15627 - DNA, 433 bp, Homo sapiens
gtccagagtgtatagttatatattaatctaaactgaataaaattagatttttcacatttgattttgaggatttgagtattaatgtttaatatttaattagatggctcaatttcaaatgctaatataatcaggcctagatgtccaatttttgcaaaattcctgtactactcttaaacataagtgtactctgataaagataagcaatctgttcccacacctggaataagccttgtctataaacaatggaaattttgaaggacttagtgtttccttgggagaggaggtaatgagtaatcacaaagactaggactagctgatttcataacactttttacaaaaacagtttaaagtaataagtggaaattttgttcacttacgatgccaatacaaatcttatgccaagttccatcacaaaaattttttgaaaaatact

SEQ ID NO: 15628 - DNA, 754 bp, Homo sapiens
aagcggaggttgcggtaagctgagatcgtgccattgcactccagcctaggcaacaagagtgaaactgcatcttaaaaataaagaaggtatgggtttcctggaactttgggggatcattataaaaatactagggtaaaaaagcaaccttagtaatcccagcaatttgggaggccgaggcgggtggatcatgaggtcaggaatttgagaccagcctgaccaacatggtgaaaccctgtctctactaatacaaaaattagacaggcgtggtggcgggcacctgtaatcccagctactcaggaggctgaggcaggagaatcgcttgaaatcggaaggtggaggttgcagtgagctgagattgccccactgcactcccgcctggtcaacaagagtgaaactctgtctcaaaaaaaaaaaagcaaccttaggatgaaagaaacattcaacataagccctatattccatcatctctgttacctcagcataccttgacttaactataatttcctattctagaaatgtcctccccctcttgccagtgacatgtttctgtactgtcagattcagttctagtgccatctctttgtgaagtcactgagagtcccaactgggtgagagggctgtgccttcaaactctccctccttcagagcatgtaatgatagtacaaactaactgacaaaaactacatccaacaccaagttcatgttttatacagcaggagcattacttctctctgatttgaaaatctgtggggga

SEQ ID NO: 15629 - DNA, 461 bp, Homo sapiens
cagctcttttcctggttgtccttgaagctgtggtgaagaaccttagagacaactgtctagggttttcctccttgttaaaaaacttctctcttaccactcttgctcttgatttttaaggagacaaaatctaactgacacaagtccctctccggctgattatgtcgcttcaaacattgtgcaaggcattattggtagttcaacttgtcattcgggctcaggaatcgaactgatctacgtggagtgaggacagttaagtctgcagtggaaacaaggctgtagggcttccccctgagagcagcagccaaggaatgctgctgtcatgctgtcacaaactctgcccctgactctatcaaaacaatgatttccaattatttcatctctttggtcctagatttcttctatctataaactaaccactttcctgccacaagagactgtcatgaagaggaattaaatttaaa

SEQ ID NO: 15630 - DNA, 165 bp, Homo sapiens
tgatcataatgtaggtggttgggttgaaggtatgtgtgagatgccatctctgtttggaaagagcactgcattagaaacggcgatctagcttctaacattttcttacttgcctctgggctaaaaggtttgattagaaaaggctcaccaatatttaaatgactaaca

SEQ ID NO: 15631 - DNA, 433 bp, Homo sapiens
cttaatgatgggaaagcatagggtagcttaagaaaaaataagctattaatatatatataggagaacagacaaaaataaagttggtgaggtaggttaaggctgaatgtcaaactgaagaatcagtacttattcaggtaaggaagattttcaatccaaggagtgacaagaaaatcaagctgaccactgtgagtcaaatggatttggatagggaaggagtaaataccaaaattctatcacagtagttcagatagaaagatatagaaacctaaactagggaagcagtgaaagtagagaacatgttcctacctacaggatggacttgctttttgtatgatctaaaggagaaaacatggctaatcattaagagtccaagactgggtagttgagaaaatagtgatgccattaatttaaatgcagagataggggagagaat

SEQ ID NO: 15632 - DNA, 525 bp, Homo sapiens
cttttaagatgacgttttttcgagtccaaattagattgctcatctgaagatgagtgcgccacagcagtgttcccttgttatgttgcttggttattgttccacatttcctcattcattccgccactgtttcatgcagcagcagaaatcaatgtgcctatgacatgaaggcacagcaagggttggccaacagcattctctttgttgtttctccaaacaccacacgtgctcagtagccgtaagatttttttcaagttttactaaggaagtgatattcaggaattttaacagaaaacagtaagtcctgtgagttggagttctagctgcaaacccaagaaggaaagcctttaagtgtggccaccagcaggggtctgataagatgtgtatggcttagggtgaccactcattggaatgcagtgtacccattgaagaggactgggcagctctggatttgttgataccagtcaccatgacagatgaagtgaaaaagcaggttgcagaccatgtgtagaacatggtaactatgtt

SEQ ID NO: 15633 - DNA, 853 bp, Homo sapiens
tgagctacgagataagaatgaagttaccagaagttatcaggtcatagtttcagagtatgcaagagagtcgggccttcatatgttcttgtaaagttttctgtctaatcttttggtataacaattttaggagttcaccctagatgaaagagtggaagtcatcagatttgtcaataagcagtctagaggaaaaatgagaagaggaagaagcagggattctttttcttgtgttttgaagatgtttctcctcccaaagctatcaccttggtagttatcaccaagatgtataatagcaagcactactgaatgatcttcccagttatcagcactagcatcacggcgagtcagttttcagaactagctcttggcgcaagccctgaaataaaatggggacaaaaagtggtctaccaccatgtgacttattttctttttttttttaattttattattattatactttaagttttagggtacatgtgcacaacgtgcaggtttgttacatatgtatacatgtgccatgttggtgtgctgtacctattaactcgtcatttagcatcaggtatatctcctaatgctatccctcccccctccccccaccccacaacactccccggtgtgtgatgttccccttcctgtgcacgtgacttattttcaattgcccagcaatgaaaactaacaagttaaagaaaatgttcattttctgaaccccagagcccacataggtacaaagatactctgtaatgtacaatgaggtggccaatcgtgggaatataggagcaataaatagtcctcttaagcaaggttcatgggtaagagttactctagcaggattgggtgttgggtcagagggtatcta

SEQ ID NO: 15634 - DNA, 432 bp, Homo sapiens
gctgtacgttatcagtagttgagccttcccggcctgtttcataaggaactggcttctgtgacccaagtctgatgagcctgagacaagcttggctttacagcatcgagctgcaaaaggcaggtcgaagtcactgtgtggaaaccctgggctcctgcagacctatggttgtgcttatttccgaatgccttagccccttggcagggctgagaaagcgagagctcagtaggtcacatgaccacttgtgagccaatcactgttgcactgggatggcacacactgattggccagccctgggcagcgctcccaccctgcaggtgtttgaagtctgtgtatgagggatgtggtctggctatgggaaagcagggagctgtttcaataccaagggggcaggatttcaaagaagaaaaataaatcatttcaattacctagaaa

SEQ ID NO: 15635 - DNA, 471 bp, Homo sapiens
tggggctccagtgtagattggagcagtgaagttagatgagatttgtagcacctcctgatgaccatgctaatcactcctctaccacagttacctctcccattattagtaacttgttagctcatcacatttcttcagcaccactttatcctctttaaccatctgtcctatttatatactcagaatacctggcacctaccaaatgagagtaagcaccatagtaaccggggatgaaattattgtatatgtactttgtgctgtcagcaacatgtatcctgagatctttgttgaagagtcagttaatgaaatttgagagtccttggattatctgacatgtaaagttgtgagccagatgtggtggcatgcacctgtagtcccagcactttgggaggcccagcggggaggatcccttgagcccaggagttcaaaaccagccgaggcaacaaagtgagacactgtctctaaaaataatac

SEQ ID NO: 15636 - DNA, 283 bp, Homo sapiens
tgatcttaggctggcatcccccaggtgtatctgtgcaactcaccatttcgctggattgctgcatgcacacaacactcttaggaaggcacaaaaaatagatcttgtggtttcagccttctatgatgatgctgagttccctcaaagattaggtctgggccaggtgcagtggctctcgcctataatcccagcactttaggaggccgaggtgggcagatcacccgaggtcaggagtttgagaccagcctggccaacatggtgaaaccccatctctactaaaaatcca

SEQ ID NO: 15637 - DNA, 447 bp, Homo sapiens
ccccatttaagagagcatctgctgctatgataacatagttcacattttatgacactttgaaaattgcctgctttttccttctatataactgcatatcctagagagcaaatatcacacattcattggtggatcttcaacgtttgaccgtcgagtatccactaggtgcttactaagagctgtgtagtgcttaagagtgagactgtggagtcagactgtgttggtttaaatacaggtatcgcttcctactgaccatgtgattatagccaaaatatttaatctgcctgtgtctcagtctcccatttgataaaataagaataattatgtatctgcatcacagggttgttataaaaatgaaattaatacatacacatacagtgattagaacaggatatggtctatgatgagcactcaataaatactagtttttaaaacgatgctgtaaaattg

SEQ ID NO: 15638 - DNA, 181 bp, Homo sapiens
aattggaaaaaagtgaaaatgctgcaatagttataaattggtgcaaattttccaggaatttgctctaaggctaatatttgaagagctgaaaacgtgtttaaatggtattttctaagatgtaactctagaacacccaacaagtaaatttgactccgttcccaaaaatttggtgctaatatta

SEQ ID NO: 15639 - DNA, 327 bp, Homo sapiens
acagagaagagcaatgcaattaatggaaactgagagggtttgaaggagttgtccttagtgtcaattgtgcaaacatgtatattaagatctacagaatgttttgtattgtattcggcataaagacatactcattgacctcagacttgtacagtttcagtagaacattattggaagagctgagtttgagacctaatattttccaggttataagggtaacagctaagttaggaattaaaaatgaaatggcactttgggaggctgaggcgggcggatcactttaggccaggtgttcaagtccaacctggccaacatggtgaaaacctgtgt

SEQ ID NO: 15640 - DNA, 332 bp, Homo sapiens
tgagacagagtctccctctgttgcccaggctggagtgcagtggcgtgatcttggctcactgcaacctccgccgcctgtgttcaagtgattctcctgcctcagcctcctgagtagctgggattacaagtgtgtgccaccactcagctaattttcgtatttttagtagaaacggggtttcaccatgttggccaggctggtcttgaactcctgacctcaagtgatccgcatacctcccaaaatgctgggattacaggggtgaaccaccgcacctggccagaagtcgtatttcaaacatatagccattactaattataatactagatcagtacact

SEQ ID NO: 15641 - DNA, 426 bp, Homo sapiens
ctctgcattttctatgtgacccaaaactatataaaatgttaccaaatgacatttctgccattctgcttacttcatttacagaattcaaacaagtataatgagcaaggtcttttcctccaaattttcttttttttttttgagacggagtttccctctgtcgcccaggctgcagtgcagtggcatgatctcgtctcaccacaacctccacctcctgggttaaagtgattctcctgcatcagcctcctgcgtagctgggattacaggtgcataccaccacacccagctaattttgtatttttagtagagatggggtttctccatgttggtcaggctggtctcgaactcctgacctcaggtgatccgcctgccttggcctcccaaagtgctgggattacaggcatgaaccaccacatctggccccaaatt

SEQ ID NO: 15642 - DNA, 393 bp, Homo sapiens
gactacatatggtgcaatatggctttaagttaaataaatgatattgtcttaaatgtacccccatacttaaaatagccatatgaaaaaatactgatctatattgtttctttttcatacacacacatacattacagaatttgtttgtaaaagcaaagcactaattacctaaccacctcaacacaatgactatttaaaaatatttatttatattagatctcaaaacaaatcttctattgttcatgtaagtaaattttcttgagtttttgtccgatttttataattctgaaaactagtaatacatttcacttttctgtacacagatatttttataaactgcaatatgtttgaaagtattttttccattaaataaaagagtagtattatgtttcgaag

SEQ ID NO: 15643 - DNA, 298 bp, Homo sapiens
gaattgtataactcatgcaaacagcctttaggtcaaacagggatttgaaattaaaactgcagaatatctagagaatagcaataatgcaatcattacttatcagagactaaaggagagctcagaggaatgttcattgccaaatccttgtgccattaagaaaagaatgaaaatgaatcaagcctctgattgttagaaaggacaataaaaaaaacctgaaggaggccagggacagtggcttactcctataatcctagcactttggtaggctgagatgagtggatggcctgagctcaggagt

SEQ ID NO: 15644 - DNA, 377 bp, Homo sapiens
tacacctaacacacatcaagaaaggcatacaggagttccacaaactcgcacacaacacagaacaaaagtggcagaaaaaccacaaaagagggctgtggctggaaagcacaaccaggagctgccccactgtccccatctgtccagaggcacctggagccaggtgtgtcccttaaaccttgtccacacaagatgctcccagcacgcagcacttgtttccctgtctacaccttcctgccacctgacaggcactgacaacaggccttctggttttgcagcagaaagcaagccccaggccaggtgcggtctcatgcctgtaatcccagtgctttgggaggcgaaggcacgaggatcacttgaggccaggagtttgaggctgc

SEQ ID NO: 15645 - DNA, 430 bp, Homo sapiens
ggcaattaatgaatgaatcctatccactaagtacatttgaaaaataaatggtcatccagtctaatacacaatcccttcttggagatgcttacaggccttggactctaggcctcatcttctagttagttgaaaaccggctccagaggttatcctgccttcttgggtggaagggtacagtgtttacatggcaggctgagtggacaggggcttagttcatctagcatatatgatctgtccaattacagaacaggtgctcttgggaagacaccatattcctttcttttgtggtgtccttccctgtacccaccacagtgctaagcatgtaacaaatggtcaataaagtccacgtcatctctggaattcgacagctatatttgcagtggttatttgctactacaacactaaaaaacaataaaacaaaacaaacccc

SEQ ID NO: 15646 - DNA, 151 bp, Homo sapiens
aagtgggattacataggaatttaactgaagtaaatgatcatcaatgtgtacaaagatctagctgcaagaatgttcttggcaaaattgtttatcacaggggaagggcacaaacaatttgagtgggtaaaagtaccacatatgttaatgatac

SEQ ID NO: 15647 - DNA, 223 bp, Homo sapiens
ctgtgctattgcacagttccacatgaatggatgcacttttttggcaaagtgatgagagaaatagcaaagaaaaaaataattggggttctccactcactgtctgcacaacagggaaccttttctgcagttttcttatcaaaagggtagccttattaagagttttaggtgcccacaccacagctaccaccaacctactgtggcagcatagttctacaactagacc

SEQ ID NO: 15648 - DNA, 198 bp, Homo sapiens
cttccctgaattattcttctctgtttagtttgcctggtaaaccccatttcttctgtttgtttaaactacagtttctcaacctcagtgttattgacatgtggggctggacaattctttgtggtgaggggcagctctgtcccttataggatgtttaacagtatccctggcctctgcccaccagatgccagtggcacccct

SEQ ID NO: 15649 - DNA, 419 bp, Homo sapiens
acaggattttccagtgtctagaaatgcactgcttgaagagcagcagaatatattacactggagaagagaagactgtaaggggctagatgcttcatctgcaagaagagtagacttgccctgaaggaataatcaggccagtgagaaagagcatatgcacatagatttgagctcagtaaagaataaacctgagcagtcccacaagggaacagtactccccagaggataagctgccaaatatgggcagtgttcaagcagaggtgcaaggaacacctgccaggtaaacaatggacacctgccctgaggaggccgtgagatagatcatctccaaagacaccatcaacctctatgaaaaggaaggatgggcttattatgaccactattcagagagaagaaactcttaatgttttcctgtgatatta

SEQ ID NO: 15650 - DNA, 315 bp, Homo sapiens
atcttttgagcccaggagtttgagaccagcatgggcaacactgtgagaccctgcctcaaataacaataatagtaataataaaattgtaaaaagaaaacaaacaaaaagaaactaacattcttcagataacaaacatatagcgatggaaagccaattagtagttgccaggggtcagcgacacagtcagggagcaaatacaaaggagtagggcacataggggagcaaagggatcctgatggtatgataccatccaaagttaatgtaacaagaaattgagatttaagaattctacttatgtgttaaacacaataaaat

SEQ ID NO: 15651 - DNA, 877 bp, Homo sapiens
aagcatttaatcaaattttgaggactaacaaacacaatttgggagtccaaccgcgagcggcggcggccagagggcggtggattggacgctccaccaatcacagggcagcgccggcttatataagcccggggcccgagcatagcagcaacgcaaaacctgctctttagatttcgagcttattctcttctagcagtttcttgccaccatgtcggaaaccgctcctgccgagacagccaccccagcgccggtggagaaatccccggctaagaagaaggcaactaagaaggctgccggcgccggcgctgctaagcgcaaagcgacggggcccccagtctcagagctgatcaccaaggctgtggctgcttctaaggagcgcaatggcctttctttggcagcccttaagaaggccttagcggccggtggctacgacgtggagaagaataacagccgcattaagctgggcctcaagagcttggtgagcaagggcaccctggtgcagaccaagggcactggtgcttctggctcctttaaactcaacaagaaggcggcctccggggaagccaagcccaaagccaagaaggcaggcgccgctaaagctaagaagcccgcgggggccacgcctaagaaggccaagaaggctgcaggggcgaaaaaggcagtgaagaagactccgaagaaggcgaagaagcccgcggcggctggcgtcaaaaaggtggcgaagagccctaagaaggccaaggccgctgccaaaccgaaaaaggcaaccaagagtcctgccaagcccaaggcagttaagccgaaggcggcaaagcccaaagccgctaagcccaaagcagcaaaacctaaagctgcaaaggccaagaaggcggctgccaaa

SEQ ID NO: 15652 - DNA, 599 bp, Homo sapiens
aagcatttaatcaaattttgaggactaacaaacacaatttgggagtccaaccgcgagcggcggcggccagagggcggtggattggacgctccaccaatcacagggcagcgccggcttatataagcccggggcccgagcatagcagcaacgcaaaacctgctctttagatttcgagcttattctcttctagcagtttcttgccaccatgtcggaaaccgctcctgccgagacagccaccccagcgccggtggagaaatccccggctaagaagaaggcaactaagaaggctgccggcgccggcgctgctaagcgcaaagcgacggggcccccagtctcagagctgatcaccaaggctgtggctgcttctaaggagcgcaatggcctttctttggcagcccttaagaaggccttagcggccggtggctacgacgtggagaagaataacagccgcattaagctgggcctcaagagcttggtgatcagctctgagactgggggccccgtcgcattgtgcgctgtagtcaggcgccagtcgcactacgcacgccgcgttggcgacggcgcatcagatgcggcggcggacaaatacgcctgttgcc

SEQ ID NO: 15653 - DNA, 274 bp, Homo sapiens
tcacacctataatctcaacactttgggaggctgacatgtgaggactgcttgagtctaggagttcaggacaatcatgggcaacatagagagacctgttctctacaaaaattaaaaaaaaaaaaattagctgggtgtagcagtgcagagctgaaatcccagctacctaggaggctgaggtgagagggtcgcttgagcccaggagttcagagcttacggtgagccgccatcacgctattgcactccaacttgggtgacagaccgagatcctagctta

SEQ ID NO: 15654 - DNA, 409 bp, Homo sapiens
gaaatactgctcacttcttcatccagttgactgaatcagagcctgcctcagaataactgctcagaaataggaatttcttcttggtcaaccccaggctttgaagggcctttggtcattcttgcccttgtgctacagttctgctgcgataatctgaatttgccatgttcgtggtgctgggaaatcagatgaatgaaagctcttagaaacccatctcctgactctactttatgtatcaaggtttagaattatcagagcagaacctggtgtttgcccctgtggtcccagctccttgggaggctgaggtgggatgatcacttgagtccaggagtttgaggctgtaatgagctgtggttatttcacagtactccagcctggatgacagagtgagaccctatctccatctgttaaa

SEQ ID NO: 15655 - DNA, 334 bp, Homo sapiens
gcgccccggcctctccgtttcttaaaagtttaaaaaggtttatagattaaagtctataggttggttttattactaagaacttctaaaatgcaccagctgatttaaaaaaaaaagaaaagaaaactgtaataggctgaaggtgggaatgacttaaaacaggtaaaagagatcattttggtgtgacagaaatgttctaaaacgggattgaggtaatagttgcatggcactgtaattttactaaaaagcactgaattgtgcacttaaaaagaattaatatgactaacaaattcccccaaaaaacctattaatataataaatattgtgaccccccccc

SEQ ID NO: 15656 - DNA, 1030 bp, Homo sapiens
ttttagtagagacagggttttgtcatgttggccagtctgttctgaaactgctgacctcaagtgattcacctgcctcggcctcccaaagtgctgggattgcaggagggagccaccgcacctgaccccattttgttttgttgtgagagaccataaacagcctagaaagatagaaatctcaataatgagaagtttctgtaatgtgtggctcctgcccaccttctctctgcttatttgctgtcttttttgtttgtttgtttttttagagatagggccttctctgtcacccaggctggagtgcagtggtgacatcatggctcactgaagcctcaaactcctggagtcaagcaatgcttctacctccacctcccgagtagctgtgactacaggcaggtgccaccacagaaggacagaccatctaaggaaaacttaaaaagacagcacaaggacaggctggacagccaccagacctggctaattttttattttttgttttattttttgtagagaccagacctcactatgttgcccaggctggtctcgaacatctggccccaacaatcctctcacctcggcctcccaaagcactgggattataggcatgagccatcaccccaggcctatttgctgtcttgattctcttttctgctccctccagccccacagatggcccaagaccccaaatgggcagtcaagcttccccactaagttgagtttctttactggacaactcaagatgtcttggtgagatcctgtcttgaaacaatgccaggaaagtacatgaggtctccttcctcctaaaaacacccctagaaggaggcctgggaggggcaagcctggcggttcaaactggtgattcaaccacccacataagaccctctaggcctaatggctgggtgaggggctcagagaatttctccaatcttggccagaaaggcttccttaccactttcacatttctctcgtgtccttcagaaggggcctgcatccaaaagtggccatggaaagcttcacagaattagcttttattgta

SEQ ID NO: 15657 - DNA, 578 bp, Homo sapiens
actggattcacagaagaaaaaagagactaaaaaaaagaaatacttgagataatgacctagaattttccagaaaaaaaaaaaaaaaaattccaaaccacagatccaagaagtttagagaaatcctaagcaaggtaaatataaaacaaaccaacaaacacacaagcctggaaacatcaaaatcaaacagcatgaaggcagcaagaagaagaaaacaaaaaattacatatacttaagtaaacaggtaagaattacagcagaccttgtgagaagcaatacgagtcagaaaacaatgacatttgcactactttaaaagagtgtggctgggcatggtggctcacacctgtaatcccagcacttggggaggctaaggtgggcggatcacgaggtcaagagatcaagaccatcctggccaacatggtgaaaccctgtttctactaaaaatagaaaaattaggctgggctggggggccgggcacctgtaatcccagctactcgggagggtgagggaggagaatcggttgaacctgggaggccggggttgcagtgagccgagattgtgccactgcactccagtctcgc

SEQ ID NO: 15658 - DNA, 523 bp, Homo sapiens
atgtcgggacgcggcaagcagggaggcaaagctcgcgccaaagccaagacccgctcttctcgtgccggtctccagttccccgtgggccgagtgcaccgactgctccgcaagggcaactatgctgagcgggtcggggccggcgcgccggtgtacctggcggcggtgctggagtacctgactgccgagatcctggagctggcgggcaacgccgcccgcgacaacaagaagacccgcattatcccgcgccacttgcagctggccatccgcaacgacgaggagctcaacaagctgctgggcaaagtaaccatcgctcagggtggtgtcctgcccaacatccaggctgtgctactgcccaagaagaccgagagtcaccacaaggccaaaggcaaataatgtctccatagaatcactttccaatacaacggctcttttcagagccacctactatttctgcgggagagctgggccactggttaaacatttggaacgtttgttatgaaaagataaagcatttttcatctag

SEQ ID NO: 15659 - DNA, 5371 bp, Homo sapiens
  misc_feature (3635)..(3635): n is a, c, g, or t
  misc_feature (3752)..(3752): n is a, c, g, or t
gacatccaaacggcaagacaatggctaaacttagtataaaccaaagtccccgagggcagtagtaacaacagaatgcctccaatgagtgtttcaataggctttgcaaaatactgagtgtcattgtatgtatgtgaggcccttaataaatatcctttagtggtaggggaaatgggccagaaatgttcagcagcattaagaagagtattcgttcattttgagatgacttctcaaagctgcaaactagccagttgtgagcttgcatttgagtgcatgtgatcctgctcttttggtgaaaaattgtagccctgttttgttaaattgcagtctccagggtttcggttcctactatgaacctagagaacaggccagaagcatgttgcacaaggcttccgttttcactgtccagtgactggtatccaaattcccagattttcgcagtaaacttcactcagtcttgttataattgttatctgtaaacatttttattcagaatgttcttaaatgaactcagggaaagctgtgcattaaatagacatttaacagatggtcaagagagtagtattctgaaatttggtaaaactgcactaatgatatttatatactacactggagaaaacaaaacaaaccaaattaaaatccaatattcgtatattttaaattatcattactgtccataaaactatttgaaataataatttcttgttagttttaaaaatgaaaaaatattattttatataaatcctccaaatcccaaatcttcaaaatccaacaggatatatattgaaaagagttataatttctttaagttattaagaaattgagatatctcatgaataatataatttaaaaatctattggctagtaagtactggcaaagtgaatatttaaccaatcttctgaaaaaaattaaataatacaagcacttaaaagtctaagattctaagacaatgaatcattttgaattggccaaatgcatcataatttttccagaagcttgttcaaattttatttcccattcttagaaaaatacagaagataaagctgggtatagtggcacatacttgaagtcccagctgtttgggaggctgaggcaggaggatcgcttgagtgtgtgagttcaaggctgcagtgaggtatgatggtgatactgtactccagcctgagcaacagagcaagacaggaatctcaaaaacaaacaaacaaaaaagattagactttatgggatgacacaaagaaaatcatcatcccatcttcaattaatgttgaacagtgtcttaaatagtgcagaatgaatgaattttatgggagtcagtgtttcctagtttgaaagtctgattattttctgtcctaaaggaacatgttagagggggtctccagagttgctgaaacccttactccatatattgcaagaaaactcctcgagtgtagtttctgtgtctgatgagtatctctctgcagcacacagccaagggcctggaccatagaaaatatccagaactgaggacttctcctgccaagcccagggagtctgaatgtgagtccaaggctggcagctttgtatgacttcaaccatcacacatatattgtgagagagaaaatgaggctttgtgtctcttatgcctctgatttttagaaacgggtctgggcagtgtcaaagagtaaaacagcctttgcgcatcttaaccacaggtgtttgccttggcctcaattaacactgcactgaatcacccaactgagagtttgcagtcactgggctagactcccagagaccgcactcaggctgtcctcaggccgcgtgaaagcctagagatatcttggtcagcagcttcgctgggactccaaactcgagaaggggaatcaagcaaggcactttggcatcaccagtgtgaagaatctccagcaggggaggcaacagaggtagcaacattgtggccacggttgtgtagaatgcattgcatccagcacactggcacatacatgcttaaaccacacacttgtgtgcgtgtccctgcaccaggggcaaagctcatccctagtttatgagtagtgcctgacaactggcccctgtccttggccagtcccaagcccgtacgggcaacagggcacgtgtttttgagcctctctcccacctttcagccctctccaggtgtctttgggaaggattcttggagcttccccctgtcgaactcgtctaggatctccatgggcgagcgcggctggcggctggctagcctgggcggcctgagagcggagcaggctctgggcggggctcccgagggtcttggcgcgctggccgccacccaccctgaggccggaggggggcgggggtcaccaaaggcggcgggcccgtcgtgcggggctgcagggatgcaccctctctcccctattttttttcattggccggttatttgcatatttcaataatctttgcagacattccattgacagcagtatgtcaatcatacaggtagatcaatgaagacctaggtcaacaatagatgtctatataaacgtctgaaatagcaaaagttgctgcttataatgtttgcattcatgttgtggtagaaagtccattaaccagaataatttttcagaaaacttccatatattaaattggatggattatttaaggagtgttaaacgttttttaaaataatagaatacaataatatgtatctatataaccacagcttgggagagtcttttccatgcatgaagcaattgaagaaatcttaaagaaaaatcttggttaattctatcccacaaaactgctaaaagttataaaagcttaatttatggtgagaaaaataccaaaaatattaaatttatattttctgttctattgaagcaattagaacaaatgcaattttaaaatattttaaccaatttatgagtataaactcttgaactgattaagaatggatcataaaataaatttacattcatgatacagttttagagtgagaatgtaaaatgagatattgaaggcgtgttttctaataatgaacctcaatgaggcttaagagagtgaaataatatcctttggattaatgtttaatcgaaactaatatttactgctctagtgcattcaagagagcctgttactaggtttttgaatgtatgattgtgtttcagaaccaatttaaaataactagatgagtgactttagagaaaatgacaataaggttgtatagaaatagatatttctttcgaggttttactttagaaaatttgaaaaagtaatttctattctgccacagttgtgtgatcctctctgcatataaaatggtatttcctcacttataaaccccaaactcttctacagtgaaggtaatacacgtttagaatgaacactgggatgtgcttaaaatactcccttgagatgctggttgctttccagagggcagttctctgcctcattgaatggtggattcactggttggagtgcgtgttttcttttttgatagacacaaaacccacatactttgaaaatcttctgtgttaaatgttctgttcaaataagagacttatcccagaaacaagagggtcctggccacagccattcattacataaaaaggaaaagaaagtagacattttaggtacctttatccttgcttcctaattggctacctangcttgccaggtacggcagaaagataatcagactttctttttacaggatattaaagatgagaaaggccttggagatgatcaaatccaatccctttattttctaaagaaactgaggctnggaataattgacctgacagatagaaactgatggaaaattttagttctgttacttacttgctgtgagaccattttgaaaatagacatcatatcctgttttaattaccctagacttcagaaataagcattccaagataaacctatctgtatctgggggaataagagtaggctcagttgacagaagacaataggaaaagtaacacataaagatgtcaccagaagacaaagctctggatttaagatttggaagttggaaaaactcttggaagcttagcaaaattgtatataaccaggcccatatgaaatggagtgctgttgcaagttactgtgctgaggaagttgaggctctaagaccaaaatgttggcaaatggcttggatttggaataatgaagaagagaggccaagagccaatcctaaagtaatgacaggaagttggtgggtgtcccagagagaggtcacttctggtaaggagcatagggagagaatggaggcagaggagtcctgtaaactaaaatccagtgatttgggaataaaatgagcctcccagtttgtttgaataaagtacttgaatccaaaccaacattttcttgctcccaatgcatatatcaggataaaacattttgacacatcgtaaaatgcatataattcatagatacaatactttacacaagaatataacacatcatattgttcagatactcatatgcctagtgctaggcattcaaaaatatttgttgaataaatgaaaactcccagctctgccacttacttaattaaccacaaaaaaaattgtgtcgtcagtaaaatggatatggtgatacacacctcgtggagtgagataatatacatgaagtacccggaacatattaagcatttgataaataatagctgttattgttgttttaagtatgggtcaaacattgttgtaaatgctttataagaatttaaaatttataccacagaaaacattttctatgtcctgtgagaaatatgtatgttttgtattttaaagagaaaaatgtgtttaaataaccagtcaagtgtctgatacacatcatcttgactgtatattagattaattcatctataattaatatgttagtcatttccaagaccaatgtagttgtctaccacttcctagcacacctgggctgcacaaatatgtgggtctgatataatgtcagaaatgcaggaagctatatgagattccagccctctatttttccaagtgtaaaagaacttatgaatcaagagccgaataaaaaacatagtactctttctgataatctgtcaacaaatttgcaatcatgtcaggcatgttatatgattacgaattgctcaatgctattatgaaaagtattttcaacaagtgaaacttctggagttctctgcagttctgggatcaaacctcagtgccttgtcctaacgtcccattaggacagaagtgcccttcctgagagtatggcagcataatgacattctagcacctggaccgattacactgctctccctgaagtagtggattctttcatcagcaggagagagaagggtgaattgtataaagtggagcctgacagtgtgtattttattctttaaaataaaaaaattaagaacataaa

SEQ ID NO: 15660 - DNA, 377 bp, Homo sapiens
ttgggccttccgccaccgacgagctaaactcaggctgcaacaacagcagcggcagcgtgaaatcaacttgttggcctatcatggggcatgccatggggctggtcctttccctaccggttcactgcttgaccttcgcctcctcagcaccttcaagcccccagcctacgaggatgtggttcaccgcccaggcaccaccccccgccccccgcctccgtgccttatactgtcgccccaggccgccccttgactgcttccagtgaacaaacctgctgttcctcctcatccagctgccctgcccattttgaaggaacaaatgtggaaggtgtttcctcccaccagagtgccctccctcatcaggagggtgagcctggggcagg

SEQ ID NO: 15661 - DNA, 371 bp, Homo sapiens
gtcaccaggcccatctcattacattgccaacaagttatacaataatcatggacattgcatgtgcacagtcacattgcaatgaatgcacatagcacagcaggcctgaccaagtaagacacctgccatcctatgacctctgggtctttccctctgcataactcttcctttgagactgaactcctgcatcctctgtatgccatatcatctcactggcttcttacaagcacctagtgaagagtctccagtttggcagatgagaaacccaaagctcagagaggttaagtgagttgcccaaggttgcacagccacttaagccaaagccaattatcttcatgctgtaccctaagcctgttgagctgactgcaagggtt

SEQ ID NO: 15662 - DNA, 237 bp, Homo sapiens
tcgtcccagctacttggaaggctgaggcaggaggatcgctccagcctgggtgatagagcagaaattaaaagttttggttgtacttaaccaaagcctctgcatggttaaattttctcttgttacctggaaattttctaaatgtccttaaatagggtacaggttaaataaattcttgtatggtacagccttagagctgtgatgaaagtatggaatcaaaccactgatatttgaaccact

SEQ ID NO: 15663 - DNA, 544 bp, Homo sapiens
aagtcaggctctcaggagcagaagggccatcagtcatcgtttaagctcctcgggtgctcccaatgcatagtcaaggttgagagctactggcctggagccgtgcctggtaacagtaggtgccacctgcgtgttagatgtggtttataatggagacacggtgcacagctgctccagagagacacatctgggcagttacagtccagcacagcagtggaggcttcccgcggcagcaggagagcccacaggaagctttcagctcagtgaagggagtcaaggtcaggcttcttggaaggaggttggacagggcagctttggcctctgagtcttgggggcctccccatgtggaactgtgctcttaaaccagggcatcaccacctcaacagatgccagggtttcctggtaaatgtaaaatacacaagtcaggcagggcacaggggcccacccctgtaatttcagcactttgggaggacaaggcaggaggattgttagaggtcaggagtttgagaccaacctgggcaatataatgataccccccatctctaca

SEQ ID NO: 15664 - DNA, 373 bp, Homo sapiens
cacaccctaccctctgcaatccactctgtctcttgcttagggccactactaagtgctctcttgtatccctggctgctgtggctgctttaccagctccaccatgctgcattctcaacacaaagtgctatccactctgcagttctgtcatttgcaactagttcccactaggaatgtcagctctcagaaggaagggacagtctagtccatggctatattcctagaactttgaacagtgcttgacttttagtaaccacttcataaatatttcatcccatttactcagcaaatgtttgttgagcacctagtatgtgccaagtacctttctaagcactagggacacatcaatgaacaaaatggattaaaaaaactgctt

SEQ ID NO: 15665 - DNA, 477 bp, Homo sapiens
tagccatctcaggcatgggctttgattcaacatgtcattcaactctctttgcaaacatggagagtcagaaagtatttaagaggcttcctaccaccactgcatcagatgaccccaggagagtccaggtcaggtccatggtttgctgtgcatctatttattacaagaggactctgcctcatgtcttattcatccaactcttcacaactttttagtaggctctgtctgaagtcttgatgaggctcaattcccattggcctgctgttattagcatacctgggaattttttaataactgtcttatctcagaatgctgtaataaaataccatgaactgggtggcttataaacaacaaaaatttatttctcacagttccggaggctaaaagtttaaaatcaggatgccagcatggtcaggttctggtgagggtccccttccgtgttgccgactgccaacttctcatcatatcctcacatggttt

SEQ ID NO: 15666 - DNA, 161 bp, Homo sapiens
tctgtacttgacatcttttatggcttctgctcatcttacaagctacttgcttactcgttctctgcacttcatcttttcagttttatacaacccattcattttcctgtcacctattacagaattgaatatcctcaattaatatgactaatgttgtaacttca

SEQ ID NO: 15667 - DNA, 376 bp, Homo sapiens
aaggactcaggagctttcactgtgttcaggtttcctccattggtcaaatatgggatagtttaagaatcaaaagaataataacctgagtgaattgaaacaaaccaaatatatcttaaactaaaggctcttaatacttaaatgaaaaatcctcagcaattacctttgggagaggatattagaaaaccagctcactgttttgaaaacgtaagtgaagggaaaaagtcaagcatttattctgccccttttcgaagtacggtactttaggataaccagataattgtggggttatcctaataattgaaggaatatagtaataagtaatataagggatgtttctctttacagaatgagtgatagaataagagtattactattt

SEQ ID NO: 15668 - DNA, 373 bp, Homo sapiens
cacaggccacccctggtttttctcagtaatagattcactgttcattcagaagtctgcagggaaaaaaagcatgagctctgttaaagtttctactctacccaccccatccttccaaatccctcatcccaatcccagaccccacttcccctctagcattggactcagcaccgtggaaatcaatccactctgttattcttccagtgtctacacctgaccacatgttctggagtaaaatctgaatactcccctggattctgatctctaggggatcattgtgcaaaggctgaattggttttcctgcccatcgaacaacattgtttttgactgtaaataaaataggacaggaatgtgaagcgcctaaaatctgatataa

SEQ ID NO: 15669 - DNA, 306 bp, Homo sapiens
aactctttgttttagaaatgtgctagataagcttagtaactagcccaagctcacacagagagttagtgtcagccacctgccatctccacagctgcatctcaaacttctctgatgtagtattcctcttctgtatagagctcatgactatggtttttcactctccaacacaccagatgtacagcttccacattctctcattatctcacatttctttcagtcttcatactttctctaagttgtttatttttattatctcttttctggtgatgggaagaaggctcctactgaataacaacttaatagaag

SEQ ID NO: 15670 - DNA, 458 bp, Homo sapiens
tcagaatcctcctccccttcactggcctcctcctctgaccctcttccttctgctcactcagctctagccacagtggcctccgtgctgttggattccacctcagggcctttgcacatgctgccctcatgactggaacacttccccaacactcctgaggctctctccctctcttcttcaggtcttgcctttgcagtgaggcctttcctcaccactctgctgaaaactgcaacccattacctgacccagtccctttccttccctgcagagcactttccaccacacacatatgtcactccttgtacacccatcagtctgtctgggctagaagaatagctcctgcgggacaggggtttgtgtctgttttgttcgcagctgcattcccagtcctagagcaatgcttgtggggcctagcaggtgctcgctaagtgctcatggattggctgagagctgagttgact

SEQ ID NO: 15671 - DNA, 176 bp, Homo sapiens
tcacagggtaggaattctgtttattcactgcagtatccacaaccatttgcacagcaattagcacgtaagtgtgcaatagttacttgcttaaaaaatgagtaactctactacaatgaaatgggtgattattaaatctaggctgaagtgaaatttatattttcaaagaaaagtctgcc

SEQ ID NO: 15672 - DNA, 408 bp, Homo sapiens
cttcttgtggggtgcagacggcggcagctggctgccagtcttggggggaggctgtccacagagagctttggaacagagtaccccaggagaccatcctgttggcctgtgcgcgcccgtgactgcgttccgtgtgccgttgctctcctcctgtcctgggtgcccacccgtgagcaggagtggcaaggcgggtgccccgagcacttgagttgccttgtctgcggtcggccgtgcctggaggggcgtctgtgtcctgctcagctgggtggctccacgcttggtgttgggggctcctaagctcttgctgcgccacactctgggcagtctctgccatgccagcttttctagtcgcctctctcttcctgtctcatttatctctgagtcccacagtcgaagcgggatcctcaagag

SEQ ID NO: 15673 - DNA, 534 bp, Homo sapiens
cttcttgtggggtgcagacggcggcagctggctgccagtcttggggggaggctgtccacagagagctttggaacagagtaccccaggagaccatcctgttggcctgtgcgcgcccgtgactgcgttccgtgtgccgttgctctcctcctgtcctgggtgcccacccgtgagcaggagtggcaaggcgggtgccccgagcacttgagttgccttgtctgcggtcggccgtgcctggaggggcgtctgtgtcctgctcagctgggtggctccacgcttggtgttgggggctcctaagctcttgctgcgccacactctgggcagtctctgccatgccagcttttctagtcgcctctctcttcctgtctcatttatctctgtccttgttttgtgtttcttttcacacttggtctctgcccagccgtcttgtccacgcagcttcgtctgtattaactcctccagccgcagcccactcactccccgccgtcgtgatgccgagcacactatctctcgccgaagggatcctcaagacagccg

SEQ ID NO: 15674 - DNA, 378 bp, Homo sapiens
ccggcctggggcggggacgatgtgtatgtgattttgtgtctgtgtctttctgtgtgtgtctgcggtcggccgtgcctggaggggcgtctgtgtcctgctcagctgggtggctccacgcttggtgttgggggctcctaagctcttgctgcgccacactctgggcagtctctgccatgccagcttttctagtcgcctctctcttcctgtctcatttatctctgtccttgttttgtgtttcttttcacacttggtctctgcccagccgtcttgtccacgcagcttcgtctgtattaactcctccagccgcagcccactcactccccgccgtcgtgatgccgagcacactatctctcgccgaagggatcctcaagacagccg

SEQ ID NO: 15675 - DNA, 334 bp, Homo sapiens
atgcagtgaaatgattttctcattcagtaatgcaatgaaattgggattcatctaagaaaactggtgtagtgaaaaagacatgaactttgaggtcacatctccaagatcaaaccctagggccccatttcttagctgtgtgaccttggagaagttacttttgagtctcactttgtactgataattgtatttacttcacaaggtttttgaaatcattaaatgaggtaatttacgtaagctacataggagtgtccggcatttgttcatctactcaatttgtaaaggacctactacgtactagacacagttgtaggctctcacagaatattttatatat

SEQ ID NO: 15676 - DNA, 426 bp, Homo sapiens
ccaccaccagcgtgaccacatgcatagttgccagcaggggcctcccaaccccgcaagctgattctgccactgtggtgaacctacacggaagcaggcacaccagtacccgctagtaccctgcagtggctgagaagcatgcacctcaccgcgctgccactgctgcttctcacacatgcaaatgaagatggatcccactgccaccactctatgaaatgctttggctgacaccacacatcagaatagtgaccagtagtcagggagcaccttggccaagaagacaaagttggggcacgaaacaagtttcctagaccacacagtccaggaactaggagctgagcattggccccctaaaatcttccagaaatgaagctagtcgtctgaatccaccctgtaccacaatcaaacccttaaggtcaccaaatagga

SEQ ID NO: 15677 - DNA, 296 bp, Homo sapiens
taaatgctaaacaatctatctgatatattctctaaaaacatacagaatataaaatcatggttaggaatttgagctttagagctagacagaacttgactgaatcttagctctgctaagagctgtgactttgggcatgataattgacctcactagactcagcttccgcatctataaaatggataatgatagaataatgagtgatggtggtaagaatgaaatgagctagtatctgcggcacctaggacagaacctggcatgtaataaacactcagtagacattacctgctggtgtggta

SEQ ID NO: 15678 - DNA, 406 bp, Homo sapiens
actgctgtttgccataaaagtgtaggcgagatctgtacttcactgagtcggcaaggtccattgtaggcaatagaaactgatgtatgagggattgggaaggcctagaaacggcccaagaaccaggaggtctccagggacgcggagaggaagaattggtgaaagagaaccagggtctctttaggccctgtgcttgcggtgaacagtcacctgccacttctggccttcatgttacccactcaagactcagattgggctgagcatggtggctcatgcctgtcatcctagcactttggggggctgagacaggaggatcccttgagcccaggagtttgagaccagcctgggcaattagaagaccctgtctctatctttaaatatttaacattttaaaaacttttaaaaatta

SEQ ID NO: 15679 - DNA, 660 bp, Homo sapiens
atttctcgtgttatgctttgctgaacgtccttcctctctgcctgacctctgactgccagccctacttccgtgtgacacctgggggccttgctgtggccaggtcacctctgagctctgttcctttctgaagcagctcccacccatgggcctgtggggtctgactccaagtgcgagcccctcctctgatgtcagaagggcatgtcccctcctgcccaggcacccactggggctctatagcttccattcccctggctggattggaggggagtaagcctaccctctcaggccaagcgggccgccttcttgttacctggatacctggcagcctctgttctcaggacaacctgtggaagccccagagcgagccagtaaccaggtgccaggtgtttgcctgagaattaatcgttgttttctttctttttcagtggttgatatcacagcaagtatcctttccgtgttggtatggttccctttaaggaattctccacttaaataaaaagaatgtatcaaagcttgaatcccacctcccgacatgccctgtgagttgaggctcggcccacagagcacctggagtgtcccccacctggccctctgctgcccttgggcgctgtgctcctctttgtgcttctcttcgtaccttgcatccagctccaagccctg

SEQ ID NO: 15680 - DNA, 688 bp, Homo sapiens
ccaaggagattttatgtctgccctgctgtcctaggctctcagagatttagttctggccgacattactgggaagtagaagtgggaaacaaacctaaatggatattgggtgtgtgtcaagactgtcttcttaggaactggcaggatcagccatcagttctgggcggattctgggcaattgggcgatacatgaagagtggttatgttgcgtcaggtcctaagacaacccagcttctgccagtagtaaaacccagtaaaattggtatttttctggactatgaattgggtgatctttccttttataatatgaatgataggtctattctctatacttttaacgattgtttcacagaagccgtttggccttatttctatactggaacagattccgaacctcttaaaatctgctcagtatcagattctgaaagataaggaactggtaaatgggtctgtttcagtttttgtaggtaacttagccagtaaatttaatctcatttctggactctttaagttttaccactgaaaaccagagtcgatttttctcctaaatttttggcaactataagatgttcataatgccactttcatatattctatgaatatcaattgtcaggtgctttgatttctaagataaaatattttagaattatgttacttaacatgtccaataaaatgttttcaaattgcctat

SEQ ID NO: 15681 - DNA, 333 bp, Homo sapiens
tttttgagacagagttttgctcttgttacccaaggctggagtgtaatggcacgatctcggctcactgcaacctctgccttctgggttcaagtgattctcctgtcttagcctcctgagtagctgaggcatgagaatcactcaaactgggagcagaggttgcagtaagccaagatcacaccgttgcaccccagcctgggcaacagagccaggctccatctaaaaaaaaaattttaaaaagactactaaaaacagttttacacgcaaggtgtctaaaaatagtagaaaaaactttttttttctttttggtaaaaggttataataaaaaggtttttg

SEQ ID NO: 15682 - DNA, 402 bp, Homo sapiens
attattccatttaatcttcacaaaaattttcctttcacatataaggaaactgaggctcagagatcttagatagtttgattagaagtagtttgatgagtgtataaatgaaaaacagtatttggccagatgtggcagctcacacctgtaattccagcgctttgggaggctgaggcaggcaaatcgctagagcccaggagtttgagaccagcctgggcaacatggcaaaaccccatctctacaaaaacgcgtaaattagccaggtgtggtggcatgtacctgtagtcctagctactcaggaggctgaggtgggaggatcgcttgagcccaggaggtggaggttgcagtgagctgagattgtgccactgcactcccagcctgggtgacagagtgagactctgtctc

SEQ ID NO: 15683 - DNA, 573 bp, Homo sapiens
cagtttggggaagtcggggtgaagccccctggaacaccctcacactggcaaagaagctgcctcggctatctgcgggctccgctgcgttctccttacttttctccccctcttaaatggagttaaaatggctgaattccggcttttaattaaaaacagcctataatcgaaaacgtctcggcgtcccgggctcccccgccgcctgctgggaaccgagagaggaaccgccgcccctcggccgggccaggagggccggagcggggctgggggctcgcgtgggtgcccggggcccagcagcccacccccacccctcccggggcgccccctccccgccggccctggtccccgattctgcaatccggagccagacagtagcggggatccccccccgcgcaccccgaggggcaggcgtggttggggggcgagctggagaagtttggagaccatcgcgcccggccgggggccggcaggctgaccggcggcgtacctggcgcggctgggttcacggctccaggctccggcgacaacgactccggcggcggccccggctcccggcgcagctaggcgcccctgctg

SEQ ID NO: 15684 - DNA, 497 bp, Homo sapiens
ttacctgggagactgttcattatatcagagattattatagcagatggaacgttaaaaattgatctgtgtttctcacaaacacagttaatctaaaccagctgcttcttccttttgtacctatgtcttctaactttgcatcctcataaaaacacaccttcagtgaaaaagctggtggcatagcatgttgatcttccaaaatgccaaaaacttcagcacattgtttttgatgagttttggctttacgtattattttaaggagaggctaattcactgtatttcatggttttagtgtgcccctttataagtttttatgtctacttagttcttccccctttaaatagtttggatgaataaactttagaagtggaagattgtatggagtagctctttgttatgatgtcatttacttgctattcaggggagccacaaatgttggcttttaaatctacaaaatagtgcaattggccttatttcattaaattatttctgtaagtgaa

SEQ ID NO: 15685 - DNA, 336 bp, Homo sapiens
gaatcactgtacatggtggtcttgactggaaaggtctctaaggctggggaggaccctacttggcttggtatttggagcgctctctgtaggggctgcccagcagacagggcttcctgtcgtcagtcattgcctcccccaatcatgtcagagtctgctcaaccctttggaaaatatggctgggaggggacaaggggcttggggagagatgagcatttgtcaggtgtctagcactaggccaagtgctgggcatatagcggtgagtatgacctggtctttttctcactgtctgatgaaaggatagatgggcaaataaagtgggaacaaattcttacaagt

SEQ ID NO: 15686 - DNA, 325 bp, Homo sapiens
ttttccaatttggatgccttttatttctttttcttacctaactgctctggctaggacttacagactttttcagaaaaaccccaaaataatctaggggagtccactgtcactagatctgctttataagaaaccctaaagggagttcctcaaactgaaatgcaataagactaattagtatcatgaaaccatatgtagttataaaaagtcactggtaaaagtaactatacagtcaaattcaaaatactcctaatactgtaatgatgcagtataatcactttagcttttaaaaggttaaaagataaaaaatactacaaataaatataat

SEQ ID NO: 15687 - DNA, 862 bp, Homo sapiens
aaaaattgtacccccaaacctgtattatattcctattgctactgtaacaaattacaatgaactaagtggttcaaaacaacacaaattagttatcttatggttctgcaggtcataaatctaaaatggatttcactggaccaaaaccaaagtgttggcaggagtgcattggtttctggagactaaaaagatgaattttctgccatttgcactttacagaggctgtctatatttcttgattagtgattcccgtctatcttcaaagccagcattaaccagttaggtctttctcgcattgcattactctaacactaactcttctacttccctttttagcatataaatgatccttgtaattacattattagattattttagacaatctaggacaatctctttatttgtaaggttagctgactagcaaccttaatttcatctgtcactttaattctctctggctatgtaacaacctattcacagtttctggggattaggacacgaacattttttgggtaatgacattattctgcctataacagtctactttttggctccaaatattcacgtctgtcttacattccaggtacattcatcccattttaacattcccaaagtcttaattaattgtagcatcaaagcaaagtttaatagctcatcaaaatatcatcaactccaaagtcccaaatctccttatctaaatcagatgtgggtgaggcttttgatataatccatccagagtcacaattcatctctagctgtggtccactaaaattcaagaaattagttatgttcacccaaaatgaaatggtagacagactaatgataatagtatatattcactttcatttaaaatgggaaggaaaga

SEQ ID NO: 15688 - DNA, 496 bp, Homo sapiens
accctttttattcctaacgatggtttccctaaagcttatgttacccaattaatgtttgccaggtatatatttttccactcatactcactttttataacatttttatgcatttattttataaacatatacatggaatattttaaagcataatgcgacattctgcttttaaaccgatgagtttatatgatttgtgattattgatacagttggctgggtgcggtggctcacgcctgtaatcccagcattttgggaagccgaggtgggcagattactaggtcaggagatcgagaccatcctggctaacatggtgaacccccatctctactaaaaatacaaaaaattacccgggtgtggtggtgggtgcctgtaatcccagctactcaggaggctgaggcaggagaatggcgtgaacccgtgaggcagagcttgcagtgagccaagatggcaccactgcactccagcctgggcgacagagcgagactctgtctcaaaaaaa

SEQ ID NO: 15689 - DNA, 193 bp, Homo sapiens
tctgtgatttagacctctgattcatttgtgaggaagtgacttttactttctgagcctcagtttctgcatctatgaagggagcccataggttcccaccctgcccaccttgcagggtgcttctaagatgggcaaatgttttctcaaccacagtgctccacggcggaggctgggtatggttatcattgctgctcct

SEQ ID NO: 15690 - DNA, 389 bp, Homo sapiens
tgcttgtcttgaagaccctgatggcttctgaatacattcaccaaggcaagtgttgatacaatctctttttctctctagctaatttccagggaacagaagtaacacctaatcaaagaacattaccttcttccagaataggaagacctggcaattttcagaattgctatggaccaatcaatgactgcttgtgtgttggggggcattagataactttttttttaaattaacaggcctccagatcaagaagaactgcatctggaacaggtataaataataagatcctggaatttgaacttgatttcatacttatgattaaaagtatgggaatttcctaaaattatatttatatacaaaatgagacagaagtaagctattttgtgtgtgggtgg

SEQ ID NO: 15691 - DNA, 380 bp, Homo sapiens
tcctcaagtcacactgtaaactagctcatctctgtggtgtactcagtatcctacagtctttcttggccttccctgtacagttcagttttcacatattcgaacggccaagaccaggttcttggctgtgctatttggagaccaggcgttggggaggattcacgggttccacagctgcggggtttggtggccgtaggggaagcagtggtttgggagttctgaatgtaagcgccagagctgccctcctggtccgctgtgcgtggtacccagtgtgcatcacactactcaccccctcccggaccctggcagtccacagcgactccgaagtcagcccatagtcacatccaccacacctcagacctgccacagcctctcctcacttc

SEQ ID NO: 15692 - DNA, 477 bp, Homo sapiens
ttttttaaaaaagaatgccaaaaggtttatttagctgttaatatgacttccatatatttcaaaaaaaacagagaaaattgtctacatataatataaatgctataagaaaagagagaagagcaaaatattctcctttattttaaggtatgtgaataaatcctcttatttctaattcatattttttcctacaacagccatgtcctggaacatgttgaactgtcaagacgtcggaatttcagtagacaatgaattcagacatctgtggaatagccttgggcacactgtgtttatggggaaaaaagcagaagagaaaaatgtgttatataaatttatgggtgcaaataaataaagcaagttcttagtgacttatgaagacagactctgacacaataataggaggaaactacaacaccccacagacactaataaatggattactgaggaaaaaaaaaccacaaagatattaggacctgaact

SEQ ID NO: 15693 - DNA, 363 bp, Homo sapiens
ggccccaaccccacattccttcctgccctgcaatgtctgaagaaaccctacagagcaaattggcggctgcaaagaaaaagccatgtcctggaacatgttgaactgtcaagacgtcggaatttcagtagacaatgaattcagacatctgtggaatagccttgggcacactgtgtttatggggaaaaaagcagaagagaaaaatgtgttatataaatttatgggtgcaaataaataaagcaagttcttagtgacttatgaagacagactctgacacaataataggaggaaactacaacaccccacagacactaataaatggattactgaggaaaaaaaaaccacaaagatattaggacctgaact

SEQ ID NO: 15694 - DNA, 432 bp, Homo sapiens
ttaccaaactgaatagggcatgccaactatttctttacttctcagaagcccttgatctctataggatagatttggtaggaatatgagcgaatcctttccctgctgaatttatgtgttgggagtaaaatgggctgagagttattatctcttggtacagaacacctattagagaaaagaaagatggctgagctctattagcattagtatagaaggatttaaatttattttgtcagaggctactgaacttaatgtaatcagtgactttatgccccctttgcattcagtaaggaatgcataagttaatgatagatatggccgggtgtggtagttcacgcctgtaatcccagcacttcgggaggccgaggcaggtggatcacttgagcctaggagatcaagactagcctggccaacatggcaaaacccaacctctac

SEQ ID NO: 15695 - DNA, 539 bp, Homo sapiens
  misc_feature (496)..(497): n is a, c, g, or t
  misc_feature (499)..(499): n is a, c, g, or t
  misc_feature (501)..(501): n is a, c, g, or t
tctcctatagtgggagtgtttacatcacagaaattggcaaacagtacaaaccagagctctccctgtcgcatactgagaaccagcttacaggcacatcacagatttagacccattataacctgtaaccacggcactctgcagggcagagctcagggctggcaagagggaccaacggggctggttccattcgtttatcacaaaggaaagactgttgcctgaacttagcctggtggcccttgagtctggctagagactgattcctaaggccagccataggccgatggctgtggcccctgtctgttcacctagacccaaactcagcttcaagtccagtccgtttcctgactccagactcagttgccattgcatgacccacataaatcctctccacagtctgccaggtagcaaggagttatccctcttatacagatggagaatctgaggctggagaaagaaaagacaaggtcttacggcacatgtatacatatgtaactanncncnacgttgtgcacatgtaccctaaaacttaaagtataatt

SEQ ID NO: 15696 - DNA, 576 bp, Homo sapiens
ggcacgaggagagagagagagagagagagagagagagagagagagagagagagagagagagagagagagagagagagagagagagagagagagagagagagagagagagagagagagagagatgtttcattctgagtatttattatctttttaaatacacagtcatgagtcactgaacaaggacacattctgagaaatgcgtcattaggtgattttgccattgtgcaaacatcatagagtgcatttatccaaacctagaggatgcattttaaaatttatatattcttacatggaaaaccaaatgtcccagcaccgttactgaatatcagtcatttccccctagttgatctgcaaggccaatatgaagtgctatctgtagctttctttatatgacccatataatcttatgggaccaccgtcatctatgtggtctgtcattgcccaaaacgtcattatgcaacacatgactgtaatttaattttgtgtatgtaatttaattcttaacagtggctatgtttaacaaccaactcacaaaatgcctaaaaatttaaccaccagttcttgcaagccaaaaca

SEQ ID NO: 15697 - DNA, 574 bp, Homo sapiens
ctaaactatttaaatcctatccattcttcaagaaatgtttcatgacgcttccttaactgctaaggacccgcagattctcttcctcttgggactcacacactgactcatctcccgatcttttggtgctcagcaaagtggaggcctctgttttggacttagagtcaagaccattaaataagactatgctctaaaaagtacacctccgtggcccggaacgagtgaattaacatctatgagtttccatttccttgtctataaaattgtgaaattgcaacttaagattagttctgaagattaaatgaggtaacataggtgaaaatgctacatttatgtaagaaattactctttcataaggatgtcaatgtttaaatacgcattttctcaattttgttaatgaaatactttgaaattcttttttctaatgaaacctgctgaatgtaaaagagacccgtactaaaggaagataccacatgaagcaccagggtctctttctggatctatcatgactcttgtgactgtttcagcagcacggaattaaggcgattgttattctggaggaagacaatgagtctca

SEQ ID NO: 15698 - DNA, 495 bp, Homo sapiens
aggccaggagttcaagaccatcctgagcaacagggcaaaaccttgtctctactaaaaatacaaaaaattagctgggcatggtggcctgtacctataatcccagctacttgggaggctgagacacaacaatcacttgaacctgggatgcagaggttgcagggagctgagattgaaccactgtactccagcctggggaacaaactgagactctgtctcaaaaaaaaagaaagaaatacttatgggtaaatctgacaaaataagtgtaagacctgtacactaaaaactacaaaacattgctgaaataaattaaagaagacctaaataatcggagagatatactttgtttaaaggtcagaagtctcagtattgctaaaatgagaactcttcccaatgcagtgctaatcaaatttctagcaggctttttgtagaaattgaaaagcagatttgaaattcatatggaagtgcgaacaaaaccaaaagagccaatataacttt

SEQ ID NO: 15699 - DNA, 204 bp, Homo sapiens
tgaaaattcagatttcctcataaatttatctcaggagttgtcataataggtttttattttttatttttaaaaagggcttttctctaagaagtaaggctatattcctgtcttagtctatttcatgttccacgcctcagtgtactgaccaaacagggcattgatagttaattagttcagaaatgtaagctgtatcattcaagaatt

SEQ ID NO: 15700 - DNA, 395 bp, Homo sapiens
ttattccagatggaggttgattctagtttttactgaaaactagaatcatgtgcatctatgtcttcacacccctcttcctgccccacttctcccttttctttctttctttctttcttttttttttttttttgagacaaagtctcactctgtcacccagactggagtgcagtggcgcaatctcggctcactgcaacctccacctcctgggttcaagcgcttctcctgcctaaaaaaaaaaccaaaaaaattagccaggcgtcatggcacacgcctgtggtcccggctactctttaggctgaggcagagaattgcctgaacctgggaagcagaggttgcagtgagccaagatcgcgccactgtactccagcctgggggacagagcaaaactctgtctc

SEQ ID NO: 15701 - DNA, 525 bp, Homo sapiens
gagacagggttctctctctaacacccaggctgaagtgcagaggtgtaacttcagctagttgcaacctccacctccccggctcaggcaatcctcccacctcagcctcccaaatagctgggactgccaccacacccagccaccttttttggttttggtagaaacagggttttgccattttccccagcctcgtctcaaactcctgagctcaagcaatcttcccacatatgtttgttctgaagtctactttgcctagtattaatatagccaatgttttttcctttgagtagtgtttgtgatatatctttttctttacttatgcttttatgtatcttcatttctaatgtggtatacatctttatagattaccttcaagtgatataccactttaatgtgttttataagaaccttagaacagtatacttctctcatgccttgttctgttgttatatattttaaatctataatgttttaaaatcaccatacatgtttataatttttgctttaaacagattgttgtccttgttt

SEQ ID NO: 15702 - DNA, 409 bp, Homo sapiens
gctctaacttccagcttctctgaccagatttcatgctcctcttcctttatttggcttctttgggtaatccctccctggtttcatctcaccataggcccttttattgcagtgcaggctgcaccctcatcaaatttccctcagtcctgtgatcaagccccagaaaagcagtcccgagcaggccacagcaccaccctccagcctgaacaccgagatgtattcgagggcctaggccttatctttcaccctagagacttaggaacatgctatagaaagcagccatcagagttgtccagatgaccactgtaattttatcatgtgctttgccagcctgcctgtactccttactgccatcttgctagcactggctatgccactgggggagtttgaaggcctccttctccttgaaggt

SEQ ID NO: 15703 - DNA, 173 bp, Homo sapiens
aagtaaaaatggtattccatgagaaaatttcaaatcagttgcacaagtgttttcctctagataaccactgtatctcagtgtgcagcaagagtgcttaatacatccttcccatttttcatcacacagaacaggaaaaagactcaacggccaagatccaaaatttaatagataat

SEQ ID NO: 15704 - DNA, 339 bp, Homo sapiens
ttggaaaaagcagatggttgagttgattcacattcagagattggcagaagagatgcaatgtattaaggtcatggagtggaaggaattatgagtgctagtaagaatgtagctgaaacaactgatctcataaatccaaactggcaaggaaggataaaatcagcaaggagctaacagactagacaaagagaattcaagaagactagtgcttttaagaagttgggccaggcatgatggctcatgcctgtaatttcagcactttgggaggccaaggagggagggtcacttgaacccaggagttcaagaacagcctgggcaacacaggaagaccccatctttaca

SEQ ID NO: 15705 - DNA, 313 bp, Homo sapiens
ttaggatcatataataaaagatgatagaaaagatctaagcaaaacataaatctctgagttattttaaaatgcttcctaatttaataataacaacagtagggctagggaaaaacagaatatgttaagtaattcagaagaccttctgcttaaatgcaaaatgcactttacacaggattttacaaaataatgtcagcccaccacttgcagttctatgtaagagggaaatttaattattatacatttaaaaaagagattagaaatggtaaattgggtatgtttggcaaccaggatgcttatggagtaggctttgttg

SEQ ID NO: 15706 - DNA, 427 bp, Homo sapiens
taagagttctttgtatattttgggtaacagtccattatatcaggtatgtcttttgcaagtattttttccaagtctgtggcttgtcttttcattaagtgtctttcacagagcagatgtttttaattttaaagaactctaacatataaattatttcttttatggatcatgcctatggtattgtatctaaaaagtaatcgccagtcttggggtcatctagattttctcctatgttatcgtctaggagttttatgttttgcattttacttttaggtctgtgatccattttgagtgacctttttgtgaagtatgtaaagtgtgtgtagattcatatttttgcatgtggatgtccagttgtttgagtacttttttcatgtgcttattggccatttgcatattttttgtaaagtgttcacatattttgactact

SEQ ID NO: 15707 - DNA, 594 bp, Homo sapiens
atgggttcaagcgattcttatgtctgagccacctgagtagctgggaccacaggcatgcaccaccacgcccagctagtttttgtatttttagtagaaaccaggttttgccatattggccaggctggtcttgaactcctgacctcatgatccacccatctcagccttccaaagtgttgggattacaggcatgagccacctgtgcccagccaaaaaaactttttctaattaagtttttgttattgttgttgttgaggcagggtctcagtcactcaggctggagtgcagtggcgccatctcagctcactgcaaccttcacctcccaagttcaagccattctcatgccttggccacccaagtagctgggattacaggtgcataccaccacacccagctaatttttgtatttttagtagagacggggtttcaccatgttggccaggctggtctcaaactcctggcctcaagtgatccccctgccttggactcccaaagtgctaggattataggcatgagccactgcacctggccaagcataaatgtatttcttttctttactatgcaaatgtaactaaacaagacagagtctccatctca

SEQ ID NO: 15708 - DNA, 571 bp, Homo sapiens
gctttgaaggaatgtgagtccggcaactggtggggaaataaatatttggtcacttctattgtctcaaatttatttccaagcattaatatgaatcttaaggctacaacaaaataatgtatcttgtaagagagatgaatggacaggaaaaaaaattagaagtcttcccaaccactcttatacataggggtagaaaatgctcaatgttgaccggaaagaaatcctgtaaatatgatgtcaaaacattgtcattggtagtcatctatcatctgtaggttgctctgactttgaagaatccctgcattgggaattgaaaatctgtgaaaactaatttcccctctatgtcactgtatctcttctaaatatgtaagtcccagccgggcacaggggctcacgtctgtaatcctagcactttgggaggctgaggcgggcagatcacgaggtcaggagatcgagaccatcctggcaaatacagtgaaaccctgtctctactaaaaatacaaaaaaaagttagccgggcgtggtagcgggcgcccgtagtcccagctactcgggaggctgaggcaggagaatg

SEQ ID NO: 15709 - DNA, 823 bp, Homo sapiens
ggaaggaaagccatcccacacccctacaacatatgttctggcatttataaactgcttgattgtgtgcctcaaggggagaaaaagtcaagcaatgcttcaaaggccaggctttctaagcaaatgagtggttcaaagcagtgtttggctcaagggcagtctggttttatggatagggccgacccaagacatctgctcatgaagaaatgtggcatctgttgccatttcctaaactataaggtttagatagattgtcttgaattttgatagcaaatttttttaaatttatatttctgcctcctcgtacatccttatatatggaaaaaaaagtaagagttcctcagatcagagctcagtagctgtgtcaatttgaagttcaatcagtgtagttgtcctggggtgatcgctgactctgctctgtttcatatttcagttgcttgctccaaggagagaatttctgagaacaatgggtgttagcaactttaagttactccccaaacgtttgctggccacattctcatttctaaacatctggatctgggtaaaggtttgaatagatgtagggaacaaaattggtttttccatggtgtagtctaattttgccaaatcacccaagaaagaaagtatatgacgtgtggagtttgcatttcttggatgggacctatcgggtcacccagcccagtcttacagtcataaattcctacctcttagttcctgccaaagggccttcagcctctgtgtgcacacttattgaatgaatgctttgcctaaagtttggccttttgaagaaaaacagcatgtgataatataaaaatatgagagttta

SEQ ID NO: 15710 - DNA, 2511 bp, Homo sapiens
ggaaggaaagccatcccacacccctacaacatatgttctggcatttataaactgcttgattgtgtgcctcaaggggagaaaaagtcaagcaatgcttcaaaggccaggctttctaagcaaatgagtggttcaaagcagtgtttggctcaagggcagtctggttttatggatagggccgacccaagacatctgctcatgaagaaatgtggcatctgttgccatttcctaaactataaggtttagatagattgtcttgaattttgatagcaaatttttttaaatttatatttctgcctcctcgtacatccttatatatggaaaaaaaagtaagagttcctcagatcagagctcagtagctgtgtcaatttgaagttcaatcagtgtagttgtcctggggtgatcgctgactctgctctgtttcatatttcagttgcttgctccaaggagagaatttctgagaacaatgggtgttagcaactttaagttactccccaaacgtttgctggccacattctcatttctaaacatctggatctgggtaaaggtttgaatagatgtagggaacaaaattggtttttccatggtgtagtctaattttgccaaatcacccaagaaagaaagtatatgacgtgtggagtttgcatttcttggatgggacctatcgggtcacccagcccagtcttacagtcataaattcctacctcttagttcctgccaaagggccttcagcctctgtgtgcacacttattgaatgaatgctttgcctaaagtttggccttttgaagaaaaacagcatgtgataatataaaaatatgagagtttaaaaaaaaaaaagatctctgcctctcttctctctgcctcgtcccaccttgctgtctgtctcattgtctttctctcccctcaccatgcgctgaattcagatttctctttcttttattataggcatgttgttttgaatgtggactttgtgggagggagaggattgttctgagaacagaaactggaagatacgtctgagttgatgggaccaacagggctttgctcctctgtgagggccaaagccattgatacttgtcgggggtgatgagggctttagcatctcaaggcagacatatgaagtatttactgctaaactatattacttactagtacaaatctgttggaattcaggggcagtctaagatttggtgagtgaaatgccatctggcaaaatcgagaagagagtgtggcctgagaggggaatgttcagcctcactgtcacattaagggtacctcaaaatacatggtccttccagtgtgttccttttccttcctccatttcactttgtcccctcttcttcctttctctcccattttcctggctttttagcactcagcttttttttataagtatgtatttactttttattatatatttggtcctttgggactttgtgatgattaagaatttattccattcaggattttaaaatgatgtgtttaatattttgttctcttaaactcttttgaagctatgctgctaaccaggtataggccagaaaggaggtggcccagtcagtaccttgctcacgtcagctaagggggacagtgatgtcatgtgggtgactcttcttcatttgaccaaggccagcctcctgttcttacctctgcccattcatttctggctatgggaaaactaccacctgttgagtgagccaatgaggccaggaagatcagaggggctgggttccggcccatgggccactatttgaatttctctgtagtaagctctttgtagggctggctccaactgcagtagccaaagaaaacctgtctgactcgacattttaatgcctgagagttggtgaaagttcagctgaagctaatgtctagacatcagcagtaactaggcatccagaaagtagcttcaaccaaagctaatagagcccaagtttccgcaggaagtttggtgctgagctgtccagagcagttgtttatctgagtgttgctagcccttagccatgctttcttagctttattctcgcctgttcctaggcatagcctgaaccagagctatggctcactgctcgctttattctactccctagtcatgcggaacaacatagtctaaaaaggaagatgtggactggggagttaggagacctgatttctattccctatgcttctactaactagcctcgagatcttaaccgctctgtgcctcagtgttcccatctgcaaaatggggatagtgttaattgccctacctacctcacagggttgttgtgaggataaactgagacaatgaattcaaagcaagttgacaagtaagtgctatgcaaattgtaagaaatggaaacaatcatgttaaaagcaatggaatggacattggcagaagggttaatggattgtccagccctttctctgtgtggcttaaacccaggtcgccattgctttatacattttcacttagcacagatttgtaattatgcatgtaataaagcacagccttatccaccctggtgtctggtg

SEQ ID NO: 15711 - DNA, 784 bp, Homo sapiens
ggaaggaaagccatcccacacccctacaacatatgttctggcatttataaactgcttgattgtgtgcctcaaggggagaaaaagtcaagcaatgcttcaaaggccaggctttctaagcaaatgagtggttcaaagcagtgtttggctcaagggcagtctggttttatggatagggccgacccaagacatctgctcatgaagaaatgtggcatctgttgccatttcctaaactataaggtttagatagattgtcttgaattttgatagcaaatttttttaaatttatatttctgcctcctcgtacatccttatatatggaaaaaaaagtaagagttcctcagatcagagctcagtagctgtgtcaatttgaagttcaatcagtgtagttgtcctggggtgatcgctgactctgctctgtttcatatttcagttgcttgctccaaggagagaatttctgagaacaatgggtgttagcaactttaagttactccccaaacgtttgctggccacattctcatttctaaacatctggatctgggtaaaggtttgaatagatgtagggaacaaaattggtttttccatggtgtagtctaattttgccaaatcacccaagaaagaaagtatatgacgtgtggagtttgcatttcttggatgggacctatcgggtcacccagcccagtcttacagtcataaattcctacctcttagttcctgccaaaggccaaactttaggcaaagcattcattcaataagtgtgcacacagaggctgaaggccctttggtc

SEQ ID NO: 15712 - DNA, 2005 bp, Homo sapiens
ggaaggaaagccatcccacacccctacaacatatgttctggcatttataaactgcttgattgtgtgcctcaaggggagaaaaagtcaagcaatgcttcaaaggccaggctttctaagcaaatgagtggttcaaagcagtgtttggctcaagggcagtctggttttatggatagggccgacccaagacatctgctcatgaagaaatgtggcatctgttgccatttcctaaactataaggtttagatagattgtcttgaattttgatagcaaatttttttaaatttatatttctgcctcctcgtacatccttatatatggaaaaaaaagtaagagttcctcagatcagagctcagtagctgtgtcaatttgaagttcaatcagtgtagttgtcctggggtgatcgctgactctgctctgtttcatatttcagttgcttgctccaaggagagaatttctgagaacaatgggtgttagcaactttaagttactccccaaacgtttgctggccacattctcatttctaaacatctggatctgggtaaaggtttgaatagatgtagggaacaaaattggtttttccatggtgtagtctaattttgccaaatcacccaagaaagaaagtatatgacgtgtggagtttgcatttcttggatgggacctatcgggtcacccagcccagtcttacagtcataaattcctacctcttagttcctgccaaagggccttcagcctctgtgtgcacacttattgaatgaatgctttgcctaaagtttggccttttgaagaaaaacagcatgtgataatataaaaatatgagagtttaaaaaaaaaaaagatctctgcctctcttctctctgcctcgtcccaccttgctgtctgtctcattgtctttctctcccctcaccatgcgctgaattcagatttctctttcttttattataggcatgttgttttgaatgtggactttgtgggagggagaggattgttctgagaacagaaactggaagatacgtctgagttgatgggaccaacagggctttgctcctctgtgagggccaaagccattgatacttgtcgggggtgatgagggctttagcatctcaaggcagacatatgaagtatttactgctaaactatattacttactagtacaaatctgttggaattcaggggcagtctaagatttggtgagtgaaatgccatctggcaaaatcgagaagagagtgtggcctgagaggggaatgttcagcctcactgtcacattaagggtacctcaaaatacatggtccttccagtgtgttccttttccttcctccatttcactttgtcccctcttcttcctttctctcccattttcctggctttttagcactcagcttttttttataagtatgtatttactttttattatatatttggtcctttgggactttgtgatgattaagaatttattccattcaggattttaaaatgatgtgtttaatattttgttctcttaaactcttttgaagctatgctgctaaccaggtataggccagaaaggaggtggcccagtcagtaccttgctcacgtcagctaagggggacagtgatgtcatgtgggtgactcttcttcatttgaccaaggccagcctcctgttcttacctctgcccattcatttctggctatgggaaaactaccacctgttgagtgagccaatgaggccaggaagatcagaggggctgggttccggcccatgggccactatttgaatttctctgtagtaagctctttgtagggctaagggctagcaacactcagataaacaaccgctctggacagctcagcaccaacacttctgcggaaacttgggctctattagctttggttgaagctactttctggatgcctagttactgctgatgtctagacattagcttcagctgaactttcaccaactctcaggcattaaaatgtcgagtcagacaggttttctttggctactgcagttggagccagcgtcgac

SEQ ID NO: 15713 - DNA, 955 bp, Homo sapiens
gtatagtttgaaagatgaggatgctttatttgcaaactatcttaacaagggattcgtaaccagaatatataaggagctcaaacaatagcaaaaagaacaatccaacttaaaaatggccaaaagatcttaataggtagttttcgaaagaagatacacaaatggccgacagatacatcaaaaaatgttcaacatcactaatcagagaaatggaaatcaaaatcaatgagataacatctcaccccaattcattacttttatcaagaagaaagaatgaatgctagtgaggatgtggaaaaaggagagccctgcctggtacactgttgggaatgtaaattggtacagccactgtggaagactacagaggttcctcaaaaaactaaaaacagaactatgctccagcagttccactactgggtatatatatatctccaaaaggaaagaaatcaatgtatcaaaaagatacctgcactcccatgtttattgcagcagtattcacgatagccaaaacatggaatcaacctaagtgcccatcaatagatgaaaggctaaagaaaatgtattattcagccataagaatgaatgaaatcctgtcattggcagcaacatggatggaattggaggtcattatgttaagtaaaataaaccaagcacagaaacaaatattgcatgttctgtctcacataggagctaaaaaagtggatctcaagaaaataaagaatagattggtagttaccagaggctaggaaggatggggaggatgaagagaggttgattagtgggcacagataatacagtttgaagaagtaagactggtgttggatagatcagggtggcatagttattaatttactgtacatttcaaaacagctagaagataattttgatggtgcctaaatcctgtaatcccaacacactgggaggatcagttgaagccaggagttcaagaacagcctgg

SEQ ID NO: 15714 - DNA, 465 bp, Homo sapiens
  misc_feature (19)..(19): n is a, c, g, or t
  misc_feature (27)..(27): n is a, c, g, or t
  misc_feature (46)..(46): n is a, c, g, or t
  misc_feature (72)..(72): n is a, c, g, or t
  misc_feature (189)..(189): n is a, c, g, or t
  misc_feature (191)..(191): n is a, c, g, or t
  misc_feature (211)..(211): n is a, c, g, or t
  misc_feature (227)..(228): n is a, c, g, or t
  misc_feature (230)..(230): n is a, c, g, or t
ttttttccttaaaagtacnttaaaaanggaaatttgtttgtatttnttatttacattttatatttttgtacnatattgttagggtccagcccatttttaatgatctcggatgacccaaacccagccttcggagcgttctctgtcctacttctgactttacttgtggtgtgaccatgttcattataatcncnaaggaggaaaaaaacccttntaaaaaagcgcaaaanngncaacagaaaaacaatcttattccgagcattccagtaacttttttgtgtatgtacttagctgtactataagtagttggtttgtatgagatggttaaaaaggccaaagataaaaggtttctttttttttccttttttgtctatgaagttgctgtttattttttttggcctgtttgatgtatgtgtgaaacaatgttgtccaacaataaacaggaattttattttgctgagtcctaaa

SEQ ID NO: 15715 - DNA, 1672 bp, Homo sapiens
  misc_feature (911)..(911): n is a, c, g, or t
cttgtgtctagcccgtgattgacattctagagataatatgagaaatattccagacctgaccttagagtttgtaatccagttgggagaaacaaagccttttatgcaaaacataattagagaaccaagcaatatcatctataatctaaaagtaaaatgtgaggtatgtttttaattccaagagcctgtgagtggttctgaagtgcaagtgtcttcttgtgtttttcagaggtttgtgtttagatggctcaggtttaatctctaatggggatagcagggaaccagatgagacctgctgaggtggccacagtactgattctagtgggcaggctgcctcccctctgatactgtgtaaggcattactaatgctggcaacagtttgcatatagccaattgccaaaagcagcctgcacatccctcctgaggctggtcccgtaaattcttctctttcctgtcgtaaagcattcctcatcaccacctcccttttcacactttatgcaaggccgtgcactgggacagcaaatggctgcaactttcactgcttgcttttcccaagtcgaagaaaagttccaacgctggcaaagcaaggacattgctattttctgacgatcgaatgtcttcgaggaactagcttcagtgctgatagggtctgtgttcctctagtaagaatagcactgtttccattagaggggaccaggatgggtagacaggctaagacgtctgattactctttgctctgtgtatttgtatgacagctcgggtgtctggcttaccttcctgaggatgagagccatagcattatccatttaataacagccacagtgacagtgctgataatggctagcatttacctagcactgtgtgccctagaacatttaatagtttcactctatgaactcgtttgttggtcttcntgccatgtgtccaacataaagctagcaggacccatctgtccttgcccatgcttattctgtgccacagccacccctggttgtgattaagatattaatgttaaagagggaattgagttctgatttctcctcattcaaaaccattctgtcatcttcatgcacatgccctgcaggcagccagccagtaaggggtccttcatacctatcctgttcctggctggtggctctcagaatctgccatggctctttgatcctgtttgtcctcctgcccttgagtgactggctatcagaaaagccttcatttccttgttggattctgcctccaggaagcaaagccgacccagtggtttctgtgggtcagctgcacttggctgtctgcactggggaagagacttggcttgttggctgttttatgccctttggactgtcaggtccaagtgtactgttggccgcagcatccagtctgtgctatcagagcaaggcgctatggtcaggagacccttagccaccaaaggtctgttgtctcctggtgtctttgcctgaagacttctggccttcttgtgtttcatcactaagtgcatctataagctgacccgctgccaggtatcatgtctgagcattttggcaaggagagtcggtgagagaagttttcttggcaaccataaaataaaagtactatcaggagctgctaaataaatttgcaccgcttcagccagggaatttcagctctcctgggtgggatagtgataggggatgtggaatgc

SEQ ID NO: 15716 - DNA, 208 bp, Homo sapiens
attccatttatactaagtgtctagaagaggcaattctacagggatagaaagcagattgttggttgcctctggctggagaatgaggagtgaatgttaataggtactttttgggggtaaataaattgttctaaggggatggtgatggttgcataacggtgcatatgctaaaaacaaattcaacttgggtaaattttatctcaaggaataa

SEQ ID NO: 15717 - DNA, 745 bp, Homo sapiens
taaaaaataagcttaagagtagaagggctctggtttcccggagctgtctagagtcatggaaggaaggccgccaatatgagggatgaggatggccacacagtagggtgacttttcaataaaataacttttttgttcttgtcacatttagtgagcttactgcaactactaccctaccaaagtcactgacttcagtaaaccatggctcagccatatgatgaatcatccagatgatcaaaattattcttatgaagagcttttaacaacaaatacagatacttgtgatataacactgtgaacaaaagcaagatatacaagggcatttgcagtataatgacaactatgaaaccgatccacatacgagaacagcaatactccaaaacttcaaaaggtgattagctatagatggtgggattctagatgatttttgttattttctagaccttgtattgagtattctatagtaagtatggattcatttttataattaaaaatatatttttaaatggaataaaatctataaaaggcatcacctacttctttcaaaggtcacatattccttaatcatggcttgaagcctcagagctaaaatggcagtgttcaaaatatacatctgctttagaacctattttcttcaatctttcctatgatacttaaaatttcatagaccttcacagaaatgtgggaggaaatctgttagtgactttgtacacgcacccagatgatctggaactggtactctccagtg

SEQ ID NO: 15718 - DNA, 510 bp, Homo sapiens
gtgagttgtgaagacgaggggctcagtcttccgattcatgcaaagggttgatgtgacattttcagagcctagttctagcttcattgtgctggaaagtggtcttggcctgaggacagcagggtgcttcagagtccagtctgatgccctttggcagccacacaccctcctgtgaaggcaccacaaattccttgggagggagacgcgttccagatgtgtatgccgcctctagagaaaacgtggcttcttctggtgagccacatgcaaggtgtctcgctggccactgtgaagtggggagagacgcctggagcaagccatgatctctgccagcactggaatcaccaacatccttgagcttccttcagtctgatgcagaacctgaggacgtggccatctcttggtggtgttctgggaaagcaggaagtcttcagacctgattgtcttcagatttcagccatgggctccctggtgagccatctcaggggtataggaaacatggatgccgccccggag

SEQ ID NO: 15719 - DNA, 435 bp, Homo sapiens
cacacaattaacatgcaacacactagcctaaaatttacttattcggtattagtggaacaattacatgaaaattacaacattttgaaaatataaaaataataaaaatttgattattatgaatattacaacataatatttaattctcaattttttgaccaacgagaaggccttatttatattatgtttgtggagtatttatagaaattgatattctgagcactatagtaagtgtcaatgtatttcatgagataaaaaccatatattgtatgttctctgataataatgaataaaaccaaaactagaaagaatgtatttttggaagtttcaaaatacacttctaattaaccctgtgtcaaacagtaaatcaaatcatagcataaactattgaacatttaactgagtaatattaaaaaataaagttgaagagtgctgatt

SEQ ID NO: 15720 - DNA, 729 bp, Homo sapiens
tatcaaggaaaacatgcttaggttatcagaattgtgaaggccatagtacaaaaagttaagagaacggaactcaggatctgagaaagatcagccattctcagcatgttgccttggctgcttaaccttactaaacttccatttcctcacatgtaaaatgtacatcataataactagtctactgagataagggaagaatacttagcacagtgctagtacactgtaagtactcaaatgttacagatccaagtattttgtaagaaaataccagcaaaagataaaagtttttttatggatcgtatttgtatcaatcacctacatgatctagagccctcacatggataacatttaaatgttcagtttgcctaatagccttcaatgaaacacggattcttctacttaaaaaaggtaagcctggagaaaataaaactgattactatgcaagaaaaaaatgtgctctgctgtgctccttggtatttttaagtggtttccattgtcttaacacctgtcttaaaacgggtatgttgtttgcactgaaccctcaaaagtatttatacctattaagttaaatttccctttttagagttaatgcttcattgcctgtcggcatattatcactatctgtctttgaaaaattttcttttaagtctcaactatttcttcataaagctcttgttcagagaaacattttttgatttgtccaatggactgaaataaaaggttagtaaacca

SEQ ID NO: 15721 - DNA, 443 bp, Homo sapiens
tatcaaggaaaacatgcttaggttatcagaattgtgaaggccatagtacaaaaagttaagagaacggaactcaggatctgagaaagatcagccattctcagcatgttgccttggctgcttaaccttactaaacttccatttcctcacatgtaaaatgtacatcataataactagtctactgagataagggaagaatacttagcacagtgctagtacactgtaagtactcaaatgttacagatccaagtattttgtaagaaaataccagcaaaagataaaagtttttttatggatcgtatttgtatcaatcacctacatgatctagagccctcacatggataacatttaaatgttcagtttgcctaatagccttcaatgaaacacggattcttctacttaaaaaaggtaagcctggagaaaataaaactgattactatgcaaga

SEQ ID NO: 15722 - DNA, 703 bp, Homo sapiens
tttgacctgattcatgttgtattagttgtgacattgtctatttcaacatacagatattcatccaaagaagtacttaagtttcatttgggtactttaagctttcattttttctttaagtgactgtttgatttctattatacatcaggcactgtttagcccttggaacttctcaagtgtaccaggtaccttgtattctaatcgagaagacacataaatatggccagtattgggaagatgtagctttttattttttctggatttgagtttttagcttaaaacttaaaatttttttcctgtgaatactcttaaagacaaaatcaggaaaattatacagagttgctaaaattttaggttgaataaagactgtctttattctgactagagttaatattaagaagttgaaaatattgatattaggcatgttacctatatgaacaatttaagatgggaacatgaacttgggatgtttgcagtttggaaactactctgaccaaaactaaactgaatgaatataaattctgacagactgatcttcaccattactgtaacctatttgatagtgaacattttttaatgtagctgggcgtgtgggcatgtgactgtagtcccagcctcttgggaggctgaggcaggggaagataccttgaggccaagagttccagctgcagtgagctatgatcacacctatgaatagccactgtac

SEQ ID NO: 15723 - DNA, 516 bp, Homo sapiens
actacgtaatagtcgacctggatgacttctctttttctacttttgacagtggatatttaccatgctggaacctaaagtacttgtatcctatccagctatgtaaaattttacttttatttgcacactaaaggtaaagctacacacacacagacacacatacacacacatttagataaagctttcattaaattacaacataccatagagattctaaataccatatatgtaatttttcataatgctgatgttgaactgaggtgcccaaaagcaaatacactcactgacccaaccaggaagtgacacattataataaatgttttatttttctttttgcaataaataaaaagatggctgatacaatcagaaactccttgtgcagaagcttacattgagtaggattttgatgagaataaagcaaagtctttctaaggtttttaagtaatgacaaatattcttaaaaaccaatagcttaaaaatcaatagctaaataaccaattattaaaaaccaatagctaa

SEQ ID NO: 15724 - DNA, 301 bp, Homo sapiens
ggttttgtgtttttcacttcaaattgggaagcgattgacttttgtatactaaccttgtatcctgcaagcttactgtaattgcttattagttcctggagttttttttgtcagttctttcagattttctgtgtagacaatcatgtcatctgtgaacaaagatagttttatttcttccttcccattctttaccttttcttattgtgttagctagaacccataacaaatttttagatacgagaaagaaggaaggcattaaggttaagtaaaatgtagtactatcatacatttctttgccacggta

SEQ ID NO: 15725 - DNA, 291 bp, Homo sapiens
aattacaaaagacagtataatgacatatttcttcactattctctcaactcatttaaaagcaaatgcatacagcaatttgtgtataattgtatttaggccctatgacttattagaatgtaatgtatatgatgataacagcagaaaggaggtgcatggcaacaaagctctattggagtgagtaagaaaaggacaccagatggtaaactaaattcacaagatgaaatgaagaaaaccagaatggtaaataagaagattaatataataaactctttaaatgcttgtagtcctagc

SEQ ID NO: 15726 - DNA, 566 bp, Homo sapiens
aaaaaaaaaaaaaaacaaaaaaaaaacttgcttaagaccacatggctaggacgtggtggagtttgttctcaactgttttactgtgttgccttctagcacaggatgctataagaaacttgaagaaatgacaggccaggaagaaaatatttatggtctacacaaaggcctaatacttttactatagcaaatcaatgagaaatgatgaatgatctagtttttttttttattgtgtgaaaggtaatggcaaaatcatgccaaaggtcatgagtaataaaatagtatgcaaattaagatgagccttttcacttatcagaccatcagatattgggatttactaagtgataatatccagtgtggttttgtttgagtaatggtttggtttgtaaatgtctatcagtccagcttttttagagggaaattcagtaaacctgtcgaatgggcttgccagttgatctaaaaatttacccctagtaagtaattctctttataaagctaaatatacaaagatgtcacattgtgatagaaaagtccttccatgtgtgggaaggatcatttaaaaaaaaaat

SEQ ID NO: 15727 - DNA, 5247 bp, Homo sapiens
  misc_feature (11)..(11): n is a, c, g, or t
gagctggcgcngtgccctggtggcagtggctgaagtggcggcggcttcggcggctgcggcggctgcaacagcttcgggctcggggttttggcggcggcgccggcgggctaggctgcgcggtgcggaccccggcgcgcggtccgggttgctggggcggcgcgtaagatgcctctaatggaggagtttctgagcagcacccctggcccagtggctttgaaagggagctcaaaccagagactatttcaagccctggatatcatatcctgagggccacaggagaagagaacatggctgtgagtttggatgacgacgtgccgctcatcctgaccttggatgagggtggcagtgccccactggctccctccaacggcctgggccaagaagagctacctagcaaaaatggcggcagctatgccatccacgactcccaggcccccagtctcagctctgggggtgagagttccccctccagccccgcacacaactgggagatgaattaccaagaggcagcaatctacctccaggaaggcgagaacaacgacaagttcttcacccaccccaaggatgccaaggcgctggcggcctacctctttgcacacaatcacctcttctacctgatggagctggccacggccctgctgctgctgctgctctccctgtgcgaggcccccgccgtccccgcactccggcttggcatctatgtccacgccaccctggagctgtttgccctgatggtggtagtgtttgaactctgcatgaagttacgctggctgggcctccacaccttcatccggcacaagcggaccatggtcaagacctcggtgctggtggtgcagtttgtcgaggccatcgtggtgttggtacggcagatgtcccatgtgcgggtgacccgagcactgcgctgcattttcctggtggactgtcggtattgcggtggcgtccggcgcaacctgcggcagatcttccagtccctgccgcccttcatggacatcctcctgctgctgctgttcttcatgatcatctttgccatcctcggtttctacttgttctcccctaacccttcagacccctacttcagcaccctggagaacagcatcgtcagtctgtttgtccttctgaccacagccaatttcccagatgtgatgatgccctcctactcccggaacccctggtcctgcgtcttcttcatcgtgtacctctccatcgagctgtatttcatcatgaacctgcttctggctgtggtgttcgacaccttcaatgacattgagaaacgcaagttcaagtctttgctactgcacaagcgaaccgctatccagcatgcctaccgcctgctcatcagccagaggaggcctgccggcatctcctacaggcagtttgaaggcctcatgcgcttctacaagccccggatgagtgccagggagcgctatcttaccttcaaggccctgaatcagaacaacacacccctgctcagcctaaaggacttttacgatatctacgaagttgctgctttgaagtggaaggccaagaaaaacagagagcactggtttgatgagcttcccaggacggcgctcctcatcttcaaaggtattaatatccttgtgaagtccaaggccttccagtatttcatgtacttggtggtggcagtcaacggggtctggatcctcgtggagacatttatgctgaaaggtgggaacttcttctccaagcacgtgccctggagttacctcgtctttctaactatctatggggtggagctgttcctgaaggttgccggcctgggccctgtggagtacttgtcttccggatggaacttgtttgacttctccgtgacagtgttcgccttcctgggactgctggcgctggccctcaacatggagcccttctatttcatcgtggtcctgcgccccctccagctgctgaggttgtttaagttgaaggagcgctaccgcaacgtgctggacaccatgttcgagctgctgccccggatggccagcctgggcctcaccctgctcatcttttactactccttcgccatcgtgggcatggagttcttctgcgggatcgtcttccccaactgctgcaacacgagtacagtggcagatgcctaccgctggcgcaaccacaccgtgggcaacaggaccgtggtggaggaaggctactattatctcaataattttgacaacatcctcaacagctttgtgaccctgtttgagctcacagttgtcaacaactggtacatcatcatggaaggcgtcacctctcagacctcccactggagccgcctctacttcatgaccttttacattgtgaccatggtggtgatgacgatcattgtcgcctttatcctcgaggccttcgtcttccgaatgaactacagccgcaagaaccaggactcggaagttgatggtggcatcacccttgagaaggaaatctccaaagaagagctggttgccgtcctggagctctaccgggaggcacggggggcctcctcggatgtcaccaggctgctggagaccctctcccagatggagagataccagcaacattccatggtgtttctgggacggcgatcaaggaccaagagcgacctgagcctgaagatgtaccaggaggagatccaggagtggtatgaggagcatgccagggagcaagagcagcagcgacaactcagcagcagtgcagcccccgccgcccagcagcccccaggcagccgccagcgctcccagaccgttacctagcccagcgcccgaaagccgtctcttctatgcaataacacaatagtattactctactgcgatgtacggaactgcggtgtgtgtacacatactcacgtatatgcacatatttatatacaggaagaaaaaagacagacaagatggggcttggtttataaccaccttgccctgtcttccttaactccagaagccagtttggtgaggggtgggggtgcggccaccaggtctgagctcttcctactgtggaaggctccagaaggcccttcacaaggagacccctcacctggatccagtcgactgcggggcttgcccctcatgtgggctggcctccatcggccacgtccaaagctgtcactgctactgcttcaggctcacatccccccgacctgatggcgtgcccgccccctctccctgcggcccatgccacaggtttctgtgttttgctttagggacagaaccacttaggaaggaaagaactcccggtctccagggtggtatttcagtgtctgtgataatgtcacgcaacacctcttcggggaccagtgcccaggatctaatggaagcggaattggggcaactgggcccatgtggccagagctcagttagccagtgccgggcggccacagattacactgaccaatctcctcccttggctctgcaagcctcccacccagccttctctggcttaacccttgttggcgaaaactcttccacagtggcctccttggggacccagaacccggaggaaggggcatgaggcaggaagtggggccgatgtctgcaacccagaccacttcgtggaatgggctcttgaccaaatccctttttttgcgatttacccgttcaagcaaaacaacgttttggttaactaaggattgtgctaaagccgataccaggtccttcacacgtgtgcactaggaacaggagcgaacagcacagagagacgctccctgtgggacgcagcagccccgtggccccggcccagttcccagccaccctccctggctctgctcacaccagagatttccatagcaggagcggttggtgcagaagtaggttcagatgaacctcagttaacgtcgccacccctcctcccaccatggtaccctgtaggagccctgtatgacatctgagcgtggtggaggtaggagggttgccagctgcagtgaccctgccacagaggcagggtcagtgcagaggtcgctttggttccgcttccctgggccacagaacggaacacagcataggttctgcagcaggagccgcagtggcaggatggagggtgcgaagggcaaggagtgcactgctgggcattcctggccagccccggccctctggtgcctgcttcctgtgacttcagaaggcaggtggacagagcctccctctggccttgtcctcttcccagccacagaacgggcagggtggcacccgaccccaggggagcagtacctggtcccccaccccctcctcccaaccacctccaaggccaagctgggtcccatagccagcacggcatggttctccccttccccccttcccaggtcaggggagttggacaagtagcaggtgtttgtttttaaagcacagccctttgggaaagcaacacattattgagactcactgtgattcccccgggagtcagactggctttgtcctcttcctctctggagggccatgggccatcagcaggagctccacatcgagccccaggccagaaccccctccctttcacagagagggaactttattgcacaattgggtgccttttagcttttgtgtgttgaaatgggcgttttggaagcaagggtcaggggacagcttctaaaggtgtgagtctctgacctgagcatctgggcctcgcctgggcccttcttcctccccaggggtggaaacgtggaggggccagcagcaccccggggtctgcccaggggagtcaaggccccgaggtgggggggcctattccaggaggagtgggatctcggccctgtccagagcgagttaatgtgtccatctgcccaaccctgtcctgagaaaggacctggttttggccaggacctgacaaatacccaatggcagcagtgtcaacagacgggagtccagccagggtgggtgcccttgtcattgaggttagggacagctatccccaggttatgcctggccccacccagcagggagttggggtccccccacaggctgtgagctctgtgggccctgggatgtgatctagctcagatgccctctcatccttgatgtcatagttgagtgcacccaagtggcacccactggcggccaggggcacagcctggtggtggtggcaatagaactgtgcccctcctcagctcctcgcttcccctcccacagccccagccttactccaccatgcggacaatcattttgtacggatcacgggagcaatgctgtacggttttgtacactggtggtttgtttcctagaaaacccattgtgtctctggatttctagcacattactaaaagagcctctgctttgtaaa

SEQ ID NO: 15728 - DNA, 5335 bp, Homo sapiens
cgagactcggtgtctgactgacctttcttttcaccattcaatttatagttccgctcagtggtccccacctcctgaagtctgaccaatcagaagcaccgccattttgacctttcaccaatggaaagacttgggactccctctgggttggactcaacgaagatggagtcttgctacattgcccaggctggtcttgaactgctaggctcaagcagttctcccaccttgacctcccaaagcgctgagattacagaagatgcctctaatggaggagtttctgagcagcacccctggcccagtggctttgaaagggagctcaaaccagagactatttcaagccctggatatcatatcctgagggccacaggagaagagaacatggctgtgagtttggatgacgacgtgccgctcatcctgaccttggatgagggtggcagtgccccactggctccctccaacggcctgggccaagaagagctacctagcaaaaatggcggcagctatgccatccacgactcccaggcccccagtctcagctctgggggtgagagttccccctccagccccgcacacaactgggagatgaattaccaagaggcagcaatctacctccaggaaggcgagaacaacgacaagttcttcacccaccccaaggatgccaaggcgctggcggcctacctctttgcacacaatcacctcttctacctgatggagctggccacggccctgctgctgctgctgctctccctgtgcgaggcccccgccgtccccgcactccggcttggcatctatgtccacgccaccctggagctgtttgccctgatggtggtagtgtttgaactctgcatgaagttacgctggctgggcctccacaccttcatccggcacaagcggaccatggtcaagacctcggtgctggtggtgcagtttgtcgaggccatcgtggtgttggtacggcagatgtcccatgtgcgggtgacccgagcactgcgctgcattttcctggtggactgtcggtattgcggtggcgtccggcgcaacctgcggcagatcttccagtccctgccgcccttcatggacatcctcctgctgctgctgttcttcatgatcatctttgccatcctcggtttctacttgttctcccctaacccttcagacccctacttcagcaccctggagaacagcatcgtcagtctgtttgtccttctgaccacagccaatttcccagatgtgatgatgccctcctactcccggaacccctggtcctgcgtcttcttcatcgtgtacctctccatcgagctgtatttcatcatgaacctgcttctggctgtggtgttcgacaccttcaatgacattgagaaacgcaagttcaagtctttgctactgcacaagcgaaccgctatccagcatgcctaccgcctgctcatcagccagaggaggcctgccggcatctcctacaggcagtttgaaggcctcatgcgcttctacaagccccggatgagtgccagggagcgctatcttaccttcaaggccctgaatcagaacaacacacccctgctcagcctaaaggacttttacgatatctacgaagttgctgctttgaagtggaaggccaagaaaaacagagagcactggtttgatgagcttcccaggacggcgctcctcatcttcaaaggtattaatatccttgtgaagtccaaggccttccagtatttcatgtacttggtggtggcagtcaacggggtctggatcctcgtggagacatttatgctgaaaggtgggaacttcttctccaagcacgtgccctggagttacctcgtctttctaactatctatggggtggagctgttcctgaaggttgccggcctgggccctgtggagtacttgtcttccggatggaacttgtttgacttctccgtgacagtgttcgccttcctgggactgctggcgctggccctcaacatggagcccttctatttcatcgtggtcctgcgccccctccagctgctgaggttgtttaagttgaaggagcgctaccgcaacgtgctggacaccatgttcgagctgctgccccggatggccagcctgggcctcaccctgctcatcttttactactccttcgccatcgtgggcatggagttcttctgcgggatcgtcttccccaactgctgcaacacgagtacagtggcagatgcctaccgctggcgcaaccacaccgtgggcaacaggaccgtggtggaggaaggctactattatctcaataattttgacaacatcctcaacagctttgtgaccctgtttgagctcacagttgtcaacaactggtacatcatcatggaaggcgtcacctctcagacctcccactggagccgcctctacttcatgaccttttacattgtgaccatggtggtgatgacgatcattgtcgcctttatcctcgaggccttcgtcttccgaatgaactacagccgcaagaaccaggactcggaagttgatggtggcatcacccttgagaaggaaatctccaaagaagagctggttgccgtcctggagctctaccgggaggcacggggggcctcctcggatgtcaccaggctgctggagaccctctcccagatggagagataccagcaacattccatggtgtttctgggacggcgatcaaggaccaagagcgacctgagcctgaagatgtaccaggaggagatccaggagtggtatgaggagcatgccagggagcaagagcagcagcgacaactcagcagcagtgcagcccccgccgcccagcagcccccaggcagccgccagcgctcccagaccgttacctagcccagcgcccgaaagccgtctcttctatgcaataacacaatagtattactctactgcgatgtacggaactgcggtgtgtgtacacatactcacgtatatgcacatatttatatacaggaagaaaaaagacagacaagatggggcttggtttataaccaccttgccctgtcttccttaactccagaagccagtttggtgaggggtgggggtgcggccaccaggtctgagctcttcctactgtggaaggctccagaaggcccttcacaaggagacccctcacctggatccagtcgactgcggggcttgcccctcatgtgggctggcctccatcggccacgtccaaagctgtcactgctactgcttcaggctcacatccccccgacctgatggcgtgcccgccccctctccctgcggcccatgccacaggtttctgtgttttgctttagggacagaaccacttaggaaggaaagaactcccggtctccagggtggtatttcagtgtctgtgataatgtcacgcaacacctcttcggggaccagtgcccaggatctaatggaagcggaattggggcaactgggcccatgtggccagagctcagttagccagtgccgggcggccacagattacactgaccaatctcctcccttggctctgcaagcctcccacccagccttctctggcttaacccttgttggcgaaaactcttccacagtggcctccttggggacccagaacccggaggaaggggcatgaggcaggaagtggggccgatgtctgcaacccagaccacttcgtggaatgggctcttgaccaaatccctttttttgcgatttacccgttcaagcaaaacaacgttttggttaactaaggattgtgctaaagccgataccaggtccttcacacgtgtgcactaggaacaggagcgaacagcacagagagacgctccctgtgggacgcagcagccccgtggccccggcccagttcccagccaccctccctggctctgctcacaccagagatttccatagcaggagcggttggtgcagaagtaggttcagatgaacctcagttaacgtcgccacccctcctcccaccatggtaccctgtaggagccctgtatgacatctgagcgtggtggaggtaggagggttgccagctgcagtgaccctgccacagaggcagggtcagtgcagaggtcgctttggttccgcttccctgggccacagaacggaacacagcataggttctgcagcaggagccgcagtggcaggatggagggtgcgaagggcaaggagtgcactgctgggcattcctggccagccccggccctctggtgcctgcttcctgtgacttcagaaggcaggtggacagagcctccctctggccttgtcctcttcccagccacagaacgggcagggtggcacccgaccccaggggagcagtacctggtcccccaccccctcctcccaaccacctccaaggccaagctgggtcccatagccagcacggcatggttctccccttccccccttcccaggtcaggggagttggacaagtagcaggtgtttgtttttaaagcacagccctttgggaaagcaacacattattgagactcactgtgattcccccgggagtcagactggctttgtcctcttcctctctggagggccatgggccatcagcaggagctccacatcgagccccaggccagaaccccctccctttcacagagagggaactttattgcacaattgggtgccttttagcttttgtgtgttgaaatgggcgttttggaagcaagggtcaggggacagcttctaaaggtgtgagtctctgacctgagcatctgggcctcgcctgggcccttcttcctccccaggggtggaaacgtggaggggccagcagcaccccggggtctgcccaggggagtcaaggccccgaggtgggggggcctattccaggaggagtgggatctcggccctgtccagagcgagttaatgtgtccatctgcccaaccctgtcctgagaaaggacctggttttggccaggacctgacaaatacccaatggcagcagtgtcaacagacgggagtccagccagggtgggtgcccttgtcattgaggttagggacagctatccccaggttatgcctggccccacccagcagggagttggggtccccccacaggctgtgagctctgtgggccctgggatgtgatctagctcagatgccctctcatccttgatgtcatagttgagtgcacccaagtggcacccactggcggccaggggcacagcctggtggtggtggcaatagaactgtgcccctcctcagctcctcgcttcccctcccacagccccagccttactccaccatgcggacaatcattttgtacggatcacgggagcaatgctgtacggttttgtacactggtggtttgtttcctagaaaacccattgtgtctctggatttctagcacattactaaaagagcctctgctttgtaaa

SEQ ID NO: 15729 - DNA, 5893 bp, Homo sapiens
  misc_feature (11)..(11): n is a, c, g, or t
gagctggcgcngtgccctggtggcagtggctgaagtggcggcggcttcggcggctgcggcggctgcaacagcttcgggctcggggttttggcggcggcgccggcgggctaggctgcgcggtgcggaccccggcgcgcggtccgggttgctggggcggcgcgtaagatgcctctaatggaggagtttctgagcagcacccctggcccagtggctttgaaagggagctcaaaccagagactatttcaagccctggatatcatatcctgagggccacaggagaagagaacatggctgtgagtttggatgacgacgtgccgctcatcctgaccttggatgagggtggcagtgccccactggctccctccaacggcctgggccaagaagagctacctagcaaaaatggcggcagctatgccatccacgactcccaggcccccagtctcagctctgggggtgagagttccccctccagccccgcacacaactgggagatgaattaccaagaggcagcaatctacctccaggaaggcgagaacaacgacaagttcttcacccaccccaaggatgccaaggcgctggcggcctacctctttgcacacaatcacctcttctacctgatggagctggccacggccctgctgctgctgctgctctccctgtgcgaggcccccgccgtccccgcactccggcttggcatctatgtccacgccaccctggagctgtttgccctgatggtggtagtgtttgaactctgcatgaagttacgctggctgggcctccacaccttcatccggcacaagcggaccatggtcaagacctcggtgctggtggtgcagtttgtcgaggccatcgtggtgttggtacggcagatgtcccatgtgcgggtgacccgagcactgcgctgcattttcctggtggactgtcggtattgcggtggcgtccggcgcaacctgcggcagatcttccagtccctgccgcccttcatggacatcctcctgctgctgctgttcttcatgatcatctttgccatcctcggtttctacttgttctcccctaacccttcagacccctacttcagcaccctggagaacagcatcgtcagtctgtttgtccttctgaccacagccaatttcccagatgtgatgatgccctcctactcccggaacccctggtcctgcgtcttcttcatcgtgtacctctccatcgagctgtatttcatcatgaacctgcttctggctgtggtgttcgacaccttcaatgacattgagaaacgcaagttcaagtctttgctactgcacaagcgaaccgctatccagcatgcctaccgcctgctcatcagccagaggaggcctgccggcatctcctacaggcagtttgaaggcctcatgcgcttctacaagccccggatgagtgccagggagcgctatcttaccttcaaggccctgaatcagaacaacacacccctgctcagcctaaaggacttttacgatatctacgaagttgctgctttgaagtggaaggccaagaaaaacagagagcactggtttgatgagcttcccaggacggcgctcctcatcttcaaaggtattaatatccttgtgaagtccaaggccttccagtatttcatgtacttggtggtggcagtcaacggggtctggatcctcgtggagacatttatgctgaaaggtgggaacttcttctccaagcacgtgccctggagttacctcgtctttctaactatctatggggtggagctgttcctgaaggttgccggcctgggccctgtggagtacttgtcttccggatggaacttgtttgacttctccgtgacagtgttcgccttcctgggactgctggcgctggccctcaacatggagcccttctatttcatcgtggtcctgcgccccctccagctgctgaggttgtttaagttgaaggagcgctaccgcaacgtgctggacaccatgttcgagctgctgccccggatggccaggtactgccagcccccaccctggcctgcaggtccaggtgccgtgtggcagtgccccgtgggggcgggagccgagtggcagtcgggggaaaggagttccacaaaggactgcaatcgagggcctgacggggctccaaggagcctggaatcttgaccaccacaggtctcctgggcaccatttttctccactgacctgtctgacatatttagtagggagggcagggagctgtcaactcgcttaccacctgtgtctacattcacaggtaaggggtcacctgtgagtctaccttcacaggtaaggggtgaatctctgggaaaggggcatttgttcatagcgtcctgacttgagctgtttttcaccccagagctgccccacgaggccccttccccgcaggcactttccagttggtgaaccgaccaggggcatggccctgcagtcagccccacgggtccgaggaggccggggctgcagaggagccgttccctcctgccggccccgcgtcaccctgcccctgtcgccccacagcctgggcctcaccctgctcatcttttactactccttcgccatcgtgggcatggagttcttctgcgggatcgtcttccccaactgctgcaacacgagtacagtggcagatgcctaccgctggcgcaaccacaccgtgggcaacaggaccgtggtggaggaaggctactattatctcaataattttgacaacatcctcaacagctttgtgaccctgtttgagctcacagttgtcaacaactggtacatcatcatggaaggcgtcacctctcagacctcccactggagccgcctctacttcatgaccttttacattgtgaccatggtggtgatgacgatcattgtcgcctttatcctcgaggccttcgtcttccgaatgaactacagccgcaagaaccaggactcggaagttgatggtggcatcacccttgagaaggaaatctccaaagaagagctggttgccgtcctggagctctaccgggaggcacggggggcctcctcggatgtcaccaggctgctggagaccctctcccagatggagagataccagcaacattccatggtgtttctgggacggcgatcaaggaccaagagcgacctgagcctgaagatgtaccaggaggagatccagagatggtatcgctctgtcacctgggctggagtccagtggcgtgatcatagctcactgtagcctccaacccctgggctcaagtgatcctccccactcagcctacccaagcagctggaactacaggagtggtatgaggagcatgccagggagcaagagcagcagcgacaactcagcagcagtgcagcccccgccgcccagcagcccccaggcagccgccagcgctcccagaccgttacctagcccagcgcccgaaagccgtctcttctatgcaataacacaatagtattactctactgcgatgtacggaactgcggtgtgtgtacacatactcacgtatatgcacatatttatatacaggaagaaaaaagacagacaagatggggcttggtttataaccaccttgccctgtcttccttaactccagaagccagtttggtgaggggtgggggtgcggccaccaggtctgagctcttcctactgtggaaggctccagaaggcccttcacaaggagacccctcacctggatccagtcgactgcggggcttgcccctcatgtgggctggcctccatcggccacgtccaaagctgtcactgctactgcttcaggctcacatccccccgacctgatggcgtgcccgccccctctccctgcggcccatgccacaggtttctgtgttttgctttagggacagaaccacttaggaaggaaagaactcccggtctccagggtggtatttcagtgtctgtgataatgtcacgcaacacctcttcggggaccagtgcccaggatctaatggaagcggaattggggcaactgggcccatgtggccagagctcagttagccagtgccgggcggccacagattacactgaccaatctcctcccttggctctgcaagcctcccacccagccttctctggcttaacccttgttggcgaaaactcttccacagtggcctccttggggacccagaacccggaggaaggggcatgaggcaggaagtggggccgatgtctgcaacccagaccacttcgtggaatgggctcttgaccaaatccctttttttgcgatttacccgttcaagcaaaacaacgttttggttaactaaggattgtgctaaagccgataccaggtccttcacacgtgtgcactaggaacaggagcgaacagcacagagagacgctccctgtgggacgcagcagccccgtggccccggcccagttcccagccaccctccctggctctgctcacaccagagatttccatagcaggagcggttggtgcagaagtaggttcagatgaacctcagttaacgtcgccacccctcctcccaccatggtaccctgtaggagccctgtatgacatctgagcgtggtggaggtaggagggttgccagctgcagtgaccctgccacagaggcagggtcagtgcagaggtcgctttggttccgcttccctgggccacagaacggaacacagcataggttctgcagcaggagccgcagtggcaggatggagggtgcgaagggcaaggagtgcactgctgggcattcctggccagccccggccctctggtgcctgcttcctgtgacttcagaaggcaggtggacagagcctccctctggccttgtcctcttcccagccacagaacgggcagggtggcacccgaccccaggggagcagtacctggtcccccaccccctcctcccaaccacctccaaggccaagctgggtcccatagccagcacggcatggttctccccttccccccttcccaggtcaggggagttggacaagtagcaggtgtttgtttttaaagcacagccctttgggaaagcaacacattattgagactcactgtgattcccccgggagtcagactggctttgtcctcttcctctctggagggccatgggccatcagcaggagctccacatcgagccccaggccagaaccccctccctttcacagagagggaactttattgcacaattgggtgccttttagcttttgtgtgttgaaatgggcgttttggaagcaagggtcaggggacagcttctaaaggtgtgagtctctgacctgagcatctgggcctcgcctgggcccttcttcctccccaggggtggaaacgtggaggggccagcagcaccccggggtctgcccaggggagtcaaggccccgaggtgggggggcctattccaggaggagtgggatctcggccctgtccagagcgagttaatgtgtccatctgcccaaccctgtcctgagaaaggacctggttttggccaggacctgacaaatacccaatggcagcagtgtcaacagacgggagtccagccagggtgggtgcccttgtcattgaggttagggacagctatccccaggttatgcctggccccacccagcagggagttggggtccccccacaggctgtgagctctgtgggccctgggatgtgatctagctcagatgccctctcatccttgatgtcatagttgagtgcacccaagtggcacccactggcggccaggggcacagcctggtggtggtggcaatagaactgtgcccctcctcagctcctcgcttcccctcccacagccccagccttactccaccatgcggacaatcattttgtacggatcacgggagcaatgctgtacggttttgtacactggtggtttgtttcctagaaaacccattgtgtctctggatttctagcacattactaaaagagcctctgctttgtaaa

SEQ ID NO: 15730 - DNA, 3589 bp, Homo sapiens
gccacaggatggctgggccccaggagccacccctcccagtgttggctggactcggctgttactcccatctccctgcatgtccccagcagccaggagatgccacttagactctgggtctctgtcctgtctcgcccactgtagagatgacttttccctctagtgacaaagtggcgagcattgctgatctctttattccattccttaaactttcccgactcccagccctactgggataaaggctgccctggttctggatccagtcgtccaggggagtggccagggctccttcagcagtcaggaattagtgttaggcccagaggggcaagcttcctctcctccatctctcacaaccagccacaaatcacggtggggtctgcgaagagccggggccatggagcagcctgtgtagacggggacctgccctgcatgggcaccccctcactggctgcttcccttggtctccaggaaggcgtcacctctcagacctcccactggagccgcctctacttcatgaccttttacattgtgaccatggtggtgatgacgatcattgtcgcctttatcctcgaggccttcgtcttccgaatgaactacagccgcaagaaccaggactcggaagttgatggtggcatcacccttgagaaggaaatctccaaagaagagctggttgccgtcctggagctctaccgggaggcacggggggcctcctcggatgtcaccaggctgctggagaccctctcccagatggagagataccagcaacattccatggtgtttctgggacggcgatcaaggaccaagagcgacctgagcctgaagatgtaccaggaggagatccagagatggtatcgctctgtcacctgggctggagtccagtggcgtgatcatagctcactgtagcctccaacccctgggctcaagtgatcctccccactcagcctacccaagcagctggaactacaggagtggtatgaggagcatgccagggagcaagagcagcagcgacaactcagcagcagtgcagcccccgccgcccagcagcccccaggcagccgccagcgctcccagaccgttacctagcccagcgcccgaaagccgtctcttctatgcaataacacaatagtattactctactgcgatgtacggaactgcggtgtgtgtacacatactcacgtatatgcacatatttatatacaggaagaaaaaagacagacaagatggggcttggtttataaccaccttgccctgtcttccttaactccagaagccagtttggtgaggggtgggggtgcggccaccaggtctgagctcttcctactgtggaaggctccagaaggcccttcacaaggagacccctcacctggatccagtcgactgcggggcttgcccctcatgtgggctggcctccatcggccacgtccaaagctgtcactgctactgcttcaggctcacatccccccgacctgatggcgtgcccgccccctctccctgcggcccatgccacaggtttctgtgttttgctttagggacagaaccacttaggaaggaaagaactcccggtctccagggtggtatttcagtgtctgtgataatgtcacgcaacacctcttcggggaccagtgcccaggatctaatggaagcggaattggggcaactgggcccatgtggccagagctcagttagccagtgccgggcggccacagattacactgaccaatctcctcccttggctctgcaagcctcccacccagccttctctggcttaacccttgttggcgaaaactcttccacagtggcctccttggggacccagaacccggaggaaggggcatgaggcaggaagtggggccgatgtctgcaacccagaccacttcgtggaatgggctcttgaccaaatccctttttttgcgatttacccgttcaagcaaaacaacgttttggttaactaaggattgtgctaaagccgataccaggtccttcacacgtgtgcactaggaacaggagcgaacagcacagagagacgctccctgtgggacgcagcagccccgtggccccggcccagttcccagccaccctccctggctctgctcacaccagagatttccatagcaggagcggttggtgcagaagtaggttcagatgaacctcagttaacgtcgccacccctcctcccaccatggtaccctgtaggagccctgtatgacatctgagcgtggtggaggtaggagggttgccagctgcagtgaccctgccacagaggcagggtcagtgcagaggtcgctttggttccgcttccctgggccacagaacggaacacagcataggttctgcagcaggagccgcagtggcaggatggagggtgcgaagggcaaggagtgcactgctgggcattcctggccagccccggccctctggtgcctgcttcctgtgacttcagaaggcaggtggacagagcctccctctggccttgtcctcttcccagccacagaacgggcagggtggcacccgaccccaggggagcagtacctggtcccccaccccctcctcccaaccacctccaaggccaagctgggtcccatagccagcacggcatggttctccccttccccccttcccaggtcaggggagttggacaagtagcaggtgtttgtttttaaagcacagccctttgggaaagcaacacattattgagactcactgtgattcccccgggagtcagactggctttgtcctcttcctctctggagggccatgggccatcagcaggagctccacatcgagccccaggccagaaccccctccctttcacagagagggaactttattgcacaattgggtgccttttagcttttgtgtgttgaaatgggcgttttggaagcaagggtcaggggacagcttctaaaggtgtgagtctctgacctgagcatctgggcctcgcctgggcccttcttcctccccaggggtggaaacgtggaggggccagcagcaccccggggtctgcccaggggagtcaaggccccgaggtgggggggcctattccaggaggagtgggatctcggccctgtccagagcgagttaatgtgtccatctgcccaaccctgtcctgagaaaggacctggttttggccaggacctgacaaatacccaatggcagcagtgtcaacagacgggagtccagccagggtgggtgcccttgtcattgaggttagggacagctatccccaggttatgcctggccccacccagcagggagttggggtccccccacaggctgtgagctctgtgggccctgggatgtgatctagctcagatgccctctcatccttgatgtcatagttgagtgcacccaagtggcacccactggcggccaggggcacagcctggtggtggtggcaatagaactgtgcccctcctcagctcctcgcttcccctcccacagccccagccttactccaccatgcggacaatcattttgtacggatcacgggagcaatgctgtacggttttgtacactggtggtttgtttcctagaaaacccattgtgtctctggatttctagcacattactaaaagagcctctgctttgtaaa

SEQ ID NO: 15731 - DNA, 5460 bp, Homo sapiens
  misc_feature (11)..(11): n is a, c, g, or t
gagctggcgcngtgccctggtggcagtggctgaagtggcggcggcttcggcggctgcggcggctgcaacagcttcgggctcggggttttggcggcggcgccggcgggctaggctgcgcggtgcggaccccggcgcgcggtccgggttgctggggcggcgcgtaagatgcctctaatggaggagtttctgagcagcacccctggcccagtggctttgaaagggagctcaaaccagagactatttcaagccctggatatcatatcctgagggccacaggagaagagaacatggctgtgagtttggatgacgacgtgccgctcatcctgaccttggatgagggtggcagtgccccactggctccctccaacggcctgggccaagaagagctacctagcaaaaatggcggcagctatgccatccacgactcccaggcccccagtctcagctctgggggtgagagttccccctccagccccgcacacaactgggagatgaattaccaagaggcagcaatctacctccaggaaggcgagaacaacgacaagttcttcacccaccccaaggatgccaaggcgctggcggcctacctctttgcacacaatcacctcttctacctgatggagctggccacggccctgctgctgctgctgctctccctgtgcgaggcccccgccgtccccgcactccggcttggcatctatgtccacgccaccctggagctgtttgccctgatggtggtagtgtttgaactctgcatgaagttacgctggctgggcctccacaccttcatccggcacaagcggaccatggtcaagacctcggtgctggtggtgcagtttgtcgaggccatcgtggtgttggtacggcagatgtcccatgtgcgggtgacccgagcactgcgctgcattttcctggtggactgtcggtattgcggtggcgtccggcgcaacctgcggcagatcttccagtccctgccgcccttcatggacatcctcctgctgctgctgttcttcatgatcatctttgccatcctcggtttctacttgttctcccctaacccttcagacccctacttcagcaccctggagaacagcatcgtcagtctgtttgtccttctgaccacagccaatttcccagatgtgatgatgccctcctactcccggaacccctggtcctgcgtcttcttcatcgtgtacctctccatcgagctgtatttcatcatgaacctgcttctggctgtggtgttcgacaccttcaatgacattgagaaacgcaagttcaagtctttgctactgcacaagcgaaccgctatccagcatgcctaccgcctgctcatcagccagaggaggcctgccggcatctcctacaggcagtttgaaggcctcatgcgcttctacaagccccggatgagtgccagggagcgctatcttaccttcaaggccctgaatcagaacaacacacccctgctcagcctaaaggacttttacgatatctacgaagttgctgctttgaagtggaaggccaagaaaaacagagagcactggtttgatgagcttcccaggacggcgctcctcatcttcaaaggtattaatatccttgtgaagtccaaggccttccagtatttcatgtacttggtggtggcagtcaacggggtctggatcctcgtggagacatttatgctgaaaggtgggaacttcttctccaagcacgtgccctggagttacctcgtctttctaactatctatggggtggagctgttcctgaaggttgccggcctgggccctgtggagtacttgtcttccggatggaacttgtttgacttctccgtgacagtgttcgccttcctgggactgctggcgctggccctcaacatggagcccttctatttcatcgtggtcctgcgccccctccagctgctgaggttgtttaagttgaaggagcgctaccgcaacgtgctggacaccatgttcgagctgctgccccggatggccagcctgggcctcaccctgctcatcttttactactccttcgccatcgtgggcatggagttcttctgcgggatcgtcttccccaactgctgcaacacgagtacagtggcagatgcctaccgctggcgcaaccacaccgtgggcaacaggaccgtggtggaggaaggctactattatctcaataattttgacaacatcctcaacagctttgtgaccctgtttgagctcacagttgtcaacaactggtacatcatcatggaaggcgtcacctctcagacctcccactggagccgcctctacttcatgaccttttacattgtgaccatggtggtgatgacgatcattgtcgcctttatcctcgaggccttcgtcttccgaatgaactacagccgcaagaaccaggactcggaagttgatggtggcatcacccttgagaaggaaatctccaaagaagagctggttgccgtcctggagctctaccgggaggcacggggggcctcctcggatgtcaccaggctgctggagaccctctcccagatggagagataccagcaacattccatggtgtttctgggacggcgatcaaggaccaagagcgacctgagcctgaagatgtaccaggaggagatccaggagtggtatgaggagcatgccagggagcaagagcagcagcgacaactcagcagcagtgcagcccccgccgcccagcagcccccaggcagccgccagcgctcccagaccgttacctagcccagcgcccgaaagccgtctcttctatgcaataacacaatagtattactctactgcgatgtacggaactgcggtgtgtgtacacatactcacgtatatgcacatatttatatacaggaagaaaaaagacagacaagatggggcttggtttataaccaccttgccctgtcttccttaactccagaagccagtttggtgaggggtgggggtgcggccaccaggtctgagctcttcctactgtggaaggctccagaaggcccttcacaaggagacccctcacctggatccagtcgactgcggggcttgcccctcatgtgggctggcctccatcggccacgtccaaagctgtcactgctactgcttcaggctcacatccccccgacctgatggcgtgcccgccccctctccctgcggcccatgccacaggtttctgtgttttgctttagggacagaaccacttaggaaggaaagaactcccggtctccagggtggtatttcagtgtctgtgataatgtcacgcaacacctcttcggggaccagtgcccaggatctaatggaagcggaattggggcaactgggcccatgtggccagagctcagttagccagtgccgggcggccacagattacactgaccaatctcctcccttggctctgcaagcctcccacccagccttctctggcttaacccttgttggcgaaaactcttccacagtggcctccttggggacccagaacccggaggaaggggcatgaggcaggaagtggggccgatgtctgcaacccagaccacttcgtggaatgggctcttgaccaaatccctttttttgcgatttacccgttcaagcaaaacaacgttttggttaactaaggattgtgctaaagccgataccaggtccttcacacgtgtgcactaggaacaggagcgaacagcacagagagacgctccctgtgggacgcagcagccccgtggccccggcccagttcccagccaccctccctggctctgctcacaccagagatttccatagcaggagcggttggtgcagaagtaggttcagatgaacctcagttaacgtcgccacccctcctcccaccatggtaccctgtaggagccctgtatgacatctgagcgtggtggaggtaggagggttgccagctgcagtgaccctgccacagaggcagggtcagtgcagaggtcgctttggttccgcttccctgggccacagaacggaacacagcataggttctgcagcaggagccgcagtggcaggatggagggtgcgaagggcaaggagtgcactgctgggcattcctggccagccccggccctctggtgcctgcttcctgtgacttcagaaggcaggtggacagagcctccctctggccttgtcctcttcccagccacagaacgggcagggtggcacccgaccccaggggagcagtacctggtcccccaccccctcctcccaaccacctccaaggccaagctgggtcccatagccagcacggcatggttctccccttccccccttcccaggtcaggggagttggacaagtagcaggtgtttgtttttaaagcacagccctttgggaaagcaacacattattgagactcactgtgattcccccgggagtcagactggctttgtcctcttcctctctggagggccatgggccatcagcaggagctccacatcgagccccaggccagaaccccctccctttcacagagagggaactttattgcacaattgggtgccttttagcttttgtgtgttgaaatgggcgttttggaagcaagggtcaggggacagcttctaaaggtgtgagtctctgacctgagcatctgggcctcgcctgggcccttcttcctccccaggggtggaaacgtggaggggccagcagcaccccggggtctgcccaggggagtcaaggccccgaggtgggggggcctattccaggaggagtgggatctcggccctgtccagagcgagttaatgtgtccatctgcccaaccctgtcctgagaaaggacctggttttggccaggacctgacaaatacccaatggcagcagtgtcaacagacgggagtccagccagggtgggtgcccttgtcattgaggttagggacagctatccccaggttatgcctggccccacccagcagggagttggggtccccccacaggctgtgagctctgtgggccctgggatgtgatctagctcagatgccctctcatccttgatgtcatagttgagtgcacccaagtggcacccactggcggccaggggcacagcctggtggtggtggcaatagaactgtgcccctcctcagctcctcgcttcccctcccacagccccagccttactccaccatgcggacaatcattttgtacggatcacgggagcaatgctgtacggttttgtacactggtggtttgtttcctagaaaacccattgtgtctctggatttctagcacattactaaaagagcctctgctttgtaaaaaaaaaaccatagaaatgataagaaacattagaacgagtataaaaagtgtggggggcgacacaaaagaatgacaagtaggtgggggggcaagttagtgaaatgtcaacgcataagacagtgagagtgggggttcactaaaacgcggaggatggtaatacaggggggttaggataagagcaggtatacagggggagagagagaaagaagagaaa

SEQ ID NO: 15732 - DNA, 5206 bp, Homo sapiens
  misc_feature (11)..(11): n is a, c, g, or t
gagctggcgcngtgccctggtggcagtggctgaagtggcggcggcttcggcggctgcggcggctgcaacagcttcgggctcggggttttggcggcggcgccggcgggctaggctgcgcggtgcggaccccggcgcgcggtccgggttgctggggcggcgcgtaagatgcctctaatggaggagtttctgagcagcacccctggcccagtggctttgaaagggagctcaaaccagagactatttcaagccctggatatcatatcctgagggccacaggagaagagaacatggctgtgagtttggatgacgacgtgccgctcatcctgaccttggatgagggtggcagtgccccactggctccctccaacggcctgggccaagaagagctacctagcaaaaatggcggcagctatgccatccacgactcccaggcccccagtctcagctctgggggtgagagttccccctccagccccgcacacaactgggagatgaattaccaagaggcagcaatctacctccaggaaggcgagaacaacgacaagttcttcacccaccccaaggatgccaaggcgctggcggcctacctctttgcacacaatcacctcttctacctgatggagctggccacggccctgctgctgctgctgctctccctgtgcgaggcccccgccgtccccgcactccggcttggcatctatgtccacgccaccctggagctgtttgccctgatggtggtagtgtttgaactctgcatgaagttacgctggctgggcctccacaccttcatccggcacaagcggaccatggtcaagacctcggtgctggtggtgcagtttgtcgaggccatcgtggtgttggtacggcagatgtcccatgtgcgggtgacccgagcactgcgctgcattttcctggtggactgtcggtattgcggtggcgtccggcgcaacctgcggcagatcttccagtccctgccgcccttcatggacatcctcctgctgctgctgttcttcatgatcatctttgccatcctcggtttctacttgttctcccctaacccttcagacccctacttcagcaccctggagaacagcatcgtcagtctgtttgtccttctgaccacagccaatttcccagatgtgatgatgccctcctactcccggaacccctggtcctgcgtcttcttcatcgtgtacctctccatcgagctgtatttcatcatgaacctgcttctggctgtggtgttcgacaccttcaatgacattgagaaacgcaagttcaagtctttgctactgcacaagcgaaccgctatccagcatgcctaccgcctgctcatcagccagaggaggcctgccggcatctcctacaggcagtttgaaggcctcatgcgcttctacaagccccggatgagtgccagggagcgctatcttaccttcaaggccctgaatcagaacaacacacccctgctcagcctaaaggacttttacgatatctacgaagttgctgctttgaagtggaaggccaagaaaaacagagagcactggtttgatgagcttcccaggacggcgctcctcatcttcaaaggtattaatatccttgtgaagtccaaggccttccagtatttcatgtacttggtggtggcagtcaacggggtctggatcctcgtggagacatttatgctgaaaggtgggaacttcttctccaagcacgtgccctggagttacctcgtctttctaactatctatggggtggagctgttcctgaaggttgccggcctgggccctgtggagtacttgtcttccggatggaacttgtttgacttctccgtgacagtgttcgccttcctgggactgctggcgctggccctcaacatggagcccttctatttcatcgtggtcctgcgccccctccagctgctgaggttgtttaagttgaaggagcgctaccgcaacgtgctggacaccatgttcgagctgctgccccggatggccagcctgggcctcaccctgctcatcttttactactccttcgccatcgtgggcatggagttcttctgcgggatcgtcttccccaactgctgcaacacgagtacagtggcagatgcctaccgctggcgcaaccacaccgtgggcaacaggaccgtggtggaggaaggctactattatctcaataattttgacaacatcctcaacagctttgtgaccctgtttgagctcacagttgtcaacaactggtacatcatcatggaaggcgtcacctctcagacctcccactggagccgcctctacttcatgaccttttacattgtgaccatggtggtgatgacgatcattgtcgcctttatcctcgaggccttcgtcttccgaatgaactacagccgcaagaaccaggactcggaagttgatggtggcatcacccttgagaaggaaatctccaaagaagagctggttgccgtcctggagctctaccgggaggcacggggggcctcctcggatgtcaccaggctgctggagaccctctcccagatggagagataccagcaacattccatggtgtttctgggacggcgatcaaggaccaagagcgacctgagcctgaagatgtaccaggaggagatccaggagtggtatgaggagcatgccagggagcaagagcagcagcgacaactcagcagcagtgcagcccccgccgcccagcagcccccaggcagccgccagcgctcccagaccgttacctagcccagcgcccgaaagccgtctcttctatgcaataacacaatagtattactctactgcgatgtacggaactgcggtgtgtgtacacatactcacgtatatgcacatatttatatacaggaagaaaaaagacagacaagatggggcttggtttataaccaccttgccctgtcttccttaactccagaagccagtttggtgaggggtgggggtgcggccaccaggtctgagctcttcctactgtggaaggctccagaaggcccttcacaaggagacccctcacctggatccagtcgactgcggggcttgcccctcatgtgggctggcctccatcggccacgtccaaagctgtcactgctactgcttcaggctcacatccccccgacctgatggcgtgcccgccccctctccctgcggcccatgccacaggtttctgtgttttgctttagggacagaaccacttaggaaggaaagaactcccggtctccagggtggtatttcagtgtctgtgataatgtcacgcaacacctcttcggggaccagtgcccaggatctaatggaagcggaattggggcaactgggcccatgtggccagagctcagttagccagtgccgggcggccacagattacactgaccaatctcctcccttggctctgcaagcctcccacccagccttctctggcttaacccttgttggcgaaaactcttccacagtggcctccttggggacccagaacccggaggaaggggcatgaggcaggaagtggggccgatgtctgcaacccagaccacttcgtggaatgggctcttgaccaaatccctttttttgcgatttacccgttcaagcaaaacaacgttttggttaactaaggattgtgctaaagccgataccaggtccttcacacgtgtgcactaggaacaggagcgaacagcacagagagacgctccctgtgggacgcagcagccccgtggccccggcccagttcccagccaccctccctggctctgctcacaccagagatttccatagcaggagcggttggtgcagaagtaggttcagatgaacctcagttaacgtcgccacccctcctcccaccatggtaccctgtaggagccctgtatgacatctgagcgtggtggaggtaggagggttgccagctgcagtgaccctgccacagaggcagggtcagtgcagaggtcgctttggttccgcttccctgggccacagaacggaacacagcataggttctgcagcaggagccgcagtggcaggatggagggtgcgaagggcaaggagtgcactgctgggcattcctggccagccccggccctctggtgcctgcttcctgtgacttcagaaggcaggtggacagagcctccctctggccttgtcctcttcccagccacagaacgggcagggtggcacccgaccccaggggagcagtacctggtcccccaccccctcctcccaaccacctccaaggccaagctgggtcccatagccagcacggcatggttctccccttccccccttcccaggtcaggggagttggacaagtagcaggtgtttgtttttaaagcacagccctttgggaaagcaacacattattgagactcactgtgattcccccgggagtcagactggctttgtcctcttcctctctggagggccatgggccatcagcaggagctccacatcgagccccaggccagaaccccctccctttcacagagagggaactttattgcacaattgggtgccttttagcttttgtgtgttgaaatgggcgttttggaagcaagggtcaggggacagcttctaaaggtgtgagtctctgacctgagcatctgggcctcgcctgggcccttcttcctccccaggggtggaaacgtggaggggccagcagcaccccggggtctgcccaggggagtcaaggccccgaggtgggggggcctattccaggaggagtgggatctcggccctgtccagagcgagttaatgtgtccatctgcccaaccctgtcctgagaaaggacctggttttggccaggacctgacaaatacccaatggcagcagtgtcaacagacgggagtccagccagggtgggtgcccttgtcattgaggttagggacagctatccccaggttatgcctggccccacccagcagggagttggggtccccccacaggctgtgagctctgtgggccctgggatgtgatctagctcagatgccctctcatccttgatgtcatagttgagtgcacccaagtggcacccactggcggccaggggcacagcctggtggtggtggcaatagaactgtgcccctcctcagctcctcgcttcccctcccacagccccagccttactccaccatgcggacaatcattttgtacggatcacgggagcacacaggagcaacaggggggatgagcacacaggtggggatgagcacacaggtggggat

SEQ ID NO: 15733 - DNA, 3688 bp, Homo sapiens
  misc_feature (11)..(11): n is a, c, g, or t
gagctggcgcngtgccctggtggcagtggctgaagtggcggcggcttcggcggctgcggcggctgcaacagcttcgggctcggggttttggcggcggcgccggcgggctaggctgcgcggtgcggaccccggcgcgcggtccgggttgctggggcggcgcgtaagatgcctctaatggaggagtttctgagcagcacccctggcccagtggctttgaaagggagctcaaaccagagactatttcaagccctggatatcatatcctgagggccacaggagaagagaacatggctgtgagtttggatgacgacgtgccgctcatcctgaccttggatgagggtggcagtgccccactggctccctccaacggcctgggccaagaagagctacctagcaaaaatggcggcagctatgccatccacgactcccaggcccccagtctcagctctgggggtgagagttccccctccagccccgcacacaactgggagatgaattaccaagaggcagcaatctacctccaggaaggcgagaacaacgacaagttcttcacccaccccaaggatgccaaggcgctggcggcctacctctttgcacacaatcacctcttctacctgatggagctggccacggccctgctgctgctgctgctctccctgtgcgaggcccccgccgtccccgcactccggcttggcatctatgtccacgccaccctggagctgtttgccctgatggtggtagtgtttgaactctgcatgaagttacgctggctgggcctccacaccttcatccggcacaagcggaccatggtcaagacctcggtgctggtggtgcagtttgtcgaggccatcgtggtgttggtacggcagatgtcccatgtgcgggtgacccgagcactgcgctgcattttcctggtggactgtcggtattgcggtggcgtccggcgcaacctgcggcagatcttccagtccctgccgcccttcatggacatcctcctgctgctgctgttcttcatgatcatctttgccatcctcggtttctacttgttctcccctaacccttcagacccctacttcagcaccctggagaacagcatcgtcagtctgtttgtccttctgaccacagccaatttcccagatgtgatgatgccctcctactcccggaacccctggtcctgcgtcttcttcatcgtgtacctctccatcgagctgtatttcatcatgaacctgcttctggctgtggtgttcgacaccttcaatgacattgagaaacgcaagttcaagtctttgctactgcacaagcgaaccgctatccagcatgcctaccgcctgctcatcagccagaggaggcctgccggcatctcctacaggcagtttgaaggcctcatgcgcttctacaagccccggatgagtgccagggagcgctatcttaccttcaaggccctgaatcagaacaacacacccctgctcagcctaaaggacttttacgatatctacgaagttgctgctttgaagtggaaggccaagaaaaacagagagcactggtttgatgagcttcccaggacggcgctcctcatcttcaaaggtattaatatccttgtgaagtccaaggccttccagtatttcatgtacttggtggtggcagtcaacggggtctggatcctcgtggagacatttatgctgaaaggtgggaacttcttctccaagcacgtgccctggagttacctcgtctttctaactatctatggggtggagctgttcctgaaggttgccggcctgggccctgtggagtacttgtcttccggatggaacttgtttgacttctccgtgacagtgttcgccttcctgggactgctggcgctggccctcaacatggagcccttctatttcatcgtggtcctgcgccccctccagctgctgaggttgtttaagttgaaggagcgctaccgcaacgtgctggacaccatgttcgagctgctgccccggatggccagcctgggcctcaccctgctcatcttttactactccttcgccatcgtgggcatggagttcttctgcgggatcgtcttccccaactgctgcaacacgagtacagtggcagatgcctaccgctggcgcaaccacaccgtgggcaacaggaccgtggtggaggaaggctactattatctcaataattttgacaacatcctcaacagctttgtgaccctgtttgagctcacagttgtcaacaactggtacatcatcatggaaggcgtcacctctcagacctcccactggagccgcctctacttcatgaccttttacattgtgaccatggtggtgatgacgatcattgtcgcctttatcctcgaggccttcgtcttccgaatgaactacagccgcaagaaccaggactcggaagttgatggtggcatcacccttgagaaggaaatctccaaagaagagctggttgccgtcctggagctctaccgggaggcacggggggcctcctcggatgtcaccaggctgctggagaccctctcccagatggagagataccagcaacattccatggtgtttctgggacggcgatcaaggaccaagagcgacctgagcctgaagatgtaccaggaggagatccaggagtggtatgaggagcatgccagggagcaagagcagcagcgacaactcagcagcagtgcagcccccgccgcccagcagcccccaggcagccgccagcgctcccagaccgttacctagcccagcgcccgaaagccgtctcttctatgcaataacacaatagtattactctactgcgatgtacggaactgcggtgtgtgtacacatactcacgtatatgcacatatttatatacaggaagaaaaaagacagacaagatggggcttggtttataaccaccttgccctgtcttccttaactccagaagccagtttggtgaggggtgggggtgcggccaccaggtctgagctcttcctactgtggaaggctccagaaggcccttcacaaggagacccctcacctggatccagtcgactgcggggcttgcccctcatgtgggctggcctccatcggccacgtccaaagctgtcactgctactgcttcaggctcacatccccccgacctgatggcgtgcccgccccctctccctgcggcccatgccacaggtttctgtgttttgctttagggacagaaccacttaggaaggaaagaactcccggtctccagggtggtatttcagtgtctgtgataatgtcacgcaacacctcttcggggaccagtgcccaggatctaatggaagcggaattggggcaactgggcccatgtggccagagctcagttagccagtgccgggcggccacagattacactgaccaatctcctcccttggctctgcaagcctcccacccagccttctctggcttaacccttgttggcgaaaactcttccacagtggcctccttggggacccagaacccggaggaaggggcatgaggcaggaagtggggccgatgtctgcaacccagaccacttcgtggaatgggctcttgaccaaatccctttttttgcgatttacccgttcaagcaaaacaatgctgtacggttttgtacactggtggtttgtttcctagaaaacccattgtgtctctggatttctagcacattactaaaagagcctctgctttgtaaa

SEQ ID NO: 15734 - DNA, 3663 bp, Homo sapiens
  misc_feature (11)..(11): n is a, c, g, or t
gagctggcgcngtgccctggtggcagtggctgaagtggcggcggcttcggcggctgcggcggctgcaacagcttcgggctcggggttttggcggcggcgccggcgggctaggctgcgcggtgcggaccccggcgcgcggtccgggttgctggggcggcgcgtaagatgcctctaatggaggagtttctgagcagcacccctggcccagtggctttgaaagggagctcaaaccagagactatttcaagccctggatatcatatcctgagggccacaggagaagagaacatggctgtgagtttggatgacgacgtgccgctcatcctgaccttggatgagggtggcagtgccccactggctccctccaacggcctgggccaagaagagctacctagcaaaaatggcggcagctatgccatccacgactcccaggcccccagtctcagctctgggggtgagagttccccctccagccccgcacacaactgggagatgaattaccaagaggcagcaatctacctccaggaaggcgagaacaacgacaagttcttcacccaccccaaggatgccaaggcgctggcggcctacctctttgcacacaatcacctcttctacctgatggagctggccacggccctgctgctgctgctgctctccctgtgcgaggcccccgccgtccccgcactccggcttggcatctatgtccacgccaccctggagctgtttgccctgatggtggtagtgtttgaactctgcatgaagttacgctggctgggcctccacaccttcatccggcacaagcggaccatggtcaagacctcggtgctggtggtgcagtttgtcgaggccatcgtggtgttggtacggcagatgtcccatgtgcgggtgacccgagcactgcgctgcattttcctggtggactgtcggtattgcggtggcgtccggcgcaacctgcggcagatcttccagtccctgccgcccttcatggacatcctcctgctgctgctgttcttcatgatcatctttgccatcctcggtttctacttgttctcccctaacccttcagacccctacttcagcaccctggagaacagcatcgtcagtctgtttgtccttctgaccacagccaatttcccagatgtgatgatgccctcctactcccggaacccctggtcctgcgtcttcttcatcgtgtacctctccatcgagctgtatttcatcatgaacctgcttctggctgtggtgttcgacaccttcaatgacattgagaaacgcaagttcaagtctttgctactgcacaagcgaaccgctatccagcatgcctaccgcctgctcatcagccagaggaggcctgccggcatctcctacaggcagtttgaaggcctcatgcgcttctacaagccccggatgagtgccagggagcgctatcttaccttcaaggccctgaatcagaacaacacacccctgctcagcctaaaggacttttacgatatctacgaagttgctgctttgaagtggaaggccaagaaaaacagagagcactggtttgatgagcttcccaggacggcgctcctcatcttcaaaggtattaatatccttgtgaagtccaaggccttccagtatttcatgtacttggtggtggcagtcaacggggtctggatcctcgtggagacatttatgctgaaaggtgggaacttcttctccaagcacgtgccctggagttacctcgtctttctaactatctatggggtggagctgttcctgaaggttgccggcctgggccctgtggagtacttgtcttccggatggaacttgtttgacttctccgtgacagtgttcgccttcctgggactgctggcgctggccctcaacatggagcccttctatttcatcgtggtcctgcgccccctccagctgctgaggttgtttaagttgaaggagcgctaccgcaacgtgctggacaccatgttcgagctgctgccccggatggccagcctgggcctcaccctgctcatcttttactactccttcgccatcgtgggcatggagttcttctgcgggatcgtcttccccaactgctgcaacacgagtacagtggcagatgcctaccgctggcgcaaccacaccgtgggcaacaggaccgtggtggaggaaggctactattatctcaataattttgacaacatcctcaacagctttgtgaccctgtttgagctcacagttgtcaacaactggtacatcatcatggaaggcgtcacctctcagacctcccactggagccgcctctacttcatgaccttttacattgtgaccatggtggtgatgacgatcattgtcgcctttatcctcgaggccttcgtcttccgaatgaactacagccgcaagaaccaggactcggaagttgatggtggcatcacccttgagaaggaaatctccaaagaagagctggttgccgtcctggagctctaccgggaggcacggggggcctcctcggatgtcaccaggctgctggagaccctctcccagatggagagataccagcaacattccatggtgtttctgggacggcgatcaaggaccaagagcgacctgagcctgaagatgtaccaggaggagatccaggagtggtatgaggagcatgccagggagcaagagcagcagcgacaactcagcagcagtgcagcccccgccgcccagcagcccccaggcagccgccagcgctcccagaccgttacctagcccagcgcccgaaagccgtctcttctatgcaataacacaatagtattactctactgcgatgtacggaactgcggtgtgtgtacacatactcacgtatatgcacatatttatatacaggaagaaaaaagacagacaagatggggcttggtttataaccaccttgccctgtcttccttaactccagaagccagtttggtgaggggtgggggtgcggccaccaggtctgagctcttcctactgtggaaggctccagaaggcccttcacaaggagacccctcacctggatccagtcgactgcggggcttgcccctcatgtgggctggcctccatcggccacgtccaaagctgtcactgctactgcttcaggctcacatccccccgacctgatggcgtgcccgccccctctccctgcggcccatgccacaggtttctgtgttttgctttagggacagaaccacttaggaaggaaagaactcccggtctccagggtggtatttcagtgtctgtgataatgtcacgcaacacctcttcggggaccagtgcccaggatctaatggaagcggaattggggcaactgggcccatgtggccagagctcagttagccagtgccgggcggccacagattacactgaccaatctcctcccttggctctgcaagcctcccacccagccttctctggcttaacccttgttggcgaaaactcttccacagtggcctccttggggacccagaacccggaggaaggggcatgaggcaggaagtggggccgatgtctgcaacccagaccacttcgtggaatgggctcttgaccaaatccctttttttgcgatttacccgttcaagcaaaacaacgttttggttaactaaggattgtgctaaagccgataccaggtccttcacacgagatcctctagatcgacccc

SEQ ID NO: 15735 - DNA, 2387 bp, Homo sapiens
  misc_feature (11)..(11): n is a, c, g, or t
gagctggcgcngtgccctggtggcagtggctgaagtggcggcggcttcggcggctgcggcggctgcaacagcttcgggctcggggttttggcggcggcgccggcgggctaggctgcgcggtgcggaccccggcgcgcggtccgggttgctggggcggcgcgtaagatgcctctaatggaggagtttctgagcagcacccctggcccagtggctttgaaagggagctcaaaccagagactatttcaagccctggatatcatatcctgagggccacaggagaagagaacatggctgtgagtttggatgacgacgtgccgctcatcctgaccttggatgagggtggcagtgccccactggctccctccaacggcctgggccaagaagagctacctagcaaaaatggcggcagctatgccatccacgactcccaggcccccagtctcagctctgggggtgagagttccccctccagccccgcacacaactgggagatgaattaccaagaggcagcaatctacctccaggaaggcgagaacaacgacaagttcttcacccaccccaaggatgccaaggcgctggcggcctacctctttgcacacaatcacctcttctacctgatggagctggccacggccctgctgctgctgctgctctccctgtgcgaggcccccgccgtccccgcactccggcttggcatctatgtccacgccaccctggagctgtttgccctgatggtggtagtgtttgaactctgcatgaagttacgctggctgggcctccacaccttcatccggcacaagcggaccatggtcaagacctcggtgctggtggtgcagtttgtcgaggccatcgtggtgttggtacggcagatgtcccatgtgcgggtgacccgagcactgcgctgcattttcctggtggactgtcggtattgcggtggcgtccggcgcaacctgcggcagatcttccagtccctgccgcccttcatggacatcctcctgctgctgctgttcttcatgatcatctttgccatcctcggtttctacttgttctcccctaacccttcagacccctacttcagcaccctggagaacagcatcgtcagtctgtttgtccttctgaccacagccaatttcccagatgtgatgatgccctcctactcccggaacccctggtcctgcgtcttcttcatcgtgtacctctccatcgagctgtatttcatcatgaacctgcttctggctgtggtgttcgacaccttcaatgacattgagaaacgcaagttcaagtctttgctactgcacaagcgaaccgctatccagcatgcctaccgcctgctcatcagccagaggaggcctgccggcatctcctacaggcagtttgaaggcctcatgcgcttctacaagccccggatgagtgccagggagcgctatcttaccttcaaggccctgaatcagaacaacacacccctgctcagcctaaaggacttttacgatatctacgaagttgctgctttgaagtggaaggccaagaaaaacagagagcactggtttgatgagcttcccaggacggcgctcctcatcttcaaaggtattaatatccttgtgaagtccaaggccttccagtatttcatgtacttggtggtggcagtcaacggggtctggatcctcgtggagacatttatgctgaaaggtgggaacttcttctccaagcacgtgccctggagttacctcgtctttctaactatctatggggtggagctgttcctgaaggttgccggcctgggccctgtggagtacttgtcttccggatggaacttgtttgacttctccgtgacagtgttcgccttcctgggactgctggcgctggccctcaacatggagcccttctatttcatcgtggtcctgcgccccctccagctgctgaggttgtttaagttgaaggagcgctaccgcaacgtgctggacaccatgttcgagctgctgccccggatggccagcctgggcctcaccctgctcatcttttactactccttcgccatcgtgggcatggagttcttctgcgggatcgtcttccccaactgctgcaacacgagtacagtggcagatgcctaccgctggcgcaaccacaccgtgggcaacaggaccgtggtggaggaaggctactattatctcaataattttgacaacatcctcaacagctttgtgaccctgtttgagctcacggagaagtcaaacaagttccatccggaagacaagtactccacagggcccaggccggcaaccttcaggaacagctccaccccatagatagttagaaagacgaggtaactccaggcacgtgcttggagaagaagttcccacctttcagcataaatgtatcattagaggacc

SEQ ID NO: 15736 - DNA, 1648 bp, Homo sapiens
  misc_feature (11)..(11): n is a, c, g, or t
gagctggcgcngtgccctggtggcagtggctgaagtggcggcggcttcggcggctgcggcggctgcaacagcttcgggctcggggttttggcggcggcgccggcgggctaggctgcgcggtgcggaccccggcgcgcggtccgggttgctggggcggcgcgtaagatgcctctaatggaggagtttctgagcagcacccctggcccagtggctttgaaagggagctcaaaccagagactatttcaagccctggatatcatatcctgagggccacaggagaagagaacatggctgtgagtttggatgacgacgtgccgctcatcctgaccttggatgagggtggcagtgccccactggctccctccaacggcctgggccaagaagagctacctagcaaaaatggcggcagctatgccatccacgactcccaggcccccagtctcagctctgggggtgagagttccccctccagccccgcacacaactgggagatgaattaccaagaggcagcaatctacctccaggaaggcgagaacaacgacaagttcttcacccaccccaaggatgccaaggcgctggcggcctacctctttgcacacaatcacctcttctacctgatggagctggccacggccctgctgctgctgctgctctccctgtgcgaggcccccgccgtccccgcactccggcttggcatctatgtccacgccaccctggagctgtttgccctgatggtggtagtgtttgaactctgcatgaagttacgctggctgggcctccacaccttcatccggcacaagcggaccatggtcaagacctcggtgctggtggtgcagtttgtcgaggccatcgtggtgttggtacggcagatgtcccatgtgcgggtgacccgagcactgcgctgcattttcctggtggactgtcggtattgcggtggcgtccggcggtaaggcccgggtggggagctgggcagtcactatcctggcatggcctgacctctgggccagtggggcaggagcttgtgagtcagttagtgatgaggtcgaccctgcatgctggtggagtacacgcagactcactctccctctgccattccatccacgcacaggagaaagcggtattcctaccgcagtgtaggtttgctgcctctgggtccagggctttttcccatcttatccgcagccttccagagctgcttcctcgctctaggcatgttatctacccaaatgcaggcagctcagcagcgtccatgtgacacaagcagactctcctgccacctccatcgaggctgtaggaccaaactcaaaccagaccaagcctcgactgagatttattttgggagactcaatctggaaaattccttggctgggctactgttgctgagagtgggtttgcaattcattctctgtgcccatctgcaaagctagaaacaggactcagtgtccttgaaacaggcccagtgtcccaggactaagtggccttgaaatgtcttcatgccttccacatcctgctcatggaaactgacctttgcacccaaggtcatgcccttggccttctgctgctctgttccctgcttgcatggcactcacctccttggggcctcaccaggtggaggtggctgtgtgctacgcctgccctagttcttccc

SEQ ID NO: 15737 - DNA, 212 bp, Homo sapiens
cttatggcacaggcgaatcgtattcctgctgcaactggatggtgctggctttagtgactgcctcactcttcccagattgcacagctttctgtgtgctgaccctcccttcttcccaaattctccatcaaaactgtctgcacttgatctcttgagcccaggaggtcaagactgcagtgagccatgatcacaccactgcactccagcctgggcag

SEQ ID NO: 15738 - DNA, 1070 bp, Homo sapiens
ggataccagcagtcacacagcccttccattcttctggtgccacacacctgtgccagcacctggagttttttttcttctggggctgcctgatgttggcaggaagtgtgagagggctggagagaggagaaggcctcccgaggccagagtgggcactgcctctccagccccccgttccaggtatgcaggatgacggctgggctgcaggggctgacggtgctccatgcctgccacccacagacctcggtgctggtggtgcagtttgtcgaggccatcgtggtgttggtacggcagatgtcccatgtgcgggtgacccgagcactgcgctgcattttcctggtggactgtcggtattgcggtggcgtccggcggtaaggcccgggtggggagctgggcagtcactatcctggcatggcctgacctctgggccagtggggcaggagcttgtgagtcagttagtgatgaggtcgaccctgcatgctggtggagtacacgcagactcactctccctctgccattccatccacgcacaggagaaagcggtattcctaccgcagtgtaggtttgctgcctctgggtccagggctttttcccatcttatccgcagccttccagagctgcttcctcgctctaggcatgttatctacccaaatgcaggcagctcagcagcgtccatgtgacacaagcagactctcctgccacctccatcgaggctgtaggaccaaactcaaaccagaccaagcctcgactgagatttattttgggagactcaatctggaaaattccttggctgggctactgttgctgagagtgggtttgcaattcattctctgtgcccatctgcaaagctagaaacaggactcagtgtccttgaaacaggcccagtgtcccaggactaagtggccttgaaatgtcttcatgccttccacatcctgctcatggaaactgacctttgcacccaaggtcatgcccttggccttctgctgctctgttccctgcttgcatggcactcacctccttggggcctcaccaggtggaggtggctgtgtgctacgcctgccctagttcttccc

SEQ ID NO: 15739 - DNA, 5459 bp, Homo sapiens
cctgcctgggaaccaggggtggagttggccagagccaaacaatgtggacagagagcaaggaggggatgttctacagagacagatggcccagtgttgctgggagaggagggcgtggctgtcagcagggaagagcaacagatggccctgcaccaggggacaaatccagttgtttttaatttttaactaagtaggatattaatatgcttccaaaagtcaaaggattcaaaaagggtctgtctaccctattccttatagcccttgtagggcgactgatttcattgacttctcatttttccttcctgtgtttcttttggtaaagataagtcgatgtatttatgttttcttgtttcctcccttttgtacacattagagagcatactatttgtactcttttgtacttgcttttttcacttatcaagagaaaggaaaacatttgtaaccagctgtgctaattcttgccattatcagtacacagcatggaggttgatttgaagatgacgggatgtccatgtgagcatatgaagggactgccaggcttttcttctgccaaacggtgtctttttgctcttaagcctgggtgccaagtgaatctctctcctcttccaatgcagatggcggcagctatgccatccacgactcccaggcccccagtctcagctctgggggtgagagttccccctccagccccgcacacaactgggagatgaattaccaagaggcagcaatctacctccaggaaggcgagaacaacgacaagttcttcacccaccccaaggatgccaaggcgctggcggcctacctctttgcacacaatcacctcttctacctgatggagctggccacggccctgctgctgctgctgctctccctgtgcgaggcccccgccgtccccgcactccggcttggcatctatgtccacgccaccctggagctgtttgccctgatggtggtagtgtttgaactctgcatgaagttacgctggctgggcctccacaccttcatccggcacaagcggaccatggtcaagacctcggtgctggtggtgcagtttgtcgaggccatcgtggtgttggtacggcagatgtcccatgtgcgggtgacccgagcactgcgctgcattttcctggtggactgtcggtattgcggtggcgtccggcgcaacctgcggcagatcttccagtccctgccgcccttcatggacatcctcctgctgctgctgttcttcatgatcatctttgccatcctcggtttctacttgttctcccctaacccttcagacccctacttcagcaccctggagaacagcatcgtcagtctgtttgtccttctgaccacagccaatttcccagatgtgatgatgccctcctactcccggaacccctggtcctgcgtcttcttcatcgtgtacctctccatcgagctgtatttcatcatgaacctgcttctggctgtggtgttcgacaccttcaatgacattgagaaacgcaagttcaagtctttgctactgcacaagcgaaccgctatccagcatgcctaccgcctgctcatcagccagaggaggcctgccggcatctcctacaggcagtttgaaggcctcatgcgcttctacaagccccggatgagtgccagggagcgctatcttaccttcaaggccctgaatcagaacaacacacccctgctcagcctaaaggacttttacgatatctacgaagttgctgctttgaagtggaaggccaagaaaaacagagagcactggtttgatgagcttcccaggacggcgctcctcatcttcaaaggtattaatatccttgtgaagtccaaggccttccagtatttcatgtacttggtggtggcagtcaacggggtctggatcctcgtggagacatttatgctgaaaggtgggaacttcttctccaagcacgtgccctggagttacctcgtctttctaactatctatggggtggagctgttcctgaaggttgccggcctgggccctgtggagtacttgtcttccggatggaacttgtttgacttctccgtgacagtgttcgccttcctgggactgctggcgctggccctcaacatggagcccttctatttcatcgtggtcctgcgccccctccagctgctgaggttgtttaagttgaaggagcgctaccgcaacgtgctggacaccatgttcgagctgctgccccggatggccagcctgggcctcaccctgctcatcttttactactccttcgccatcgtgggcatggagttcttctgcgggatcgtcttccccaactgctgcaacacgagtacagtggcagatgcctaccgctggcgcaaccacaccgtgggcaacaggaccgtggtggaggaaggctactattatctcaataattttgacaacatcctcaacagctttgtgaccctgtttgagctcacagttgtcaacaactggtacatcatcatggaaggcgtcacctctcagacctcccactggagccgcctctacttcatgaccttttacattgtgaccatggtggtgatgacgatcattgtcgcctttatcctcgaggccttcgtcttccgaatgaactacagccgcaagaaccaggactcggaagttgatggtggcatcacccttgagaaggaaatctccaaagaagagctggttgccgtcctggagctctaccgggaggcacggggggcctcctcggatgtcaccaggctgctggagaccctctcccagatggagagataccagcaacattccatggtgtttctgggacggcgatcaaggaccaagagcgacctgagcctgaagatgtaccaggaggagatccaggagtggtatgaggagcatgccagggagcaagagcagcagcgacaactcagcagcagtgcagcccccgccgcccagcagcccccaggcagccgccagcgctcccagaccgttacctagcccagcgcccgaaagccgtctcttctatgcaataacacaatagtattactctactgcgatgtacggaactgcggtgtgtgtacacatactcacgtatatgcacatatttatatacaggaagaaaaaagacagacaagatggggcttggtttataaccaccttgccctgtcttccttaactccagaagccagtttggtgaggggtgggggtgcggccaccaggtctgagctcttcctactgtggaaggctccagaaggcccttcacaaggagacccctcacctggatccagtcgactgcggggcttgcccctcatgtgggctggcctccatcggccacgtccaaagctgtcactgctactgcttcaggctcacatccccccgacctgatggcgtgcccgccccctctccctgcggcccatgccacaggtttctgtgttttgctttagggacagaaccacttaggaaggaaagaactcccggtctccagggtggtatttcagtgtctgtgataatgtcacgcaacacctcttcggggaccagtgcccaggatctaatggaagcggaattggggcaactgggcccatgtggccagagctcagttagccagtgccgggcggccacagattacactgaccaatctcctcccttggctctgcaagcctcccacccagccttctctggcttaacccttgttggcgaaaactcttccacagtggcctccttggggacccagaacccggaggaaggggcatgaggcaggaagtggggccgatgtctgcaacccagaccacttcgtggaatgggctcttgaccaaatccctttttttgcgatttacccgttcaagcaaaacaacgttttggttaactaaggattgtgctaaagccgataccaggtccttcacacgtgtgcactaggaacaggagcgaacagcacagagagacgctccctgtgggacgcagcagccccgtggccccggcccagttcccagccaccctccctggctctgctcacaccagagatttccatagcaggagcggttggtgcagaagtaggttcagatgaacctcagttaacgtcgccacccctcctcccaccatggtaccctgtaggagccctgtatgacatctgagcgtggtggaggtaggagggttgccagctgcagtgaccctgccacagaggcagggtcagtgcagaggtcgctttggttccgcttccctgggccacagaacggaacacagcataggttctgcagcaggagccgcagtggcaggatggagggtgcgaagggcaaggagtgcactgctgggcattcctggccagccccggccctctggtgcctgcttcctgtgacttcagaaggcaggtggacagagcctccctctggccttgtcctcttcccagccacagaacgggcagggtggcacccgaccccaggggagcagtacctggtcccccaccccctcctcccaaccacctccaaggccaagctgggtcccatagccagcacggcatggttctccccttccccccttcccaggtcaggggagttggacaagtagcaggtgtttgtttttaaagcacagccctttgggaaagcaacacattattgagactcactgtgattcccccgggagtcagactggctttgtcctcttcctctctggagggccatgggccatcagcaggagctccacatcgagccccaggccagaaccccctccctttcacagagagggaactttattgcacaattgggtgccttttagcttttgtgtgttgaaatgggcgttttggaagcaagggtcaggggacagcttctaaaggtgtgagtctctgacctgagcatctgggcctcgcctgggcccttcttcctccccaggggtggaaacgtggaggggccagcagcaccccggggtctgcccaggggagtcaaggccccgaggtgggggggcctattccaggaggagtgggatctcggccctgtccagagcgagttaatgtgtccatctgcccaaccctgtcctgagaaaggacctggttttggccaggacctgacaaatacccaatggcagcagtgtcaacagacgggagtccagccagggtgggtgcccttgtcattgaggttagggacagctatccccaggttatgcctggccccacccagcagggagttggggtccccccacaggctgtgagctctgtgggccctgggatgtgatctagctcagatgccctctcatccttgatgtcatagttgagtgcacccaagtggcacccactggcggccaggggcacagcctggtggtggtggcaatagaactgtgcccctcctcagctcctcgcttcccctcccacagccccagccttactccaccatgcggacaatcattttgtacggatcacgggagcaatgctgtacggttttgtacactggtggtttgtttcctagaaaacccattgtgtctctggatttctagcacattactaaaagagcctctgctttgtaaa

SEQ ID NO: 15740 - DNA, 5370 bp, Homo sapiens
  misc_feature (11)..(11): n is a, c, g, or t
gagctggcgcngtgccctggtggcagtggctgaagtggcggcggcttcggcggctgcggcggctgcaacagcttcgggctcggggttttggcggcggcgccggcgggctaggctgcgcggtgcggaccccggcgcgcggtccgggttgctggggcggcgcgtaagatgcctctaatggaggagtttctgagcagcacccctggcccagtggctttgaaagggagctcaaaccagagactatttcaagccctggatatcatatcctgagggccacaggagaagagaacatggctgtgagtttggatgacgacgtgccgctcatcctgaccttggatgagggtggcagtgccccactggctccctccaacggcctgggccaagaagagctacctagcaaaaatggcggcagctatgccatccacgactcccaggcccccagtctcagctctgggggtgagagttccccctccagccccgcacacaactgggagatgaattaccaagaggcagcaatctacctccaggaaggcgagaacaacgacaagttcttcacccaccccaaggatgccaaggcgctggcggcctacctctttgcacacaatcacctcttctacctgatggagctggccacggccctgctgctgctgctgctctccctgtgcgaggcccccgccgtccccgcactccggcttggcatctatgtccacgccaccctggagctgtttgccctgatggtggtagtgtttgaactctgcatgaagttacgctggctgggcctccacaccttcatccggcacaagcggaccatggtcaagacctcggtgctggtggtgcagtttgtcgaggccatcgtggtgttggtacggcagatgtcccatgtgcgggtgacccgagcactgcgctgcattttcctggtggactgtcggtattgcggtggcgtccggcgcaacctgcggcagatcttccagtccctgccgcccttcatggacatcctcctgctgctgctgttcttcatgatcatctttgccatcctcggtttctacttgttctcccctaacccttcagacccctacttcagcaccctggagaacagcatcgtcagtctgtttgtccttctgaccacagccaatttcccagatgtgatgatgccctcctactcccggaacccctggtcctgcgtcttcttcatcgtgtacctctccatcgagctgtatttcatcatgaacctgcttctggctgtggtgttcgacaccttcaatgacattgagaaacgcaagttcaagtctttgctactgcacaagcgaaccgctatccagcatgcctaccgcctgctcatcagccagaggaggcctgccggcatctcctacaggcagtttgaaggcctcatgcgcttctacaagccccggatgagtgccagggagcgctatcttaccttcaaggccctgaatcagaacaacacacccctgctcagcctaaaggacttttacgatatctacgaagttgctgctttgaagtggaaggccaagaaaaacagagagcactggtttgatgagcttcccaggacggcgctcctcatcttcaaaggtattaatatccttgtgaagtccaaggccttccagtatttcatgtacttggtggtggcagtcaacggggtctggatcctcgtggagacatttatgctgaaaggtgggaacttcttctccaagcacgtgccctggagttacctcgtctttctaactatctatggggtggagctgttcctgaaggttgccggcctgggccctgtggagtacttgtcttccggatggaacttgtttgacttctccgtgacagtgttcgccttcctgggactgctggcgctggccctcaacatggagcccttctatttcatcgtggtcctgcgccccctccagctgctgaggttgtttaagttgaaggagcgctaccgcaacgtgctggacaccatgttcgagctgctgccccggatggccagcctgggcctcaccctgctcatcttttactactccttcgccatcgtgggcatggagttcttctgcgggatcgtcttccccaactgctgcaacacgagtacagtggcagatgcctaccgctggcgcaaccacaccgtgggcaacaggaccgtggtggaggaaggctactattatctcaataattttgacaacatcctcaacagctttgtgaccctgtttgagctcacagttgtcaacaactggtacatcatcatggaaggcgtcacctctcagacctcccactggagccgcctctacttcatgaccttttacattgtgaccatggtggtgatgacgatcattgtcgcctttatcctcgaggccttcgtcttccgaatgaactacagccgcaagaaccaggactcggaagttgatggtggcatcacccttgagaaggaaatctccaaagaagagctggttgccgtcctggagctctaccgggaggcacggggggcctcctcggatgtcaccaggctgctggagaccctctcccagatggagagataccagcaacattccatggtgtttctgggacggcgatcaaggaccaagagcgacctgagcctgaagatgtaccaggaggagatccagagatggtatcgctctgtcacctgggctggagtccagtggcgtgatcatagctcactgtagcctccaacccctgggctcaagtgatcctccccactcagcctacccaagcagctggaactacaggagtggtatgaggagcatgccagggagcaagagcagcagcgacaactcagcagcagtgcagcccccgccgcccagcagcccccaggcagccgccagcgctcccagaccgttacctagcccagcgcccgaaagccgtctcttctatgcaataacacaatagtattactctactgcgatgtacggaactgcggtgtgtgtacacatactcacgtatatgcacatatttatatacaggaagaaaaaagacagacaagatggggcttggtttataaccaccttgccctgtcttccttaactccagaagccagtttggtgaggggtgggggtgcggccaccaggtctgagctcttcctactgtggaaggctccagaaggcccttcacaaggagacccctcacctggatccagtcgactgcggggcttgcccctcatgtgggctggcctccatcggccacgtccaaagctgtcactgctactgcttcaggctcacatccccccgacctgatggcgtgcccgccccctctccctgcggcccatgccacaggtttctgtgttttgctttagggacagaaccacttaggaaggaaagaactcccggtctccagggtggtatttcagtgtctgtgataatgtcacgcaacacctcttcggggaccagtgcccaggatctaatggaagcggaattggggcaactgggcccatgtggccagagctcagttagccagtgccgggcggccacagattacactgaccaatctcctcccttggctctgcaagcctcccacccagccttctctggcttaacccttgttggcgaaaactcttccacagtggcctccttggggacccagaacccggaggaaggggcatgaggcaggaagtggggccgatgtctgcaacccagaccacttcgtggaatgggctcttgaccaaatccctttttttgcgatttacccgttcaagcaaaacaacgttttggttaactaaggattgtgctaaagccgataccaggtccttcacacgtgtgcactaggaacaggagcgaacagcacagagagacgctccctgtgggacgcagcagccccgtggccccggcccagttcccagccaccctccctggctctgctcacaccagagatttccatagcaggagcggttggtgcagaagtaggttcagatgaacctcagttaacgtcgccacccctcctcccaccatggtaccctgtaggagccctgtatgacatctgagcgtggtggaggtaggagggttgccagctgcagtgaccctgccacagaggcagggtcagtgcagaggtcgctttggttccgcttccctgggccacagaacggaacacagcataggttctgcagcaggagccgcagtggcaggatggagggtgcgaagggcaaggagtgcactgctgggcattcctggccagccccggccctctggtgcctgcttcctgtgacttcagaaggcaggtggacagagcctccctctggccttgtcctcttcccagccacagaacgggcagggtggcacccgaccccaggggagcagtacctggtcccccaccccctcctcccaaccacctccaaggccaagctgggtcccatagccagcacggcatggttctccccttccccccttcccaggtcaggggagttggacaagtagcaggtgtttgtttttaaagcacagccctttgggaaagcaacacattattgagactcactgtgattcccccgggagtcagactggctttgtcctcttcctctctggagggccatgggccatcagcaggagctccacatcgagccccaggccagaaccccctccctttcacagagagggaactttattgcacaattgggtgccttttagcttttgtgtgttgaaatgggcgttttggaagcaagggtcaggggacagcttctaaaggtgtgagtctctgacctgagcatctgggcctcgcctgggcccttcttcctccccaggggtggaaacgtggaggggccagcagcaccccggggtctgcccaggggagtcaaggccccgaggtgggggggcctattccaggaggagtgggatctcggccctgtccagagcgagttaatgtgtccatctgcccaaccctgtcctgagaaaggacctggttttggccaggacctgacaaatacccaatggcagcagtgtcaacagacgggagtccagccagggtgggtgcccttgtcattgaggttagggacagctatccccaggttatgcctggccccacccagcagggagttggggtccccccacaggctgtgagctctgtgggccctgggatgtgatctagctcagatgccctctcatccttgatgtcatagttgagtgcacccaagtggcacccactggcggccaggggcacagcctggtggtggtggcaatagaactgtgcccctcctcagctcctcgcttcccctcccacagccccagccttactccaccatgcggacaatcattttgtacggatcacgggagcaatgctgtacggttttgtacactggtggtttgtttcctagaaaacccattgtgtctctggatttctagcacattactaaaagagcctctgctttgtaaa

SEQ ID NO: 15741 - DNA, 3417 bp, Homo sapiens
ttcctgactgctgaaggagccctggccactcccctggacgactggatccagaaccagggcagcctttatcccagtagggctgggagtcgggaaagtttaaggaatggaataaagagatcagcaatgctcgccactttgtcactagaggggcaagcttcctctcctccatctctcacaaccagccacaaatcacggtggggtctgcgaagagccggggccatggagcagcctgtgtagacggggacctgccctgcatgggcaccccctcactggctgcttcccttggtctccaggaaggcgtcacctctcagacctcccactggagccgcctctacttcatgaccttttacattgtgaccatggtggtgatgacgatcattgtcgcctttatcctcgaggccttcgtcttccgaatgaactacagccgcaagaaccaggactcggaagttgatggtggcatcacccttgagaaggaaatctccaaagaagagctggttgccgtcctggagctctaccgggaggcacggggggcctcctcggatgtcaccaggctgctggagaccctctcccagatggagagataccagcaacattccatggtgtttctgggacggcgatcaaggaccaagagcgacctgagcctgaagatgtaccaggaggagatccagagatggtatcgctctgtcacctgggctggagtccagtggcgtgatcatagctcactgtagcctccaacccctgggctcaagtgatcctccccactcagcctacccaagcagctggaactacaggagtggtatgaggagcatgccagggagcaagagcagcagcgacaactcagcagcagtgcagcccccgccgcccagcagcccccaggcagccgccagcgctcccagaccgttacctagcccagcgcccgaaagccgtctcttctatgcaataacacaatagtattactctactgcgatgtacggaactgcggtgtgtgtacacatactcacgtatatgcacatatttatatacaggaagaaaaaagacagacaagatggggcttggtttataaccaccttgccctgtcttccttaactccagaagccagtttggtgaggggtgggggtgcggccaccaggtctgagctcttcctactgtggaaggctccagaaggcccttcacaaggagacccctcacctggatccagtcgactgcggggcttgcccctcatgtgggctggcctccatcggccacgtccaaagctgtcactgctactgcttcaggctcacatccccccgacctgatggcgtgcccgccccctctccctgcggcccatgccacaggtttctgtgttttgctttagggacagaaccacttaggaaggaaagaactcccggtctccagggtggtatttcagtgtctgtgataatgtcacgcaacacctcttcggggaccagtgcccaggatctaatggaagcggaattggggcaactgggcccatgtggccagagctcagttagccagtgccgggcggccacagattacactgaccaatctcctcccttggctctgcaagcctcccacccagccttctctggcttaacccttgttggcgaaaactcttccacagtggcctccttggggacccagaacccggaggaaggggcatgaggcaggaagtggggccgatgtctgcaacccagaccacttcgtggaatgggctcttgaccaaatccctttttttgcgatttacccgttcaagcaaaacaacgttttggttaactaaggattgtgctaaagccgataccaggtccttcacacgtgtgcactaggaacaggagcgaacagcacagagagacgctccctgtgggacgcagcagccccgtggccccggcccagttcccagccaccctccctggctctgctcacaccagagatttccatagcaggagcggttggtgcagaagtaggttcagatgaacctcagttaacgtcgccacccctcctcccaccatggtaccctgtaggagccctgtatgacatctgagcgtggtggaggtaggagggttgccagctgcagtgaccctgccacagaggcagggtcagtgcagaggtcgctttggttccgcttccctgggccacagaacggaacacagcataggttctgcagcaggagccgcagtggcaggatggagggtgcgaagggcaaggagtgcactgctgggcattcctggccagccccggccctctggtgcctgcttcctgtgacttcagaaggcaggtggacagagcctccctctggccttgtcctcttcccagccacagaacgggcagggtggcacccgaccccaggggagcagtacctggtcccccaccccctcctcccaaccacctccaaggccaagctgggtcccatagccagcacggcatggttctccccttccccccttcccaggtcaggggagttggacaagtagcaggtgtttgtttttaaagcacagccctttgggaaagcaacacattattgagactcactgtgattcccccgggagtcagactggctttgtcctcttcctctctggagggccatgggccatcagcaggagctccacatcgagccccaggccagaaccccctccctttcacagagagggaactttattgcacaattgggtgccttttagcttttgtgtgttgaaatgggcgttttggaagcaagggtcaggggacagcttctaaaggtgtgagtctctgacctgagcatctgggcctcgcctgggcccttcttcctccccaggggtggaaacgtggaggggccagcagcaccccggggtctgcccaggggagtcaaggccccgaggtgggggggcctattccaggaggagtgggatctcggccctgtccagagcgagttaatgtgtccatctgcccaaccctgtcctgagaaaggacctggttttggccaggacctgacaaatacccaatggcagcagtgtcaacagacgggagtccagccagggtgggtgcccttgtcattgaggttagggacagctatccccaggttatgcctggccccacccagcagggagttggggtccccccacaggctgtgagctctgtgggccctgggatgtgatctagctcagatgccctctcatccttgatgtcatagttgagtgcacccaagtggcacccactggcggccaggggcacagcctggtggtggtggcaatagaactgtgcccctcctcagctcctcgcttcccctcccacagccccagccttactccaccatgcggacaatcattttgtacggatcacgggagcaatgctgtacggttttgtacactggtggtttgtttcctagaaaacccattgtgtctctggatttctagcacattactaaaagagcctctgctttgtaaa

SEQ ID NO: 15742 - DNA, 5597 bp, Homo sapiens
  misc_feature (11)..(11): n is a, c, g, or t
  misc_feature (5315)..(5315): n is a, c, g, or t
  misc_feature (5317)..(5317): n is a, c, g, or t
gagctggcgcngtgccctggtggcagtggctgaagtggcggcggcttcggcggctgcggcggctgcaacagcttcgggctcggggttttggcggcggcgccggcgggctaggctgcgcggtgcggaccccggcgcgcggtccgggttgctggggcggcgcgtaagatgcctctaatggaggagtttctgagcagcacccctggcccagtggctttgaaagggagctcaaaccagagactatttcaagccctggatatcatatcctgagggccacaggagaagagaacatggctgtgagtttggatgacgacgtgccgctcatcctgaccttggatgagggtggcagtgccccactggctccctccaacggcctgggccaagaagagctacctagcaaaaatggcggcagctatgccatccacgactcccaggcccccagtctcagctctgggggtgagagttccccctccagccccgcacacaactgggagatgaattaccaagaggcagcaatctacctccaggaaggcgagaacaacgacaagttcttcacccaccccaaggatgccaaggcgctggcggcctacctctttgcacacaatcacctcttctacctgatggagctggccacggccctgctgctgctgctgctctccctgtgcgaggcccccgccgtccccgcactccggcttggcatctatgtccacgccaccctggagctgtttgccctgatggtggtagtgtttgaactctgcatgaagttacgctggctgggcctccacaccttcatccggcacaagcggaccatggtcaagacctcggtgctggtggtgcagtttgtcgaggccatcgtggtgttggtacggcagatgtcccatgtgcgggtgacccgagcactgcgctgcattttcctggtggactgtcggtattgcggtggcgtccggcgcaacctgcggcagatcttccagtccctgccgcccttcatggacatcctcctgctgctgctgttcttcatgatcatctttgccatcctcggtttctacttgttctcccctaacccttcagacccctacttcagcaccctggagaacagcatcgtcagtctgtttgtccttctgaccacagccaatttcccagatgtgatgatgccctcctactcccggaacccctggtcctgcgtcttcttcatcgtgtacctctccatcgagctgtatttcatcatgaacctgcttctggctgtggtgttcgacaccttcaatgacattgagaaacgcaagttcaagtctttgctactgcacaagcgaaccgctatccagcatgcctaccgcctgctcatcagccagaggaggcctgccggcatctcctacaggcagtttgaaggcctcatgcgcttctacaagccccggatgagtgccagggagcgctatcttaccttcaaggccctgaatcagaacaacacacccctgctcagcctaaaggacttttacgatatctacgaagttgctgctttgaagtggaaggccaagaaaaacagagagcactggtttgatgagcttcccaggacggcgctcctcatcttcaaaggtattaatatccttgtgaagtccaaggccttccagtatttcatgtacttggtggtggcagtcaacggggtctggatcctcgtggagacatttatgctgaaaggtgggaacttcttctccaagcacgtgccctggagttacctcgtctttctaactatctatggggtggagctgttcctgaaggttgccggcctgggccctgtggagtacttgtcttccggatggaacttgtttgacttctccgtgacagtgttcgccttcctgggactgctggcgctggccctcaacatggagcccttctatttcatcgtggtcctgcgccccctccagctgctgaggttgtttaagttgaaggagcgctaccgcaacgtgctggacaccatgttcgagctgctgccccggatggccagcctgggcctcaccctgctcatcttttactactccttcgccatcgtgggcatggagttcttctgcgggatcgtcttccccaactgctgcaacacgagtacagtggcagatgcctaccgctggcgcaaccacaccgtgggcaacaggaccgtggtggaggaaggctactattatctcaataattttgacaacatcctcaacagctttgtgaccctgtttgagctcacagttgtcaacaactggtacatcatcatggaaggcgtcacctctcagacctcccactggagccgcctctacttcatgaccttttacattgtgaccatggtggtgatgacgatcattgtcgcctttatcctcgaggccttcgtcttccgaatgaactacagccgcaagaaccaggactcggaagttgatggtggcatcacccttgagaaggaaatctccaaagaagagctggttgccgtcctggagctctaccgggaggcacggggggcctcctcggatgtcaccaggctgctggagaccctctcccagatggagagataccagcaacattccatggtgtttctgggacggcgatcaaggaccaagagcgacctgagcctgaagatgtaccaggaggagatccaggagtggtatgaggagcatgccagggagcaagagcagcagcgacaactcagcagcagtgcagcccccgccgcccagcagcccccaggcagccgccagcgctcccagaccgttacctagcccagcgcccgaaagccgtctcttctatgcaataacacaatagtattactctactgcgatgtacggaactgcggtgtgtgtacacatactcacgtatatgcacatatttatatacaggaagaaaaaagacagacaagatggggcttggtttataaccaccttgccctgtcttccttaactccagaagccagtttggtgaggggtgggggtgcggccaccaggtctgagctcttcctactgtggaaggctccagaaggcccttcacaaggagacccctcacctggatccagtcgactgcggggcttgcccctcatgtgggctggcctccatcggccacgtccaaagctgtcactgctactgcttcaggctcacatccccccgacctgatggcgtgcccgccccctctccctgcggcccatgccacaggtttctgtgttttgctttagggacagaaccacttaggaaggaaagaactcccggtctccagggtggtatttcagtgtctgtgataatgtcacgcaacacctcttcggggaccagtgcccaggatctaatggaagcggaattggggcaactgggcccatgtggccagagctcagttagccagtgccgggcggccacagattacactgaccaatctcctcccttggctctgcaagcctcccacccagccttctctggcttaacccttgttggcgaaaactcttccacagtggcctccttggggacccagaacccggaggaaggggcatgaggcaggaagtggggccgatgtctgcaacccagaccacttcgtggaatgggctcttgaccaaatccctttttttgcgatttacccgttcaagcaaaacaacgttttggttaactaaggattgtgctaaagccgataccaggtccttcacacgtgtgcactaggaacaggagcgaacagcacagagagacgctccctgtgggacgcagcagccccgtggccccggcccagttcccagccaccctccctggctctgctcacaccagagatttccatagcaggagcggttggtgcagaagtaggttcagatgaacctcagttaacgtcgccacccctcctcccaccatggtaccctgtaggagccctgtatgacatctgagcgtggtggaggtaggagggttgccagctgcagtgaccctgccacagaggcagggtcagtgcagaggtcgctttggttccgcttccctgggccacagaacggaacacagcataggttctgcagcaggagccgcagtggcaggatggagggtgcgaagggcaaggagtgcactgctgggcattcctggccagccccggccctctggtgcctgcttcctgtgacttcagaaggcaggtggacagagcctccctctggccttgtcctcttcccagccacagaacgggcagggtggcacccgaccccaggggagcagtacctggtcccccaccccctcctcccaaccacctccaaggccaagctgggtcccatagccagcacggcatggttctccccttccccccttcccaggtcaggggagttggacaagtagcaggtgtttgtttttaaagcacagccctttgggaaagcaacacattattgagactcactgtgattcccccgggagtcagactggctttgtcctcttcctctctggagggccatgggccatcagcaggagctccacatcgagccccaggccagaaccccctccctttcacagagagggaactttattgcacaattgggtgccttttagcttttgtgtgttgaaatgggcgttttggaagcaagggtcaggggacagcttctaaaggtgtgagtctctgacctgagcatctgggcctcgcctgggcccttcttcctccccaggggtggaaacgtggaggggccagcagcaccccggggtctgcccaggggagtcaaggccccgaggtgggggggcctattccaggaggagtgggatctcggccctgtccagagcgagttaatgtgtccatctgcccaaccctgtcctgagaaaggacctggttttggccaggacctgacaaatacccaatggcagcagtgtcaacagacgggagtccagccagggtgggtgcccttgtcattgaggttagggacagctatccccaggttatgcctggccccacccagcagggagttggggtccccccacaggctgtgagctctgtgggccctgggatgtgatctagctcagatgccctctcatccttgatgtcatagttgagtgcacccaagtggcacccactggcggccaggggcacagcctggtggtggtggcaatagaactgtgcccctcctcagctcctcgcttcccctcccacagccccagccttactccaccatgcggacaatcattttgtacggatcacgggagcaatgctgtacggttttgtacactggtggtttgtttcctagaaaacccattgtgtctctggatttctagcacattactaaaagagcctctgctttgtaaaaaaaaaaaaaaaaaaaaaaaaaaaaaaacaaaaaaaaaaaaaaaaaaaaaaaaaaaaaaaaaaaacananaaaaaaaaaaaaaaaattcactgcccggcgttttacaccgtgagactggaaaaccctggggttccccacttaatcgcttggagaaaatccccttttgccagttggggaataccaaagagcccgcactgtggcctttccaacagtggccaacctgaatggaaagggaaattgaagcttaatatttgtaaattcggtaaaatttggtaacaactacttcttaccaattggccgaattggaaactccttttgattccgcttagggttgaggtttctcgttggt

SEQ ID NO: 15743 - DNA, 3962 bp, Homo sapiens
  misc_feature (11)..(11): n is a, c, g, or t
gagctggcgcngtgccctggtggcagtggctgaagtggcggcggcttcggcggctgcggcggctgcaacagcttcgggctcggggttttggcggcggcgccggcgggctaggctgcgcggtgcggaccccggcgcgcggtccgggttgctggggcggcgcgtaagatgcctctaatggaggagtttctgagcagcacccctggcccagtggctttgaaagggagctcaaaccagagactatttcaagccctggatatcatatcctgagggccacaggagaagagaacatggctgtgagtttggatgacgacgtgccgctcatcctgaccttggatgagggtggcagtgccccactggctccctccaacggcctgggccaagaagagctacctagcaaaaatggcggcagctatgccatccacgactcccaggcccccagtctcagctctgggggtgagagttccccctccagccccgcacacaactgggagatgaattaccaagaggcagcaatctacctccaggaaggcgagaacaacgacaagttcttcacccaccccaaggatgccaaggcgctggcggcctacctctttgcacacaatcacctcttctacctgatggagctggccacggccctgctgctgctgctgctctccctgtgcgaggcccccgccgtccccgcactccggcttggcatctatgtccacgccaccctggagctgtttgccctgatggtggtagtgtttgaactctgcatgaagttacgctggctgggcctccacaccttcatccggcacaagcggaccatggtcaagacctcggtgctggtggtgcagtttgtcgaggccatcgtggtgttggtacggcagatgtcccatgtgcgggtgacccgagcactgcgctgcattttcctggtggactgtcggtattgcggtggcgtccggcgcaacctgcggcagatcttccagtccctgccgcccttcatggacatcctcctgctgctgctgttcttcatgatcatctttgccatcctcggtttctacttgttctcccctaacccttcagacccctacttcagcaccctggagaacagcatcgtcagtctgtttgtccttctgaccacagccaatttcccagatgtgatgatgccctcctactcccggaacccctggtcctgcgtcttcttcatcgtgtacctctccatcgagctgtatttcatcatgaacctgcttctggctgtggtgttcgacaccttcaatgacattgagaaacgcaagttcaagtctttgctactgcacaagcgaaccgctatccagcatgcctaccgcctgctcatcagccagaggaggcctgccggcatctcctacaggcagtttgaaggcctcatgcgcttctacaagccccggatgagtgccagggagcgctatcttaccttcaaggccctgaatcagaacaacacacccctgctcagcctaaaggacttttacgatatctacgaagttgctgctttgaagtggaaggccaagaaaaacagagagcactggtttgatgagcttcccaggacggcgctcctcatcttcaaaggtattaatatccttgtgaagtccaaggccttccagtatttcatgtacttggtggtggcagtcaacggggtctggatcctcgtggagacatttatgctgaaaggtgggaacttcttctccaagcacgtgccctggagttacctcgtctttctaactatctatggggtggagctgttcctgaaggttgccggcctgggccctgtggagtacttgtcttccggatggaacttgtttgacttctccgtgacagtgttcgccttcctgggactgctggcgctggccctcaacatggagcccttctatttcatcgtggtcctgcgccccctccagctgctgaggttgtttaagttgaaggagcgctaccgcaacgtgctggacaccatgttcgagctgctgccccggatggccagcctgggcctcaccctgctcatcttttactactccttcgccatcgtgggcatggagttcttctgcgggatcgtcttccccaactgctgcaacacgagtacagtggcagatgcctaccgctggcgcaaccacaccgtgggcaacaggaccgtggtggaggaaggctactattatctcaataattttgacaacatcctcaacagctttgtgaccctgtttgagctcacagttgtcaacaactggtacatcatcatggaaggcgtcacctctcagacctcccactggagccgcctctacttcatgaccttttacattgtgaccatggtggtgatgacgatcattgtcgcctttatcctcgaggccttcgtcttccgaatgaactacagccgcaagaaccaggactcggaagttgatggtggcatcacccttgagaaggaaatctccaaagaagagctggttgccgtcctggagctctaccgggaggcacggggggcctcctcggatgtcaccaggctgctggagaccctctcccagatggagagataccagcaacattccatggtgtttctgggacggcgatcaaggaccaagagcgacctgagcctgaagatgtaccaggaggagatccaggagtggtatgaggagcatgccagggagcaagagcagcagcgacaactcagcagcagtgcagcccccgccgcccagcagcccccaggcagccgccagcgctcccagaccgttacctagcccagcgcccgaaagccgtctcttctatgcaataacacaatagtattactctactgcgatgtacggaactgcggtgtgtgtacacatactcacgtatatgcacatatttatatacaggaagaaaaaagacagacaagatggggcttggtttataaccaccttgccctgtcttccttaactccagaagccagtttggtgaggggtgggggtgcggccaccaggtctgagctcttcctactgtggaaggctccagaaggcccttcacaaggagacccctcacctggatccagtcgactgcggggcttgcccctcatgtgggctggcctccatcggccacgtccaaagctgtcactgctactgcttcaggctcacatccccccgacctgatggcgtgcccgccccctctccctgcggcccatgccacaggtttctgtgttttgctttagggacagaaccacttaggaaggaaagaactcccggtctccagggtggtatttcagtgtctgtgataatgtcacgcaacacctcttcggggaccagtgcccaggatctaatggaagcggaattggggcaactgggcccatgtggccagagctcagttagccagtgccgggcggccacagattacactgaccaatctcctcccttggctctgcaagcctcccacccagccttctctggcttaacccttgttggcgaaaactcttccacagtggcctccttggggacccagaacccggaggaaggggcatgaggcaggaagtggggccgatgtctgcaacccagaccacttcgtggaatgggctcttgaccaaatccctttttttgcgatttacccgttcaagcaaaacaacgttttggttaactaaggattgtgctaaagccgataccaggtccttcacacgctgtgagctctgtgggccctgggatgtgatctagctcagatgccctctcatccttgatgtcatagttgagtgcacccaagtggcacccactggcggccaggggcacagcctggtggtggtggcaatagaactgtgcccctcctcagctcctcgcttcccctcccacagccccagccttactccaccatgcggacaatcattttgtacggatcacgggagcaatgctgtacggttttgtacactggtggtttgtttcctagaaaacccattgtgtctctggatttctagcacattactaaaagagcctctgctttgtaaa

SEQ ID NO: 15744 - DNA, 2951 bp, Homo sapiens
  misc_feature (11)..(11): n is a, c, g, or t
gagctggcgcngtgccctggtggcagtggctgaagtggcggcggcttcggcggctgcggcggctgcaacagcttcgggctcggggttttggcggcggcgccggcgggctaggctgcgcggtgcggaccccggcgcgcggtccgggttgctggggcggcgcgtaagatgcctctaatggaggagtttctgagcagcacccctggcccagtggctttgaaagggagctcaaaccagagactatttcaagccctggatatcatatcctgagggccacaggagaagagaacatggctgtgagtttggatgacgacgtgccgctcatcctgaccttggatgagggtggcagtgccccactggctccctccaacggcctgggccaagaagagctacctagcaaaaatggcggcagctatgccatccacgactcccaggcccccagtctcagctctgggggtgagagttccccctccagccccgcacacaactgggagatgaattaccaagaggcagcaatctacctccaggaaggcgagaacaacgacaagttcttcacccaccccaaggatgccaaggcgctggcggcctacctctttgcacacaatcacctcttctacctgatggagctggccacggccctgctgctgctgctgctctccctgtgcgaggcccccgccgtccccgcactccggcttggcatctatgtccacgccaccctggagctgtttgccctgatggtggtagtgtttgaactctgcatgaagttacgctggctgggcctccacaccttcatccggcacaagcggaccatggtcaagacctcggtgctggtggtgcagtttgtcgaggccatcgtggtgttggtacggcagatgtcccatgtgcgggtgacccgagcactgcgctgcattttcctggtggactgtcggtattgcggtggcgtccggcgcaacctgcggcagatcttccagtccctgccgcccttcatggacatcctcctgctgctgctgttcttcatgatcatctttgccatcctcggtttctacttgttctcccctaacccttcagacccctacttcagcaccctggagaacagcatcgtcagtctgtttgtccttctgaccacagccaatttcccagatgtgatgatgccctcctactcccggaacccctggtcctgcgtcttcttcatcgtgtacctctccatcgagctgtatttcatcatgaacctgcttctggctgtggtgttcgacaccttcaatgacattgagaaacgcaagttcaagtctttgctactgcacaagcgaaccgctatccagcatgcctaccgcctgctcatcagccagaggaggcctgccggcatctcctacaggcagtttgaaggcctcatgcgcttctacaagccccggatgagtgccagggagcgctatcttaccttcaaggccctgaatcagaacaacacacccctgctcagcctaaaggacttttacgatatctacgaagttgctgctttgaagtggaaggccaagaaaaacagagagcactggtttgatgagcttcccaggacggcgctcctcatcttcaaaggtattaatatccttgtgaagtccaaggccttccagtatttcatgtacttggtggtggcagtcaacggggtctggatcctcgtggagacatttatgctgaaaggtgggaacttcttctccaagcacgtgccctggagttacctcgtctttctaactatctatggggtggagctgttcctgaaggttgccggcctgggccctgtggagtacttgtcttccggatggaacttgtttgacttctccgtgacagtgttcgccttcctgggactgctggcgctggccctcaacatggagcccttctatttcatcgtggtcctgcgccccctccagctgctgaggttgtttaagttgaaggagcgctaccgcaacgtgctggacaccatgttcgagctgctgccccggatggccagcctgggcctcaccctgctcatcttttactactccttcgccatcgtgggcatggagttcttctgcgggatcgtcttccccaactgctgcaacacgagtacagtggcagatgcctaccgctggcgcaaccacaccgtgggcaacaggaccgtggtggaggaaggctactattatctcaataattttgacaacatcctcaacagctttgtgaccctgtttgagctcacagttgtcaacaactggtacatcatcatggaaggcgtcacctctcagacctcccactggagccgcctctacttcatgaccttttacattgtgaccatggtggtgatgacgatcattgtcgcctttatcctcgaggccttcgtcttccgaatgaactacagccgcaagaaccaggactcggaaggtctgtgcagggatgatgccttgggcatttgatatctgccgcctacccagctctgtctgtctgtctgggtggctgtccagccagccatcaggctgtcatttttctgctgtctggctgtccagcttatctatctggcttgtctttctagatcttgtatttgcattgattttcaaatatttaatgtcagaaaacgtaatctaactttaaaataagacagagcatgtcatagttggagaaaaatcaagaagtagagaaaggcttatgtggcagcagcagcccctgccctgcctttccctcccgtcctccagaggcttctccttcttggctatttcttctgttagtcatctccacgtttctcaataataggttcacactacggttcttgatttaaatggtgtaaatattgcttatggcacaggcgaatcgtattcctgctgcaactggatggtgctggctttagtgactgcctcactcttcccagattgcacagctttctgtgtgctgacccccttcctacctccagaataaagaatctcaacctggaaaaaaaa

SEQ ID NO: 15745 - DNA, 1748 bp, Homo sapiens
  misc_feature (11)..(11): n is a, c, g, or t
gagctggcgcngtgccctggtggcagtggctgaagtggcggcggcttcggcggctgcggcggctgcaacagcttcgggctcggggttttggcggcggcgccggcgggctaggctgcgcggtgcggaccccggcgcgcggtccgggttgctggggcggcgcgtaagatgcctctaatggaggagtttctgagcagcacccctggcccagtggctttgaaagggagctcaaaccagagactatttcaagccctggatatcatatcctgagggccacaggagaagagaacatggctgtgagtttggatgacgacgtgccgctcatcctgaccttggatgagggtggcagtgccccactggctccctccaacggcctgggccaagaagagctacctagcaaaaatggcggcagctatgccatccacgactcccaggcccccagtctcagctctgggggtgagagttccccctccagccccgcacacaactgggagatgaattaccaagaggcagcaatctacctccaggaaggcgagaacaacgacaagttcttcacccaccccaaggatgccaaggcgctggcggcctacctctttgcacacaatcacctcttctacctgatggagctggccacggccctgctgctgctgctgctctccctgtgcgaggcccccgccgtccccgcactccggcttggcatctatgtccacgccaccctggagctgtttgccctgatggtggtagtgtttgaactctgcatgaagttacgctggctgggcctccacaccttcatccggcacaagcggaccatggtcaagacctcggtgctggtggtgcagtttgtcgaggccatcgtggtgttggtacggcagatgtcccatgtgcgggtgacccgagcactgcgctgcattttcctggtggactgtcggtattgcggtggcgtccggcgcaacctgcggcagatcttccagtccctgccgcccttcatggacatcctcctgctgctgctgttcttcatgatcatctttgccatcctcggtttctacttgttctcccctaacccttcagacccctacttcagcaccctggagaacagcatcgtcagtctgtttgtccttctgaccacagccaatttcccagatgtgatgatgccctcctactcccggaacccctggtcctgcgtcttcttcatcgtgtacctctccatcgagctgtatttcatcatgaacctgcttctggctgtggtgttcgacaccttcaatgacattgagaaacgcaagttcaagtctttgctactgcacaagcgaaccgctatccagcatgcctaccgcctgctcatcagccagaggaggcctgccggcatctcctacaggcagtttgaaggcctcatgcgcttctacaagccccggatgagtgccagggagcgctatcttaccttcaaggccctgaatcagaacaacacacccctgctcagcctaaaggacttttacgatatctacgaagttgctgctttgaagtggaaggccaagaaaaacagagagcactggtttgatgagcttcccaggacggcgctcctcatcttcaaaggtattaatatccttgtgaagtccaaggccttccagtatttcatgtgtaagtgtgaaatatctccactctaggccactttccccctgagtcctttgctgttctagaagcgggagaggcaagagattggtcctagagtcctgtgtttgactttttattgtggggaa

SEQ ID NO: 15746 - DNA, 340 bp, Homo sapiens
gggtctgcgaagagccggggccatggagcagcctgtgtagacggggacctgccctgcatgggcaccccctcactggctgcttcccttggtctccaggaaggcgtcacctctcagacctcccactggagccgcctctacttcatgaccttttacattgtgaccatggtaggtcccggaccacagaacgctctttgtccttcgtcttccacatcaccagctgcccctgctcttcagcctgcagcgtcagggagtggggctgggtcccatctggccggactctgttgggcgtgggctgcgcagccacggacacctacccaccctcctcccctgcctctgcccc

SEQ ID NO: 15747 - DNA, 391 bp, Homo sapiens
ggaatgttaattccagatttcactttctgatttttttacgtatttaaaattttgtttctttaaaaatagctttattgaggtataattcaagcaccgtacaattcacccattttgaaatgtacaattcagtggtttttagtatatttgcagagttgtgcaacaattgccacagccaattttagaacattttcatctccctaaaacgacactcgcgccctgtaatcctccagtttccggcctgcagcctctcctggggcggcagacacgggtccccgttctgtcgccggctgtgcctctcttgggcatttcgtgtcagtggaagcgtctggcccatggcctctgtgtgcgtggcctgttggttggcaccacattgtggatgctgtggtgtggg

SEQ ID NO: 15748 - DNA, 1166 bp, Homo sapiens
acctgagtgtggataacttttagtatctgtgggggatcctggaaccaattccctgccaatatagaaggacaactgtctacagtacttgaagtattattaactacattcgccatgctgtatgttagatccccagaacatatttatcctgcatatctaaaattttgatcattttacaaactttctattttttttgtcaattttctccagctagacacttgtgcaatacggctattatctgatctttgccttaaatgttgtgcttcttttccatatgcacgtattttgcaaaatataaagtgtgtagagctatatagcactcagccaagtggtgggtacctgcaggtgcttcagagaagtaaattgatgctgctaatatttgttgaatggcacgaatatgatgagcaatagcaggtggtgcccttcagccagaccatcgctccgtgcgtctgatgcatcttgccaaagagtagttctgggaggtggttgcctctagagaacacattcctcctattctggggtcccgtgagagaaagaaatgcttttgcttttgatgtgggactcttactaagcctttcttcagagaaaaggaagtgaaaaatgcaccccatgataatcagtttcttacaacatactgtgatagtaccggcttcgttgtttttagctggaatcattagcttccatttttagaataacagctattggctaaattaggctacagtaggccattaagatggatgttggaattaaaaacatttttggaaaaaagcctgctttgagcctttgttataagcccttgggtagagatctgggtcctgtttctgatttcttgtgagccttcactctgacagttttgtttccagaaacacactcttagcctgctcctgaaatgggaacagacaggccaacttcccctctccagtctcccctgcgggtcaaagctttactttcctgtcatgttaagaaagaatagatttaaccttgataatccatgtagtattctgtatttttaccttttccttatctgaaaaaaagtgtatatatggcatggaattgattgcacaggcacatggcatgttggcttgtgaaccaattgttaaaatttcaagttaatcattaaaataatatctttcaaattaagttatattaaaaacaaaggtaacattcta

SEQ ID NO: 15749 - DNA, 1475 bp, Homo sapiens
  misc_feature (1247)..(1248): n is a, c, g, or t
  misc_feature (1252)..(1252): n is a, c, g, or t
  misc_feature (1255)..(1255): n is a, c, g, or t
  misc_feature (1264)..(1264): n is a, c, g, or t
  misc_feature (1269)..(1269): n is a, c, g, or t
  misc_feature (1275)..(1275): n is a, c, g, or t
  misc_feature (1291)..(1291): n is a, c, g, or t
acctgagtgtggataacttttagtatctgtgggggatcctggaaccaattccctgccaatatagaaggacaactgtctacagtacttgaagtattattaactacattcgccatgctgtatgttagatccccagaacatatttatcctgcatatctaaaattttgatcattttacaaactttctattttttttgtcaattttctccagctagacacttgtgcaatacggctattatctgatctttgccttaaatgttgtgcttcttttccatatgcacgtattttgcaaaatataaagtgtgtagagctatatagcactcagccaagtggtgggtacctgcaggtgcttcagagaagtaaattgatgctgctaatatttgttgaatggcacgaatatgatgagcaatagcaggtggtgcccttcagccagaccatcgctccgtgcgtctgatgcatcttgccaaagagtagttctgggaggtggttgcctctagagaacacattcctcctattctggggtcccgtgagagaaagaaatgcttttgcttttgatgtgggactcttactaagcctttcttcagagaaaaggaagtgaaaaatgcaccccatgataatcagtttcttacaacatactgtgatagtaccggcttcgttgtttttagctggaatcattagcttccatttttagaataacagctattggctaaattaggctacagtaggccattaagatggatgttggaattaaaaacatttttggaaaaaagcctgctttgagcctttgttataagcccttgggtagagatctgggtcctgtttctgatttcttgtgagccttcactctgacagttttgtttccagaaacacactcttagcctgctcctgaaatgggaacagacaggccaacttcccctctccagtctcccctgcgggtcaaagctttactttcctgtcatgttaagaaagaatagatttaaccttgataatccatgtagtattctgtatttttaccttttccttatctgaaaaaaagtgtatatatggcatggaattgattgcacaggcacatggcatgttggcttgtgaaccaattgttaaaatttcaagttaatcattaaaataatatctttcaaattaagttatattaaaaacaaaggtaacattctaaatcattactttctaattatttcgcccttttttttgtcgttgattatttagacttaagaaagtgatgggaaaaacgttatnncagncanagtgtcggngcatncagggnttccacctgacctgangctcatattgacatatacttcaggggttgtcagatgtcatcagcagagacaagcgagggcacctgaatccaaggggggaaaggggggaagagaacagctgggtggggttttgttcgccccgtgtataaaaatcggccggcttgcggcggggcatcccccgggccttgggggggcctccccgacg

SEQ ID NO: 15750 - DNA, 1622 bp, Homo sapiens
acctgagtgtggataacttttagtatctgtgggggatcctggaaccaattccctgccaatatagaaggacaactgtctacagtacttgaagtattattaactacattcgccatgctgtatgttagatccccagaacatatttatcctgcatatctaaaattttgatcattttacaaactttctattttttttgtcaattttctccagctagacacttgtgcaatacggctattatctgatctttgccttaaatgttgtgcttcttttccatatgcacgtattttgcaaaatataaagtgtgtagagctatatagcactcagccaagtggtgggtacctgcaggtgcttcagagaagtaaattgatgctgctaatatttgttgaatggcacgaatatgatgagcaatagcaggtggtgcccttcagccagaccatcgctccgtgcgtctgatgcatcttgccaaagagtagttctgggaggtggttgcctctagagaacacattcctcctattctggggtcccgtgagagaaagaaatgcttttgcttttgatgtgggactcttactaagcctttcttcagagaaaaggaagtgaaaaatgcaccccatgataatcagtttcttacaacatactgtgatagtaccggcttcgttgtttttagctggaatcattagcttccatttttagaataacagctattggctaaattaggctacagtaggccattaagatggatgttggaattaaaaacatttttggaaaaaagcctgctttgagcctttgttataagcccttgggtagagatctgggtcctgtttctgatttcttgtgagccttcactctgacagttttgtttccagaaacacactcttagcctgctcctgaaatgggaacagacaggccaacttcccctctccagtctcccctgcgggtcaaagctttactttcctgtcatgttaagaaagaatagatttaaccttgataatccatgtagtattctgtatttttaccttttccttatctgaaaaaaagtgtatatatggcatggaattgattgcacaggcacatggcatgttggcttgtgaaccaattgttaaaatttcaagttaatcattaaaataatatctttcaaattaagttatattaaaaacaaaggtaacattctaaatcattactttctaattatttcgcccttttttttgtcgttgattatttagacttaagaaagtgatgggaaaaacgttaataacacagtacataagttgtttctgtagccattacactgtgattttcacaaacacttgaacacttgaatagtcttccattatttgaaaactattattcaacttatccaagtgaagtattggcatacaaagaagttgtttcatatttgcattgctcatgaatgtaaacaaaatgtcgatatgtgtgaactatacttgttgatcaattgcaaccataggttggctgcagatgcgagagcttggtaaacatcaacaaaagcattctctgagaatgaattgactatatggaatttgtaggaaagtgtattgtgtattttattattatttgtaaattgtgtattccacatcttttagattagtaaaatttatagtaaacat

SEQ ID NO: 15751 - DNA, 455 bp, Homo sapiens
tctggctctgggcagtaaagggacatggctgctgcttatttcaggaacttaggggcaagtgtcttcatgcctgtggaaacaggagccagctagtactatttccagcaagaaatttaagagaaaggagagatttttattatgattttgatttctttactacaacattgcatgtgtctggagtatagccattacactttatgaaaaaggcaaaatggtcatttggggtgttttaggaagtttgccaaaaggctcctttgtcattataatccttcctaagctgccatccacgggtttaggtcatggatatgaaaagtgaaagggtttagagatgaagtagtgtcccctgagtgcttaccaacctgttaatctttttgagatgttaattttttcatatagagccccctaaaatcttgatggctctagatcagtcaagcctaagagaagacgtatttatg

SEQ ID NO: 15752 - DNA, 504 bp, Homo sapiens
ctggctgatcattatatatagctttgagctttcaaaaaatactgatgccaagactctaccctgaaccaattaaattacagcctaaagtgcagctgagtttgagaatcatggcttaccttttcttgaactccttaagttagggaatacatactcccttcccagttttgtcaaattgattcaaatttgccaccttataaacatccagctattgcaaagagcctggtatatcgtagagtttcagtatatctatttcatagtttcccccctgtggtcttgcagaatggaattaacctgaattcaacaaaagaggtctttaaaattcataacagcaggtgtcgtctgtctttgaaattcccttgccaaaaaaggaaatgatttcttagtgatatgctttacttctgttgatcactatttgctcttttaaagtgtccaaagatgttttaatagatacttggtatttgttgttttctttaataaagtataatttacatgtagcacaggaat

SEQ ID NO: 15753 - DNA, 785 bp, Homo sapiens
gagcatgtctgacctgctcagacatgcagggtagttggcatctcaaaagagtagaagaaaggaatatttaaacaaatggctgagaacttttccaaaactcatgaaagatatcacaccaaaaattcaagaatccctcccacaaactccaagtgggataaataaaaacaacccacacctagaaacatcatagtaaaactgttgaagaccaaagaaaaataatattttagacctgctggggtgggagagggaatataaccattaaaggagcaataatattagactgacagctccttctcagcagaaacaatggaagacagtgaaatactgccttttatggttctgaaagaaaatgactgccaacctaaaaatttctaatcagggaaaatatcctgcaaaaatgaagaggatatgaagacatttttagagaaacagctagaagaattaatcagcacgcctaccctaaaggaaaatttaaaaggtgttttacaggcagaaggaaaataatcccaaacgtaaggacagagccctaggaaagattgaagagcaatgaaaatgacacataaatattgactacataaaacaataattatgtcttatggagttttaaatatatagagaaataaaatgtatgaaaatgaaaggatttatgtgggaattttaagtgttctaagacacttggcatcatccaagaagagagtaaaaattcatttaatattagtctttgataactcatgtatgcatgataatatttgagatatcaataaaagtgtatagctttccacata

SEQ ID NO: 15754 - DNA, 123 bp, Homo sapiens
ctgggaccaggaatttgggccgtttctaccatattctcagcagcctaaggtggtggcctgctgatgtggagactactcaccttgagccatgtggtccccaggacagaaatggcctttgttttg

SEQ ID NO: 15755 - DNA, 268 bp, Homo sapiens
catgatgcattgtgtaccaagtcttcatcatggttctgcctatggttcttggtcatcaatgtaatgaaagttctgatatcttataagatgggtggggactctcttatccctgaaaatatcattgtgaatacagtaagagatccaaaatcggccgggtatggtggctcacgcctgtagtcccagcactttgggaggccaaggtgggtggatcacgaggtcaggagatcgagaccatcctgggtaacacggtgaaaccccgtctctacta

SEQ ID NO: 15756 - DNA, 624 bp, Homo sapiens
tatttttctgcaatgtttattcttacatgtttacctctgtgcagtttcctattgactttactaggcaaaacttcaaaaaatcaaatctccaagttctctaaaaatgcattggtctctacttacaacactctcaacaacaatccctgtgatcattcttcttagttctgactgagtcagtaggaaagaaaagcctcttgtttggataatttttcttctatttattgttcatttgtattaacactttagtaagttgactatttaagtccttgcgctagccattgcttttcttctcattaattttaaaatcctcattacatattgaggatattaaccactggtctatcttatatgttataaatattttttcccagtctgtcatctgcctatcggtcttaccttattcttggtcatacgaaagctcctggtctttcatattcaaatcttttctcttttccttcatgatttctgcctatgatatgtgctatgcctcacaaatcctttttcacccccaaattatatagaactcacccatattttcttctagttttatttttgttattatttattttagttattttggagacaggatctcgctttgtgtccaggctggagtgtggtggcggg

SEQ ID NO: 15757 - DNA, 798 bp, Homo sapiens
agcgtggcttcgaagatgtttcagaagcgttgggcggcgggcgtccctgagagaaattagttcaagcgattctcgtgcctcagcctcccgagtagctgggattacaggaatctggaaactgttcttcaggaagaaacccattagtttggaactggagaattcctttgcatcagatactaaaatgaaagaaccacttttaggtggtgagtgtgacaaggcagtggcatcacagctggggctgctagatgaaattaagacagaacccgacaatgctcaagagtattgtcataggcaacagtccagaactcaggagaatgaactgaaaataaatgctgtgttttcagagagtgcttcacagttgactgcaggcattcagctttctctggcatcatctggcatgaataaaatgcttccttcagtttcaaccacagctattcaggtttcctgtgctggttgtaaaaaaattctccagaaggggcaaactgcttatcagaggaaaggatctgctcaacttttctgctccataccatgcatcactgaatacatttcatctgccagttcaccagttccttctaagagaacttgttcaaactgctcaaaagacattttaaatccaaaggatgtgattagtgtccagctggaagacactacctcttgcaaaactttttgcagcctatcttgtctttcatcatatgaagaaaaaagaaaaccatttgttaccatatgtactaatagcattttgaccaagtgcagcatgtgccagaagactgctattattcagtatgaagtaaaatacca

SEQ ID NO: 15758 - DNA, 889 bp, Homo sapiens
agcgtggcttcgaagatgtttcagaagcgttgggcggcgggcgtccctgagagaaattagagtattgtcataggcaacagtccagaactcaggagaatgaactgaaaataaatgctgtgttttcagagagtgcttcacagttgactgcaggcattcagctttctctggcatcatctggcatgaataaaatgcttccttcagtttcaaccacagctattcaggtttcctgtgctggttgtaaaaaaattctccagaaggggcaaactgcttatcagaggaaaggatctgctcaacttttctgctccataccatgcatcactgaatacatttcatctgccagttcaccagttccttctaagagaacttgttcaaactgctcaaaaaacctgccaaaccacttatatctgttccttgcaaaccattgaagccctcagatgaaatgattgagactacgagtgatttggggaagacagagcttttctgctctattaattgtttctctgcatacagtaaagctaagatggaatcttcttcaggtaatgtttgttctgtggtgcatgatacttccaacagaagcttcttttctccaaaggaaaagatacgactccggttatagcatatgtgtcgtggagacaccgatgtttgcgtgcctcatgaacctgatgtcttcacgatccgctcttcggtaacgcgacggcgtgttctgtgggccttctaaggttccctgggaccggtatgctgggctgtttcgtctcgcgcaccagcgtccccttctcggttccgccccgctgcccgccaagtcagcggtggcttggatgggttgcccgttccccgaggggcctatgctgggtgtggcgcacacagggttcgccatatggggcccacagtg

SEQ ID NO: 15759 - DNA, 815 bp, Homo sapiens
agacacagtctcactctgtcacccaggctggagtgcagtggctcaatgtccattcactgcgacctccacctcccaggttcaagcgattctcgtgcctcagcctcccgagtagctgggattacaggaatctggaaactgttcttcaggaagaaacccattagtttggaactggagaattcctttgcatcagatactaaaatgaaagaaccacttttaggtggtgagtgtgacaaggcagtggcatcacagctggggctgctagatgaaattaagacagaacccgacaatgctcaagagtattgtcataggcaacagtccagaactcaggagaatgaactgaaaataaatgctgtgttttcagagagtgcttcacagttgactgcaggcattcagctttctctggcatcatctggcatgaataaaatgcttccttcagtttcaaccacagctattcaggtttcctgtgctggttgtaaaaaaattctccagaaggggcaaactgcttatcagaggaaaggatctgctcaacttttctgctccataccatgcatcactgaatacatttcatctgccagttcaccagttccttctaagagaacttgttcaaactgctcaaaagacattttaaatccaaaggatgtgattagtgtccagctggaagacactacctcttgcaaaactttttgcagcctatcttgtctttcatcatatgaagaaaaaagaaaaccatttgttaccatatgtactaatagcattttgaccaagtgcagcatgtgccagaagactgctattattcagtatgaagtaaaatacca

SEQ ID NO: 15760 - DNA, 841 bp, Homo sapiens
atcagatcataaatatggtcataatgacatcataatgggagagacaagagatagagaacttctacaggtattcagagcattttttttcttttggacataaaatgaatccattgtacaagaatgccttctccccattctcagtgcagagacaaagctgacaagcttaaaagtgcatgtttaggattctagacttggtttaactcaaatggccttgattggatggggtccctctgcagtattaaaactgctctaattgcattcttcaagccagctgaaggctgacagcttccgctcccggctcattatcagagcacttcaaggggctccattatgagcagagcacctggtccaaatttatttcaacggcccagagcaaaatgggaaggtgcttaatgttcaaccacaatggtgacatttttatgagatatccaaggttcagaaacaaataaatgaaaggtttgaagggagcatgaacagaaactgtgacaataaaaattcaacattgatatatcaatttaaaaacatataccacccatacacttggggtaaggccaaaggttcaatgcaggctaaccagaaagaaaaagaagaaaaaaggtcaatactcaactcctcccatgactggctttgctaaaaaagactgatgaaattctaaaaatgtttaaggaaatcagaatgagatgcgaattctgaattccggttaggataacaattatgttatctatctgcaccaacatgagaacgaaagaaaatccaagtggaattcagagtgaatgctaaatgtattatgttcatagtttttctccggtttgcttacacaattgctgtctttctctctctc

SEQ ID NO: 15761 - DNA, 493 bp, Homo sapiens
gaagccctgtgggagtctgggttaggagcactccaggaagtggtccagaggttggagtttttactcccttcatgtgttcatatctgtctgcctgaagtcttaagctgcatagagaaattatgtgttagccaattggagtgttagtaccttgctaactctcctccccatgacgcagccaattccagttgctgggtactcctccccgggactcagtccctgtacagcttctgctctccaacttttctcgctcctagcagcctctggaaccagaatggacggtcctctagtaacgctggattctatgggttggaagtactgcagcggctggatcaggttccagtaaagttttgtaccttcaaatgtctctgttgttaaacagtgttgtagttatctttcccatgggcctagaaattaaggagacaaatgtctactgaacatgctgagtgcttgagaaagacactccagataaatacataaagacttgcttgtttga

SEQ ID NO: 15762 - DNA, 399 bp, Homo sapiens
cacctgtgggggaaaaacaaaaggtctaattttcatgtcattttggagtcccagaaagattggtaaagaaaaactgtttgaagaaataaagactcaaaaaaaatcacaaatttagtgaaaagagatcaatgtatagattcaagaagttcagcaaaccccaaagaagataaactcaaaaccacaatcaggaacgtgataatcaaagataaagaaaaaagtcttgcagtcagccagaggagaacagtacctcaccttcaggggaagcagttcgagccactgcacactcctcatcagaaaccgtgcaggccaggaggcagaaatgaccctgtgaaagcgccgaaggcaattcagttcagaatttaatatctagtgaaaatgctcttcaggaaaggcagtgaa

SEQ ID NO: 15763 - DNA, 989 bp, Homo sapiens
taagccttttaaaaaattttctttgaaagataaaatacatgagtttctaacaattagaaaggaaaaaattaaaatatgaaataacaaaagtaaacaaaagatactttcaaagcagtgaacaaaacattttgacataagccataatataaattataatataaaaacataaaaaccatagtataaattgtcagtctttgagttggccacaaattcaatttaatgaaagaagagaagggatgctggaggtaaataaattcttagagtttctatctcatagagtttgctcttctggttctctagactgccaaagaacataaagatgtacaaggggacctagctgtagtaaaagcatacctataacaacaaaaactctaaaacggtgcccctcacgattttctactgaaatttctctaatagtagaggtataaaataagaagttagagaataatacaaaaggggcccaccatagaaagcacatttcttttctcttaagactcatgtgatttttgcatcttactccataatgtattagtggttgcattaatatgacaatgtctgcaattaaacaccagtaagcaaaattgatacatcagaatgacttgcagggcttatcatgcagtttcatttacatccctaccccactgccatttacttgagcgtgaatgacacacgagagattctttgccttccataatgcaactttacacataaataacacaaggctaaagaaaaccagaactcaaattcaccatgcataggagtgataacaaaaatatttaacagtcagtatgggtgattactggccaatcagaatacgtcactgatatatcaaaatggatgcaggccactgtgactaacttgtgggtatcatttctatgatcaccctaaaacagagttgggaaaatatcaattaactggactctctggtttgaattctcaatatgtatcttaatatgaaatagctcattaaaacttcatgtgtaactatt

SEQ ID NO: 15764 - DNA, 1067 bp, Homo sapiens
  misc_feature (1056)..(1056): n is a, c, g, or t
  misc_feature (1062)..(1062): n is a, c, g, or t
taagccttttaaaaaattttctttgaaagataaaatacatgagtttctaacaattagaaaggaaaaaattaaaatatgaaataacaaaagtaaacaaaagatactttcaaagcagtgaacaaaacattttgacataagccataatataaattataatataaaaacataaaaaccatagtataaattgtcagtctttgagttggccacaaattcaatttaatgaaagaagagaagggatgctggaggtaaataaattcttagagtttctatctcatagagtttgctcttctggttctctagactgccaaagaacataaagatgtacaaggggacctagctgtagtaaaagcatacctataacaacaaaaactctaaaacggtgcccctcacgattttctactgaaatttctctaatagtagaggtataaaataagaagttagagaataatacaaaaggggcccaccatagaaagcacatttcttttctcttaagactcatgtgatttttgcatcttactccataatgtattagtggttgcattaatatgacaatgtctgcaattaaacaccagtaagcaaaattgatacatcagaatgacttgcagggcttatcatgcagtttcatttacatccctaccccactgccatttacttgagcgtgaatgacacacgagagattctttgccttccataatgcaactttacacataaataacacaaggctaaagaaaaccagaactcaaattcaccatgcataggagtgataacaaaaatatttaacagtcagtatgggtgattactggccaatcagaatacgtcactgatatatcaaaatggatgcaggccactgtgactaacttgtgggtatcatttctatgatcaccctaaaacagagttgggaaaatatcaattaactggactctctggtttgaattctcaatatgtatcttaatatgaaatagctcattaaaacttcatgtgtaactatttcagcattgttgtcagctactctttattccacttctatacagatcatgtcatcttcaaatagagacnctttcncttca

SEQ ID NO: 15765 - DNA, 834 bp, Homo sapiens
cagtgagcaacagtcttactgcaaagcaggagcacaacccgtctctttgtctccgtggtcaaatcaattacttcttagaaagtctaatttttttcaaaatgaccatgtacaagagcaaacgcagacatcagagatatatcaacatggcaggagagcccaaaccatacagaccaaaacctggaaacaagaggcccctttctgcactttacagacttgaatcaaaggaacctttcctgtctgttggcggttatgtctttgactatgattactacagagatgatttctacaatcggttatttgattaccacgggcgtgtgcctccacctccccgtgcagtaattccgctgaagcgtcccagagtggcagtcacaacgactcgcagggggaaaggagtcttttccatgaaaggtggatcgagatctactgccagtgggtcaacaggttctaaatgtaagtaatgtccttcattttatttctctttaaagaagggagtgattaactatcattgcacgaatgcctatattcaataaattaaccagatagttatgaaggacctgctatgtataaagtgttagaaaatcataagatggataaaaaatggtctctgctttccaccatactgtgttgcagtaggggagacaaacacaaaaatgtctaacaaaaatccaggaccaatttgaaaagtattttatcagagcaaataacactgtgctcttggcttagcttgtgatatattaaagtactgaaatataatatgttgcttttaatgaagaaataattttacttccaaagggagtgcataaactgtcttttcagagaaacatacaaaattag

SEQ ID NO: 15766 - DNA, 1688 bp, Homo sapiens
cagtgagcaacagtcttactgcaaagcaggagcacaacccgtctctttgtctccgtggtcaaatcaattacttcttagaaagtctaatttttttcaaaatgaccatgtacaagagcaaacgcagacatcagagatatatcaacatggcaggagagcccaaaccatacagaccaaaacctggaaacaagaggcccctttctgcactttacagacttgaatcaaaggaacctttcctgtctgttggcggttatgtctttgactatgattactacagagatgatttctacaatcggttatttgattaccacgggcgtgtgcctccacctccccgtgcagtaattccgctgaagcgtcccagagtggcagtcacaacgactcgcagggggaaaggagtcttttccatgaaaggtggatcgagatctactgccagtgggtcaacaggttctaaattgaaatcagatgagttacagaccatcaagaaagaattaacccagatcaaaactaaaattgactccttgctagggcgcctggagaagattgagaaacagcagaaggcggaggcagaagctcagaagaagcaattggaagagagtctagtgctgatccaagaggaatgtgtgtcagagattgcagatcactctacagaggagcctgctgaaggagggccagatgccgatggagaagagatgacagatgggatagaggaggacttcgatgaagatgggggtcatgagctgtttctacagataaagtgatctgaaataacgcatgatgccacaaagcagaaaagagaaactgtgacaacccccagaaatgtgaaaggaggtttcttactggacagcagcatctttggttcaatttatataaaaacccaaataaataaaatggacagtattgctcagttttagaaattccatttcttctatgttttaagctgtacaattgtcaggtttttatggtttaaattgtaaatgtgttttcccctttgctaattatgttttttttttcagtcttaaaatgtgaaaggcatttatgaatggtaagggaaacactatatacaaatgtatatttgtaaaagctatttttatgattagcatgtttcactgttgatcatatataaagtcaggtgatattgcaattctgtatttaaagcttatttccaacaatgtcatgtaagaaaagatgcatcttatgctagtttttataatttatttataatttatagtttaaagtacttcagatcataatgataaaatacttgaaaaagttatatttctgccctgtataagcaccctttttattaataaagaatgcagatatttcagatgtgatataatagttaaagaactgttggtttgatctgtgattaagttgagcatgctccgctctactgaactaaatgatccaattattacttcagtctgggtatgagattccatggacaagtaaggactagattgccaaggaaaagactgtcttgcccttggatccaaaagtttaaattagtgcatacatcatgtcatttcacctcctgttcctaggaactctccattcccaagcattgccagtgttttccagataatcttagctgttgtcttgtgctgtggaaatggaagaaaccatcttcacagactgtaggagaattcaacatataatttcttaataaatactgtttcttttaaaacaaa

SEQ ID NO: 15767 - DNA, 2121 bp, Homo sapiens
cgccgcgagctgccgctgccgctgctgccgccactggtgttgccgctctcaggcgccaggctccccgtcgccgccgccgccgcctcgccagccagagttgggctccgtgggcttcccccctcgcagcctcggtccttccccgctgcctgcaagtcagcctggctccgagtcacgtgtcagtgcctgaggcagagactgcgagaaaaaaacgcgcttcattccttcttccaccgccatactgtattttatactaaatctcatttttattccaacattttactcccgctcggattaaagcaaggagagccaatcatgactggcaaaacacagaccagcaacgtcaccaataagaatgaccccaagtccatcaactcccgtgttttcatcggcaatctaaatacggcaattgtcaagaaagttgacattgaagccattttttcaaagtatggaaaaatagttggatgttccgttcacaaaggttatgcatttgtacagtacatgagtgagcgacatgcaagagctgcagtggctggagaaaatgccagagtcatcgccggccaaccacttgatatcaacatggcaggagagcccaaaccatacagaccaaaacctggaaacaagaggcccctttctgcactttacagacttgaatcaaaggaacctttcctgtctgttggcggttatgtctttgactatgattactacagagatgatttctacaatcggttatttgattaccacgggcgtgtgcctccacctccccgtgcagtaattccgctgaagcgtcccagagtggcagtcacaacgactcgcagggggaaaggagtcttttccatgaaaggtggatcgagatctactgccagtgggtcaacaggttctaaattgaaatcagatgagttacagaccatcaagaaagaattaacccagatcaaaactaaaattgactccttgctagggcgcctggagaagattgagaaacagcagaaggcggaggcagaagctcagaagaagcaattggaagagagtctagtgctgatccaagaggaatgtgtgtcagagattgcagatcactctacagaggagcctgctgaaggagggccagatgccgatggagaagagatgacagatgggatagaggaggacttcgatgaagatgggggtcatgagctgtttctacagataaagtgatctgaaataacgcatgatgccacaaagcagaaaagagaaactgtgacaacccccagaaatgtgaaaggaggtttcttactggacagcagcatctttggttcaatttatataaaaacccaaataaataaaatggacagtattgctcagttttagaaattccatttcttctatgttttaagctgtacaattgtcaggtttttatggtttaaattgtaaatgtgttttcccctttgctaattatgttttttttttcagtcttaaaatgtgaaaggcatttatgaatggtaagggaaacactatatacaaatgtatatttgtaaaagctatttttatgattagcatgtttcactgttgatcatatataaagtcaggtgatattgcaattctgtatttaaagcttatttccaacaatgtcatgtaagaaaagatgcatcttatgctagtttttataatttatttataatttatagtttaaagtacttcagatcataatgataaaatacttgaaaaagttatatttctgccctgtataagcaccctttttattaataaagaatgcagatatttcagatgtgatataatagttaaagaactgttggtttgatctgtgattaagttgagcatgctccgctctactgaactaaatgatccaattattacttcagtctgggtatgagattccatggacaagtaaggactagattgccaaggaaaagactgtcttgcccttggatccaaaagtttaaattagtgcatacatcatgtcatttcacctcctgttcctaggaactctccattcccaagcattgccagtgttttccagataatcttagctgttgtcttgtgctgtggaaatggaagaaaccatcttcacagactgtaggagaattcaacatataatttcttaataaatactgtttcttttaaaacaaa

SEQ ID NO: 15768 - DNA, 1975 bp, Homo sapiens
agcggcagagaccgcatattccggaggggctggctccaggccacgcgagccggagctggagacatttccagagccttgaggatggcaccggccctcgcacgctcaactcctgctcctcctcttcgcaatgagtaaacgacgcagattaaagcaaggagagccaatcatgactggcaaaacacagaccagcaacgtcaccaataagaatgaccccaagtccatcaactcccgtgttttcatcggcaatctaaatacggcaattgtcaagaaagttgacattgaagccattttttcaaagtatggaaaaatagttggatgttccgttcacaaaggttatgcatttgtacagtacatgagtgagcgacatgcaagagctgcagtggctggagaaaatgccagagtcatcgccggccaaccacttgatatcaacatggcaggagagcccaaaccatacagaccaaaacctggaaacaagaggcccctttctgcactttacagacttgaatcaaaggaacctttcctgtctgttggcggttatgtctttgactatgattactacagagatgatttctacaatcggttatttgattaccacgggcgtgtgcctccacctccccgtgcagtaattccgctgaagcgtcccagagtggcagtcacaacgactcgcagggggaaaggagtcttttccatgaaaggtggatcgagatctactgccagtgggtcaacaggttctaaattgaaatcagatgagttacagaccatcaagaaagaattaacccagatcaaaactaaaattgactccttgctagggcgcctggagaagattgagaaacagcagaaggcggaggcagaagctcagaagaagcaattggaagagagtctagtgctgatccaagaggaatgtgtgtcagagattgcagatcactctacagaggagcctgctgaaggagggccagatgccgatggagaagagatgacagatgggatagaggaggacttcgatgaagatgggggtcatgagctgtttctacagataaagtgatctgaaataacgcatgatgccacaaagcagaaaagagaaactgtgacaacccccagaaatgtgaaaggaggtttcttactggacagcagcatctttggttcaatttatataaaaacccaaataaataaaatggacagtattgctcagttttagaaattccatttcttctatgttttaagctgtacaattgtcaggtttttatggtttaaattgtaaatgtgttttcccctttgctaattatgttttttttttcagtcttaaaatgtgaaaggcatttatgaatggtaagggaaacactatatacaaatgtatatttgtaaaagctatttttatgattagcatgtttcactgttgatcatatataaagtcaggtgatattgcaattctgtatttaaagcttatttccaacaatgtcatgtaagaaaagatgcatcttatgctagtttttataatttatttataatttatagtttaaagtacttcagatcataatgataaaatacttgaaaaagttatatttctgccctgtataagcaccctttttattaataaagaatgcagatatttcagatgtgatataatagttaaagaactgttggtttgatctgtgattaagttgagcatgctccgctctactgaactaaatgatccaattattacttcagtctgggtatgagattccatggacaagtaaggactagattgccaaggaaaagactgtcttgcccttggatccaaaagtttaaattagtgcatacatcatgtcatttcacctcctgttcctaggaactctccattcccaagcattgccagtgttttccagataatcttagctgttgtcttgtgctgtggaaatggaagaaaccatcttcacagactgtaggagaattcaacatataatttcttaataaatactgtttcttttaaaacaaa

SEQ ID NO: 15769 - DNA, 1877 bp, Homo sapiens
cagtgagcaacagtcttactgcaaagcaggagcacaacccgtctctttgtctccgtggtcaaatcaattacttcttagaaagtctaatttttttcaaaatgaccatgtacaagagcaaacgcagacatcagagatatatcaacatggcaggagagcccaaaccatacagaccaaaacctggaaacaagaggcccctttctgcactttacagacttgaatcaaaggaacctttcctgtctgttggcggttatgtctttgactatgattactacagagatgatttctacaatcggttatttgattaccacgggcgtgtgcctccacctccccgtgcagtaattccgctgaagcgtcccagagtggcagtcacaacgactcgcagggggaaaggagtcttttccatgaaaggtggatcgagatctactgccagtgggtcaacaggttctaaattgaaatcagatgagttacagaccatcaagaaagaattaacccagatcaaaactaaaattgactccttgctagggcgcctggagaagattgagaaacagcagaaggcggaggcagaagctcagaagaagcaattggaagagagtctagtgctgatccaagaggaatgtgtgtcagagattgcagatcactctacagaggagcctgctgaaggagggccagatgccgatggagaagagatgacagatgggatagaggaggacttcgatgaagatgggggtcatgagctgtttctacagataaagtgatctgaaataacgcatgatgccacaaagcagaaaagagaaactgtgacaacccccagaaatgtgaaaggaggtttcttactggacagcagcatctttggttcaatttatataaaaacccaaataaataaaatggacagtattgctcagttttagaaattccatttcttctatgttttaagctgtacaattgtcaggtttttatggtttaaattgtaaatgtgttttcccctttgctaattatgttttttttttcagtcttaaaatgtgaaaggcatttatgaatggtaagggaaacactatatacaaatgtatatttgtaaaagctatttttatgattagcatgtttcactgttgatcatatataaagtcaggtgatattgcaattctgtatttaaagcttatttccaacaatgtcatgtaagaaaagatgcatcttatgctagtttttataatttatttataatttatagtttaaagtacttcagatcataatgataaaatacttgaaaaagttatatttctgccctgtataagcaccctttttattaataaagaatgcagatatttcagatgtgatataatagttaaagaactgttggtttgatctgtgattaagttgagcatgctccgctctactgaactaaatgatccaattattacttcagtctgggtatgagattccatggacaagtaaggactagattgccaaggaaaagactgtcttgcccttggatccaaaagtttaaattagtgcatacatcatgtcatttcacctcctgttcctaggaactctccattcccaagcattgccagtgttttccagataatcttagctgttgtcttgtgctgtggaaatggaagaaaccatcttcacagactgtaggagaattcaacatataatttcttaataaatactgtttcttttaaaacaaaataaaaattaaacccccaaatccgttaattctttaaaaaccggtttcccatttttccaattttcaaaaggttattatcaatggtttgcagaaaactctaattaagttgatttaattttagacggagcagagcatttcaccggccccattatcgtgagctactttatttttccccgggcagggggccttg

SEQ ID NO: 15770 - DNA, 648 bp, Homo sapiens
tgcggccgctccaacatcagaattgttatatcacctgactttatatatgatcaacagtgaaacatgttgatcatatataaagtcaggtgatattgcaattctgtatttaaagcttatttccaacaatgtcatgtaagaaaagatgcatcttatgctagtttttataatttatttataatttatagtttaaagtacttcagatcataatgataaaatacttgaaaaagttatatttctgccctgtataagcaccctttttattaataaagaatgcagatatttcagatgtgatataatagttaaagaactgttggtttgatctgtgattaagttgagcatgctccgctctactgaactaaatgatccaattattacttcagtctgggtatgagattccatggacaagtaaggactagattgccaaggaaaagactgtcttgcccttggatccaaaagtttaaattagtgcatacatcatgtcatttcacctcctgttcctaggaactctccattcccaagcattgccagtgttttccagataatcttagctgttgtcttgtgctgtggaaatggaagaaaccatcttcacagactgtaggagaattcaacatataatttcttaataaatactgtttcttttaaaacaaa

SEQ ID NO: 15771 - DNA, 282 bp, Homo sapiens
aacaatgaaggcagagaagccagtggctgctttgacatgaggcttcccgtgtgggaggtgaaccagaagccaagcctggacggagactgtgccatcaagaggctctgtcacgagatgccaagatgagcacgcgtctccaaaacaacacaatctcaacatgcaaaatgatcaccaagcaagaggaaacagagtgagccctagaggtgaggaagttgcctgaattccatctgtgtgcccacatacacaaagctctgttacacaaaggagctactccagcgacta

SEQ ID NO: 15772 - DNA, 347 bp, Homo sapiens
caaactaaaattttgtaatagtttgtaaatggacactatatatagtgaatccataaggcgctcttaaaaattcagtatggaaaaggatctggcttcccaatagaaaaatggcaaaggatatgaacaactcacttaggaaaaataatttaccaaaaagcttctgggaaaaaaagcaggatgccaatctaaagggtattcaaataagcagacattaaatatacaatgaaaaattttaaatggcaaaaatttgaaagaaatctatgctagtaaacagtaaaatcctttctggagttaaaagcatgtgttcgtactctttaacccaataatttcacttaggcacttttcct

SEQ ID NO: 15773 - DNA, 383 bp, Homo sapiens
ggctctgggagtatcagatgcacaaagtacaggtgaacaggtaaccagattggtatctctgcaggtgccctgaggctgggaaacagcactggtggggtggagaggcagcctgcaactcggtgtccctcttgcctgaagcagccaacaggttaacccaggtctgttcctgcaggactgacatgcgctggttccagccgatgaaagcagatgcaaatcagtgcaatttcctctgcagcaataattaacccacgggaaccttgctggagcaggtagtttcaggagaatggcgctgaagatgttggagagagattagcatttttcagctctcatcgcagtgatttgcgctgcattttagtgtgtattcagttccaactcattaccat

SEQ ID NO: 15774 - DNA, 1329 bp, Homo sapiens
tgcgtcccggaaggagcgagcttgcggagcgtgaaccagtgagtgaaagcggcgccgcccgccggccgcaggtgcggcaaagccagtgtcatctgccggttctcttagggctcccggaaagaaggagggctagccgcgtgcgttcgcgccgcgcctccttgcgtttctgttccccaaatagggcctctccttctcccgccgcccaggcccctgcgtgggctggacgcgtcagccccacacattagcctcgctgcggcgcccagactctgctttgcctccccgtcccggtccctggcccctgccctgtcgcccgccgccggagcggtgaccgcccggcccgccgttcttctgctgccaccgctgtcggcaccatgggcagtgagcagagctccgaggccgagagccgacccaacgatctgaactcctcagtgactccttcaccagccaagcatagagccaagatggatgatattgtggttgtagctcagggctcccaggcctcacggaacgtcagcaacgatcccgatgtcatcaagttgcaagagattccaaccttccagccccttttgaaagggctattgagtggccagacttccccaacaaatgccaaattggagaaactggactctcagcaggtgttgcagctctgcctccgatatcaagatcacctgcatcagtgtgcagaggccgttgcttttgaccagaatgctttggttaaacgaatcaaagagatggatctgtctgtagaaactctgttcagcttcatgcaggagcgccagaaaagatacgccaagtatgccgagcagatccagaaagtgaacgagatgtccgccatcctccgccgcatacagatgggcatcgaccagactgtgcccctgctggacaggctcaacagcatgctgcccgagggcgagcggctggagcccttcagcatgaagcccgaccgcgagctcaggctgtagctgccgcccggcctgcctggggctgggagccccagacaccgacaccctgaggacgtgtggagctaaggtcatatcatctgaccaggtctggaggctggcgggaggctccctgaaagtgggtgcgaaggagtccggctggcatgaaaatctgactttgcccagctcttttccttgatgcagtttcccggtgtggaaggaacctaaccagttctcggtgataactgaagctggaacgtgtgaattattaggaattctttgaagaactctgcattgagaattatttttatttagttttttttttttttaattgagagtatatagtccagtccaggtaccggaataaaaatatggagacaaggggaaaata

SEQ ID NO: 15775 - DNA, 832 bp, Homo sapiens
cccagaacatagagccagggacagtcccctctcagttctcttctaaaggtggttctggcacaacagttgataaagctgtgtccctgaagggctttttagccctgggtgcttcctgtaaaacttgtcagcttccactggatctgcgggactgtgtccctcacaggctggacacccggccctgcggagaggacttgattaaacaaggtataatgtacttctctttcccatccacagatggatctgtctgtagaaactctgttcagcttcatgcaggagcgccagaaaagatacgccaagtatgccgagcagatccagaaagtgaacgagatgtccgccatcctccgccgcatacagatgggcatcgaccagactgtgcccctgctggacaggctcaacagcatgctgcccgagggcgagcggctggagcccttcagcatgaagcccgaccgcgagctcaggctgtagctgccgcccggcctgcctggggctgggagccccagacaccgacaccctgaggacgtgtggagctaaggtcatatcatctgaccaggtctggaggctggcgggaggctccctgaaagtgggtgcgaaggagtccggctggcatgaaaatctgactttgcccagctcttttccttgatgcagtttcccggtgtggaaggaacctaaccagttctcggtgataactgaagctggaacgtgtgaattattaggaattctttgaagaactctgcattgagaattatttttatttagttttttttttttttaattgagagtatatagtccagtccaggtaccggaataaaaatatggagacaaggggaaaata
